United States Patent Application Publication US 2015/0376612 A1 - sequence listing, part 2

SEQ ID NO: 2521 - DNA, 1047 bp, Homo sapiens
aatgggattagaggtgtgatccactgtgcccagcctgaactcttcttttttatcaggagcctactccagcagtaataatgcattcccagaataatggcattaatccattcatgagggcagagccctaatgacctaatcactcttaatagtcctaccttttaatatcttcacaatggtaattaaattacaacatgaattttagagggaacattcaaaccatattaaggcccaacccctctggagagggcaatctgttttactcagtttacctactcaaatattaatctcatccagaaatacctcacagaaacacccaaaataatgtttaaataaaaatctgggcacctgctggcccactcaagttgacacacaaaattaatcaccagaaatgttttgttagatttatgtctatttcattttattatgagtaattataaatgggattgagtatttaatttacatgttcatgcattcattgctagtatatagaaacacaattgattttcatatattgatcttatatgctataaccttgttgaactcacttaatagttctaggagttttttaatatattttttgggatattctacatagaatattggttatctgtaaatagggacaatttatttcttcctttctgatctatatggctttatttcctcttcttgccttatataatggatggaatttccagcattatgtcgaataagtggtgaagaatagacattgttgactttttccctatcttaaaggaaaggattgagtctttcactattaaaatgttagctgtagacttttgtcaatgctctttgtcaagttgaggcagtttctctctattcctatttttctgagagtttttatcctaaaagtgtgctgaattttgtcacatgcttttttctgtataaatttatttgatcacgtgatttttttcttcttttgcctgttaataatggtaaagtacattgatagatttttgaatacaaaaccagctttgcatccctggaataaatccctattggtcatgatgcataattctttttacatat

SEQ ID NO: 2522 - DNA, 1051 bp, Homo sapiens
cacattttctttatccagtctatcattgatggacatttgggttgattccatgtctttgctgttgtgaataatgctgcaatgaacatacgcgaaaaaggtcaacatcactgatctttagagaaatgcaaatcaaaactacagtgagatggtttgacatggttgcagtttaattcttctgcatatggatgtccagtttccccaacactatttattgaagagactatcctttatccattgtgtattcttgacaactttgtcaaaaatcagtttgtacacgcataggttcatttatgggttcccctttctgttttattggtatatatgtctgatttttttttctggccaatatcgtgctgttttaattgctatagatttaagattagtttaaaattaggtagtttgatgcctcctgctttgttctttttgcccataattgccttgactattcaaggttttgtggtttcatacgaattttaagattttaaaaaatttccataaaaataacattagtattttgatggcaattgcattgaatctgtaaacattttaacaacattagttcttccaatccatgaacataggatattttatcatgtatttgtgtcttcttccatttcttttattaacattttatagttttcagtgtataggtctttcacctcattgattaaatttattcctaagtattttattattttttgtgtggctatttaaatgcagttgttcccttgagtgtttttagatggtttattattagagtatagaagcactactgatttttatgtgtgattttgtgttctgcaactttaccatatttgtttattctaacattttcttcgtggaatctttaggtttttccttaagaacatgttgtcaggaaacagcaacaactttagttttttctttcttattaggatgtcttttatttcttttccttaactgctcagacaaggacttctactactatgttgaatagaagtggtgagagtggacatccttgttttgggtctcagaaagtacttcaattttttactatgcttaccaacaagca

SEQ ID NO: 2523 - DNA, 1390 bp, Homo sapiens
agttcataaaatttttggtagtgttctgctgtgaagcaaccaggtcctgcactttttttgatgggagatttagttactgattcagttgtctttcttatttttggtctgttcagattttctgtttcttcatgattaagtctgggtaggtgatatgtgtctaggatttatttatttattctaggtaatccaatttgttggtgcataattgttcataacagcctcttaggatcctttgtatttctgtggtatcagttgtaatgttttctctctcatttttgattttgagttttctctccttttttcttagtctagctaaagatttgtcaattttatctttaaaaaaaacctaactcttagttttgttgatcttttaaattattttttctagactctattttatttgttgctgctctggtctttattatttctttccttctgctaattttggcttagtttgttttctgtgtagtttctgaaggcgtaacattaagttgtttatttgagatctttatacttttttgatgtaagcatttattgctataaacttccttctttgaactccttttactgcatcccataagttttggtctgttgcatttctatttttgtttgtctcaagatatttttaaatttcatttttaatttcttcattggctttttcgttgtgcaagaacatgttgttttgtgtctatgtatttgtgaattaccaaaaattcctccttttattgatttctattttcataccacagtagttagaaaaaataattgatactgtttcagtcctcctaaaattgctgagacttgttttgtggcctaacatgtgatctctcctggagggtgttttgtgtgcacttgagaacaatgtatattctgttgctgttagatgcaatattctgtatttacctattaagtccatttggtctaaagtgttaagttcaattttttttatgaattttctgtctgaatgatctgtccattgttgaaaattggttattgatatcccctactattattgtattgtaacctatctctccctttaaattctttaatatttgcttgatatatttaaggtctcaaatgttgggtgtgtatatagttatgacatatcatcttgatgagttgacccctttatcattatttaatgtcatttttcatctatttttatagtttttgacttaaagtctattttatctgatataactataaccacccctgttctttttctttccatttgtgtggaatgtcttttccatcccttcactttcaatctatgtgtgtccttaaaagtgcagtaaatgagtgtcttgcaggcagcctatagttcagtctttgttttttaaatctatttagtcactttttattgaagaatttaatccatttatattcaagg

SEQ ID NO: 2524 - DNA, 1073 bp, Homo sapiens
tagcatttatttgtctgggaaagtttttatttctgcctcatttctgaatgacagctttgctggggaaaatatttttggcttgcaggggttgtttttttttcccccttagcatttttaatatatcatcccattcttccctggcctacagagtttctgctgacaaatctgctgattgttatactgggatttttttttgtatatgatctgtttcttatctcttgctgctctcagaaatttttctttgtctttgattttggtagtttaattattatgtgtgttgttgaactctgggttaaatttaattggagatctctgcacttcctggatattggtatttttccctagattagggaagtttttagccgttatttctttaaatgtgctttctgacctgtcttctcatttttctactttgtaacttctattttgagactcttggatctcttgacagtgttctataattcatgtaggctttttttattcttttttattcttttccctttgcttttctgactggataatttcacatgttctgtctttgaccttattcattctttcttcagtttgactgagcctgctgttgaaactctctattgcattatttagttcagtcattgtatctttatttttaggatttgtattttgcttcttttattatttcttagtcagacttctaattttgtttgtatatagttttctaagttaattttttatacatatctttttgtagtttactgagcttctttaagaggatattgctgaattatttgtctgctatttaataggtttccacttctttagggccaagtgatggggctttgttagtttctttgggaggtgtcatgatttcctgagtctttgtaatcccatgttcttgtgttgatatctgtgcctgtaaggagacagacacctctttcagcttttataggttttttttttcttttttgagacagagtcttgctctgtggcccaggcatgattgtggttcactacagtctcaacctcctgggctcaagcaatcctcctcaccttcctgagtagctgagaccacaggtgcatgccaccacatccac

SEQ ID NO: 2525 - DNA, 1391 bp, Homo sapiens
tgcagggccttggggtgggctttgagcctgaactgagtgctgtttaacctgctgggtgtagaagaactagctcctgtgctttgttatattgcgctgtggtgggtatttctctctctgtggggtgtgggggcagggtctgaggctggactggaggctgagccatctagggatataagccaggtagaatgtcccaccacttctgggagtgaccagctaggatttgtgagggagctatgctgttagctggtacctcagattgtgtactactgctggcaggtacacagagctgccaccaagatctgtaggctggttgccatgggctctgtctccttgctttatctctacctgaccctaggtggtctagccatgctgttaccctctgtgttccttatgaagtgagactggagtggacttcttgggaagcatatcagaatgccagggaaactggatgtctgttttctattctattttcccactgtagaaactgtgggccctgggaaattttttctttgttgaactgagccatcttggggaaaggaggagcagtgggatcaaagtgagataatttctcttatccttcaaaggcaggtttttttttgtttgtttgtttgtttgtttgtttgtttgttttggttctgtgttctgtggtccatgcagctttctcaggcctttccaagttttgggaacacaagggtattcttgtctgtgaatagttgctagttgaactttctttgggaggtaataaaggcctgagaccctgtattttgcccttttactgatatcagtctgtgttaattcttctttaaacatttggtagaaatgtccagtgaaataatctgggcctggagattgcttctttggaagtttttaaattatgaattcaattttctttttttttcagattatcgattttttaaattattattattatactttaagttttagggtactatgcagccatgaaaaatgatgagttcatgtcctttgtagggacatggatgaaattggaaatcatcattctcagtaaactatcgcaaggacaaaaaaccaaacaccacatgttctcactcataggtgggaattgaacaatgagaacacatggacagaggaatgaattcaattttcttgataggtatagggctactgagattatctgtttcacattgggtgagttgttgtagtttgtgttttttgaggaattggtacgtttcatctaagttgtcagatttatgtatagaattattcataatattcccttatgatacctttgatgtctacagaatcaatcttgatatcccctatttcattcctgttcctgatactttgtgtcttttcactttttttcagtcttatttgaagttaggtttattgatgtttttaaagaatcagct

SEQ ID NO: 2526 - DNA, 1130 bp, Homo sapiens
tctgtcttttaattgccatatttagactatttaaatttaatctgattatttatatgggctttaagttgtaagccattttttttattctgttcgttctctctgctgtttgtttctatgttttatttttcctgccttgaacatttttaagaattccattttgatttatctatagtatttttcaatatgtctctttgtgtagcttttttagtggttgctatagtataagattatatatatattacagtctactgatgttataattttatcagtttgaatgatatgtagaaactttcatgtttctttaccttcctgtttgtaatatattgtcttaaatagtttttatgcatacatttgaaactttatcaaacattgttataatttttgcttctgtcatcaaatagaatttagaaaattcatgagaggaatattctgtttgattatatttttgtttatcatgttctttcttcctttttaatgttgcagtgttccttcttttattgtttggttgtttgatttctgtttaaagaactttctgtagccatatttttagtgtgggtctgttagtatacaggttctacttttcatttgtcttagaacgtcttaatttcctcttcattcatgaacatttttgctagatataggattctgggttgacagttcctttctttcagcacttgaaaaacattgtgtgactttcttctaaccatggtcatttgaattgtttttctcctatggataaagtgtttttcctcttgctgatttcaaggttttttctttgtgtttagttttcagaagtttgactttgacatgtttttggtgtggattattttgtctttattctgttttgagttcccttagcttcttgaatctctaggtttgtgtttcttttgacaaatttggaatgtttcagccattatttcttcaagtatttttttttttagccctgtcttctttaacctctccttctgggacttcagacacaaatgctagatcaattttataatcccacaggtgaatgaaggtttgttctttttttttttttttcttttttctgaggtgggatctcactctgttgcccaggctggatggagtgcagtggcatgatctcagctcactgcagcctctacctc

SEQ ID NO: 2527 - DNA, 1061 bp, Homo sapiens
tatttagatttagtgaatttaatacattgaggacatataattcattttacataatacttcctcatatttcaaaattattagaactcagtggcataacagaatgtcattacttgtttccccctcctattttgttcttattcaacacacctagtccccaaaaccttgcctacaacattatcatccaaacacaacccctaatgcttactaatcattatcgtttaaaatggggtagatgtaaaacatttcaactataaggatattaactaaaccacactacttacctctaaattaattttattcattttgaatgagagatatatctgtagaaattttttaactttcaggtcatttttgtaccaccatctttttttggctgatgacttgtttcaaacctgtttggtttatataagaggactttgtgaagatgcaattaatctcaaaaattataatgaccatgaaaataatctatctgccatatgccttgtaaaggtgagtagaagtatactactataagctaatattggtatatagaaactaggaagaaaaatagcattttgaattaaaaaatacagatttctaaattcataaataaaccatctctttcgattactaccgttctaaaatatctgcaaagaatgtgagttccttgcaataaattttaatagttaacatttcttgtaatttcttccttatgcctaacctaagtctataagaccctttattttcaaatgtatttccgaatgtgtaatatgatttaaaataatcagttatctcttatacataattgatattcttcctctagtatagcatgtcaagatagtatcataagcttcaactcagaagttttggttaaatttatgaattctcctatttcaagattctagaaaaagtgagcctgttaatggaataacttaatttatataagatagctcttttgagtggttaagtacctagaactaattaagtctacaattgaacaagattctagcagattttacttcactcactcaatgtatggggaaaaaagtaaaattgatagagttatctagactaagaaagag

SEQ ID NO: 2528 - DNA, 1029 bp, Homo sapiens
attgttaaggggcttagacaagttaaatatttgaaaattagctcgaaaatcagttgtgttgactgcatgtaacaagatcaatacttgtaaatcaacatcgtatgtttagaattgattatgtgtaatgacagatacatagtaggtgctcaccaatagtctttgagtgaataaaagaataaactaatgaaggaggaggaattatcacatagatgtatattttttatacttatatagagaatgtttatgtttcaaaaggattaaattcaccttaagtaggagacatttcacagaggaatctctttgatttggtttttatgtagaaggaaataggatatggttttcttgtagaaggaaataaaataatctgtaatatcagattattttgtaaatggctgagtgacaaaatttattaatttttaatgatgggtgggaaggcataaaagactttaaaatacctttgaagtctgtgccttaaatgccaccaaatgatagagaacattactagtgatagagaagaaatgttaggactctttcctagagacctcaggccatgtcagctttaatatagaacatcaggaggaagagaacaaacttttccagacagtatgtaagtatttattatctattatatgcgaaatgctgtgcaaaagagatgaatacaaagtgaaaaacaaagctttgctattttcaatctgcttacagttcatgggaagaaataattctttatatataaaaatgaaaactaattctagagatagtttctttgttatgctaatcattctacctaacccattagcaaagtataaggtaaggaatgtttactggcaaataatacttgtaaaacagtcatgttacagaaatccagaggaggcagagattagccttatttggaattaaagttaggtcatgcctcatattttgagctaggctgtgctggatttgaatagccatagaagaggagataaggcttttaaataaagaatataaatgtgagtaaggcattcaatatatatttgatttgaaagttag

SEQ ID NO: 2529 - DNA, 1028 bp, Homo sapiens
gtaaagaacatatgttctttgttcaaatcttcactttcaagtggatggaatattatgtttttgtattaccagagattaattcttagcttagttgatggagatttctcccagctagattctgaatgaattttgaataaaattcacctatttgaacaaaacttagttctagagagattgccacttatccaagttgacagaatcatctagagttgagactttggatcatgtttcatattcgggtgaagtttgttttattgagcagtatttgggtgcttaataaaaatgtaaatatttgtgtcccactccttttgcaagagagggcagtgagtggtgctggtaatctacattttaaatcggttcctcagttaactgttaggcaggataaattttgagaactacttttaaagaacaactattcaaagtttttgaacatggtattttaggaaaattattgtgatattggtttttgggaaaaattggtagtggagagatacttgagtgatagagatcaattattatagtactggataaatgcaggtataagcaataaagactttaattaggatgtcatcagtaagaccagaaaggcagggaaattttgaaaaatttggacctggtagtcagatatgggaccaggagaatggaaacttaaagagtaaatccaaaattttaagcaagagcagtacttttcaatcttttttgttgtgggaagatacatttattaatttttataatataactatatgataaaagataaacatatctgtatatttattaatgaaaatgtattttgttaagagaattaacacagtagtggaaaaacaatactgaaagaaggaagaatgatgtaatatacacgcatgtatggaacattatgattttgtattaccagagattaattcatagcatagtagatagagatttcttccttatagattctgaatgaattctgaataaaattaaccttatttgaattatttaattttaccctctttatgctgtgttgtgggaagttggggaccccaaac

SEQ ID NO: 2530 - DNA, 1048 bp, Homo sapiens
ccattgtcccttggtgtccatgttcaattgagttcagatttaactttttaagtttaatttaacttttcctcctcagaattccctcagtttttgcttatctgtaaaagattctatttattcttcatttcagaagaatttctctgctgggaataatattcttggctgatagtttatttctttcaatattttgtatatatcattccaatgtctcctggcctgtaaagtttctgctgagaaatctgcttatctaatggaaattcccttatatgtgacttgacattcttgatacttttaaaattctttctttctctttgactttgtcaatttgactataatgtgccccagagaggacatgtttgagtttaatctctttgggtttgtttagcttattagacctggatgttcatttctcttccaagacatgggaaatttttagctattatttcattaaacatatttttcttgtttttctcttctctttctgcaacaaccataatctgaatatttgtcacttaatggtgttccataaatcctgtgagttttcttcactgttttttttctttttcttttctttttttttgtctgcctgtgttatttcaaatgcccggtcttcaggttcagaaattttcttctgcttggtctagtctgttgctgaaggtctcagttgcatttttaaatttccttcattaaatttttcagttctaggatttctatttggttcttttctatgatatatatctttatttaatttttcattcagtttatgaattgttttcctggtctcattgaattgtctatctgtattctcatatatttcactgaatttccctaagattaatattttgaattatttttctggcatcttatacatttctttatgactggggcctgttactacagtattattgttttcatttggaggtgacatagtttcttgtttttcaagatgacattcagtatgttggaggatgatccctttatgtaggaacacacagatatttattagtatatacttccttgtttgatttccaaaacttaagttatctgc

SEQ ID NO: 2531 - DNA, 1763 bp, Homo sapiens
aacatccttaaaggaaagaaattccaaccaaaaatgtcatatcccaccaaactaagcttcataagcaaaggagaaatgaaatccttgtcagagaagcaaatggtaaggaaatttgttgccactagacctaccttacaagaggtcctaaagggagtgctaaacatggaaatgaaagaacattccctgccaccacaaaaacacgcttgagtacataaacacacttaagtacataggccattgacattttaacacaactgtaaaattaggtctacataacaacaagctaataacacagtgacaagatcaaatcctcacatgttaatattgaccttgaatgtaaatgggctaaatgccccactttaaaggccaactgtgacaaactggataaagaagcaagacccaactgtctgctgtctctaagagacccatctcacaagtaacaacacccatagactcaaagtaaagggttagagaaagacctgtctggcaaatggaaaacaaaaaaaaaagagcagaggttgctattcttatatcagctaaaacagaccttaaacaaacaatgatcaaaaaggacaaagaaggccattacataacaatatagagttcagtactaaaagacttaaatattctaaatatatgcacacccaatattggagcatctagattcattaaacaagtactgagagtcctacaaagagttttagacaaccacgcaataatagtggtggacttcaacaccccaatgacagcattagacacattgttgaggcagaaaactacaaaactattcaggacttaaacttgatacttgaccagttggatctaacagacacctacagaacactatgcctaacaacagagtatacattcttctcgtcagcacatggcacatactctaagattgaccacatatttgtccataaagtaagtctcaactaaatcacaaaaatcaaaaccataacaaccacactgttggaccacagctcaagcacaaccagcttctgagtgacttttggttaaagaataaaattaaggcagaaatttaaaaaaattatttgaaactaataacagacacaacataccagaatcttcaggacacaactaaagaaggatgaagaggaaagtttatagtgctgtacacctacctcaagaagttagaaagatctcaaattaagactctaattattgcacctagaggaaccagaaaaacaagagaaaacaaatcccaaagccagcagaaaaaaagaaattacaaaaattagagcagaactgaacaaaactgaggcatgaaaatccatacaaaagatcagcaaaaccaaaagttgattcttcagaagattaaacaagtttgatagcctggtgcctagatttataaggaaaaaaataaagaagacccaaatacacccaatcagaaatgacaaaggtggcatcataactgaccccagagaaatacaaaaaaaaatctcagccaggcaaggtggctcatgcttgtaatcccaacactttgggaggccaaggaaggcagatcacctgaggtcaggagtttgagaccagcctggccaacatggtgaaacctcatctctattagaaatacaaaaattagccaggtgtggtggcatgtgtctgtagtttcagctactcaggaggctgaggcaggagaatcacttgaatctgggaggcggaggttgcagtgagccaagattgcaccactggaatccagcctgggtgacagagcaaggctctgtctcaaaaaaaaaaaaaaa

SEQ ID NO: 2532 - DNA, 1469 bp, Homo sapiens
cattcccactgataactggaacaagagaaggatgccaactcttaccactcctgttaaacacagtactggaaattctagccagatcaattatgcaagagagagaagcataaggcatccagataggaagaggtcaaactatctgtttgtagatgatatgattctctatctaggaaaccttatagtttctgtccaaaagctcctacatctgataaaataacttaggaaagtttcagcatataaaatcaatgtacaaaaatcagtagcatttctgtacaccaaaaacatccaaactgagagccaaatcaatgccattcacaatagccacaataagaataaaatatctaggaatacagttaaccaaggtggtgatagatatgtacaatgagaattacaaagcactgctgaaagaaattagagatgacacaaacaaatggaaaaacattccatgctgatgaataggaaaaatcaatattgttaaaatggccatactgcccaaagcagtttacagacttgatgctattcctgtcaaattaccaacatcatttttcacaattcaaaaaaaaaactattctaaaatttgtgttgaaccaaagaacctgaattgccaaagcaatccaaagcaaaaagagcaaagctggaggcatcacattacccgacttcaaactatacaagactacagtaaccaaacagcatggtaagggtacaaaaacagatacatagaccaatggaacaaagtagagaactcagaaataaagccacacagtctacaatgacaacaatggagaaagaactcccttttcaataaatgcttctgggataactggctagccatattcagaagattgaaactggatcccttcctgtcactatatacaaaaattaactcaagatggattaaagacttaaatgtaagacctaaaacagtacaaaccctagaagaaaacctaggaaataccattctggacatcaaccttgacaaagaatttatgacctagtccccaaatgcaattgcagcaaaaacaaaattgataagtgggacctaatgaaactaaagggcttctgcatggcaagcaaaattatcaacagagtaaacagacaacttacagaatgagagaaaatattcacaatctgtgcatctgacaaagttctaacatccagagtctataaggctctttaacaccccaacaaacaaaaaaccaaataactccactaaaaaatgggcaaaggatatgaacaaatacttctcaaaagaagacatacatgtagccaacaaatatattaaaaatatgaccaccaatcattagagaaatccaaatcaaaaccaaaatgagttaacatcttacaccaatcagaatggctgttattaaaaagtcaaaaaacaatagatgctggtgaggatgtggcaaaaaggaaacaccctgctggtagcaatgtaaattagttcagccactttggaaagcagtgtggag

SEQ ID NO: 2533 - DNA, 1026 bp, Homo sapiens
ttgggcaatttcttataaagataaacataaacttaccctataatgtagcaagcctcctcctagccatttaccgcaaaaagcagaaaacatttttctatggagaaaaaccatatgtaaatatttataatggctttattcataattgttcaaatctggaaataatttaaatatctataagtggatagccatgaaatgcagtacttctcagcaataaaaatgagtgaaatattatacttacttatgcaacacgaataaatctcaaatgttaagtgaaggaagccagactcaaaacactatatattatatgattccatttatatgacattttggcaaaccaaaactggaagggcagaaatcaagtcagtgattgccatgggctaggtgggggtgagaggaaccttctataaaggggcctgatacaatgttttagatgacagaaatgtactacatttagtcattgtgattgtagtggttgttaactgtgtgtgattgtcaaaattcattagaactgcatacctgagaagcatgaattttactggatataaattatacctcaataaacctgacattaaaaataaagtattatttatttagcacatgtaacttgtcagatactttgttagatcctggacatacaatgctgagcaaaatagacagtttttgctctaatgtagtttacagtctagaggaagggagagatattaatctactgaccacacaaatatatttaacattacaataaatgctacaaagaagaagtttggggtattgtgagactgaatctggtctgggagaagtttcgttgataggagttaatgaggaaatcaagaagaaagggtggtcaagtcatccctaaaaagtgtatcatataccctacagaacaagaagcatatttgaaaaagtgagaagaagacagtgtgacaacagtaaagtgataagaaaatagcataagacataatgtgattggtcaaacctataaataataaatgtcttttctaccatcctaaaagtttctgaaaaattttg

SEQ ID NO: 2534 - DNA, 1042 bp, Homo sapiens
gcagaaatcacaagggaaattagaataaaatacagttttataaatgaatgaaaatgaaaacacaacataacaaaacttactataggcagcaaaggcagtgcttagagggaatttatacatgtaaaaactacatgatatctgtgttctacaaatattttatcccagtccataaattgtcttaattttcttaagtggcttttgataaacaagagtttttaatttttatgaagttcaatttatctgttttttcttttaaaggtttgggcttttggtttccgatctaaagcattgtttcctaatgcaacagcatgatgaatttttccaatattttcttttagaagttttatacttctggatattatatctgttatcctttttgagttaatttttgcaaatggtgtcaggtgtggtttgaggtatatattgttatatgttggtatttaatcactccagtagtttgttgaaaagactaatcttcctccagacaattaccctaacatctggtagaaaattgattaattaaatatattcatgagtctatttctgaatgcttttttctagtccagtgatctgtgaatctgtccttccaccaatatctcacagtctgcataactataattttataataagtcttgaaatcaggtagtatgtattcttcagctttgttcttctttttcaaaattgttttaactattttaattcatttactttttcatatatatcttataattaactagcagatttattcaaaaggcctactgagattttgattgagattgcattgaatatatagatcaatctggggagaattgacatcttaacaatattcagtcttttaaagccctgaacatggtagactttttcctttgtttagatcttctttgatttatctcttcagtgttttgtagaactcagtgtgcaaatattgcacatttttgttttaaactacctatttcatattttgatggtattaaaaatggtaccatattttaaatacagtttctaattattcattgctggtaaaagaaatgcggttgatttt

SEQ ID NO: 2535 - DNA, 1972 bp, Homo sapiens
tttaaagtatgttttctagatttgtagttcttaaacccaggtgcacaatagagtcacctgttgagcttgtagatgattaagagtcctgggccctgcctctgactttttaactcaatatctctggggataggacctaagaatttgtattttaaataggcactcagtgactaggactaatgatatactgactctggcatcaatttacagtctttggggggaactccttcattacaatgtcatttgtttcacatgcaatttacttattttaacatgcaagtgtcaggtatttggtaatacagtgttactcggttatactggagttatgatttctcatttaaaattttggtctgtattctaaattaaatgttctgtaagttatatgttgtcactggcaccctcacattatccgttaaattagattttgaatagtgttgaagtggggaaggatttgagaaaaacatatgcaccaatatttgaagtaaatctatgcttgagaattcctgctgagagtgattcttcagaaaattctaaagagaactttcatgagtctgaccagtgccctgaagagtgtgtgatgtttgaagatgaaatgtcagaaaataaagacaattgtgtcaaaaaacactcaagtgaagaattgctcccaaaagccaagaaatcaaaagaaattagttacaatcttgaagatattatttcaggtaagacaattgagactataaagaatgaggggttgccaggtgtggtggctcatgcctgcaatcctggcactctgggaggctgaggtgggaggatcacttgatgccagaagtttgagaccagcctgggcaacacagtgagaccttgtctcttgtctcttggggaaaaaaaaaaaaaaaaaaaaagaatggagggaaatatcttaacaactggaaaataacaaatgagagatcattttaatagtctgttgtgtcttctaatttatagattatgattttataaatcttaaggtaaatactgctaaaagtaaggataaacttacagatcattgttgtgcatgtcagtaatgacaccattattcattttcatctcaaaacccaaacagtttctcactgaagcagagccgagggccccgttcatcaagaggaacaacatctaggatgtttgtcctcagatctctttaatcagaaccttggaatggggtgtactgcttcagtattgtgtttcaagtgacttcttgagtttattcttaggatatgtgtaaagcactggcatatattaatttgtcatttacctgatataaatatcaatcaattttgtattttctctttctttcaatggattctaatagacacagaaattgagactgagtttgagaataaatacatgtattatgagtaagtattagacattttaaaaattacgagtaattgtattttatatggtagttattatattcctctgaaatatgcttttattgttttctctgttagatttccagaatttcctacaaatctctttatagatcccaacagattggagttttcagtaaaaattcaaaatatgttgactaatatggaaaaatgtataagtaagtgtttttaaagcttagtgaaatgcattgtcttctttggcaatatttttttaaatttaagcatctgatgcctttacccagggatgtggcagatgttacagaatattagtatatcataaatgcacagtccttgggatcaaacactgaatttggaattatttgaggatgtgtgaattttacacatggccttagagtgcataaaagatgagaattaggaaaatattcaaggtttggattttttcagttacattctatagaatgttatgacacttaatacaaatgagcaagatcttttatgtcatagtataacaaagatattgtttctaccttaaagagactttaattattttgcagctgtatgtacacaatctgaaattgcaggcaattactagcctgaccaaa

SEQ ID NO: 2536 - DNA, 1030 bp, Homo sapiens
tatgaagatgaaatgtgcataagaacatgggtttgttttaaaaccaagaattatcacaaagttgttataattttttacccagtccattttgaatcagtttggtaagggtttcttgctgagtaaaatccagagatattagtatcttgcaacattatacacttacagacattctaaacaactgtgctctcttgttgggatgacccctcccatactcattttattcagtgcccatagatttgttctactgccttctagcttttaataatgtaaataagaagtctgatgctactctgattctccttcctttgtatacttgtgatttctgtctagtaatttatcatttggagttacgaacttttctataataaagccatatatataattctatgttgatctttcttaaaatccagtgaggctcttcagtctgaagaactaagttcttaccaatctttccatatgttcctttttttccctttggattttttgtttttcatcttagatttcctgggtctaaacatctgattatttctatttcttttttctttattatgaaatgtttctactgttttttttttaagtttctataatgagataatttgagacttctataagttggaagcgtagtacagagtttctgtatactctttatatgctttaatctagttatgaaaatgaagaaattaatattagtataatagtattaatgaaatgatagattttatttggattttcccagttgtttccctaatgttcattttctgtgccaggatctaatcccggatcacacattgcatatattaatagttgttatgtctgctaagtcttttccagtgtgtaccagttgctcagtctttccttgtcttttatgaccttgagatactggtaatttactctacagattgtccatcagttttggattgtctgatgttgtctcatgatgagtttgaggatatacatcttgagggagaataccatactgggtgtgtgcccttttcagtacatcagcctagtagtacatgacattgatata

SEQ ID NO: 2537 - DNA, 1054 bp, Homo sapiens
atttcatttttatatttaaatatttgttcactctgagatttatctggcgtatgttgtgaagtaggacttcacttttaatttttctcagatgactaatgatctgtctgtcctagcatcatgaattgaataatccattccttatccccactgatttgaaatgccacatttatcattttttattttccagaatgttttccattgtatttctgggctatgcagatgatatgtctgtaacttatgtaccagtattatactgtgttagttattaggtagctttgtactatttttagcatctgttagccgtctcctttttctctcttttttccttggaaatttcctgggttcattgatatttattttggtctttagactataatacagtattactgttatttattttgttgctcaagttgttctggcttaattttggaagagtaattctccccagttggctcctgtgcccttcaatatacctccatccttgtcttgtgactacttccttagtttccgtcacctcaagatacttcaggctcatcttgtattttctctgccccagccctgaaattaactgtttctccaaggaaccctggattagagaaggaaatttaggaactaagatctatgcactagatgtgctcattgctacaggagtgtcactacttcctggcctaccagagaaaatatctagaaaatatatgtatgtatgctagctcatgcatacacacacaactatatttattcctagatctttttgtttgtccattttaaactgaattcatactgatacctcagaccccaatccaatacctcagggttcattctagccttttcttttccttatatctaacttttttctctggctatgagaaatctggctgacataatcaacaacatagttacttgtttgttatacagtcatgcactgcataaagatggttcaatcaatgacagaccacatggtagtcccataagattataataccatacttttgctgtatcttttctatgtttcaatatataatccttaccactattttacaattgcctacaatat

SEQ ID NO: 2538 - DNA, 1046 bp, Homo sapiens
agtgtctgttcatatccttcgcccactttttgatggggttgttttttgcttgtaaatttgtttgagttcattgtagattcttgatattagccctttgtcagatgagtagattgcaaaaattttctcccattctgtaggttgcctgttcactctgatggtagtttcttttgctgtgcaaaagctctttagtttaattagatcccatttgtcaattttggcttctgttgccatcgcttttggtgttttagatatgaagtccttgcccatgcctatgtcctgaatggtattgcctaggttttcttctagggttcttatggttttaggtctaacatttaagtctttaatccatcttgaattaatttttgtataaggtgtaaggaagggatccagtttcagctttctacatatggctagccagttttcccagcaccatttattaaatagggaatactttccccatttcttgtttttgtcaggtttgtcaaagatcagatggttgtagatatgtggaattatttctgagggctctgttctgttccgttggtctatatctctgttttggtaccagtaccatgctgtttcggttactgtagccttgtagtatagtttgaagtcaggtagcgtgatgtgtccagctttgttcttttgacttaggattgacttgtcaatgcgggcccttttttggttccataggaactttaaagtagtttttttccaattctgtgaagaaagtctttggtagcttgatggggatggcattgaatctataaattaccttgggcagtatgcccatttgcacgatattgattcttcctacccatgagcatggaatgttcttccatttgtttgtatcctcttttatttcattgagcagtggtttgtagttctccttgaagaggtccttcacatcccttgtaagttggattcctaggtattttattctccttgcagcaattgtgaatggaagttcgctcatgatttggctctctgtctgttattggtgtataagaatgcttttgatttttgcacattgattttgtatcctg

SEQ ID NO: 2539 - DNA, 1032 bp, Homo sapiens
tccaggtgccgtgtgtcacccctttctttgactaggaaaaggaattccctgaccccttgcgcttcctgggtgaggccgtgcctcactctgctttggctcatgctcggtgcgcagcacccactgtcctgcacccactgctgacactgcccagtgagatgaacccagtacctcagttggaaatgcagaaatcacccatcttctgcgtcgctcatgctgggagctgtagactggagctgttcctatacggccatcttggatcctagattattgttttttaaagatggggtcttgttatgttgcccaggctgatctctaactcctggcctcaagtgatcctttcagcctcctgaatagctaggattataggcacaagccaccacacctggctgtatattctattttgaaagtccttatatagcacttaaattacatactcccagaaagttcatcttcatccatttagctatatagacaggaatgagaatgtaatgtttagaacattgattatgatgtgagactgcctatgttcaaaatctgtgatctagccatgatggagaaacaaagactggacttaacctccttccataaacaactaaataaaataaaggaaagaaatactggctgggtacattggctcatgcctctgtaatgccagcaatttgggaggccgaggcggatggaatgcttgagctgaagagtttgagactagcctgggcaatgtggtgaaaacccatctctacaaaaaatgcaaaaaaattagtcaggcatggtggtgcacacctgtggtcccagctactcaggagactgaggtgtgaggatggcttgatcccaggaagttgaggctgcagtgagtggattgtgccactgcactccagcatggtcaacagaataagactgtatctcaaaaagagagagagagagagaaagaaagagaaataaataaataaataccttcagacactgattagtgtctgattaacaggtagtacaggattatgattcttgaaatcagggaaacaagtgagagagagg

SEQ ID NO: 2540 - DNA, 1161 bp, Homo sapiens
tggggtcctgtgactcagtaggcagaatgttcatagagtgaaagttcacaaagatgaattggaaccactaattgtaagcagaacaatcttttgaaatcaccaagttctcactgctcagagtggagggtctcaacaattatacaaggcattcagtgtggaccccaaatgagtaaaccttagcaatagagctaactatccctaaaggaaagtccattttataactacccttccaaagattaaagatagacctcaaagagatcaaattgttctgcatttaattacctgaaaaaatgaaagacaacactctttaaatgaaaacagcaaaaatcagatacgtaacatgtaacactgacaatgcttggttgtcaaccagaaattactaaatatgcccagaagcagtaaaatgtgacctacaactaagagaaaaaaaataaatggaaacagaaatgacgagatggggctaacagaaaaagacactaaaacagattatatatttatgtagaagtatttaaatgaaaacatgaacataacagacaaatgaaagatatttaaaaaaagcaaaatagcaaaacttaaagagatgaaaaatacaatatagtcatccttttgtatttgtggaggatttgtttcagggctccaaggataccaaaatccatagatactcaagtcccttatgtaaatcatgtatttgcatataacctacctatgcacatcctcctgtatactttaaatcacctctagattacttataataccaaatacaatgtaaatgctgtgtaactaatttttatatggtaggtttttacttgtattattttttattgttataatttttttgttgttttttaaaaacactttccatttgtggttggttgaatctatggatgcgaaagccacagacatggagggctgactgtatcttaaatgaaaacttcacttgatgagattaattgattagacactgcagaaaaaaatctgaacttgaaataatagaaatagaatcaattgcaaaggaagcacagggatgaaagaagactaagaaatcaaacaaaaacagagactcagttgcctgtgggataataccaagtgatctatcatatgtgtaattatagttctatgggaaatgagaaggtggagagacaaaagttatctgaaaaatga

SEQ ID NO: 2541 - DNA, 1650 bp, Homo sapiens
tccatattgacacaaatgacagaatgaatttcttttttaaagctgaatagtattttattgtgtacatatactacattttatttgtccattcatctgttgatagacacatagtgtccacaattgtccataagtgaatagtgctaaaaggaacatggaagtgcagacatctctgacatacttatttcagatcttttgggtaaatacccagaagtgagattgttggatcatgtggtaattctatttttagttttttgaggaacctccatacagttttccaaaagggcagtatgaaattatattccaaacaacagtgttcaactgtccttctttctccaaatccttgccacatgtactttcatcattttgataataactattctgacaggtgtgaggtgatgactcactgtgattttaacttgaatttccctagtgattagtgatattgagcatttttttcatatatctgttggccatttgtatgtctccttttgagacatatctactttttattggattgtttgttttctttctgtaaaggtatttgagttgcttataaattatccccttatcagatgtatagcttgcaaaatattttctccaaattcataggttgtcccttcagtctgtgaattgtttcctttggtttgcagaagatttttagtttgatgtaatcctattcatctcattttgcttttgttgcttgtgttttcagggtcatatccaagaaatcattttttaggccaacatcatggagctttgcccctgtcttcttctagaagttttacagttttcagtcttcatttttaaatttttaatttatttttattatgtatttttatttcgatagttttgggggtacaagtggttattggttacatggataagttctttagtggtgatttctgaaattttggtgcacctgtcaactgagctgtatacactgtacccaatatgtagtcttttatctcacacccccctcccacccttcccacctgagtcccaaagtttattatattgttcttacgcctttgcatccttatagcttagctcccacttataagtgagaacatatgatatttggttttccattcctgggttacttcacttagaataatggcctccagttccatccaagtttctgcaaaagacattattttgctgctttttatggttgagtattattccatggtgtgtgtataccacatttaatttacccactcattggttgatgggcacttagattgtttccatatttctgcaattgtaaaatgtgctgctataaacgtgtgtacatgtgtctttttttacttttaagttcaggggaacatgtgcagaatgtgcaggtttgttacataggtaaacatgtgtcaaaggagtttgttatatggattatttcatcagccaggtattaatccattagttatttttcctctctccctcatcccactctccaccctccagtaggccccagtgtgtgttgttcccctctatgtgtccatgtgctctcatcatttagctcctgcttataagtgagaacatgtggtatttggttttctattcctgcattaatttgctaaggacaatggcctccagcttcatccatgtccctgcacagaacatgatctcattctttttatggctgcataatat

SEQ ID NO: 2542 - DNA, 1069 bp, Homo sapiens
atagatgctggatattagatctctgttagatgactagtttgcaaaaattttctcccattctctgggctgtttactctgttgatagtctcttttgctgtgcagaagctctttagtttaattagattccatttgtcaatttttgcttttattgcaattgcttttggcatcttcatcatgaaatctttgcccatgcctatgtcctgaatggtattgcctaggtcatcttccagggcttttatagtttggggttttacatttaagtctttaattcatcttgagaaaatttttgtatatggtataaggaaggggttcaatttcaatcttcagcatatggctagccagttatcccagcatcatttattgaatagggattcctttccccattgcttgtctttgtcaggtttgttgaagatctgatagttgtaggtgtgtggtcctatttctgggctttctgttctgttcccttggtctatgtgccttttcttgtaccagtaccttgctgttttggttagtgtagccctgtagtgtagtatgaagatgggtagtgtgatgcctccagctttgttctctttgattggattgtcttggctatttgggttctttttctggtttcacttgaatctttaaatagttttctctagttctgtgaagaatgtcaatggtagtttaatggaaatagcattgaatctaaaattgttttgggcagtatagccattttcacaatactgattcttcctatccatgagcatggaatgtttctccatttgtttgtatcctctctgatttccctgagcagtggtttgtagttctccttgtagagatcttttacctccctagttaactgtattcctaggtattttattccttttgtggcaattgtgaatggtagttcatttatgatttggctatcagcttgattgttgttggtgtataggaatgctagttatttttgcacgttgattttctattctgagactttgctgaaattatcagcttaagaagcttttgggaggccgaggcgggcggatcacgaggtcaggagatcgagaccatcccggctaaaacggtg

SEQ ID NO: 2543 - DNA, 1023 bp, Homo sapiens
gtttgtatttctgtggggtcagtgataatatctcacttgttatttctgattgcatttatttgaatactctcccttttctactttattcgtctagctagcagtgtctcttttattaatttttttcaaaaaacccagctcctggattcattggtcttttgaatggtttttcatgtctctttctccttcagttcactctgattttggttatttcttgtctcctgctaactttgggatttgtttactcttagttctctaggtcttttagttgtgatgttaggttgttaacttgagatctttctagctttttgatgtgggcatttagtgctataaattttcctcttaatactgccttagctatgtctcagagattctggtacattgtatatttgtcctcattaatttcaaaaaacttcttgatttctgccttaatttcattatttacccaaaagtcattcaggagcagcttattccatttcagtgtcattgtatggatttgagtgaatttcttggttttgattgtggatttcattttgctgtgttgtgaaagacagtttgttatgatttcaggtcttttgcatttgctgaggagtgttttactcctgattatgtgatctattttagagtaagtgccatgcggtgatgaaaagaagtatattctattgtttttgtgtggagagttctgtgggtatgtctcaggtccatttgatccagtgctgggctcgggttgtgaatatctttgttaactttctgtctattagacatattgtcagtggggtgttaaagtttcccactattattgtggcaaggtctctagaaactttctttataaatctaggtgctccagtcttgggtgcacatatatttaggatagttaggttttcttgttgaattgaaccctttaacattatgtaatgtccttctttgtcttttttatctttgttggtttaaagtctgttttgtcagaagctaggattgcaacccctgctattttctgttttccatttgcttcgtagattttctttc

SEQ ID NO: 2544 - DNA, 1681 bp, Homo sapiens
tgggattacaggcatgagccaccgcactcagctgttttaggaagttttttttttttttttttttttttttgagacggagtctcgctctgtcgcccaggctggagtgcagtagtgggatctcggctcactgcaagctccgcctcccgggttcacgccattctcctgcctcagcctcccaagtagctgggactacaggcgcccgccactacgcccggctaattttttgtatttttagtagagacggggtttcaccgttttagccgggatggtctcgatctcctgacctcgtgatccgcctgcctcggcctcccaaagtgctgggattacaggcgtgagccaccgcgcccggcctgtcttaggaagtttttaaacctctgtccgctggagaacactggtgggattggctggagaacctggtttggagagtccacccagtgaggaggaacagatacgggacctacttaatgaagcagtctggtcatgcttttgtagagaagctgtgctgtgctgtgcttctgcctctgcccccgattggcttgggctctccaaagccagtaggctggaatggctaaggggcccaaacagcaaagatggtggcccacccttccctttgggagctctctcccagggagttttctaatctctatcacatggagaacaccagcggggtggctggaggccccagtttggaggtcttgccaaatgaggaggaacagataagggacctgcttaagcagtctggccaccctttggtagggtagctgtgctgtgctggggaaccccttccacctccagtcagtttggaatctccaaagccgcaggctatagtggctaagttgcccaaacagcaaacatagtggcctgcccctccttccaagagcttcatctcaggtgcaacactgctacctgtggctggctggaattccaagccactggatgttatcctgtgaggcatcgtgaaagtagcacccccagactatcactgcttggtgccctggattcagcttctttcctaggggtatatatgggggtctaacctcccactttgccagcattgcagttacttttgctggaaagcctggagctggactatctaaagctcctgggtttctgtgcatacctgagtgactactctgccaagactccatgtagctctgtgtgtcagactgaaggccctggtgaagtgggttcacaaggggttctcctgccccaagggttgcaaagatccatgggagaagtgtggtttcctgtggtcacacattcactcaccacttccctgggtgggggaggttcacttggctctgtgtcactcctgggtggaccattgtccttccttgcttttctctgttctccgtgggtcgagttgtttcctttattagtcccaatgcaagtacctggatgtttcaattgaaggtactgtatttactcacccttttcatacctctctgtgagagcaatgcattctagctgcttctagtcagccatcttggccactccctccaaattcttaaaaattatttaaatctctttgttaaatttctaaatttagtcatttattattttctatatgttgttgagttgttcctgtgtaatcttatgaagtttgctaagcttccttaaaataattatttttaacctgggtgtggtggtgtttacctgtagtcccagctactcaggaaat

SEQ ID NO: 2545 - DNA, 1033 bp, Homo sapiens
tattctcttggtttatatgagattggaattatttggttgtttgtgatataaatgtgtatttcaaaattttttgggcatttaattagtatttgtattggagtctaaatagttatgtttactcagtctactgacacgatcattcttggtgcactttccatatgccaggtacattgtaagtctattactgaattattttatttgatctccaaagtacagatgaggacaataagtttatcagaataaagctatttgcttaggttcacacagttagtaaatactgaggctgggatcgaaaataagtttctctgattttaaggcctcttaatataaactctgtggcaaagagacacacacatgccccataataaaatttctgatggattaacaatggtaatctctgggtaatggaataatagttgaccatctgataaacttttccatcttataaacttttttgtattgtgatttttgcatgaacatttattttaatatcaaattagacacacacatatgtgaaattaattcaaggctgtaaagattaaaaattgaactgactttcataccaaaattacataaaattatgcaggcatactccttaagaacccttgaaacatgaaaaaatatgaaaaaattttagttccagcacagaaatgcaattacttcaagcattttatggagtaatttatatacacttttgacaagtatggttataaatataatagatataagtatggtggaaaataatgggacgtggaatcaatttgggtttgaatcacagttgtataacttgctacatttctgatcttggtacaataaaccctctgagactcagtttcctcctgtgcaattagaaaaaatacctaattagcaaatatactatctgaataaagtatgatcatgtacgtaaagaacctatcacatacatgcccaaaaagttgtagcatttattatgcaccgttcacatttcagtcataatttgccatttgtattacatttcttgaaaattgttattcataacttacttattttatgt

SEQ ID NO: 2546 - DNA, 1086 bp, Homo sapiens
acagacagaattttggtgatttgtgaacctgaaagggaagtaaaattacatttctattttcactaatttctaactggaacttagcattttctcaactatgaatgaatgtaggcaacaaacagcagcatggctggtgacttttaccataggcttcaagagactgccaaatgggctcatggcataaaagggactaaaaccccctgaaatctttctgggccaatctttatctttgtctgggccaaatggtaatgatagttccagtttcactcacttatcaggtaaaagcctagattatatactaaaatgctttcactgccagtaaaacagtacgttctagacatactgatttctcttagaaagtcctactcttattttttagataagaactcctcttctgttatgtgctggtactcaagtgtcaacagcaatggaaatgatccagactctctcaggggaagctgcaagtttaactaacaaagctaaagcatattcacattatcaggattgtttcagtgattctcaatctcatatgcattctgttaatgtggaagaaattacacagattgtgctttcagagatctctgacattgaaggtgacttgactttgaggaaaaaactatgggaagcacaagaggagtggaagcgagcctcttgggaatggaggaatagttctcttcaaagtattgatgtagaatcagtacagagaaatgtttcaaaactgatgcacataatctcggtactagaaaaaggtaaaaatgtgtttctcaaattttcccacctaggtctatataccaaatggcctttggacatcaagagcattgtccttggcttgtttctttacccattctcaggttgaccattatggctagagctacaatacaggagtataggtaggaatttcactcaggcaaaaaagagattaagtccttgtcaaaaaagttttgttaagaaattaacaatttttatgtcctttaaaagttggttccctgcatagaaccccagctacctcaccctgagtatggcccttcttagggcactggtcagagatgttttgatgataaaggaccatctgcataatcattcatt

SEQ ID NO: 2547 - DNA, 1018 bp, Homo sapiens
aaacctaactggaattagatcttcaatatttttgatgtgcctttcaaaacttgcatttaaaatttccattttggacatatcaggaattatttgctatactggatactaaagaatactttgttcattttagatgtttcagtatgaaaatgaaataaatgatatgtcaacctcagcaactaatgaagctgctcttgaaaaaatgctatttaagattattgatttttggaacactactcctttgcctttaattcttcaccacacagagatttactctatcttcataattccatctatagatgacatatcagctcagttagaagagtctcaagtcatacttgcaacaattaaaggatctccccacattgggcccattaaggtaagtattatggcaaaggaaaaatgttttctttttctgtagttttatttattatttcaatcttttgcggtctacagtttgcctttgaattgtataaatcattcatatacttatataaaaattacaatgaatatttactagtttgaataccaaaaataactttttgtagaagccttaattgttcatgagaaaatgtcaaagtttaattttggcagaaaagataaatttagatcatagaaaaatatgaccttataaccatggcttatcaccagtgtacagtgttccctgatagtccctcactgagcaaccccacgtgtggtaatacacctaataataataataattattattattattttttgagacagagtcttactccgtcacccaggctggagtgcagtggtgctgtctcggctcactgcaagctccgcctcctgggttcacgccattctcctgcctcagcctcccgagtagctgggactacaggtgcccgccacgacgcccggctaattgtttgtatttttttagtagagacgggatttcactgtgttagccaggatggtctcgatctcctgacctcatgatctgcccacctcagcctcccaaagtactgggattacaggcatgagccaccgtgcccga

SEQ ID NO: 2548 - DNA, 1059 bp, Homo sapiens
cctgtaatcccagctacttggaaggctgaggcaggagaatcgcttgaagccgggaggcagaggttgcagtgagccaagatcgtgtctttgcactccagcctgggcaacaagagcaaaactccgtcaaaaaaaaaaaaaaaaaaaaaaagagagcgagagaaagaaaagaaaagaaaaaagaaaacagatttagaaaggagatatttaaaaaatttttaaaaactagaaatcaatagccctcttaaatatagatgcaaacattctaaaaaaatatttccaaatcaagtccgtcaatatacagagaatgttgtattattaccaagagagattaatttgagaaatgcaaggttggtttaacattcaaaaatcaatctacaatttgccatattaaacataaacaggaaaaacagaagatattctcagtacattttaaaaaattttttacagaattcaacattcattcctgattaaaatatgtctcaacaaattaagaatagaagataacatcctgaataaagaacatctatgaaaaacattttgtccttaatagtgaaagactgaacgcttttcccctaagatcaagaataaggatgttctcccttaccaattctattctacattttactggagtttccagccagtgtactgaagtaagaaagagaaataaaaaatgtccagattgaaaaagaagaagtaaaatatcatttgtattccgatgacatgattacctatgtaaaaaaatcaaacaaaatttacaaactaaataaaacttattttagcaagtttgcaggatacatgattagtatacaaagtcaaattcattatatatactggcattgagaaatagcataaaaataagatatataaacctgagaaaaatgtataagatctgcacacaaaaaacttcaaaaccctgcagagagaaagaagacttaaaaaatggaagatacattgtgttcatccattgaaagacctaataaagatgtcaaatatcaccaaatggatctctagattcaacacaatcctaatcagaatcctagcagactacttgtagaaatt

SEQ ID NO: 2549 - DNA, 1035 bp, Homo sapiens
tagagaatgagataatagtggaagtggtcttgggaaatcttgacatgtatttccctagagtgtagggacattagaaactagcgcttgcctcttctctggagaattctaaagcagcctttaataacagggcaaggaagaagtgcaggaatacatggttatcttagaccagtgattttcaaccagcggtaatttttttacctctgggagtcatttcacaaagtctggaaacatttttacttgtcacaactgaggggatactactggcatctagtgggtataggccaggatattgttaaacattctacaatgcaccagaacttctccctacccccagcccccacaccaaccagaattatgtagtccaaaatgtcaacagtgcagaaactgagaaatcctgacagacatagtaggggtttccaagctagagccatcttgaaagatctccacccaaaaatggcagaacaagggaatcccagaagtatactacttagagcaggagcttaaggaatggttgtaagaggtcagctggcaagagccaatgaatggtgcaatatagaggttcctgttggggtactctgaaatctccagcaatatactttatggatacctgccatgacagagggcatgcaagaggcaaaagaggattcaaagtaacactagctgagtgaagaaaaaaagtccctctaaattcctcccctcttcaacttcagagccaagaggagtttgaatcaggttgaggctagggtgggagaggggtgggaaatataggtgaacagaaaaaaaagaaataatgcaactgtataattatagaaactatttctctcattcaattccaacaacaacagaaacaaaactaaaattaatatattaatggcttatcacatcacatgtgggttttgcttcccttttccaaagggagaaaataatgataatcttctgtaaaggaaaatttatacaccaaggctgacatggcccttacattttcttatcctctaagatgagataaccgttaatagaacttcagtgtttttatac

SEQ ID NO: 2550 - DNA, 1153 bp, Homo sapiens
atgacaaactagaataaaatggtatatgtgtgtctaagggtggggttttcttgtttattttgattttggtttcatttgttttagtttagctttattaaacttttttttagcaatttaagtatcactttcattaagcatggaatgttattttaactgatactactatatataccataactaatattgtggcttttgtttgtaagtataggtcaaaatgaggatgtaattcatatcataattaagcatatattctgaattgcatttcttttgattctggacaggattaccttgaagttaaaagattaattttcccaagattttactttcttagcaatgccgagcttcttgatattctagctgatagcagaaatcctgagtctgtacaggtaataacatctttctctgctcagcaatattatattagcgatattcagatcacaattcaataatattactgacatttgtttctggttcacagcctcatcttgtgaaatgctttgaaaatataaaacaattattgatatggaaacaagacattggccctcctgctgtaaaaatgctaatatctgctgaaggggaaggtctcgtgctgccaaagtatgataaatgttacaaactgtttagattctgtacaacgtcattatttaaaatctctgctttgaaatttttgatatattataaaagtgcgctaagcaaactgtttcttcaaagattatatccttacgtaaatatacttttgcctttccatattccctacaatacataatctcacctttgctctaattaaaagttgagaaagcagtcttcaaactcctgggtgcattctaatttgcacttacattttgttctgtcattaaattctgccttaagtttcctactctctttttagtgctttttccctttttggttttagtatatgaatatagataagaagaaaattggctatttggagttgttgatgctactcccactactgcttctgctgatctctggtttcactgtggtttgctcccaggcaataatgacaaactaggtccttccattacactggttcaatttgccagccccagcaagggctctctaacctttggcaagtggtcctgatgtaagttgatttttaaaaaaatgctgtgcccaacccttcttatctacc

SEQ ID NO: 2551 - DNA, 1070 bp, Homo sapiens
tgtgctaaaaaagtaagtacaattttcaaatcctaaaattatatattttatatatatacttgcacatatatatatacacacacattttttaaaactcacttatctactaatctaagtgagaaatatccagaaaagaatatggagtcaaatctcttatgaaatgggttttaatggaacatgatgacacatgatgactaaatggaaaataatcacttttacagtgtaactgtcagtttgagagtgtttacatgcacaaccttcagatggcttttgtgtacgttgagattcagctgtatcagaaaactgttcaggatctgaactctgctcagtagggctcccgtttgagcacacctcactactttgcattttggttctacttttacttcctaggattgtttacttggcttactctttctaacgttctccttttcatatttaagtctatcattgcatctgtttagaatgaagaaaaaaacctcagagcgtgaactttcaaaactaacttgactagaactgttatattgtatttctaattattcattgttggtaatagaaaggctattgacttttaggtttttatatctatagttgttaatattattctgaaggccaatacaaggtttctagagcagagaagattatgatttacttacataaataaccattctggctctccttttcttcaattcttgtaaccacccagtgggttcaccttgcctgctgcctagacagagccaatttatcaagacaggggaaatgcagtggagaaagagtaattcacacaagccagctgtataggagaccagttttattattactcaactcagtctcctggagaattcagggatcagagtttttaaggataatttggcaggtaggggctccagaagtggggagtactgattggtcaggttggagatggaatcatagcgggggtcaaagtgagcttttcttgctgtcttctgttcctggatgggatcccagaactgattgagccagattaccagactgggtggtgtcagctgatccatcaagtgcagggccagcaaaatatctcaagcactgatctt

SEQ ID NO: 2552 - DNA, 1059 bp, Homo sapiens
tatctcttcctttgcaattctttttaaaatgccattttttcatgttattttagatgcaaattttatttaacatcgaaaagtacaactgacagcatcctttttttgttcttaattttattggaaaagcttctagtgtttgaccataatgcataggtttctggaatatacgccttatccaactaaagatatttcatcctattcatagtttgcagagttttaaagagatttaatttatttttaatttttaattgagaaataataattgtatctattatggcatacattgtgatgttttgatacatgtacacaatgtaaaatgattgattcaagctaattaaaatactcatcacctcacatgcttattttttatggtgaaaacatttcaagtttacttttagctattgcgaaacatacattattattaactatagtgacctgctgtgcagtagatcgctaaaatttattcctagtctaactgaaactttgtatccttagactaacttctcccctttcctcatccctccccactttcaccctctggttaacaccattctactctctacttctgtgaatagagaatgttttttagattctccatataaatgagatcatacaatattcatctttcttggcctggcttatttcacttagcatacataatgtcctccagggttattcatgttgtcataagtgatagaatttacctcttttttgggaggccgaggtgggtggatcccctgagatcaggagtttgagaccagcctggccaacatggtgaaaccctgtctctactaaaaatacaaaatttagccaggcatggtgatgcacacctgtagtcccagctacttgggaggctgaggcaggagaatcccttgaacccgggaggcggaggttgcagtgagctgagattgtgccactgcactccagcctgggtgacagagcgagactccatctcaaattaaataaataaataaataaatagaaataaataataaataaataattaaataatttttttctaaagagaatgtacaagtacattcatcaaatgtaacagat

SEQ ID NO: 2553 - DNA, 1029 bp, Homo sapiens
aggcagacatctcactctgttgcccaagctggagtgcagtggcatgatctcggcttactgcaacctctgcctcccgggttcaagcaattctcatgctggtattacaggtggtgccaccacacctggctaatttttgtatttttagtagaggtggggttttaccatgttggccaggctggtctcaaaatcttgacctcagtgtgatctgcccgcctcagcctcctgaagtgctggaattacaggcatgagccaccacacccagtgagataaaaagcaaagtgggtatactggccacatacctgaagagccctcttgtcttattactctgaattaatgtgcttttattgaaaagctctgtaataacagtatttattagtattactaatgtttagcaataaaagcaaaaattttttctctttaggtaattttaatactcatatgatttatggacatataaaattgtatcataatctaatatttctaatgcaagctaatggatactaacttgtggctttcctctcatggattttgttcaaactgttaaagctagtattacaggactcataaatctgtggatatagttgggggtgggggggtcacagtaacatttcactgactcttctacacctcatcctctgcaaagttttccccatttatgtccagagagttccccaggttttgtcccaattgttttcctgttttcaccaccctctttggtatcagctgtccaagaaatcactgtaggatttctcccattgtctctaccactgatgctgattgtaagacactgatgttcatgccaagcattctatctcatagtggtcccaaagtttttaaactggggctagggacacttgggagacaggctgtgttccatgctgaagcaggatatctgtgctgtgccccattctgtgttctactatatcttccaggcagagctcttttattccctaagtgtctcccaggttccttttactatgtaagtcaactcattcagctaggtatcttccagcctcaggtcccagaaac

SEQ ID NO: 2554 - DNA, 1045 bp, Homo sapiens
cccatctctactaaaaataaaataattagccagctgtgatggcacgcacctgtagtcccacatactcaggaggctgaggcacaagaatcgcttgaacctgggaggcagaggttgcagtgagtccagattgtaccactgcacaccagcctgggcaacagagcaagactctgtctcaaagaaaataaaaacaaaaacaaaacatatgattgtctcagtagatgcagaaaaagcattttataaaatccaacatccctttttgataaaaagtctcaacaaactaggcatcaaaggaacatatcttaaaaaaaagagagagagagagaaagaaagaaagaaagaaaaataaagaaagaaagaagccatactgaataggtggaagctaaaagcattccccttaagaattggaataagacaaggatgcccactcacaccactcttatgcattatagtacgggaagtcctagccagaacaaccaggtaaaagaaagaaataaaagacatccaaataggaaaagaggaagttaaattatgcctctttgctgatggtatgactctgtacctgttattaaaataaaaaataaaaaataaattttaaaaaacatagccaagaggctcctaaatctggtaaacaacttcagcaaagtttcaggacacaaaatcaatgtaaaaaaaaaaaatcagtagcatttctatacaccaataacattcatgctgagagccaaataaagaacacaaactcatttattatagccacaaaaaataaaatagtcaatggatatagagatatattggttaataaacttaaaatcattaatgaatgaataaatctgtaaattttgttttaggtttgtgttggtgtgatgttagtgggcccaacaggtggaggaaagacaacagtcagaagaattttggaaaaagcattaacgctattaccaattgcagacttcttatcagttgcagaaagaaaatctgcttcaaaggtaaatgttctgttaaataaaatgtttctctatttgttcatatcttattttacactttaatattt

SEQ ID NO: 2555 - DNA, 1034 bp, Homo sapiens
ttcttcttttaattggcaaacttaatctattttattttgattactgatgatggacttttgcctttttgcgattttattctatgtcttgtatcttttttgtttctcaattcctccaaaattgccttttgtgtttgatttttttctagtgtaacatttggattccttcttcatttccttttcattttttactcatttttaaaatagttacctgggagattgcagttaacaactgttagggtctgaattgtgtcccccccacccaaaattcatgtgttaaatctccaacccacagtacctcagcttgtatctccccttattcatggggaatacattccatgaccccaagtggatgcctggggccacagatagtactgaaccctatatatactatgttttttcccatacatacatatctatgatgaagtttaatttataaatttgacacagtaaaagatgaacaatgacaactaatgaaatagaacaattataaaaaatatgatgtaataaaaattatgtgaatgtgatctctatctctcaaaatatcttattatatatactgtattcacccttcttcttgtgtatgtcgatctgataactgagttgttactgagtgactgattagcaggtagatttatgtcccaggtgggacagagccagatggtgcaagatttcatgtaactactcaaaatagcatgaaacttaaaacttacaaattgtttatttctagaattttccatttaatatttttggactgcagttgaccacaggtaaatgcaactgcagaacatgaaactatagaaaagggaggattacagtatatttggagatacagcctttaaagaggtgattaagttaaaataaagctattacagcaggccctaatccaatttgacttgtgtacttataagaaaaggaaatttacaaacacaaagtgacattagaggtgtgtgtatgcacagagaaaagaccacatgaagacacagtgagaaggcagttatcagcaagtcaaggattgaggtcttgaagaaatcaaa

SEQ ID NO: 2556 - DNA, 1054 bp, Homo sapiens
acttaatgctattcctatcaactaccagtgacatttttcacagaattagaaaaaactattataaaattcttaggaaacaaaaaagagcctgaatgaagctgaaggcatcatgttacccaatttcaaactatactacaaggctacagtaaccaaaacaacatgatacttatacaaatgcagacacatagacaagtagagcagaatagcccagaaataatactgcacacttacaaccatctgatctttgacaaagttgacaaaaagttgccaaagtttgaaaaaataagcagtggcaaaaggacttcctgttcaatacatgatgttgggatacctggctagatgtatgcagaagattgaaactggaccccttcctttcacgatatacaaaaatcaactcaagatagattaatgatttacatgtaaaacttgaaactatagaagaaacctaggaaaatcattctgtatatgtgcctgggcaaagatttcatgatgaagacaccaaaagcaattgcaatgaaacaaaaattgataattgggacctaattaaagagctgctgcacagaaaaaaaggctatcaacagaataagcagataacctatagaattggagaaaatatttgcaaactgtgtatccgataaaaatctaatatctggaatccataagaaacttaaacaaattggcaagaaaaaaacatccccactaaaaagtgggcaaaggatatgaacagacacttctccaaagaagatatacattgagccaataaccatatgaaaaaatactcatcatcactaattattagaaaaatgcaaatgaaaatcacaatgagataccatctcacaccagtcagaatggctattacaaaaagttaaaaaataacagatgctagcaagggtatggagaaaaggggacacactgcttgtgggaatgtaaattagttcagccactgtggaaagcacagtgatttggtgatttctcaaagaacttagaactaccattcaatccagccatcccattattgggcatatatgcccaaattaacataaatcattctacc

SEQ ID NO: 2557 - DNA, 1028 bp, Homo sapiens
tgaaaggttaacattcatataacagaacctccagaaagatatagtaaaaataaatagaggggaagaaatgtttcaggaaataattgcctaggagttcagagaattagagaaaatatgagacctaagattgaataggatcctggagtatttaaacatgacaaaaagtaaaaacccacacctagaaatgttagatagataaattttcctacacctcttggatgttctgttcttttttgtttgttttctttattctctttgtgtttctgtttggttgatttctattgacttgtcctccaatttactgattccttgctctgctacatgcagtctgctgtaagcccattgaaagaattctcatatttgatattgtggtttttatttccagcatttccattgaccttcttatagttttcatctctcttctggaattccctctctgtccatgaatgatttcttccttcaacattagatcttttacattttaatcatagttttttaaaaaaattcctgactgataatttcaacatctggccatctctgggtctgttcttttgactgctttatctcttggcaacatgacttttcttaatctttcttatttttatgtctcataatttttaattgaataccagatattgtgtataaaagaaattagagactgaggtatacagtagttatacctggaaatgggcatactttttcttctgccacattgttcaggtagtggcacagtgggttgagtcaatattgacctagatttggctgttagtgttactatagttaccttcagtgcaccacagactttaaattttccatgctcctgtacctttcctggcaatagattgctgttgtttgttacttggttcaaggttcatggtgggaacaggggagatttacaggttctcatgttatagcctcattttaaggcagggtctgtgcacctgagcctcaggcatggtgtttctcagcaaagaaacaatttattgtgaatagctacattcaatatcaatttatgaataatacctaag

SEQ ID NO: 2558 - DNA, 1037 bp, Homo sapiens
tttcccatggtcttcgcaacctgcagaccaggagattcccttgggtgcctacaccacaagggccttgggtttcaagcacgaaactgggtggctattacggcagacaccgagctagctgcaggagtttttcttcgtaccccagtggggtacttactggcctgtaatgccagtaagacagaatcattcactgccctggaaaggaggctgaaaccagaaagccacgtggtctagttcagcagatcccaaccccagggagcccagcaagctaagatccaatggcttgaaattcttgctgccagcacagcagtatgaagtttacctgggactctcgagcttggtatggggaagggcatccaccattacagaggcttgaataggcagttttcccctcactgtgtaaacaaaggaactgggaagttcaaactaggcagagcccaacacagcaccgcaaagccactgtatccagactgcctctctagattcctcctctctgggcagggcatttctgaaagaaaggcagcagcccaagtcaggggcttatagataaaactcccatctgcctgggacagagcacctgggggaagggttggctgctgcttcagcagacttaaacattccttctgctgtctcagaagagagcagtggctcttccagcacagtgctcgagctctgctaaaggacagactgcctcaagtgggtccctgacccccgagcctcctgactgggataaacctcccagcaggggccaacaaacacctcatacaggagagccccagctggcatctggtgggtgcccctgtgggatgaagcttacagaggaaggagcaggcagcaatctttgctgttctgcaacctccgctgctgatacccaggcaaacaggatctggagtggacctctagcaaactccaacagacctgcagcaaagagtcctgactattagaaggaaaactaacaaacagaaaggaagagcatcaacatcaacagaaagtaagtccacacagaagcctcatctgaaggtcaccagcatcaaagacca

SEQ ID NO: 2559 - DNA, 1022 bp, Homo sapiens
acccaataccctcattatagtgaaagaagctgaagaaaattacattcctgtttggttttaggtgctacgaaaacctataatgccagtaaggcagaagataaagccataaaactatcaattcagttactctgagctcatctgctgtgtttctggatctgtattatccatatcgccatgtagcaagaagttctgtaggatcataatattatagtcttatatttcttttttttaaaaaaatccaaattattttataaagccttagatttccttagtacttgtgctttttgaatcggttctaacaaatggaatccatcctattactttgaaacagtaaacatttgcaattagctgttgttgactaaaagaactttgagtaggtaaagtgattgttgatgcaggtaccaaaaagagacaaaatattaagcataaatatatttagaagaactttgttaaataaagatgaatgctaacaacattataccaaaaatacaaatcctactgatttgtctgatgtacttgtttgaggttacagtcatacattgctgaacaactgggatgtgttctgagaaatgtgctgttgggggatttttttcatggtgtgaatgtcaaagagtgaacttacacaaatctagatagtgtagcctactacacacctaggctatatggcataacctattgctctaaggctacaaatatgtacagcatgttactctactgaatactgtaggcaattgtaacaaactagtatttgtgcatctaaacatatctaaccatagaaaaggtacagtaaaaattcagtataaaagatttaaaatatggtacacctgaatagggcacttaccatgaatggaacttgcaggactggaagttgttctgagttagtggagagtgactgtgaaggcctcagacattactgtacattactgtagactttataaatactgtacacttaggctacactaaatttatttgtaaatttttctttcttcaggctgtgtgcagtagcccatgcctgtaatccc

SEQ ID NO: 2560 - DNA, 1038 bp, Homo sapiens
tgggatcagtggtgatatccccttcatcattttttattgtatctatttgattcatctattgtcttctttattagtctggctagtggtctatctattttgttaatcttttcaaaaaaacagctcttggatggttgatcttatgaagggtttttcatgtctctatctccttcagttctgctctgatcttagttatttcttgtcttctgctagcttttgaatttgtttgctcttgcttctctagttcttttaattgtgatgttagggtgtcgattttagatctttcccgctttctgatgtgggcacttagtgctataaatttccctcttaacactgctttagctctgtcccagagattctggtacatgtgcctttgttctcattggtttcaaaaaatttatttatttctgccttatttgattatttacccagtagtcattccagagcaggttgctcagtttccatgtagttttgtggttttgagtgagtttcttaatcctgagttctaatttgattgcaatgtggtctgagagactgttatgatttcctttcttttgcatttgctgagagagtgttttacttccacttatgtgatcaattttagaataagtgctatgtggtgctgagaagaatgtatattctgtagatttggggtggagagttctgtagatgtctattaggttcatttggtccagagctgagttcaagtcctgaatatccttgttaattttctgtcttgttgatctgtctaatattcacagtggggtgttacagtttcccaccattattgtgtgggagtctgagtctcttctgcaaagtctcaggacacaaaatcaatgtgcaaaatcacaagcattcctatacaccaatataggcaatatattgacaataatagacaataatataataggacaaacagccaaatcatgagtgaactcacatttacatttgctacaaagaaaataaaatacctaggaatacaacttacaaggtacgtgaaggacctcttcaaggagaactacaaactgctgctcaaggaaa

SEQ ID NO: 2561 - DNA, 1031 bp, Homo sapiens
agctaaaagtgcctctagtgtcctctgtggtaatgaaagtgatgatgaaagtgacttgcagaatgactttaatttagtggaaatgattgcttctccaatacatgcgacatttaggaactcctggacataatcaatggagttttctcaggaataggaagacttttaagagtaatgaactaataacttttatgattgactatattgtgacatgattacattttcctgaaacaaatcttaacatattttatttctgcatagccatgtacttttcttttcttttttttctttcttttttttttttgagacggagtctctgtcgcccaggctggagtgcagtggcgcaatctcggctcactgcaagctccgcctcctgggttcaggccattcttctgcctcagcctcccgagtagctgggactgcaggcgtctgccaccacacccggctaattttttgtatttttagtagagatggggtttcaccgcgttagccaggatggtctcgatctcctgaactcctgatctgccagccttggcctcccaaagtgctgggattacaggcgtgagccaccgtgcccagccagccatgtacttttcatatatacaattaatgaaaataaaataatcctaatgacaaaaaaaaaaaaaagatgaggtgaatagtactttctaggtcatttgaaactttttttaaaatgttaacttaggaacttcattactaactaatcttcaaagatctggcggaaacttcttgaagataacagaatgtggagaatgcattaattataccgctaccagagacacaacatgcctttcttttctcatgagccttcttttaaagaattcctgccctgtacttctcacaggtattacaaatatttaatagaaggagaatttcagagttagaaaaagatttacagatatttggtctaactatcttattttgtaagtgggaaaaaaatatacactgaaaagttttggttactatattaatttattttcttaccagcagtttatgaacacccatttttccac

SEQ ID NO: 2562 - DNA, 1016 bp, Homo sapiens
tcataacaccctatgatataggtcctgttattatcctgattttacagatgaagaaaccgagcagagtaagattaagatctcacctaaggtcaccctgctagttaagtggtggagtcattattcaaacctaggatatctaatgacatatattttcgaattatcataccataccacccctcaatcttcatttagccatttgcgaaacaaacatcttctaaatgcctatcaggaattcccagtgccagacagcaagtgggataagtgctgaggactacctaggactagtatggaccctgcctccaagcacattacaacctaagaagtgcaatgcatttctgtcagtgctataacgtcagtgctgtgacagacctatgcacacaatatagtggtggaacaaaggaggaaggagtaatttattctacctgattttaggggagagggagatggtcagacttcaaataagaggtagcccatgaccttggtgtgaaagataagcaagaatttgccaagtaaaccaggaaaggacatgtggaaacttgcagaactgtagtggtaaactaagggaagattctttttctcagactgttgctggaactacaagatatttctagcaacaggagttcttaacctgggatccacagaccctcaaagcgttcttaaataaaaccatattctaatatatttgggggtttttggtaacccttatattttgatatatgcattttaaaatattattttgagaaagagtccacaggctttctaaacctttataaaccaagaggagtttatagcacaaaaaaagttaagaacacattagtcctagatccactgtgccaggagcttctccaacacagatatatgctgtgagttttgataacaagtagaattgtgctattaatggatagtgttaaattcttatcttacaatagattcagtggacccaagaaaacctgatgaatcactcaactgtatttttggacttcttggatataaacaagactcatagaaaaaagatt

SEQ ID NO: 2563 - DNA, 1032 bp, Homo sapiens
ttggcctcttgtcatacctaattagctcatcattgttttttaccttataacatggttgaagaaaaatttatatcaagaataaaagaagtgtcagcctgccttttgcttgttattcacttgtgcttccattattagcattgctttcaatccagtgtttctttcagacatctttttaagctacctgcccatgttttaggagctgacatttcaaactaggtaacagaagaggcaaatccctcacttggatacgagtaagctgcaaggcttcctcgtgtcctcagtgttaagcaaataggggaggccccattcctgagccttctcagatggggagcttcccctcttccattaaggtgccacctatctcactgagtgacccagaacttctgcaatgccaaccacctgaaggtgccactgttgatcaatatattaaatatgagtaaggggccgagcggggtggcttatgcctgtaatcccagcactttgggaggccgaggcgggtagattacgaggtgaggaaaccatgaccatcctggccaacatggtgaaaccccgtctctactaaaaatacaaaaattagctgaatgtggtggtgcaggcctgtaatcccagctacttaggaggctgaggcaggacaatcacttgaacctaggaggcggagattgcagtgagccaagatggcgccactgcactccagcctggtgagagagcaagactcggaggggggagggatagcattaggagatatacctaatgctaaatggcgagttaatgggtgcagcacaccagcatggcacatgtatacatatgtaactaacctgcacattgtgcacatgtaccctaaaacttaaagtataataataataaataaataaataaaaataaaaaaagaaaaataaataaataaataaataagagtacggcttaatttcagtatttaatattttaagccaattaaaaattgatacagagaaattcatggcgtttgtttttgctttttgttttgcatggttttgttttgttttgttttgtttt

SEQ ID NO: 2564 - DNA, 1037 bp, Homo sapiens
ataacgtaaagcaatatggaaggaatgttatcagtcatttattaagtgtaaatggatgcattctctcaataaaaggcaagactattaaattgggttacaaaacaaaacccagaaatgtgcaatttatacgaaaaagtgaaattaatgaagaaattttgaaattatcaagaaaataaaaaagaagaaagcagaaatggcaatattaatattagtcagaatgtaatgactgagagtgctatattcttcagacaacagcatattgtagcatatatatatatatatatacacacatgtatatatacactggtatacatgtacatatatatgtatatatgtatatgcaattattgtgggaaatttcaaaaaacctccatcaggattggacagctctaataaacaaatataagatgaatagaataatgtagtcaacaaatttgattaacagatagatcgagagactaacatccctctaataaaaagtacatattttttcaggtatccaaggaactgttacacaactcagtcatgagcatggccacaaagaaaaacctttaatgattttatgggccacgttatctgaacacaatttaatataataaaaatttgacccctaaaaatctaaacaacttggatattaagaaacataactctagataaccttttatcaaataggatattaaaagggaaatcagccaggctcggtggctcacagctgtaatctcagcactttgggagggtaaggtgggcggatcacctgaggtcaggagttcaagaccagcctggccaacatgatgaaacctgcacggtggctcacgcccataatcccagcactttgggaggccgaggcagttggatcacctaaggtcgggagttagagaccagcctgaccaacgaggagtaaccccatctctactgaaaacaaaaattagcctggcgtggtggcacatgcctataatcccagctactcaggaggcaggagagttgcttgaacccgggaggtggaggttgcagtgagctgagatcacagcacttcactc

SEQ ID NO: 2565 - DNA, 1100 bp, Homo sapiens
aattatgtttctgttctggcttgtagataagtagcagtttttattttattttattttatttatttattttttttgaaatggagtctcgctctgtccccaggctggagtgcaatggtgcgatctcggctcactgcaagctccacctccctggttcacaccattctcttgcctcagcctcccgattagctgggactgcaggcactcatcaccacgcccggctaattttttgtattttttagtagagacggggtttcaccgtgttagccaggatggtctcaatctcctgactttatgatccacccgccttggcctcccaaagtgctgagattacaggcgtgagccaccgcgcctggccgatacttagcagtttttaaaacagctagctaaacaagagttactgatactggttagggaaaaactgcgatacactgtgcttgaatccatcactgaaaaaaaataatgttcgtggaagtgttcttgggagatgtcttataggaatatgctaatatctaaatgccttggcaatctgtagaatattgaacataaagtattgtgtaacatggaacttcagtataggagttattctggtttttggaaaagttgttggtggagacttcaaggcagaattctgcttttatgtaataatgcgttatgttctaccttcgtgataaagacctgattttgctgaatattttagtctgaatctgcttgctaagatttgtggaaaaatggaaagtgtgagttgcactgacctgcagcactgtttgctaatgaatggatttggactttttaactagccatttctgctaaatgttttcctccctttcctgtcattcctctgtggctaggtgtgttggtgtatattcttattggcaagaaatgccaccttataagtctcacagacattccctgaatgtggatgtgttttgagaatgttcagtacatctcttcaaactggctgcaaataaaatatccaactttttaagtcttaaataaatggtagcaaaggaatgaactaaaatagctgattttttttttaacttcatttcggtttagtttatagtaaaaatgcctttagatgtttgggggtatttattcta

SEQ ID NO: 2566 - DNA, 1024 bp, Homo sapiens
agactacaggtgtgcaccaccacactcagctaatttttaaatttttttgtcaagacagggtctcattatattgcccaggttgatctggaactcctggactcaagccatctttctgccttagcctcccaaaccactgggattatgggtgtgaaccactaagtacttcttaaatcttgacattccacacagaaaaattttaattgtgattgtcacagagtggttaggtatacttgctgaagaaaaacccctatgtcctgtcttaaaaataggggaataggccgggcgcggtggctcgtgctggtaatcccagcattttgggaggctgaggtgggcggatcatgaggtcaggagttcgagaccagcctgaccaacacagtgaaaccccgtctctactaaaaatacaaatattagcatggtggtgggtgcctgtaatctcagctacttgggaggctgaggcaggagaatcgcttgaacctgggactgggaggcagaggttgcaatgagccaagattgtgccactgcactctagcctgggtgacagaactagactcggtctcaaaaaaaataaaataagggaataaatgcagaacgaattttaatacaaaaggccttatctccaattgatggctctttttgccctgttaatgattgaatataattaaggatccatgttaacttcgacttttttataatcccatgtatccatcatttttctaatcccataattgatttagaatactgtcttctatggacctaaaatctttttctgtcagaaatttcagtgagaaggtatgtacattctctcataggacatgtgctaaaattttgatgatgaagattaatatggcctttttacaagattgccgcacaaatttgtacaatgcgtggataaaaatttttttaagtgagttgtttaaaaggctcacttaaaaaaatcagttgggcatgatgaggttgaacttcaagttatttaagttgttgacttttattataggatcattagttcctgttgtttaaaactcat

SEQ ID NO: 2567 - DNA, 1735 bp, Homo sapiens
aattagctaggtgtggttgtgtgtgcctgtagtcccagctactcaggaagctgaggatcgcttgagcccaggacgcaggttgcagtgagctgagattgcaccactacacccccaacctgggccacagagtgagacactgtctcaaaaatacataccttcagcaaatcaagattttttttttttttttttttgagacggaatctcactctgtcgcccaggctggagtgcagtggcatgatcttggctcactgcagccctcactcctgggttcaagcgattctcctgcctcagcctcctaagtagctgggattacaggcacacgccaccacgcccagctaatttttgtatttttagtagagacggggtttcaccatattggccaggctggtttcgaactgctgacctggtggtccgcctgcctcggcctcccagagtgctgggattacaggcgtaagccaccacgcctggccaagaaaatcaagatttacctggtttatgtgttgaccagctatacacagagaattctagatttttttctaaaaattattatcaaacccccaatttcaccagtagaaaaagagatcttaagatttctgtgtttttttttccagcataactcagttacttatggctgggagaaaatatgtagggagataatctaatacctaattcgaaggaagaaaatatctaattctaagtcttgagttcttctcatcagaccatagcaggatttaacatttaacatttttcagaagcttctaatagacttcattcagttttttgtccacagcagtggcatttaaattactgtactttaagacatggaattgctggaggcttggaaacttgagtgcaatttccctagtacgacctccaaggagaatagagcaaaacagtggtaggaaaaactctcaaaattttacccaattgtatgttttctacattgtcagtatctagttttatatagttaatatgtacttctaaaatttctgacagtgtttggtgtataaaacagaccaagctcaagatgtaaagaagattgagaaattccacagtcaactaatgcgacttatggtagccaaggaagcccgcaatgttaccatggaaactgagtgaatggtttgaaatgaagactttgtcgtgtacttaggaagtaaatatcttttgaattagagaaagtgttgggacagaaagtactttatgtaactaagtgggctgttcagaagcttagaggtcattttttgtaattttctttttaattactttagagagctagggatgcaaatgttttcagttagaaagcctttatttacttttggaaattgaacaagaaatgcatctgtcttagaaactggagattatttgatgttaggtaaaacatgtaattgtttctctggcaaatttgtatcagtaatttgaaaatgagatattaggaaaaaccaattcttcttaaatttagttcatctttctttaaaagaacattaaatgtaaccattttgtcagatccatgtattttggagcataaaatgtatgctgttgtgaccaataaatataaaatatggtaattggaattaactccacaccatagtatgcattgttatacatactgtgtacctaattatgtatagcagtgtagtctcaattatatctgaaagtaattgtgactaacaagtatgctttgccttatttccacatttaaactacctgttaatataagggatttgtagtatcagct

SEQ ID NO: 2568 - DNA, 1047 bp, Homo sapiens
cttctccaactcccatggcctccccagtggggccagtgctgaaagaggctggctctgtgctcgctcctcagccctgaggcctgttcctccgccatctctcctctctccctgtccttgacaccagcccagcctcaccccggcccctctctctgccttcagccacgtgaaaggcctgcacttgaacatggctttggttttaagcaacttctctaccctgaccctcctcctgggacagcgtttcgggaggtttcttggcctcactgagagggatgtggagctgctgtaccccgtcaaggagaaggtattctacagcctgatgagggagagcggctacatgcacatccagtgcaccaagcctgacaccgtaggtgagtgtgctcaggggtcctcgcccactgccggctccactggggcagggagacacccgcggggtaacctcaccaccccaccccaatgctgcccacagaaggaagcctcttgtaaggacctcccagctctttagatctttaaactgcattttcccatagaatcaagaggatggaccctcagcagattcccaggccaatttagcaactctgtttagccgactcagtattcatagtggctttcacccctgatctcccacccctgagtctatatcctacactgagaagcagagggatggagggggtgaggtaggaggaatcctgggagtgggcagctctggggctgcaggggagaggggagagggtgccctggggccttggggaagaggttcccaggcagtgagggagggcccagcaaccatgtctgccaccagggtcctgttaaaggacaatactttttcaaaaaggtaaatttataaaggaaccagtaaaattttaaaaagaaacaattcaaagacaaataagaacactgaaattaatttgctaacagacacaaaacttgtcaacatccacagagtaatatcaattaaatctccatgggacaaaattcatttgcctctatgaacaagagtcattcgcattaccctcagttctttacaattcacagaactgtaaaatagct

SEQ ID NO: 2569 - DNA, 1032 bp, Homo sapiens
agaggcgtaggcccttcagtttgaaggaagctgagcaggcagtgtgccaggccctgggagacagtgggaaggtatcgtccctgtttatcagatgaggatgccgaggcagagttaaggaagcgaggcatgtgagcacccaggagttaaggcaggcctgtgctcgaacgtggcttcctgcacacagccccgccctctgcggccagtgccacacatcacacctgaagctccagctctctggtccccaggcctgagtctctcccttgctccccgctccccgccaggctctgctctgaatgactctcctgtgggtctggctgcctatattctagagaagttttccacctggaccaatacggaattccgatacctggaggatggaggcctggaaaggtgaggccctggtttgcccctgcagtcatgaccctggtcccagcagccaacctcctcaccctcttcatccccttgtctggttgctctgcatggggcactcagcaaattctattgttggctttcttacaaatcctcaccctgtgaccaacgtagctgcattttttgggtgaggtggcctggtgggttgttcccagcctcacagtgcatggtcaagactaggatgcaggctcacctgcttgtgctccttttgctgaacaggcccctctggggattagggagcccacagggcagcaggcaccacattattgtcaagagcacctgggcttttcctcctgattccctggagagcctggcatcagggtcacgtgactgcgtgttccaggagggtggtcgcagaaagacaggaggctgttaatctctcagagccttagaggctgtatcctctacatgcctgactcccagctctgtggcctgactcaggcttcaccaaggtcagctctgacccaccctttccagggcccatccctttattccttcagtgacacacaggaccagacagtgctggggatgggaaagacagtaaaatgagactgaatcctgccttgggggtagggactctgtcttggccatgctgtagcccca

SEQ ID NO: 2570 - DNA, 1028 bp, Homo sapiens
caggcttttcttggggaagataccccttttctgaggaatgagtttgcctccgtcccctgcccatgctgggagcccacgctcaccccctcacccctccaagctcactccccaacccccaactccgtgtggtaagcaacatggctttgatgataaacgactttactctaaaagcggctggaactcagtgacatgagcgtgcgctgaccccacatggggccccctgtgcaagcagagctggccggcccctccttgctggcagaggcacgggaggcctgctggggatgaggccactggccagggctatgctgcaccagaccaatggcaccgcccccacccctcccagcgcaggggcagcttggagcagaggcagcactggccaccactgcgggggcaagtcagcgtcaagagagtccctgagtgagaaggcccagataagcccaggccccccaggccagcggacaggcacaggcagggcctacagaggtgccaaggccccaggccagttgtgctaggagcctggacctgctcttccacacccccatcccgcccctactgcacaggcttgtgccttggtgccccctggaggcagcagggaggaggcttctcaggcagaagtcttaagttgcatcccattccccagaatccccaggagggagaagagggatgggctgcccctccttcctgccagagccacagctcaagggcagtgggatggccctgcacccagcccaggtaccccttcctctgtgccgaccatgctgtcctttggctccgaggaggccctgagcactgcccacccccacaccttggagggagcagacggagggggtgagtactgcacagagcctgcctggaggtgcagactcatgcactcagccctgaagaggtgagagaggctggatcttaactgtggtccaatgggcatattatgagtggtccttgtccctgcctgctatggggtaaccctgacccagctagcgtccctgacaacatgatacaaaaacacagaactctagcgggatacagag

SEQ ID NO: 2571 - DNA, 1033 bp, Homo sapiens
cacagagaaggggagatttggactggaccttttggttactcattttgtgtgtgtgtgtgtgtgtgtgtgtgtgtgtgaatgcaatgtatgcatttcaggaggggatggtggcaatgggtaaaggtactgaggtaggaatatgtatgactcacttagagtacaaatatcctgatattgctggagtcaggggaataaaggaagaaaagattgaaaagttgggtaagtcagaaccaaacaatgaggaggcttaattatcaaattctcaagattttgactctcagtatattccagaataaattaagataagaaactggcccataaggacaggtaaagctcatgcttgacgtgaaatagtaaaggaatggaattggctgcagaaagaatgaagaaggatagcttagaagagatggtttacctagagaagtaattctcacggcgtggtccctggactggagcatcagcatcaactaggaacttgttggaaatgcaaattgctgggcccctgcaagacttattatcagaaactctggggctggactcagcgatctgagttttaaacagcacactcaagtttgagaactagtgaactagataaataatccttttagcagataaacagtgtagcagaattctctctatccaatttatgttctacatatgaaaaaacaaaactgttaaaccaattatttgaatcatttttaaaactttttttgttggccgggggtggtgattcacgcctgtaatcccaccactttgagaggctgaggtggttggatcacttgagccaaggagttcaagaccagcttaggtaacacagcaaaaccacacctctacccaaaatacaaaaattagccagtctcataacctggtctcaaaataaataaacacatagattaaattttaaaataaaataaacaaaccctttttatataaacattttaaacctacacaaaagtagacagaacaataaaccttcatatacccatcatcagatttaacaattatcaagatgttgccacgttatcactttctc

SEQ ID NO: 2572 - DNA, 1090 bp, Homo sapiens
ttcccttttttggagaggcggaaacttgatgcatttgaaatgcaaaaaaaacttttgcattttggagggcggcacgtggcaggggataggggtattttcgagcgatttggtgttttgtctctttggaacggaatcggatacgttttgcgattgtttccattttgttctggtcggggagccgagttggttcctgctcgaggcgctgggagcgaggcgggcaggttgggggaccctgtgccgagggacccgaaggaggcaaaaccaaaagtttatgtggtgcttggggtggaccggtcggcggatgtcgtgcgttaattaaagcctgggtgcggggcactttttatttcactgcgaagcctgtgaggactggacgcgaggacggggctttgtagaatgctcgctggtggtagctgttgttcctctcttgttttttcgagacgcctttttgtcaacataactgtaaagatgcaaaaccaagaatattttcagatatttacagcaatccatcaacagtcagacgaagggggggcagccaaagtgggggggagtaagaccttttttttgctgtaatttgactcgaccttccagtggtttgtgccttttttcttttgacttgtttgtggatggaatgtttacagacatttctaattactgctttaattaaataaattggatcaaaggccgttcgaggtatttttgttttgccgtttgtcgctcagaattggcattttgagaggtgattgatactgctaacaattttctagtactctagtttgtttcaagaagagattttgggtagacgtaatcttcaccctttcaaattatataacaatacgaacattattttttatactgatcataatttccagatttggggagggggtgatcgtggcaggaaaagttgtatgtttggtagttgcatatggtgatttttgatttttcaatgctggtaggtaagtaaggaggtctctgtaccatggctcgtacaaagcagactgcccgcaaatcgaccggtggtaaagcacccaggaagcaactggctacaaaagccgctcgcaagagtgcgccctctactggaggggtgaagaaa

SEQ ID NO: 2573 - DNA, 1050 bp, Homo sapiens
agcgcagctatcggtgctttgcaggtaaaatggtgggtgggaagactcagagtttgtattcctgttgtgtaccaagaacagttccaaattgttgcatgtgcttatatcatttaatcacaagcctgtcaggtagttgatattgttacttcactgttgagacttcagaaaggttaaattgctcaaggtcatacacgtagaaaatggcaaaaccataatttgaacctatttgactccaaggcttagtgcacattccattataccatttaaaattttgaaacattgcactaaaaacaatatttaaagaaaatcctctggtttggtttatggatgctgcaggacattaagaagaacttgagactagaggtctatatttgtagtaacaatttcaaacaacagtgcctagaataaaagaaatgtctcttcaggtcctgaagaaacatataggtagagagagcttaatacctaggatgggaataggcagtattaaaaaattatgcattaagacgtaaaaggagcagtgagtggaggataggattggattggcaagattgggggaacggtgcttaaaggtgatactggacgtgtaaaggggccaggatttgccttgtggtttcctaaaggggattagggattgccacttacatgtggagcatattgaatttaatcttaatctctagcatgtcaggacttagagaaatactgttctagagatatttatgtatttgagatatttgtggtttaagttaagaccaaaacttgaaattcctacaagatacttgataaaggtatgtagacgtcattaacatcagtcacttaagtaacctattttatattgtgtggttggattctttagttgcaagtatcccagaatacagtaaagctaccacctccatcagaagcatgcagttgggggtcgttaaaaatgctgattgttaggcaccattgcagacctgaatcattctgggggtggggagggggcatccagaatctaagtacattccattggaggattttcaaggctgctgttgctgtgctgggcttttgctttat

SEQ ID NO: 2574 - DNA, 1062 bp, Homo sapiens
gtagcttgtaccacattttacaaaagcattctagctttctgtaatcccgaggtgccaggttaagcaaaattaaactgttttctttcctgatataatagctgatatgcgttgtgagcccctaaggaggctacaatatgccattttttccaggatttctacccacttctagaatatcttaagaacgaatctcggaatattaaggacttttgcttttaatacctgtggaataggtaagatgcgagggactacttgcatagaatagaaacattttttaaaactagcaaatattgaaaatctacttgaggacaaggcatttggagtattaaatgagatttctgttatcaagtaacttaagggcaccaaaaaatggctgataatgcaaggtcattgtgagtgccaaggaactaggagttcagggttgcctgcactggcaacaggagcaagagacaagtatgcgattttctccttcatggaatagtcttgagctgggccttaaagggtagataagtaagacttagttgttaataacaaatgctggagaaacacacgtgaaaatagttcaatttgaatgaaggaaacttgtagaagagtagtgatagggctaaaaaggatgaagctagaaatgtgaaagtaccttttttttttttttttgagacgagtcacactctgtcacctaggctggagtgcagtggtgcaatctcggcttactgcagcctccgcctcccgggttcaagcaattctcctgtctcagcctcccaagtagctgggactacaggcacatgccaccacgcccagctactttttgtatttttagtagagacaaggtttctccgtgttggtcagtctagtctcaagctcctgacctcgggtgatctgcctgcctcggcctcccaaagtgctgggattacaggcgtgagccaccacggcacctggtctggaattttttttattagaataaaaatgcaactataagactgttttctcccttaatatatcttcagcagagaaataacttttccttatagaaaaggagagagagccaactaacctatcatttcatgc

SEQ ID NO: 2575 - DNA, 1062 bp, Homo sapiens; identical to SEQ ID NO: 2574

SEQ ID NO: 2576 - DNA, 1092 bp, Homo sapiens
acacctgtaatcccagcactttgggaggctgaggtgggcagatcacctgaagttaggagttcaagaccagcctggccaacatggtgaaaccccatctctactaaaaatacaaaattagctggacgtgatggtgcatgcctgtaatcccagctactcgggaggctgaggcaggagaattgcctgagctcgggaggtggaggttgcagtgagccgaggttataccactgcactccagccagggctacagagcaagactcaaacctcaaaaaacaaaaacaaaaagagtaagcagatgttttggcttagactaaaagattcttcagcttttcagacagctataagtatactaagaatttgagttatgagttaattctaagtggaaacgcccctttttcctcttcacaagttaagtgtcaatgagtgattcatacactgtcatttttaagtggtagtaggaataagataacttgaaaggatcttacagtcaaatgggaaaaaccagagaaatcgatactagtactagagggcaacaaatgctgttacaaattggggtacgtagaggaaggtacttggtagaggacaggggcatgtttccggggcatagatcaaagtatataaataaggaactgccaggccagttgcggtggctcactcctgtaatcccagcactttgggaggccgaggcaggaggatcacgaggtcaggagatcgagaccatcctagctaacacaatgaagccccatctctactgaaaattagtcaggcgtggtggtgggcgcctgtagcccgagctactcgggaggctgaggcaggagaatgacatgaacctgggaggtggagcttgcagtgagctgagatcttgccactgcactccagcctgggcaacaaagagagactccgtctcaaaataaataaataaggaactgccgggcgcggtggctcacgcctataatcccagcactttgggaggccaaggtgggtggatcacgaggtcaggagttcgagaccagcctgaccaacatggtgaaaccccttctctactaaaaatacaaaaaagtagccaggcatggtggcgcatacctgtagtcccag

SEQ ID NO: 2577 - DNA, 1092 bp, Homo sapiens; identical to SEQ ID NO: 2576

SEQ ID NO: 2578 - DNA, 1050 bp, Homo sapiens
catataaaagtatagcagaggggtccccaacccgtggatcagtactggtccatggtctgttaggaaccgggcggcacagcaggagttgagcggcgggccagcccccaaagaaagcttcatcagtacttacagccactccccaacactggttttgctgcctgagctccgcctcctgtcagatcagcagaagcattagattttcctagaatcggaaacctattgtgaactgcatatgccagggatctaggttgtgcactcctaatgagaatctaatgcctcatctgtcactgtctcccatcacccccagatgggatgtctagttgcaggaaaacaagctcagggctcccactgattctacattatggtgaattgtataattacttcattatatattacaatataataataatagaaataaagtgcacaacaaatgtaatgcacttgaatcatcctgaaaccatccctcccccttaccccagtctgtggaaaaactgtcttccacgaaaccagaacctgctgtcaaaaaggttggagacctctggtacagcacatataattatgtacagtacataatacttgataatgacaacaaatgacgatgttactggcttatatgtttactatgctatattttttattgttattttagagtatagaccttctacttataaaaagaaaaacacattaactgtaaaacagccttgggcaggtccttcgggaggaatccagaaggcattgttatcataggagatgccagctccctgcatgttattgccctggaagaccttccagtgggacaagatgtggaggtggaagatggtgatgttgatggtcctgaccctgtgaaggcctaggctactgtgtgtgtttgtgttttaacaaaagagtttaaaaactaaaaaaagccgggcatggtggctcacacctatagtcccagcactttgggaggctgaggcgggcagaccacctgaggtcaggagttcgagaccagcctgaccaacatgatgaaaccccgtctctactaaaaatacaaaaattagccgggcaagg

SEQ ID NO: 2579 - DNA, 1050 bp, Homo sapiens; identical to SEQ ID NO: 2578

SEQ ID NO: 2580 - DNA, 1048 bp, Homo sapiens
gggtaagacacggctgccgcgacccttgcgacccccaccccgccgcgggagggcgtggggggagagaagggcgcggccggagacctcctggcggggccgcgcgctccaagtgctgcgaccacgcgccaccgcccgctcctggcgtccccgggcaggtggcagaagcgcgtggagtgtgcaccccagaggggagaggctgcgctggggtctccgacccgcaggcggggccccaaagagccggaaactttgcggccaatgttggagcccgcagcggcggccggaatggctctgccggcttcggagtagggctcccgtcccggcgccccgatttctgctccttctctccgtcgtgtgcatccgtccgcgagcccacttccccgagaggaatggggtcggatcagaatgagctctagggcctcggcggcgaggatcaaactcccgggcgtcgaagtcagctgagccggggaaagaggacgagccgggctagatatacctgcagccccctttggttcgcggagtgcggaccgcgtggggacgagaactctagccagagtctcctccgcctcattcaggggtacctgcacttccgccagcaccccgcagggcgccagggggatgggggatgattttattagtttggatgcatgtggccagagatgaacccatagctccctcggatcccttctgttcctgagaagtagagagtgcgccgatgtaattctgtgcaggactccggcagccggcaggggttctggtggcatctatgtcccacgttttaaagcagaggccccttacagagatggtgcaggagggtgaatggaggcagggaatgagaagttttcctgaccctccctcccttaactccacccccaggtctctgcctgcacgcccctcccctcctccagcttggcactggctgctcctgcgtgctgggaggtgcccccctctcccgtgcccgcccgaagaaccaggcgccccagtgccctctccgggagaaagcgtgcccctgtcggcgagcctgttgccaacgtatggttccaagttccca

SEQ ID NO: 2581 - DNA, 1044 bp, Homo sapiens
acacctgtctcccctccgtagctgctcaccgtccccccaaggggggtttgcctcttgcctactttggcctttctctgttatcgatgttaataatgacatatatctcgcttatgagttggtcataataaaaagctatcttgtacagaatattagaatttaagatcttaagaatttcaatgacactgaaatagtttattattacctttttacagaagaggaaacaagttcagggagttaagcagctagtccagttatgtggcttcagtgctttaagcaccaggatttgaacatagctggctacactgtctttatctcttgagtttttgcgcaggaggttcctgtattcaactcctacccgtgtctctccactactgctgggaaagttttgtggagtccccatgagcaacttcctgacaaacaaacaaaatttttttaaagaaaccaaagcagtgtgtgtaggtcacatgcagtgtgtctaatgaaaacatctctggcgggttttcagctgttgctttgactttcggacactgtttagttggggactgataagacagcaaatatttctgcaagtattcccacctgttctattcccagctgccacagctgcggaaaggcgggggtgaggctgagaggccccgagaggaacattttccactgggctccaatcctggagatgggatgaccatcatgttaatgtctggagaaaagaatgatttcaggctgggtgctgtggctcatgtctgtaatcccagcactttgggaggccgaggtgggtggatcacctgaggtcggaagtttgagaccagcctgaccaacatggagaaaccccatctttactaaaaatacaaaattagccgggcgtggtggcacatgcctgtaatcccagctactcaggaggctgaggcaggagaatcgcttgaacccaggaggcggaggttgcagtgagccgagatcgggccatggcactccagcctgggcaacaagagcaaaactccatctcaaaaaaaaaaaaatggtttcacatcagtcctcaggaaagatcag

SEQ ID NO: 2582 - DNA, 1037 bp, Homo sapiens
ggcagaaagttcaaagtaatttcttcctctgcaaattcccagtatcttagtcacacgcaaagagagtgtccctgtgcactgactcctctagctagtgatttgtcagccaaaaatgtttatttatctcctggcctgtttcctcccatatcagtatggccacatgaacagaattgagtgacctcctgagtccctgtattaggaaggggaaagatcttttgattcattaaccattaagttgattcattaaccattaagtcttgggcctgcagaccatagcaaccttccttccttcatttatggtgcttcatccagctccaaatcttctctactttgtcctcacaaacttttcatatgccctagtagctcatagactgctccttatatctggaaagcaacattcaaacttctcatttctggttccaaaaatccgtgcattacatggataggctgccgtgggggacattctgcggccctcacgatgtggtttcccacagagaagccaggagaacgaggaggacggtgaggaggaccctgaccgctatgtctgtagtggggttcccgggcggccgccaggcctggaggaagagctgaccctcaaatacggagcgaagcacgtgatcatgctgtttgtgcctgtcactctgtgcatgatcgtggtggtagccaccatcaagtctgtgcgcttctacacagagaagaatggacagctgtgagttggggggctggggggagcagggtggggtgagggctgagttgccagggggtggggggcgcagcagcctgtgttggtcactgtacctgcagctccacaccagcagcggtaaagagcagggatgaagaaccgcccaggttcatggcctggctcactgcctcctggattgtgacctacttgggcatgcttttaacatccctatgcctcagcttccttgttcgtataatgggttgataacgcagttactgggagaattaagtgagttaatatgagtgaagggcttagaagagtgtctactgcacgtgagtgctcaggcaagctggat

SEQ ID NO: 2583 - DNA, 1045 bp, Homo sapiens
tgcctcagcctcctgagtagataggattataggcatgtgccaccacgctgggctaatttttgtatttttagtagagatggggtttcaccatgttggccaggctgatctcgaactcctgaccttgtgatcggcccgcctcagcctcccaaagtactgggattacaggcatgagccactacacccagcctcattttccattattactgctatgctgattgagcaagtgcactgttaagcactggacacgctgtaagtgatttgttcatcaagacagtcctttgggtaccatgcatatacataaccccaaatgttagctgctatttgatattagcatgattatcattgccagtattgttacttccattttaaggttaaagaattggaggctcagagaagtgggactccccagcctggccaccgcgtctcgggtgcacagctcctccatgcttgcagttgcctgcgaggccctactctggctcacaccagggcctgctctaagttgtgactggagaatgagaatttgggatgccagcccagaggcaaggcatgctctgagagctccacccggggctcctgtgctacagggcaggctcttcttcagggggctgcccggggatagtttgacaaggatgtctctgtcttcctagatctcgtggctgtgctgtgtcccaaagggcctctgagaatgctggtagaaactgcccaggagagaaatgagcccatattccctgccctgatatactcatgtgagtgagccccccgtgcctctgcctgactcggggtcagcaggcagcctgtggggggacaggggcctgcttcctggccgtggctttcagagttgactgggcgatcccaggagggtctccactttcagaagccagggagggcagtatcttgttattacacagtaagaagcttagaaagttaggacaggaagcaggcatctgctgggatgtgctgcagtccctgacttcatcccgtccatcctccagcggcatgctgcggtgcaggttgcattcctgtgatcccgcagccacccctcagc

SEQ ID NO: 2584 - DNA, 1079 bp, Homo sapiens
ccctgtttgaaggaacttttaatgatctcgcctctctgcacacatttctttaactagaaagtttcctaagcaaaggagttaggagagcagggtggcctgacatctgccagccctgagctgtaaggctgtggatgctgagcaggtccctggactcagttgtgcacggtggcacagacactgccaggtggttgccaaaacatccagtggttccttcagcaagtgttcaccctctgcagaagcctgtgagggcctgagctcagaaaccactctcctttccttctctggctttggccctgggcactgtggtgggagagtggacagtttggctttgccttctctgtacatcaatcatgggttgcaaagagaatctcagaagtgcctcttcctgagcacagtggctcacacctgtaatcccaatacttcgggaggtcgagtcggaaggatcacttgagcccaggagtttgagaccagccggggcaacatagtgagactttgtacaaaaaaaaatttaaaaattagccaagcatggtggcatgcatctgtagtctcagctactctggaggctgaggtgggaggatcacttaagcccaggaggctgaggctgcaatgagccgagatcaagcaggtgttaggtatatcagacagctgagaagacgcaagtgtgccctggggttcaaactggtacccctgtctccctgttccaggaataacatgagtgccgggacaatgcatctttattatgagaggaatgagaattgtgtatcttgacatttgacaggagcttgctttcccccaggctgtttgaggaagggcagaggaaaatgtggtgccctaagaaggaaggacagaggaggccgaacactggcgggtggaatcccactgattagtagtgcaggtcagagacctgggatggggggcattgccgtcatggaagccacagcggggagcgggtaaagcagacagggatggtccctgatggtgacaactcgcaagaggttaaggggaaagaaaaactgaaaagcttattcaatttggcaattatggcagtgtttatcttcagaagagcagttttagggtgg

SEQ ID NO: 2585 - DNA, 1031 bp, Homo sapiens
acagttgcccgccaccatgcctggctaattttgtattttagtagagacggggtttcaccacgttagccaggctggtctcaaactcctgactgcaggtgatccacgcaccttggcctccaaaagtgctgggattacaggcgtgagccaccgtgcccagcccagttattttaactattgtatagtgttccattgtatgagttctactgtttatatgctattgatcgacctgtaggggttttgcagtgtttctgtattacagctgtgctgcagtgagcatcccatcacattgtgtggatttgaggaagtattggaattcccccaattgactggacattcccaattaccctccaagtatgtgtctgtttatccttccatccgcaatctgagagttccccaactctataatacttggtgtcatcagacttttcatcttgtctgattggatgggtgtcatttcctttaggttttataattatcttttcatatgtgtattggctgtacaaggttccttctctgttcattattattaatttttttagacagagtctcgcgctgtcgcccaggctggagtgcagcagcgtgatcttggctcactgcaagctccgcctcccgggttcatgccattctcctgcctcagcctcctgagtagctgggattacaggtgcctgccatcacgcccggctagtttttttgtattttgagtagagatggggtttcaccgtgttagccaggagggtctcgatctcctgacctcgtgatccacccgcctcggcctcccaaagtgctgggattacaggtgtgagtcactgcgcccagcccaagtttccttctctgttacttgttcatatcctctgcccatttttcacttggattttttgtcttacggatatttaagcctcttaaaatatatattctggagagatgctaatctttgattaattatatgcattgcaaatgtctggtacattgtggcttgcctctcttccctgcctttaggagtgttttgctggacccaagtaatttttaaatgt

SEQ ID NO: 2586 - DNA, 1087 bp, Homo sapiens
ctggatatgaaattctgggttgaaaattcttttctttaagaatgttgaatattggcccccactctcttctggcttatagagtttctgctgagagatcagctgttagtctgatgggcttccctttgtgggtaacctgacttttctctctggctgcccttaacattttttccttcatttcaactttagtgaatctgacaattatgtgtcttggagttgctcttctcgaggagtatctttgtggcgttctctgtatttcctgaatttaaatgttggcctgccttgctaggttggggaagttctcctggatatatcctgcagagtgttttccaacttggttccattctccccgtcactttcaggtacaccaatcagacgtagatttggtcttttcacatagtcccatattttttggaggctttgttggcttctttttactcttttttctctatacttctcttctggcttcatttaattcatttgatcttcaatcactgataccctttcttccagttgatcgaatcgggctactgaaattgaccacatagttggaagtaaagtactcctcagcaaatgtaaaagaacagaatttataacaaactgtctttcagaccacagtgcaatcaaactagaactcaggattaagaaactcaaaaccgctcaactacatggaaactgaacaatctgatcctgaatgactactgggtacataacgaaatgaaggcagaaataaagatgttctttgaaaccaacgagaacaaagacacaacataccagaatctctgggacacattcaaagcagtgcatagaaggaaatttatagcactaaatgcccacaagagaaagcaggaaagatctaaaattgacaccctaacatcacgattaaaagaactagagaagcaagaacaaacacattcaaaagctagcagaaggcaagaaataactaagatcagagcagaactgaaggaaatagagacacaaaaaacccttcaaaaaattaatgaatccaggagctggttttgtgaaaagatcaacaaaattgatagactgctagcaagactaataaagaagaaaagagagaagaatcaaa

SEQ ID NO: 2587 - DNA, 1035 bp, Homo sapiens
acccacctcagcccttcttgcattctcttcatgtgacagcgcagcttccccgcgagtttcgctggccgcgagcctcaggtccggacgcagtgggggcgcctcagttgcagggtgggtcctctgcagccgtctcacgtccctgggtccacctcagcccctcgttcctgcttcggggaggagacgagggccacgtgcagagccttgggtccctggaacacgcccgctgcttgcccgaccgccttcccgctgccgaatgcccgttgcccatgccctttggtcgccaatacagctttgatgcttcgctttctaataatgttgttcttcactcccagacccccttgcactgtgtgtctggggctctaggctcgttgccgctggctgcaggtttgggtgagaactttgacttccttggctggagccagctgttgggcttcgcaggtgggaattttgtgtgaacttgggacaggggatcctttttgatcctttcttcctttcgcttttctttggcctttcctcttctccaaactctggggggtcttgtgagtggtttgggcttactcccctaaactcgaacctttccgaggctcattctcacccattgcacagaggtaacagcccctctgccaaaccctctttgggcgatggggagtgctgcaggggcaggtttgggtgttgggactccccatttgggtgagagatgtcaggttcctgaagggtgagaggcttgtgtgcagtcttccagcctgagtcgggcctacagcctgttgaaaaacttgtgcacgttcacttgggccttggatctacgtgacaggattgagtagctggtcatgccaggcctacctgattgccaaaggatttgaacattccttgatgccagcctgccagttgtcacgctgtggatgggtaggtcatcctggcaggagggctcttgggagactcttcttttggaggaaggcctttctcccgaggagagacaaaaggggagctacaggagcagcatctgtaagactcaggcggctgggtgcggtggctcac

SEQ ID NO: 2588 - DNA, 1038 bp, Homo sapiens
aacagagcgagactcaatctcaaaaaaaaaaaaaaaaggctcaggcaatggcttagagtgttttgttcagccttgcaaatggtgcggactatgcagaatcgtaatgatttggggcctaatgttgagcaactcaaaggaaaagtgaaccaggcagaatgggcacctccctcagagccagtgtgttatctaagacaaagtttttcaacctgtggactaatgacattttggacccataattcttcgttgtgggagacctggcctatacattgtaggatgtgtagcagtatccctggcttctgtctactagactagcaccgctccccaccccttctagccgttgtgaccatcaaaagtgtttccagacattgccacgtgtcccctggagggcaaaatctcccttgattgagaaccactgaggtaaaactctaaaaagagttgtcctgtgctgccaggggtccctctgggacctgcccgtgagtaggtgagaggtttaggcaaagggtagtgttatgcctcctgccctaacccagtggtaaaagccatgtagattgggctacctgtgcacctaggagggcagaggcaaaacctgcaagcagaaagttaggaggtagacacccatgggcatgtactgtgcctgctaaatgtgtggcagtgactggctgggttgggggtgctggagaattagaagactggtagcttctcggggatactgcaagactaggggatttgcacatgaataactatgggccagttttaaaataggaaacatgcttaagctgagtgctggcacaaaggctaactcagctatccacaagtggttcttcaaggagatgctttattcatcctcactttttgctcagacagctctgtgtcttgtgatgtgggaggggctgggcctgcatcttcagggagtgagtggctgggtgcatttcaaacatacgtatgtgtatttttacacagcagcgtggacatgggtatgatttgtggagttcttttgtagttgcttgaagcatcagtgtcaaggtcagtgaacctttt

SEQ ID NO: 2589 - DNA, 1047 bp, Homo sapiens
caggaggagggaggagagctgtacagaaagttggcattggacaacccctcccagccccccaggcctgtcccttcatgagcagtacttaggggccaccctggcctggataatacagtaccaggtggcttgcctttctctggcttcacctgggggcctgtgggtgttgggcagctctgtgtctggcgaggtgagcccatttctcagggtcaggagcagaactataatgggggggtccttgccccaacacgagccttattggggtgttctcattcaactctggtgaccttccaaatttcctgggacagctgtggtttttactcttgccctagaatatgagtcgacaaatagtaaatattttgggctttatgggtcatagatctttcttgcaactgctgaactttgctgttgtagccaaaaaagaaaaaaaaaagaaagcagctagggacaatacatatgtaaacgaatgagctatacgtaatctataaatgggtgagcaggctgtgttccaataaaactttattgacaaaaaagcaagcagtaggactggatttggcttgaggaccatggtttgctaacccctgccctggaaggacactaattatgtgtcttaatttttgttgcaaaagatgtggtcactgcacctactacccagttctaaactaggatcctgtttttttgaggatcgggggtaagcaccctttcattatttccgtcttttaacccagaggccaacattagggaaggcaggcagacccgctgcttgttccaagtgatttttttccccactgtcccgagaagggcagttgagcctctctctccaaattggaggtgccactttccatccgcctggtggcctgttaggagcagttgtcttctgatgaaggacagtggctaaacaaggagaggcaatgtttatgccattccaatctgctgcctaacccttgcccgttctgctatggacaagcacttaggggatggggaatacatttgtgtgcttgcttactttttaaaattttaataaaagatatttaagattatttttatttt

SEQ ID NO: 2590 - DNA, 1048 bp, Homo sapiens
agccctgggagaggtcagtgaacttgtgttgaaggaacctccggttgactttttattttggtttcatgcctggctagtggacactcccaaacatgagcacctgtctcccacccccactgctttatcatttatggtcactcttttggctgcccctcctcagaggagagcaggcaggcacacggaggccttcaggaggctgctgtaccaaggaggcacagagcccaaacacttcatttcagttactcacaggcgagacccccaaaacgtgctcatggagcagcaggaagaagtagggtaggtgggagactggtgttcctagcgagggcctggtacttgcagatgaagtcacggtgctgataggatttttaacttgtgtattacatggtttgagggcttttatttctttaaaatcatgatgaaaatacctcctggtgtagctgtgtgcctggttcttggtacacccctggaagggatttgcagcgaaattgtgggatcgttgaattatgaggcactttgggattgtggtgcattagaagtaggattttaagacctaagttttgaaaacagaaggtgagaaaagttctggacagatgtttccttctggtagttattccccttccctcctttctacttctgtgagagcgtagactcccttgcagaaaaatacctggtcttaagctggcatggtggtgcaggcctgtaattccagctgcttgagagcctgaggtgggaggatcagttgagccttggaatttgaggctgtagggtgccatgattatgcctgtgaacagccttgacactccagcccgggcaacatagtgagacccctctcttaaaaaaaaaaaaagtacctgatgttgatgaggtgtgaagggttcactttgcatggtaaggggaggtgtgggtgtggcccctaaacagtaggtcagcgatatttgtcaaaggggggtgggtacaggctgtggttttgaaatgagtctacatgttagtctgctcacaaatgacagactgtgtttattagcagcatctgtttattagcagtctgtgt

SEQ ID NO: 2591 - DNA, 1067 bp, Homo sapiens
tctgctatgattgtggatttacctacttttagtctattgacttgtgctttatatggtttgaagctatgttatttgttgcctacagattcagaattctttttttttgtttgagacagagtcttgctctgtcgcccaggctggagtgcagtggcacaatcttggctcactgcaacttctgcctcctgggttcaagtgattctcctgcctcagcctcccgagtagctgagactacacgtgcgtgataagtctcgatctcctgacctcatgatccgcccgcctcggcctcctaaagtgctaggattacaggcgtgagccaccgcgcccggccagatttagaattcttcttatatcctcctagggattgacccttcattcttatgttatgcctcttttcatctctgtgaaagtcctcattgtctgatattactatagctacattccagctttgttttgggtaatgtttgcatgttaccttttttttttcccctgtactttcaacttttaaaatgtccttatgtttaatgcatatctatgagcagcatatatagttggttttttgtgtgttttaagtgtagactgataatcttacaatgagaatatttagtccatttacatttaaatgcaattgtggatgtattggagtttatatctactaccttagtttttgtttgtttactatttgacctgtctgttatgtccccctttttctcacctgttttgccttcttttaaattaatcaaggacttaaaattatagtcatgcgtctctctttttttttggagacagtctcgctcggtcacccaggctggagtgcagcggcgtgatctcggctcacagcaacctcaggcaattcccatgcctcagccactcgaatagctggaattacaggtgtgtgctgccatgcccggctaatttttgtagttttagcggagacagggttttgccatgttggccaggctgttcttgaactcctggcctcaagtgatccacctgcctcaaccttccaaagtgctgggattaaaggcatgagccaccgcacctggccctcatgtgtgtcttaacaagga

SEQ ID NO: 2592 - DNA, 1045 bp, Homo sapiens
gctgggcgtggtggtgggtacctgtaatcccagctacttgggaggctgaggcaggagaatcacttgaactggggaggtggaggttgcagtgagccaagatggcggcgttgcactccagcctggatgacagctccatctcaaaaagaaaaagaaaaaaaagaaaaaagagaatatatcatcatactttatttttttaaggtatttttgctgggtagaatattcgatgttgaaaatgtgtttcctttgatcactttaataatattcctctattgttttcttactttgattgtttttttgaaaatgtggctatcagttatattgctgcttctttgaaagttatgtcttatttcttttctctggctgcttttacgatttcctttttgtttttgttctctagcagtttgactgtgacatgcttgagtgtggtttgctttgtatttattctgcttggggtttacagagcatcttgaactgtggcttccatcagttttggaaaattttgatcatttcttcaaatactgtatctgtactattctctcctctctttctgggactccaattacacatatgttagatcttttccctctgtcccctgtgtctcctttgctcttttctgtattttccatgcctttttccatttatccttcagtcttgcaggtttagaggagatgacttatctcctctgtacctatacattgagaaatggacacctacagaagtgagactttaatggatagaggaggcactagagaagacttgccagaaggagttgagcactgctttgtgcatagctctgtggtggttcctggggccttcacacaggaacttacaatccacatcattaaggcagaaggggagagaggaaaaggggagagaggaagacaggaaacaaaaagtaaagaaagaggaagcaataatattatttgattctgtgtagaaaggattttgaaatttgacctgtgaaaacaaggagatgctcatatgagaaaaagcaggtcagtgggccaggaatgaagagtagagggaatggacctttgggtatcct

SEQ ID NO: 2593 - DNA, 1026 bp, Homo sapiens
gtgggcctgggcttcggggcactggcagaggtcgccaagaagagcctgcgctccgaggacccctcaggtgagccgggcccttcagtgggaggggcagggtgggccccgggagggttgagcctgtcagcccccagccccacctgtgctctgggagtgtcagccagctgggccgcatttgcatggggttccacgtaagtggcgtccctggggtgatgaggctgttcatacagacagattgacctgctttagagggggtgaggctggaggcccttcctcctcccagcccaaagtggccacccagccccttctttttggctgcctgcacatccacacgccttctgcacacctggacaccttacacaccccctgcacacccactgaacacccacacacaacccctgcacacccaccgaacacccgcagaccttaccccttccacacccagcgaacacgcgcacaccttacacaccccttgcccacccaccaaacacccgcaccttacataccccttgcacacccactgaacacccacacacctccttatacctcctgcacacccaccgaacacccacagaccttacacaccccttgcacacccaccgaacacccgcacaccttacccctgcacacccaccgaacacccgcacacgtcacacaccccctgcacacccaccaaacacccacacatcttaccctccacacacccacgcacctttttacatcctccacacacccacctcatacctgcacacctccttacacaccctctacacacccaccacacacacctgcttacacagcctccgcacccactgaacacccgcacacctccttacacaccctccacccacccaccacacacctgcacacctctttatcctccacccaccctccacccacccgaacacctccttacacaccctccacataccctccaaacacccgcacaccttgcacaccctccacacacccacctctcacccacacacctccttacacaccctccacacccaccaaatacctgca

SEQ ID NO: 2594 - DNA, 1055 bp, Homo sapiens
cccgtgggcagacacacggctgctgggtgtgtcttgggtggactctggcaggctcagacacgcatggtgggaggccctgccagcttaggcccacggactctgttctttttggccagaacagtgttttgttaaaactctgtatgagtgccacgaggcgggacgcatcctctgcactctgccacaggccccgccactcccttttgtatcacatcagcccagtccatgttaccctcgtgttcccggcccctgtgggtttgagtttatgcccattaccatgatgtaatccagtttacagcagagctttgaatgagaactcagcgccccgggcactgtgggaggaacccgggctggtggagggctctggtgtctcgccgccatttatccttcctctcttgccccaggtcatggaagacgcccacttggatgccatcctcatcctgggggaggccttcgcctctgatgagccttttgattttggcactcagagcaccaccgagaagatccacaacctgattcccgtcatgctgaggcaccgtctcgtccccccacccgaggaaacctactccctgcacaggaagatggggggctccttcctcatctgctccaagctgaaggcccgcttcccctgcaaggccatgttcgaggaggcctacagcaactactgcaagaggcaggcccagcagtagggctgcgggccacgcccaggccggctccgcgggaactctctccctcagacaggccaaaaaccagtagcgaggtcgtggtgatgctctttttaactcctttgcccaataaggggggtggctgcctggagccccgtagccagcgctttccacggtttctgttgctaaatggttgtagggtgagaagtgcaagaatgaagatgaagccccactgctcggtcagtctgcctccgtgtgtcctctgaaataagcagatgaagatgaaagggcaactttgttttcttctttttcctgatgtgaatgttaagcagaagggagagagtccttactcccttccaatctctgttcagtgcaaaacccagaaacatgaac

SEQ ID NO: 2595 - DNA, 1048 bp, Homo sapiens
tgagacatggggcatgagaacatggcaaatcatggcttgattttcccagggtctgtgtcttcgtgtccctaacatctagtgaagggctggacaccacacaacaaaaaaatatttgttactgtaggctttggcggttactcataaggacaaaacactaaaccataggctagaagttagattctgagtgcattaactcctgacactccaagtgggcctttttacagagggaaaaaaaaaaaaagaggcccagaggttaagtggcagaatgaggatttggaacaagacagtctagtcttacagtctacactaaggggaccaaacgaagggctggcaaactatgatggtccaagggccaaatctggcccactgcatttttgtaagttttattggggcacagccactctcgtttatgtacgtagcaggctaagactgtttttgcactgaaatgccagagccggggagctgcagcaaactatatacacaaaggcacaaggatttcttaactggtcctggacagaaaagggttgccaagccctgttctaaagcactgcacagctgacactacagtaaaccaacataacagtatcagccacaaatgtcaattccatgggccattggaaccggaagtattctccgaataactacttagctgccaccagttcaggagttcctttaaccccacccctggaccttccctgtatgttcttagatgaaccattctaactccagaaaagcagtaacagtccgtcttgtttaagtgacacaaaatcaaactgctcccacattcacactgtcagggccactcaggaaacctcacgcagccagggtttggtcttgtggaccgaagtaacagcaacagcgaagttctggccagaagaggggagttgaaagcttcaggagaattgaacatcattcttacccgagctaaggaagaaattaagaaagtcctagattaaaccacaggggcaaactaaccccatgtccttttacggcataaagaagcagcctggatgaggaaggaggccagcagaaagaagagaagtgacag

SEQ ID NO: 2596 - DNA, 1032 bp, Homo sapiens
ccacgtgtgaatgaagtctcaggctttgtgaggagaaagagcagctccacaggcagctaattgtctccagagctccaaatctgttcctcccacgtcatgatgggcatggggcggggggaatgttgcattgttttcagaggaatcaggtacaatccctggaaggatgaatctattttgctactttctgttgccaggttgggggaagtgctaggtggttcgcctttatttgtatggggtactcagatgccctgccactgtgttacttgttttactaccatagaatgagggttcactttcaaacttggcatgtagatgctatttgccaccagcacagaggaggactgctgacttgggacagtgtacttggcagcctcaggtgtatctggccaccccagtgtgacccactgggcccgactccaggtgctgtagtcctgctagtatgtagggagtcatctgattcctcacccgccattgctcatgggctccagggtcttggcaccccaacccagcccccttctgctgcttcatgccagctgtgggaagatgtggactggtgccttgtccacttgagctcttgtgggtgctccaggtctgttgacaaagcagtaagtggcagccactaaccttgagcttctaggatgtattcagtggacttcaagtgcctcttagaagcctgattccattaactcccccaaaacttaatgcaatttgaggctacttctcattctcatcttagtgttacacaaccattaatctccattctatctgtagacattcactttctggacatgtcttgtataattggaaccatacattatcagtcttttgcttctggtttctattagtttgtttgaggttcatatctgttgtagcatgtagcattatttaattcattttgatggccaaataggattccaatataaaatgtacttaactgtttttccttatattaactggttgacattttgacatttgagtatttccatttttcatatttggttataacaaacaatgttccagtgagtctttgtg

SEQ ID NO: 2597 - DNA, 1042 bp, Homo sapiens
gcagttactgccctcaggacagttgatgatcttgtgatcatcaaacctgtatgagtcctcagacttgccctcaggtaaatttgaataaaacaaagacacgtaaaaactggactcttgacaagaattaaggtattccaaattagaatttataagccacataggaaatcaaccaccagaataaaggttcagaaaaactagatatttccaaaacgtcaaatactaaaatttttaaaatatttaaatgtatataaaggaaaaaatgggaaattgaagtgatatgtaaagatcaaggagcaacaaactttataagccatacttggaaaagaactaaaccaaatataaacatttgaaaaataaaataaagttaatatacaatgcacagtcaaaacattaatgcataaagatcaaggaaaaacaaactttataagccatatttggaaaagaactaaaccaaatataaacatttgaaaaatataataaagttaatatacaatgcacaggcaaaacataaaaataagttaatgagaggattagtgaactgtaagatttagctgccaaaatgcattacagaggaacgatgaaatagaaatatgaatacagatggctagtacctattagttatttatttaaatcctctcgctcctccaattctccaccctccaataggccccaatgtgtgttgctcccctctgttttaaaatacgtagatacttcataacaataggtttattgaatgctgattttaccataaaatttgtgacgattcaataactacattaaaatttacttgtaactttttgtgaatatatattttaatccaacatcaatatttgaaacctttaaacagcaaaaatactaacaggattatctttgaaaatggaacaccatttccttcacttttttttttttctctttgagacagagcctcactccgtcacccaggctggagtgcagtggcaagatctcggctcactgcaacctctgcctcccaggttcaagcgattttcctgcctcagcctcctgagtagctgggactacaggc

SEQ ID NO: 2598 - DNA, 1025 bp, Homo sapiens
gggacagatcaatacatgcttcttactattaatataatcacattcttgcaatgagggaacctccaggcttggctcaggtatggttcaccctatctatggagctttactacaccttcctccttccaattagaaccagcccctctatgtactacagctctcctgagccttcacacacattcataatagtggcagcatgttctgacacttaaaaattcctgaaataatcttagtgtttattgtttacttctttatatatttgctcctatgggttctgtgtacttcaccactatattcccaataccaagcatagtgatgcccttggcaggtgctcagtaagtaactatttaatcagtgaataatagcactgtctatggaaggaatgcagaaagtagtaggttagagcaaaccttagctcagccattcactattaaggtgaccttgggcaagtccctgattttttctcccttcagttacctcatctgtgacatggggaataactaaacttacctgacaggtttgttggcaagaacttaataagtaaaaattaccaaagagcttcaaagcactggctggtatagtgaaaatgttccatacatgtgaactattgacagtatcatttcactggtcgttgaaattttttttatccttcctttcactcaacattaagccctgaattttctctcactttgttgcatatacataaaccatttttgagttatgttcaatattttatactaaaattatttaaaatgttaataattaaatactattagttgataattacttttcctatatgctgcataacttttgtagtacagaaatgtttatttttgaggtaatctactttattaacctttttcaatcatactttttgtactttttatccagtttataaagagcttttattctccgtggaaatgaacatagtcttactgtcaggtaataatactaactgcagcattcttttgcatattctctccaatcatctggaagatttgaggtaataatctcattttatatatttt

SEQ ID NO: 2599 - DNA, 1052 bp, Homo sapiens
aagcatacttggagtctgtatatatatttactccttttccttctcctgtgttctagtgcccaagtgagggctattaattctgccagctgagtgctagtttctggagtgaggggattactttcaagtattccattatcactggccactgcataccccgcctttcgaagtcctttttctacaaaggaacttccatcagtatacaagttgagctcaggatccgtcaagggaacctctagaaggtcccctcgagcggtgtaggtttgaacaatcacttgttgacagttatgttctatcttttcttcattgtctggaagaaatgtgggtgggttaagagttgcacaagtgcacagtggcagcactggcccttcaagtgatagagcctgatatttaagcaaatggttgtctgacagccacagtctcctttagcagtgagtatgccgttcacatcatgagatgtccacacagtaagatctcttccctgtatcattttaactgcttcagatgctaagactgctactgctgccactacctgtaaacaatgagtccaaccctttgccactacatcagtttccttactcaggtatgccatgtgttgtaagctggtccctcggacctgtgtaaggacttctagagctattcctgtttttttttctgtgacatataaagaaaagtcttgctccattggcaagcttaacactggggcttggattagggccttctttagggcctggaaagccgcttctgcttcaggtgtccattctactaaatgggtattggctttctgagttcccgtaattagtgtgtataatggcctggctatttcattgtacctgggaatccatattcaacagcagccttttatgccaaggaaccctcttaattgcttcagggttttgggatgaggataagccagtataggctggatacgttcctcactgagggccctggtgcctttggataattttagccctaagtatttaacctgctgtaagcagagctgagcctctggtttggaaaccttgtagccacaggtggcgaggaagtttaagagc

SEQ ID NO: 2600 - DNA, 1069 bp, Homo sapiens
gcgaaggagagaacccagagcctaaaatatcccactagttctagaaaagagaaaatttcttgcttggtttgcggaggcaggagagactggaggagggatgtgcggtcagttgtgagccctcgggttcacgggctaagagctaggcctagataggtgactgagggggtgcatatttttgctttcttaggggagacccaatacccctgttctgtcaagaagtttaaaagagatagtatgggtgtcgaagtctctttgggaggggctacacaggagcagattgttaacatattgaaggagagtggacggttttagggataaggtagagaggtcgtgagcaagggcctgtccaaaaaggtgggggctgtctctgaaacattgaggtggtagtacacaccaggtgagctgacgtgaaaggtgggtgtcggggttttcccaagtaaaggcaaagaggtttggggaattagagtgtaaaggaattgtgaaaaaaagcatcttttatgtttagaatagaaaaatgggtggtattggagggaattgcggaaagtgaagtatatgggtcaggaactactagacagcttggttaatgagcctgaggtcctgaactaagcgataagttcctggctttttaacagatagaactggtgtgttaaaaggggattttgttgggcagagtaggtgactagcaaggaggtgagaaacgataggctttaggcctacaagagctgcttgggggatgggatactgcttctgtgatagaaactgggtgggctctttaagggtaatgcagacggtggtgtggtgttttgcgcctaaacagcggggttgactacagatgggggataaggaaaagttgcatgttttaaggtgggaggttggaggagtagaagaaagttagaagtaccacaggggtctaggtggatgtcttgggtactatgggaaatgtggaagtagggagtaatgtggagttttgaaaggatgtctctgcttaggagcagagttgggcatgagggcagaactaagaaagagtgagtgaaggaaaaggttacgtgtagggagcagaagagtggag

SEQ ID NO: 2601 - DNA, 1047 bp, Homo sapiens
atggggtctgtctttggtgggcttattaccaggggcttgtgtgcttgtgaattctgtcttattccttggccaactgagttgccttcagcactttgatctatagggcagacacttggcctaataccaagtgtttgtatgtgtgtggctctcacccagtacttgtgaggtttttaccaagtcacaggtctctaggttggcaagactgtccacagaatgtagcttaaaggtctagaactgagttattcacctgcttcagagaccacagtaaatgtcaaggtctgcagttctgcatctatggccgtgaatgagcatctgaccccagctctctgactgggtaggacctcttcttgactatggctgggaggagttaatgacagttacagtgttacttcagaattctaagtggaatcatgttaaatgggccatttcctcgtctgtagccaagaccagcgtcctcaagtttgccacctgaaggaagacttgctttctgaaaaaggctttccttggtcttgtgcttttagcagggtattacaaccccctgcctgaatcacaaagcaatcataaatgtactttttgtgtgacagggtcttgctatgttacccaggctggtctcaaacacctggcctgaagtaatccttctgcctcaccctctcaaatagctggaattacaaatatgaggtatggtgcccggctctgtcacaaaggcacttatgtccatagatgactgataaatttttgttgctttgggagatatacaagaagaggacctcctgttccaacaacttgctgattttactcttcctatatggtttcactttccatttagttttctctttgcatttcaaatttgtgtggaattttttaataaacatatatatttgggaaacctagtggggaaggtatgttcttagtaaatcttatatgtattcatgagtgcttataaattatatatgttcccaataaatgaacacttttattattacttgatgctcatattttctcttgtgacaattttggcttaaagtatactttgtgaaatataacagt

SEQ ID NO: 2602 - DNA, 1056 bp, Homo sapiens
ttgaaatttttaatatagtgaaaaattggatttaactggagagtttgaggacatttttaagttagaaatgcaccatttgaatcatttaattggcataattgggatgtactctacacagtttataggattaaattactgagttagtaatgtttgtatgaaagaaatgttattagattctaccacaaaatatagtaaacatgaaatcagttagaataggtaaagcattaataatggtaggctatatatcataatcactatataaagaaacatcagaatttggaaaccccttaagcaaaaatatatcttagaaatcttaaggacacttaatggcaagcaaaaaagtttaaatttagttttttataaattacatatagcacaatttatgtgtacatgtagaatcttttagtttttagtgtttatgtaatatattagacaataataaacatttacatttatgtttacatttatatttaatttttcaaatttaatttaaatttctaaatgcttctgtggatttaaattttggaataatcttttcttccccattgatactggaatcttgggaagtttcttactcatatcacaatatgttttatttaaatggatgcagcttacattgcagagtttatataaataatcacataacaagccaattccttagtcattttctgtattaaaaaactcagagatctagagagcttttggattgaaatatttccttggtgattttggatgcaaacctgatttctgtgttcacaccatggccagagatgggactgttagcaccacctgcttctttaatgtcgtccatatgatcagcatcagcaccagaaactccaggtgtcccaaacttaaagtgaaagccatagagtcctttggtgactcccatgttctgtgctggttctagaacatgctggtaaatatcagagtttctatgcttatggctgataagtagacatttttaaaaatcataaaaactgtattttctatatagttcagctaagtttatgaaaaagatgcagactcagtatttggagcattgctatcgctccatga

SEQ ID NO: 2603 - DNA, 1076 bp, Homo sapiens
ttgattttgtatcctgcaactttagtgaatttattctaagtatttttaaagttttctatttataagactatgatatctgcaaacagggacaattattttctttctttccaatttggttgtctttggttttgttttctaatttctctggcctggaaattcagtagcatgttaaataagagtgatgaagttagatatatttgccttactataactcttagaaaaaaggcttacaacttttgaaggtttagcatgatgtcagatgtccatttgtcatatatggcctttattggcttgaggtatgtatgttctatatgtaatttgttttgagattttgtcataaagtaatgttgaattttctaaaattctttttctgcattcacttaaaagttataattggttctgagatccttcatctttctcagaatctaggaggatgcatctgtacctagaggaggacacaaaggcatcatatgttacattctcgtgacatataatgtctactgcttataatgtctactgtgagtttctgactccccaaatgaaattgaggcccagaaactttcaactgctttgttcgttgaataatgccaagtgtctggaaatgtgactattcagattaaatgcttaatgtgtgtgtgttgactaaataaatctcaaccagaaccttctcagatattttgttgaacgtgggacctttgtttttttttgttgttttgttttgttttgtttttgttgttgttgttgttgttgtttaccagcaggggacccctgttttgtctatgtcaagaacaaagaccaggcaaaagaaatgtcaagccgcatttacaaatgcaaaaatggacttgtttttgatatgcttttcccaacaataagggacatgagtcattggggcatgttacagagagtttcagtaaaattcagaaaaaaataataaatatgaacagccacagcatgcccagaagcctttttatggagccaggcatggttgacctgctttccatgtctcaaaacattagtccctacaagaaccctatgaggtttatcttcttttcacccattttgagagaagaaaagtt

SEQ ID NO: 2604 - DNA, 1026 bp, Homo sapiens
aaagagccttggagaagttttatttttttctgtttggaaagaatacacagagcaagatgatttacaataaaccttttgacctaacgcacatacttgttttctttaacattaaggggagtcttaagaaacagctacagcagtttctcacctggcaaagacaaatgctgggaaactgcagggccaaggatgtgagcagatgacgcagggaagagaaaccccaaataagtattaaatgactgaaaggtgactcaaacttatctgttaaacaactggaaatgcaaggaattacatgagtttctttgtcacacagacaccagattggcaaaaaattaagtcttaacattcaagggaggctggatgtagggaaccagcgatattgagagactgctggggacactatacttgccacagcccttttggaaagtaatctggctatacctattaaagttttacccatgcatattctttcaccaagttacccctttctgcaggtgattactatatattatgggctgaattgcattttctcccaaaaatgtatgtgttcccatgttttaatagtcagtgcctcagaatgggaatatatttggacatatgatttttatagaggtaattaaggttaagtgagtttattggagtgagccctaatccaatatgactggggtctttataagaagtgatggtaaagatacagaaacagaagatcctgtgaacacagcaatggaagacagcaatctactagtcaaggaaaatggcctcagaaaaaacaccccagccatagcttgatgtcaggttcctagcctccaaaattgtgagaaaaaatatctgttattaaagccttgagtttgtgatgctgtattatgacagcgtagcaaactgttatagtttgttaagacacatacaatatgtttcctgcagcacgactgaagtggaaataaaatgtcttcatgccagtttccaccagcattgaaaggctgaaccactgtgggaaacagctttgattatgaaataacataaagacgtgat

SEQ ID NO: 2605 - DNA, 1347 bp, Homo sapiens
ataattgctttccatttcctcagctttaagatgtcaaaatatgaattagacaattatgtcatgactaagcctgagcatattttgtgtatgtaaagctattaatattttttgtgaactacaacatatcttttgccaatttttctattttgtggattatctttttctagtcaataatcttgtgattattatttaatccagggtcccgttatcctctaggcaactgctctctcctgggagggtgtgcctggtcaggtttgcctcaccttttgtagctaccctatcctgtatgccgtttggctgtggttttcttcttcaatccaatcctatctacatttcatgttttaatgatttttcctgacttctagtttagtgaggatacatcttaattttcagagtgagttattctttctaagaatttgtggtaaagaaaggttgccacagatgacctgtcagccatcttaaatcaaaagatcagaagttatctgacgtatattgcattatttagtctgatacttctgaaatggtaaatgcttctctttggcaagagagaacacaggaatattggaggatttgcctcattaatgtatactcatcttggcataattgtgctagactgattattaagctaaagagggtaaacaaaaaagggagcccaaacaggtaaaaagtctaccttcaaatcactgacagtattatctaatggaattttactaaaggccccatcctggcttttgagctgcattaatctattgtgtctggatactatttacatattcatatgagtcattttttaagttgtgaaacttctatagtcagcgttcactaatgagtcctctgggaactaaactgttttttaacaagcttaactgaggtaactggaatcaaacaggccataaattacacagggtagccttgacttgtggcttaggggaagtatttttctaagtttcttatgctcagtgacagatatgtgcccttgcagcttctccttgagtaggccttgctgcagttcgacaggggatatcctgctcatgaactgtggggttgaaaagcatcccttgctcactgtaaagggtccacgctctctcctttttcttttcttttctttcttgcttttttttttttttttttttgaggtagagttttgctgtttttgcccaggctggagtgcaatggcaggatcttggctcactccaacctccgcctcccgggttcaagcaaatctcctccctcagcatcccaagtagctgggattacgggcatgcgccaccacagccggctaattttttgtatttttagtagagatggggtttcaccatattggtcagctggtcttgaactccagac

SEQ ID NO: 2606 - DNA, 1052 bp, Homo sapiens
cctaagatggtgtgtgtggggctgaggtatcacccatgggctgtttactgggaccctcagttcctcgtcctggggtcctgtctggagcgtgagtcttggggggctgctttctggctcaggtagaaagtttactccctctgccctcaggttccatccagtccctcttctgggatccgggggtgcccacttgggtgggtccatctgggagccgaggatctcccagtgcagtgccacatggacttgtgcctgcgtgttgctggttcttcctacctctgctgggagggtgctggtactccctcctcatcaccccatagggctctggcaccctaattgcatggtctctcagcatgccgctgctggcatactatccaccttcctggatttgccagtctgcccgcttttcagtgtcaggctgccactatatttgtctgtttcctttgtctttggagaagtgtgtgttgagtttgccgtccttctctattgctctctaccccttttttaaggacacgtccttgagagcctgtgtgtgtgtctgtgtgtgtctgtgtgtcgtctgtatgtgtatgtgtgtctgtgtgtttctgtttgtgtctgtgtgtatttgtgtgtgtcatctgtgtgtgtgtgtttcagtacacatagctcaggtttttacatgctttcaattacttttattatttcttgaaaagtcattttgaagcgtgttgtttctcgttttgtgattgttcggaggaaagtgagaacttcctcctagcacccacagctgcagtgggcagaacctctgtgtccctggaatcccgccttggcattggccactgtccctcagccctaagctggggtcatattggtgcatcagtattgcatgcaggttagttggactgaggtcacatcttgtacttgactaagaggagatcctttcagtcagagctttgctggcacaaggccggagccggaagatgacagagcccccgacaatcccagctcttctgtgtagatggcaggtgtgtgttttgccctagtcagagtctgcagggggccagcagctggagccc

SEQ ID NO: 2607 - DNA, 1084 bp, Homo sapiens
gttttggtttcctctttaggttgtgagcccattctgagttaatgtttgtgtgcggagtgaggtgaggacccagatttattcttctgtgtgtccagatcgagttttcccaacaccatctggtaaaccagctgttctttccccattgaatggtcttgacacccttgttgaaaatccgttagccatagataatatgagtttatctctggtttctcacttaattccattttgcagtctaatgtcactgttttgattactgtagctttgtcataaggttttttgtattttttattttgagacagggtctcactctgtctcccaggctggagtgcagtggcatgatctcggttcactgcaatctccgcctcccaggctcaggtgattctcccacctcagcctcccaagtaattgggactataggtgtgcaccaccacgtccagctaattttttttttttttttttttttttgtagacatggagtctccctatgttgcccaggctggtcttgaactcctgggctcaagcagccttcccttctcagcctcccaaagtgctgagattatgggcatgagccactgtgcctggccaaaaaaaagtttcaaaagtaaaaaataaaataagttaaaaagagaaaacagcatataggataagaatataaagaaaaattattctggcacggctatatagtgtttgtgtttgaaattttattacagaagagtcagagttaaagaaaatcgtagtttgtaatatacaaaagttacaggaagctaaggctcacctgttattgaagaaagactttttaaaataaatttagtggagccttagtgcgcagtgttgataaagtccacagtagtgttcagtcatgcctaagccttcacgctcactcaccacacacccagggccgcgtccagtcctgccagccctgctcacgggaagcgctctacactgcgtgccatttcgtatctttatgctgcacatttacggcaccttctccacgtttagatgtgcaggtagttagcgtggtgctccagctacttgtgctgcttggtgctgtggtgtgccatgcaggcctgcagcttgggggggt

SEQ ID NO: 2608 - DNA, 1072 bp, Homo sapiens
taggtagtgtaaccttcatggcggcttgctaggactgtatataaaagaagaatatgatgtatgtttaataattattggcattgatgtatgtcaaatggtactctatgtctattgggttcagtacagtattttatttgttttccctatcatttttacctttgaacatctgggtcagggttagacagatttaatacagcttattcagctactcttagtgtcatcctgccaaagacactccagtcagagagccagagcaggtcctggcccagcctcccttggatgtcccagggccctgccaccatctgtaaggggtataggacttctggcggtgacccgggatgtggtctgggtcatgccccacagcatctctatgtgcaatgagtgtatcctcaggaccgggggcaggtcaccctctctgtgaaacagataaaatgtgccacgttcttagaacaatgtcagcttacattgcatatccaataactcagctttcattcaggatagctataggatggtaaaaacagaagacaaagttgtgtatgtactttaatcccaaatttgagttattcgcaagagtgtatggacatagcgacgggggaaaaagccagataggagtgtgcttgtgtcactgatggtgccagcctaacagtggtctgtattatgggcagattttgttttattccttaacttctctcatgtttcctggttttctacatgcagttattaacagaaaagacaaatagtggtgtctcctgatagcactgcacgccatggtcatggagagggcagagctgatgcaggggctagtgggaggcattggagctgtgggtcctggcaggggccttgggccatctccccagccgtcagctcatgggagccctgtggccctgaaggacatttaaattctaaatacacttaaatcacattttagtatggttgacgagggacatagggactgagaccagatcccgagcggatccatgtccctggcttccaggaggcctcctcacaggatgtgggcacagggacagtgtgagtgtgcagcccagccatcccttccaagggctgtgcctgc

SEQ ID NO: 2609 - DNA, 1050 bp, Homo sapiens
ggggtctcctctgtccctgacccctcgctgttctcaggacttcacagtgtgggtggggtctcccctgtccctgacctctcactgtcagcaagtccttgcaatatcaggtgaggccttttgtgtcacttgaccattccttgtccactggacctcaaaactaacatgatatacagtagtaagaatgtagaaactttcccactaaaatcacgaccaaggcccatacatccgctctcaccatctcctttcagcactttaagctctaacagatggaacaaggcaagaaaaggaagttaaagtttaatgatactgaaagaagaaacaaactctctttgttcacaaatgacattttccaggtagaaagtgtaaaaagggatcaagaaaatcccctagaataatgaacaactattcaagatttcaaaatatacaaaagttaatcactttcctatataccaacaatggatgagtggatttgaagttaaaaacaaagtacttctactttagcacccccaaacaataaaatacttaggtacaagtctaaaaaaagtgtactctttctatatatatgagaaaaactacaaaaccctgatgaacaaaagaagaaccaaataaatggagaaaaattccatgtttatggataagaagactcagtattttcaacatgtttgttccttccagcttgatctatagattcaatgcaatttcaatcaaaatccctgcaagttattttgtggatattaacagatgatcctaaagtttttatggagaggcaaaagacccagaataatcaattcaatactgaaggagaggagcagagttggaggactgacgctacctgactagaagacttactacaaagctgcagttaccaaaccagtgtgttattggtaaaaggagagacaaataatagaacagattaggggacccagaaatagacccatataaatatagtcaactcatcttctgagaagattcaaaggcaccacaatgcagaaaatggtcccacaatggtgctgggacaactagatgtccgcatgtgcaaaagaaatcaaa

SEQ ID NO: 2610 - DNA, 1011 bp, Homo sapiens
tctgcatgagggcagtgatcaaagcattatttacaatagtaaaaagttataagcattgtaaatgtcccccaggagaacatctgccttcaaataatgtttccaagaaactttaactgtttaaagacatgaggaaatgtctggtggaagacggcagtttaacctgtttacactcactggtttcttcttcctttgaagatctcactaaaataatcatgaatgaatgaaaacatagaagacccatagggacaagttgatcaggagaagctcactcaagagattacaacaaatctttgaaagaaaaaaaaacagagaagaggtaactgataagtcacggcagagagagctacaagaggacggatggcagggtctctgggtagcaacctgggactctgctgagggccaccagggctgggatgaggatggagtggaaaacaagaggacgggttaagcagctgtattgtaagacttctactccagctaagattaagtaaaaaggatcaaatttaccctccctcctgaaacaactgaaaaatctagacaaaatggatggaaccacaatttccaacattagccaacaggcagcacaggataacaggccctaagaggggacagagcgaggtgggtccaggcaggggccagtagtctccctgaggagatagagccagagtcccagagcctgttctgggctgagtcctgacactttcctacccccaaaatccatatgttgaagtcctaactcccagtactttagaatgtgaccagatttgaaaacagggtctttaaagaggtgattgagctaaaatgaggccacaagggggtccctaatccaatctgactgacgtccctataagaagaggaagtctgtacacacagacaccaggctgcgtgtgcacagaggaaaggccatgtgaggacatagcaaggaagtggcatctgcaagccacaaggagaggcctcaggagaaaccagccctgcccataccttgacctcagaattctggcctcctgaact

SEQ ID NO: 2611 - DNA, 1050 bp, Homo sapiens
tgttggagtgggcagttgtagttcttgtttcagaactagtggtcagcagttttctttgccggctgttgcaaggctggtggttctggcgttttccgcagtgtgttgggaggagtgtgagatgccgcggtgcagttgtgtgcggcccctgtggccctctgctgttgcgttagccattgtctaacacgtgtgaccgcatggatggtgtcctcatttaatttgaattttcaccagcactgcctaggtagccagaaccataaggtcctgaaatgccgtactattagctgggtccaaaattgagaagaattgagtagtgtaaatgttagtcacacatctcattggacacattgttagagtgtgttgtccatgttttcacatgttggtagactggagaatagctgtcacttgtcttcaggcgtatcttgttgaaaataaatccaaatcactgcagcagtaggaatatgctgttgcctgtgaggcagattttcggatttgctagttgaaaaagatttgaaacagttggtttggacaacagctgagtcacacaatgactgtgagtgaaaagcaaaaactggttctgtgcccctcacagttctggttttgtacatcatgtggtctagctatgggctgtacctcttgcacaatatggagaggacattcagacatcttcaactgctcatctgcccctacggaccagacaggcttgaaactataggaagatgcatttgacctttcatttttcagttcagtagaatttaatatggactgtcagccgctgcggtgatcatggaagtagacctaagagaaaaaaacttgtgcaagttcacacgtggagtagtatatgaccatggtttcagagaactgaagcagttctttttagattcttcaaattaaatgtctccttggtgtatttaaacctgctgttactcacaggccaggctccaccaagctttcctacacacttcttcctgagctgtgaccattctcctgagcaagaggctgcagccagcctgggctggcgggcccatactgtctctcataggcattctctcc

SEQ ID NO: 2612 - DNA, 1107 bp, Homo sapiens
taaaaatacaaaaaaataggccaggtgtggtggtgtgcacctgtagtcccagctacccgggaggctggggcaggagaatggcgtgaacccgggaggtggagcttgcagggagcagagatcgcgccactgcactccagcctgggcaacagagcgagactttgtctcaaaaaaaaaaaaaagaaaaaaaagaaacagcatgaaattccttgttgatgggaaatacccgaaaggcctgcctgggttttcagagagcttccagaaagctgaattcatggaggttcctggagaatggcacagccaggagggaaaggtagcgccgtgtctcttccctcatacaccgcccactgcatctctccatctgtatcctttgtaacatcctttatgaaaaaccagtaacctttagtgtttttctgagttctgtgagccactctagcaaattaattgaacccaaggggaaggagttatgggaaccctgatttatagatggctgtccagaagcacaggtaaaataacctggagtttgtgattgcctccaggtagacagtgtcagaattgaactgaattaaacgacacctagctggtgtctgctgcagaacgcagaactggttgcttgcttggcatgtagggagaaacccctgctcatgtggtgtgagaagcgacctgtgttataagagtgtgtgagaaactgagtttgggttttcctatgtcctcaaaatagtatattttgaaagccttctaggcagaatgtattaaaatagtttttactccctgaagggatgccagcaagctagaaagattcatttccaaagggcttccagtggtagcatggctagacatgagacatctttccatttgtgtcatacagcaagttatttttgcagtaccatatacgctatgcgggaaacttttaagtattttataggtttgatttaggtacaaatggccaagaagctatcatctatactcatcctggggattgggaacggaggcagttagatgtgcctgtgctttgtaccttctgtagatgggaatgcagttgctcactcaccaatcaaatttattgatttatatttaaaatactatgaatacatcttctggcaattttgg

SEQ ID NO: 2613 - DNA, 1025 bp, Homo sapiens
ctgctctctctccatgtggggttggctaggctgctgctctctctccacgttgctgtgggctcgcatcctctccctggttccctgggggagcttcttagggagggagcatgtgagagatctgaggccctgcagtttgggagttattttcattctcccctaacacttgttggatactttggctgggtatagaattaaagggtttcgaaagcagtgtttcagagtcttccattctctggggcatcagaggtgtcatttgcccctgtgcattctggagtccaccttgcacctttattgggtctcatctaggtccttggctttgcgcttcagccctttgaggccgaagcccagattcctgggtccccactctggaacagggaaaaatttcaccccgtaatttcgtacgttctttctttttagggtttctgttggttgatatcttaagttactcctcatcttcctttttcattctgtttgtttttgttctgccttctgagcaccttcattttgaattttccttttcagctatttgtgtatctatcaggtttctctccttgtcctttgttaaaatagtattctgtcttcagtctcctgtcttggttgcctccttgcagattccttttatatttgggtctcttatgttggtggcctttcaaaggcagacaggcctgtctcttggtggggggtgggggtgggcggagctccagttgcttgtgtgtggatctgctggggcatatagaactctcaggaattattctggaatttcatggctcaagtgtgttgtcatggctcagcgcaggcctaagccctgctgcagctgctcccctagaccaagcttgtccaacccttaggccgcatgtggcccaggatggctttgaacccgacccaacacaaatttctaataaaacattgagattttgggggtttttgttttggtttggttcaccagctgttgtgttagtatattttgtgtgtggtccaagacaattcttcttccattgtggcccagggtagccaagattggacat

SEQ ID NO: 2614 - DNA, 1360 bp, Homo sapiens
ctggtcccatgggcactcctgcttctagagagggggggccagcccatagatggggcatcgatgcccatagatgcggcaggggggctgtgttcccatgaccatttgacactggctgcccggcaggcctgatcttcgtggtggacagcaatgacagagagcgtgtgaacgaggcccgtgaggagctcatgaggatgctggccgaggacgagctccgggatgctgtcctcctggtgttcgccaacaagcaggtaggcgcccgggccagcctggggaatgtgaggagccagtgtgggttccgcctggtggtaggggttactggaggctggtggggcccctttctctgtcctgtggacagcccttcccaccaacccttccttcccccaggacctccccaacgccatgaatgcggccgagatcacagacaagctggggctgcactcactacgccacaggaactggtacattcaggccacctgcgccaccagcggcgacgggctctatgaaggactggactggctgtccaatcagctccggaaccagaagtgaacgcgacccccctccctctcactcctcttgccctctgctttactctcatgtggcaaacgtgcggctcgtggtgtgagtgccagaagctgcctccgtggtttggtcaccgtgtgcatcgcaccgtgctgtaaatgtggcagacgcagcctgcggccaggctttttatttaatgtaaatagtttttgtttccaatgaggcagtttctggtactcctatgcaatattactcagctttttttattgtaaaaagaaaaatcaactcactgttcagtgctgagaggggatgtaggcccatgggcacctggcctccaggagtcgctgtgttgggagagccggccacgcccttggctttagagctgtgttgaaatccattttggtggttggtttttaacccaaactcagtgcattttttaaaatagttaagaatccaagtcgagaacacttgaacacacagaagggagaccccgcctagcatagatttgcagttacggcctggatgccagtcgccagcccagctgttcccctcgggaacatgaggtggtggtggcgcagcagactgcgatcaattctgcatggtcacagtagagatccccgcaactcgcttgtccttgggtcaccctgcattccatagccatgtgcttgtccctgtgctcccacggttcccaggggccaggctgggagcccacagccaccccactatgccgcaggccgccctacccaccttcaggcagcctatgggacgcagggccccatctgtccctcggtcgccgtgtggccagagtgggtccgtcgtccccaacactcgtgctcgctca

SEQ ID NO: 2615 - DNA, 1031 bp, Homo sapiens
cagtcgtgggtgtgggaggggcctgcaggcatgcctgggttgggggcagctggccctgggcaccctggtgcaggtccagtctgccctctggatggcccctcctcttccccagattactactttgtaaccagggaggtgatgcagcgtgacatagcagccggcgacttcatcgagcatgccgagttctcggggaacctgtatggcacgaggtgggccatgcgtgggtgtgggtgggctcccagggttgctgttggcaacagggatccaggtagtgcctgctgcctgcccgccatccacaccacccaccccatggttatgaatgtggccaggttgtggcccagggccaggctcccacgtctgtggcccacagtggctcttttcatgaggctgctgggcccggtcctgccaccgtgcattgtcctggcagggtgaagggtgcacaggacacctcatgctcactacaggcaccttggggagtgggtggcctctgttccctgtaggcggggcagggcgtgggggtagcaggtttgagatgctgtcgggtgctgggtccaggccaggcctaggctcagctgtgggaggagaacgctgggcccgggagggcctgggtgtccctgaagctcctgtaggcctcagagagccctggcacccctgctgacctggcacctctccccagcaaggtggcggtgcaggccgtgcaggccatgaaccgcatctgtgtgctggacgtggacctgcagggtgtgcggaacatcaaggccaccgatctgcggcccatctacatctctgtgcagccgccttcactgcacgtgctggtgtgtgctgggcagggttgggggctgggggccagggcatgccaggctctgattgccaccccctttttaggagcagcggctgcggcagcgcaacactgaaaccgaggagagcctggtgaagcggctggctgctgcccaggccgacatggagagcagtgagtgtgccgtgggatcaccagggaatgccaggaggggagtcagggttctgaggtctgt

SEQ ID NO: 2616 - DNA, 1049 bp, Homo sapiens
cctgtcccagtgcccgaggtggccttttgatgtgagagggccaaaacttccaacctcagatcatgctaaggctgccgtttctggtacctgtgtcctgtgaaatgccatgcaccccgacgacacctgcacagaatgggcctgctggaccaccctgcctccgtagttcataaagactcccaagctgtatcacttgggaggcaggtttaagagctgttctccctcctcttcactcagtggccttgcaaataaatcttttctcttagctgggtgcagtggctaacgcctgtaatcccagtgctttgggaggctgaggcgggaagatagtttgagctcaggagttcaaggccagcctgggcaatagcaagaccttgtctctacaaaaaaaaaaaaaaaaaaaaaaaaaaaagctggtcttggtggcaagtgcctgtagtcccagctactcaggaggttgaagcaggaggatcacttgagtccaggaatttgaggctgcagtgagctatgattgcatcactgtgctccagcctgggccacagagcgactctgactcaagaaaaaaacaaaaaataacaacaaagatctctaaatctgttttaattttgtgttttgacaggcattaggattaaggttaactaaaggccattgagaacccgcagaagcaggaaaacctgtttgcctcccccattagctgcctaaaaaaataaagtgcctggcctggcgcgatgacttatgcctgtaatcccagcactttgggaggccgaggcaggcagatcacctgaggtcaggagttcaagaccagcctgaccaacatggtgaaaccccatctctactaaaagtacaaaagttagtcgggcatggtggtgggcacctatagtcccagctgcttgggaggctgaggcagaagaattgcttgaacccgggaggcagaggttgcagtgaactgacaccgcaccattggattccagcctgggcaacaagagtgaaactccatctcaaaaaaaaaaaaaaaaaaaattaaaaagtgccctttcatgaaggaatttccagtg

SEQ ID NO: 2617 - DNA, 1196 bp, Homo sapiens
ggacagtacctcatgcgctgtctcatgtgcgctctctctttcgctctctccttttgcctctgtctctgactctgtgtgtctctttctctttttgtctctctgtctttccctctcccctcccatgcagtgatggcgccaacccgtggcagtcccagagctggaggcaggaggatggatcctcatctccatgggaagtgtcagcgtgtggctgccagggaagcgtggcaggcgcctggccttgggtccatctacatagttgcgtgtttcaacaatgtccatttatccttcaccccgaggcgtgttttgggggctgcaaacacctcccggtagaggctggacctgaggacccttcccacctgtgcccgtcccttcctgaagtcctagccacagcccatcctccatgagtcccggcagctctgggtcatgcccttccctggtcacccatctgcccctcacctcgtcatccagggacccagaccctgcaccttccatgtgggcccacagatccttggcaggtacctgaggtgcaccattgagtgtcggatttggggttagcatccagaaagaagaatgcgcatgacgctctgtgaaggctggaactcaggtcttcagggagagaaaggaagactggattgcaccttgatgcctcctgaggaggcggcccccctcttgaggtgggcgtgggcccggcccagccttatccaagtcgctctgtccacctcccccttcctggcccccaccccactcctgtgcctcccaggagccctccctgtgctccacctgcctccgcagaaggaagcctctttctctgtttccctgggtgagggggctggcaggtggctaaccccatttagcatctccaggccctgccatcgtgtctcatcttgctgttatctctagctctttccctcctcccatttcctttagtagttgaattttgcaaagcttgtagcagtagctcagttgcctgcagcatccttgtgtgtagataaattagtcgacagaaactcagcactggggacaggattgcaaagtcggggacatagatgcagacagttgttgagatttggggatagccgggcttgtgagcggtgcccatttccagatgaagcctttcagcccttctgagtccccggcccttggtgcgatgtctgtgagtttgacctgcccagcgtgtgggctggctcaatgctgaa

SEQ ID NO: 2618 - DNA, 1030 bp, Homo sapiens
ccaggaagctaacaggtgcagaggaaaagtgccatggaagaaaaagaagaaaaaggtcatttactctcactctcaaacaagttattaatgctataaatggagacacagcaagcctcatgtgctcctgtacccatctccttgcgggtaacacacctctcaccctagtctgtctgcggaattccacgaggacatccaggagggaaggggtttgattttctaattgctcataaagagctgtagcccagtctctagctggtgactgtcatgaaactccagaatgctgggggagaaaacccagactcggattaagcaaattcgaggtcagaacgacatcaagggattcccttaatgtcccttgctttcctgctgtccccatggggacttctacagtcaggggctgggggctgggcccaatcctcagagctcttcagctgggatgggcaggccaagaccctcatgagtctcttgtgagcatttcttgtaaccttggtttagagagcaggtgttggtaaaaagttctgtgaccttgggcggttctacccagcacagccatccaggttgggcatttacgtgtgtgattagggagttgtgtgggcacaggctcttgtcctgtttggttcttgcattgcaggaaggccctgtggtccttctgcccttggggatggggagagggtggaggaagcagagacactgaagagcaaaccacatcctgaccatagacaatgctcacctggcaccgagagctgctgcagcttccctgggaagtcctggcaactttgggggaatgaatttagtttcctgccaactccaggtagggtgtgacccagaccaaccacgctgtctccaagcagtgatgtgaaaggcaacctagacatctggcaaaagccgccaagtcccccagtttccagagattcttccttttgttttttgcaaaaatatgtaactgtacctttctggcagttgcagcagaaaaaaaaaaaaaggcttcctgaagagtgtgatccccagtgtggaacaccccagggctggg

SEQ ID NO: 2619 - DNA, 1021 bp, Homo sapiens
acaagtgtttgcaaatgtttctgcaaatggcagtggtctggttcttcctgtagagaaccacagtcagaaatgttgtaaggaaaacatggtctttagcaatttttggttacatctttgcacttctttattttcaagtgctctttagcccaggcttagtttctttaacctgagtaaggagcacggagcactaggggaagggtggaatgtccaaataagaaaagcaagtgggggtcatgaatcagtaagaaaggattggaagagttcaggagatagagcttttatgtttcatttttcgtatacgcatgataacaactgataaaatagagcttatctttggcatctccacttcagacacagttaactgaacttttgagcttcacagattgattacattctgatcataaggctttgaccattagtattcttatttcatggtaacttccaagtatgtttttactttgcaactctgaattgaatcttttcttctaatagaggaaattaatcgaaaactagtagaaactaataaatagaaaatgaggccagaggtgatggctcacgcctgtaatcccagcactttggaaggccgagttgggcggatcacttgagctcaggagttcaataccagcctggccaacatggcgaaaccccagccctattaaaaatacaaaaaattacctgggcatggtggtacgcttgtagtcccggctacttgggaggctgaggcatgagaattgcttgaacccaggaggtgaagtttacagtgagccaagattgtgccactgcactccatcctgggcaacagagtgagactctgtctcaaaaaaagaaaatgagttttagaaggagcaagcaggacagttgaagtttgccaagctgaagtaaaagtcacctagaaccaagtcctaggctgtcactttgacgtatcagtggccatatttatacagcattgttccttaaaagtgaaacagtcaggctctcttctggacatttgcctctgagctggtgaaggaatgtttgccta

SEQ ID NO: 2620 - DNA, 1049 bp, Homo sapiens
actaatgtgcacacgagtcccctggtgtattaaaatgtagatcctgacttggagggtgagggagatcggcatctgaccagctcccgggccgtgcaggtgctgttggtccagggaggcatgtaatgactccatgctcgagaactttgaaagcatggttttttgaaaaaacaaaatattctttctcatggtcatttgaactgtaaagtattccaatccatgcctgtgactttactgctgatgctctgatgactgtaacatctatatttctagtcacatccttcactcaaactacagatctttttttcagctacctaactacacctgggtggcctacaggcatctgaatgcagtacgtcccaaacccaacaaattattcacgcctatgccccatcttctatttttcctgtgtttgcctagaagataaagttagagtccatttttaattcttccccatccttacctcctggatctattgggtttcagagtcttttgagctgacttcttaacatggtttaagttactgtttaccctgaaagatgcaaaggaaagttaaattagggccagtttacatgattaaaaggtaagcaaattgggtttcattccaaagttcttcgtcgtagtgacttgagcagctgtgctgactatcttacagcttgccacacagcatctgcaccactgtccctaggcagcttccacagcacctggaacctgggttcatgaggatacaagagcctcctgggccaggatgggagtagttttccactttagaagaactatatatctatatataatatagatatatataatatatatagtttatatataaattatttacaatttatatataattatttataatttatatataattatttatatttatataaattattattatatcagtggaaagtaacaaagagttggcctgctaagtaactgccttcctcaaatcagcctcctcagtgtgtgtgatcccaacgaatgggtcaggaaaatcaaagacccaatcacgaacctggagcaattgttgggagtctgtgctgcaaatg

SEQ ID NO: 2621 - DNA, 1048 bp, Homo sapiens
tcaccagagatgctgatgatcagtcagtggacacttggcagcctttatcttacttagcttctcttttcatattcggcccttataagaactgcttccccaaatctccactgtgttggcttacaggtattttcaacttaatctctgaattggcaacttattattttaccttaaagcctattccttctcagaaccttcagcatctcttatctcagttttcgtaatcacagaccctaagcctttaattcctaaagaaggaaaccttctttaaatgactccattctacccaaattctagtgctataccacagcacttagccttttctgccaggaagtaggacacatgaaatgcatcatacagtcagaggccatacatccgtgcttcctttctgacatttggaaatcttgaaagcaagacgattgcttggggaaaaaactaggaaggcagaggtcatcgtgtctgctgaatatggcttaattttcttgaacactcaaggtcatcattgactattgactgctgcacagaatgtgctgtgctattacggccactttctagctcatcccctgctgtccccatctgcctttgtgcctgtagttcacagtcctactttagtatatacctttgatctactgcagtttggggcattaggtaatagaggctgcttgaagtgaatgtaaaacaagtcagtcaattccaaatgaggtgtctcctgtagagttaatcttttttggctttatgtttgctatttcagtggctaggagacctttttttcctggtctttattttgtctgtgttcctgaatggctgacatttgctcaagattgaattctaattatttgatacctttcctattatctcatttgacttttctcatacggaaagttaaaagtacattagtaggatgtatctgttttagattttctgttttggggtgtggtctttcccttcaatcttaattcattctggagaaaacccttatcaggtgaatataattataaactgagtgagaaaaatttattgtgaatttgagccctcaagttaacgttcacta

SEQ ID NO: 2622 - DNA, 1061 bp, Homo sapiens
gtcatgctttttaagtcagtcttccaatctttgtcatttaattgatgtatttattccatttacattattgtaattattgatattgtatgactcaggtttgccattttatttctcagttttcttttccagcctgccttgactggccattttaaagaattctgtttgatttaccaagagtgctgtggaatgtatctctgctcatagctttttcagtggtcactctgtgtattacttcatatatacataacttatcatagttatatatatatatatatatatatatatatatcatagtttactgttgtcatctttttatcctgtcttgttttaattgtcttaaatatttcctttacatattttagaatcatatagataatactatttttcttaaacagttaaacataatgaagaaaactcaagataagaaggaaagcctattgtatttgcccatgtttttgctttccatgttctttcttccactcagatgttccaagattccttcctttatcattttcttcctgtttagagaaattcctatagctattcttttgcaggcagatgtcctggtgataaattctgttaatttttttttaaatcagagaatgtcttcatttaccctttattccagaaaaatagtttcacaggacatagggctctgggttgaaaggttttctttctttgagcacttgaaaaatacagtcactctcttatggcctccctggcttcagatgagaaatctgctgttattcgaattgtatttcccttgtagatatggtatcatttttctctggctacctttaagactttttatttgtcttcagttttcagaagtttaattatgatgtatcttgtcatggacttctttgagtttatcctgtttgagttcattcagcttttcaaatctgtagatttatgtctctcaccaaatttaagttttcagtgctgtttcttagagtgcttttttcaaccactttctctttgtcctctccttccaggactccagtgacatgaatgttagatctttttcattgtctgcaggtccttgaggctctgtttattta

SEQ ID NO: 2623 - DNA, 1498 bp, Homo sapiens
tgggcacaatggcgcatgcctgtaatcccagcactttgggaggccgaggcagacctcctcacctgaggtcaggagttcaagaccagcctggccaacatggtgtaaccccttctctactaaaaataaaaaaattagccgggcgtggtggcaggtgcctgtaatcccagctactctggaggctgaggcaggaaaatcgcttgaacccgggaggtggaggttgcagtgagctgagatcacgccattgtactccagcctgggcaacaagagcaaaactccatctcaaaaattaattaagtaattgaagttcaataattgcttcaaaaataccataaccacctttaatcaccatcatttttctggaagcattgattaaacatggtggattcaattagacatttatgtcttccctctcagaaccccactgaaatgtctgttaagtaactgaaattgaagtaactcaaaaaggccaagattgagtgagtgcacaattatgattgagagatttccaaaaaaatcttaaagataggaagtagatggtgctctgacagcagaaggagctccaccttaagtactgtaatgggggaagccatttcttcctctggagtcccagaaaaggtcaggatttggaagcatcaggttctacaggaggtagaggttacagaggttcatgtttacacacgaaataagaggttcagtcttttacgttgaaatggagtctagactcaaggtcataaggcccacctgagggcatggggtcaggcctgaaaagagggaaattaagtgaaaatgaaagcctctggcccccaacccacctcccctacctcttccctggtcgctggcagccaggtgtgtatgtcccacataggagaaaggagccttctctgcagaaaaatgaatagtcagaaaggaaaggcttgaaggtagtgacattttgctttcccagtcaaacagcccagtctctatccagtcatctgaaagtgaaaccctccaagcccacctgctccacccacacataaagagcttcttttagactttttcattccttgctcttaatgatcaggcagaattttgaagaaagtttctatagcaaaagagagagctcaaagtaaagaagctggaactttgagggagtaagaaaaacacactaaaaccacagtatccttaggaagaagagcagagattgcattggagtatgtaatagaaacaaagtcatacttaaaaagagcaatcagaataatatgttaaataaactcatggtgaaaaatgggagagatgacataaagaatcctccagaattaatccagaagatgcaatgactattaggagttccagaagagagaagagcagagagaataatagaagaaaatgtttcactgaaggaatgagattccagattaattggcccacctaaaatcaaacatagtaaggaaaaagtccagaccagagcgtgccatgtgaaatttcagaacaccacagatgaagtaaggaagaccagaaa

SEQ ID NO: 2624 - DNA, 1024 bp, Homo sapiens
ctgacacataggagggaccccagggcttgtgggaaaaaatgatcacagagccaactgtgtccctaagtctttcaagggtatctgcatatcactggtgcagcctttccactgcaagatcccactttgcaaaatttccaaacaggcagttaaaacccttccttcctgcagtaggtcgctttgtttttgaatattgatgaccttccgggattgatagctcacaatatgtaggtctcatgttttgttgtcaggtaaacaacaacatgttggggattctgtctgtgcactcctacttgactcctggcacatctcacagcacagcctgtgaacaagcagttatgcctgctgtgttctccatcttagcagaattcgatattgtaggaatagggagctttacctcgagggttgtcagatgcaattgaggatataattgtcaataaacctctgatctaaagcctagccatgatcagctgttatagtattttatgatgcctcataaatgattaggggtgaaatgtgttgaatctctcacttctgttaattacacactctaagttacagttgacaagtccccatgttgaagcagaggccagaactataattagatcttggaaacttagtaactctgctgccttttcaaaggaaaagaggaatgacaaatagttttcctaccctaattttaagactcactcttttcacctgacacttaaattctgaattctatttaagttctttatgtgtgtttctatctgattttccaacttcagccctatctgagctgtgagaacttgactcctgcacttggagagagcccactgtgaggatctgcggttgccgagggctccttttgctgttcactgcatctcccgtcccttgtcgaagtataggactcaatgcccacctttcttttcttccttaaaaaccatagtgtgccagagaaacgctagataatatttagtttaacaagaacctatttctaatactatccattgaaatgtctataatagtaaaaccttgaaggggcata

SEQ ID NO: 2625 - DNA, 1051 bp, Homo sapiens
aggtgagaggatcacttgagcccaggagttcaaggctgcagtgagccgtgtttgcgccactgccctctagcctgagtgacaaagtgagaccctattaaaaaaaaaatcagtaaaatgtaaatccttgcattcctgatgttgatacgcatggcttcttttttaaaaacgttcagtcttactagaggtttctcaataattttttcgaagcaacagctcccggcttcattcatattccatttttgttttcaatttcattgatgtctgctttttgtcttcctttgttctgctagttgtgggttcattttacttatcgttttctgttactgtggatgctcagattattgatctgaaaccttctttcataataaaagcactcaatgcaataaatttccctctaagcactgcattatctgtgcccacgtattttaatatgctataatttcacttttcttccctttaaaatatgttctgatttctcttgagaattcctctttggtgatttatttatgactatgttgtttaacttccaggcaatttcagattctcctgttatccttctattactgaattttagttcaattccattatggtcagaaacatactttgtatgatttcagttattttacattcattaaagtttattttataaaccaggatatggtcttagagatatgttccacgtggccttggaagaatatatgtattacgctgttgttgggtggagtgctataaatgtcagttacagccacttgattaatgatactcagttcttccatcttggctagttttctattagttctattactgttaggagtattgaagtcttcaactgtaatggtgaatttgtctagttctcctttcagttgtcagatttccttcacatattttgcctcagcacaatcttctttgtcatgttagcctttttccagtaattcacctgtccaccatagccatctgcttcctgtcataaccctgctttccctgggcgtatggagaatcctatgttctattgttccatactgtctcactttttagggattatgcttgcctc

SEQ ID NO: 2626 - DNA, 1045 bp, Homo sapiens
aatgaccatttagtggaattagatcatttaacgaatggagaaaattgacaaggataatgacatggtattacagtaaagaatgatgtgaattaatcatagctcactctcatctgttggggttgtgtagggaatctgatggatgatcacagcatcaacagtgtgcatggtaggcccacactgatgtaaacacgcagccagaatcctcttaggtgcatctaaagggtatggtaagaagtcagcacagccagcatacccagcagaatgatcagcagctagtgctgttccaagcactttacatggcttagcttgttcaatcctcatgacaacctatcatcctcattttgcagatgaggaaactgaggtgcacacatacaaagaaaagctagatgatttgttcaagatcataaggagccagagtgtgaacccagatagttccaaaaggatttgtgtgcttttcatcagtatgatagcaaaggattaagagagggtccttggggaactgggtgaaacgctggaatacttttgcaaaaacgacttctttctgaatatgctgcaaaaagtcagtaatttgacatgacgaatgtggtattatgctatcaaaaattttgttggacagattatgccaaagagaataatcccgacacttgacttactctctgttcactctcacacgtgatgcagcactgtccagcagtggtcagcagtggtgggtgtgtgctgtgtctccatcgtccagtatggtcaccactggccacagctgtcttgaccacttgaaatgtggccagtatgactaggaactgaatatttaattttatttaattctaattaatttaaatgtaagtagtcacatgtggctggtggtgctctgctggacagtgtgtggttgtgattcagacctaaagatgattgactataaaagaggcatgttttgtcatcaaaatctcattttcttttttttttgagatggagtctcgctctgtcactcaggctggagtgcagtggtgcgatcttggctcactgtaacctctgtctcctgggttcaagc

SEQ ID NO: 2627 - DNA, 1061 bp, Homo sapiens
taaaatttaatgggttttatgtatatatgaagccgtccccacaatcaaaatatagaatattttccatcatccttaaaagattcctcttgtttctttgcagttttttctccactctggtcccagccccagtcacccatctgctttttgtccttatggatttgtttgtgttttctggagttttataaaaatgtgcctaccattgtgctgaatgacagcagggaaggtgctctggtgtgtgctagaacttccccatgagctgtaactcaagctgtggggacactcatgcaattaggattcttgggaggagtttgttaagaggccctggacggtcctgacaccatatggtaggaaaagaactaggaatcagaagtaaatctaagaagacagtagaatgtctgctaatgataattgagtcctatgtctgtccacctataaaaggcacatacacaaacaatttctgaaatgtaaggaggcaaagacataatttagggtatctcattttttaaatcatatgatgtcggtagatgattttctccacttaagataattttcaatttgttttccatttgcctttattatagaactccatcttggtgttttttttttttttttttttttttaagtaatcctagatttcatcctaaaaatcttgattacttttctggttagactcttaaaaacacccgagcactcttgagttttttaaagtgtccttccctttgttgtgtagataactgtttggacatatctgttctcccttattctgtctgcaaaataagccaattaaagagtctgggaaaacatgtaacacttgagataattttcacccatattaaaagtctaacatagaagagttaaaatgtgctgtttttgaactaattggttgggaaacactttgttgtctgtaggaagcatagatgacctgcctacggtcctaaagtgtgcacgcctggttgaaagaatgtacagccacatcgccgcacgagctgaggagtttgctgtgttttccccatttatggtggcccagtacgtgttggaggtacagaaggtaaaattgggtt

SEQ ID NO: 2628 - DNA, 1055 bp, Homo sapiens
caggccctgtggcccagaccaggcatcttgaactatatcccagaccctcctcatgaacagaatcactgctcaaaagtcctccttttttcacctgccctgtgctctagtctagattctgatttcttgtggtgagttggtgttgccttggatttcttgtgcctgctcagatctgtggatttggccctaggtcctttttctttcttcctgttggcctcctcagctccctccctcctttctgccaggtattccctgcaggcctcagcgtcagggctacctctattgacaggggatccttgggcgttcgggccatagtttttctttggtgaataaatatgtatggcttacaaaacatgtgtttctaaatttatgaaattatatgtatgtttatacattcattcgtgctttcatttagccaacatttattaagttttttacatagcagaaaccacttcataactgtgagactctggataaatcacttaagtttcctgagtgtcattttcttctctgtgaaatggaggtaataatgattggctccggtgtggtcctgcaccttgaacaagatagtggactttaaagggcttcatcagatgccagcccagaaggtgtccagtgggtaagaatgtcccccctgatgccatcccttcatctggttcccagtggggaatatgatgaagtggctgctacccaggagctcatggccattctgcttagttccagtatacacgagctctctggggatggcacctctcactctgccatgcagtggtgagaagtaactattctggaattgtcttatctcagccctacatactattttcagtgtctgtgtttcatttttcttctagaacatgcctcccagagttgttgaaataattaagctaggtgctatatgaagagaacttagtgtgtggcacataaacaataagggttcaataaatagtggctgtcatcatcctcgtcattctatagccaatgagagaagtgagttgaaataaaacctggcttaagagccagttatatttgaaattattagtgttggctcgttgcctgtg

SEQ ID NO: 2629 - DNA, 1050 bp, Homo sapiens
cttattagcagctttagaaacttcactatatcagtaaatcagcatcaactagatacttagagctaacttacaatatcatgataaccaaataaaaagagttttcaccatggacaagattcatcaacagtgactgcgctatttaagctcttaactaaggcacgagctctacctggtttcagaatcctcgggaagctggattcgtcatctggagggttgcttgcagaggatgacattatgtgaaaggagctgcattattctaaagggtatttcatgttggcctttccaccaagattaggttcattttctcaaatgtgctacctgcagctctcttcttccttcaaaaccatgtcaacatgaaacacaatgaaagatatataaatcgcaaatggcaaaaaaccattcacaagcttcaatattttaacttttattggtgccagattacctggaaaacaccttacaaatgatcccaacatacctgtgaccaattctacacactgtccctggatctgtcctcctcttcttccagtatattgaagtttaagccaggcacatggctaccaaacataaagactagatatcctagtctaccttgcagctacatggtcatgtggccagtgggatgtgaggtgaagtaatgcacacacctttggggtcattccttcaaaagtaagggaaatacattgtccttcctgctttctggagttcagccaccttggatcatacagacgaggcaaatgcttgggggacggtcgatgaccagggagaaggagcctgggtcccatgccttgagtgccatgcctgctgaggcagagacattgattatagtttgctaaacaccttcgagttccctgactcccctccaggagtcaggcagaactatgttcaactgtgacatatgatcgcttctgggctggagcacacacaactctccagcctgatcctctcctctgagacaggtggggatgatggagatgcagatgtaggtaacagctccacatggcaccctgatgatctcgcaccatctatattgaccacctaggcactggcttg

SEQ ID NO: 2630 - DNA, 1031 bp, Homo sapiens
cctcaacttctgggctcaagtgatcttcccacctcagcctcccaaatagctgagattacaggcatgtacccctgtacctgacttctcattttgttcatccattgttatactgatttcctttattttttttgtgtctttctttaatgatttgatcatactttaaaccgtttttttaaaacctttgtctagtaactccaatttctgtccttcctccaggatggtttctgtcaattaaccttggtcctttgaattagtcatatttttgtatttttttgtatgccttgtgatttttcactgaaaactagacatttgattactacaatgtggtaactctgaaaatcagattctccccttcaccaggattttctggctccttttcttttttttttctttctgttattgaagtctatagtagcctgtttgtttagtgacattcccaagctatatttcaaatactatattttttgttgacatggtaactaaagtctctgttccttagcttgagttcagctagtgttttgacggagaattccttgaatgctaggagctgtcctactctttgcaaattgactctgtgcttgggatttccttcaactccatgctaggcttgcactgtgtctagggatcagtctaaggtgaaagcttaggttttctcaggtcttttctgagcatgcatcttgttctgggcatggacatgtctgtcaaaattccccatttacttttgagtgtcctaatttcccagagaaactctacacagattttgccttaggtagtctgttatatgttgacctgtaatcttttctcccaggcatcttagggttgttattttggtttgcaatattttttagctttttttggcctcagtcctgagttaggcaaagcagagagaaaatcaacttgcatcaatttttctgtgttagcccctatacaggttagaatagaaatgtggctcagacaaatgtgacatatacaataacttgcaaataaagtctgctctgatccctccagaattggggaaatggtcttgcact

SEQ ID NO: 2631 - DNA, 1079 bp, Homo sapiens
ccatggctggcagttttctgtccctaactcttagggaagaggaatggccaggagggttgggggtagagttactgaatttccagagttcaggtcaggacatgcatttgggcagggacaagggtactttcgggactgtggttgctctggttcagtttcttaactctggcaccattgacatttttggctggcttttttttttttttaagacagttgtactctgccacccaggttagagctcagtggtacaaccagagctaactgtagcctcaaactcctgggctcaggtgatcctttcacctcaccctaccgagtagctaagactataggcatgtgtcaccacagcaggctaatttttaaattttttgtagggacagggtttcactatgttgcccaggctgggctcaagcggtcctcctgccttggcctcccaaagcattgggattccaggtgtgagcgactgcactgggctggatcattctttgttgtgcaaggctgtcctctgcattgtatgatgtgtagcagcttccccagcctctccccactagatgccagtagttctcccacccctgatcttccaagttgtaacaaccaaaaatgtgcagacattgccaagtgtcctggcgagggtgggaggtgggcagaattgcccttggtagagaaccactgccttagtccgttaattttgatttcattccttctgtctgagccattatggttagaccttcttgtaatgagactgcctttctgtgtggtctggggtgaaccactgtggggagggctaatatattaatacgttttaattttcaaaatttaataaacactttcatggcactcactgtgcatagaaataaaagggctgcatttcatctcagcccttttatttcttctagtgtactgatgaaactgaagcacagaaaggttaagtgactttcccaaggtcacagagctcacaggtggcagacccagggttgtctggtggaagagatctcctcagggcctctggaggcagtggggtttttctgcaactcctggccgagggtttctgccagccagcagtgaacctggcttgctcctgctcc

SEQ ID NO: 2632 - DNA, 1033 bp, Homo sapiens
cggaaggatagttgcagtattaaagtggtgatcacgtaggctcatggggaaggcaggattggagctgagactaagagggagccattgtggttccctctgcttcagaggtagcccctggtttcatcttcgtccagcctctttttcggtgatctctctactccttggtttcttttgctaaacaaatgagccagttttctttcccgaaggatgttgcctttggttggctagtggtggagtttccctccatgctgtagacatcttggtcacctgttcttgttctggtctcctcgatgaggcatgaatgcatcctggttaaaaggttgtgtgtactctcataatcgcttcccttactacagacctgcagctgctcgaggcagttttaatttagactgctccagcagtttaatttgctgatcagcttcgtgggatatgcttgtggaacaatctcatttcttgattcctgagctgacttctgtgaagcaccaagcatcgggtaagtcattcattgttaggtgcaccattgaagaacagtacacattcttaaagtgctttctgcacatattgctgtttaacgagaaatccccctgggtccctgtgcaccttttccagcacaggatttccgctgtgatgtgatctttgggagttgctgcgggtgggagtggggtttgttgattcatatttgcaggaaaccagagatcagatgcctgcctgatacccaggctttggagaggggggttattcttggcaatgtgggtaacactgagcttctgtgatagatagtattgtacttggggacagtaaaatggagatgtgacttcatggccaatctcagggaggcggaactgtgggaagttgtggctggtcctggttctcaaggtgagggcatgcaggtgcttttcatagaggccattctcatttatgaagggtcattagatattttatcggattggtaggtaccaatcccataaaaccattgggatggttaggcaccgtgcgtccagtgtacttctggataaaacaactggagcattta

SEQ ID NO: 2633 - DNA, 1057 bp, Homo sapiens
ttggtccttcctgttggcttcctgttgccccagctgtagctgttgaattcagtcttcagttatcccagcactggccagccagcctcatcgtccacactccctgcagatcccaccactcctccaaggaagtctctacctcagggccctttggctacgcttctaaggttaagtctaaccggttccctcaggcctaggggtggtggctgcttcctgtcgttgctacttccctgatatctagaattttcctttttctacccagttacctggttactgactttctacccagttaacaatttatattaaagcccttctgttcaaaaagcttatgtagtttctgcgttctaattggatcctgactaatacatctgactttcaacattctttagtaatcagtcagcaaaatgatttcatgagatagacgtattatatttaattggattacagttcaccttatattcctttagttttttttttttttttttttgcactgatctttctgattttcgttaggctcgtctatgtaatttgagacataactcctctcattagctactttctaaatcatcagacttgagttctttcctggaaagatcaccacagatggctaatgtcattcattttgttggctcttttggctttatagtagagggtgacaattcttttgtttttggtttttttttttgagctggggtcttgcatgacctcactgcaacctctgcctcccgggttcaaatgattcttctgcctcagcctcctaagtagctgggattacaggcacgcgccaccaagcctggctagtttttgtatttttagtagagatggggtttcaccatgttggccaggctgatctcgaactcctgacctcaggtgatctgcctgcctcggcctcccaaagtgctgggattacaggtgtgagccaccgcacctggccaagggtgacatttctaaaccttatctctaaattctgtgtccattattcagtattcctttaacttgtagagcatggctattacgtgtttaagcaacatatatctctaaaaagattcgaggccgctta

SEQ ID NO: 2634 - DNA, 1048 bp, Homo sapiens
tgcaagtttctcaaaaatgtgaatacaccaatggtgtttcatgaatccaccaagaccatacagcactatagctttgcctggagagttttctctcctcagcaaagctctccacctgtcccaagctgtgattcccaagaaatgccagctgggaagcctggtttgagggtagcatatgctccattgccatggccaagtcagtacaagccttttagcaatggtgcgttccctcagaaggtttgctgtggcccatttagccatattttggctttggttcctggaagggaggtgtctgccttcttcctagtggtgtgctgcccaccaggcatgcccagtggctcatctgtctctgcagatagcttggctgaacccaaaagggctcagtccttcctgtgggcttgatgcctgtaggaagggccagtcttgtccccatgtctgcagtgtgccacagcctcctttccaatttgtttccattataggattatgagacctcctgactctaaggaactgttttatctggggcttggtgttgcgggcacagcacctgtgaatagttaatgacattttttattcccaaccaagacctaggctcctttagggcaagggccagtgttgatctgaggatatattcccagcttctcacacagtctgtggtgcagactaggagttccatagatcgttgaatgaatggtttaaaaaatgaagggatcaagtcctggaagtggttttaatttgctgtgactccaggtagcttgcttaaacactctatgttttctaaattttaaaatagagctaatatttctcaaatggctccataggacattggtgacactcagttctgcaccagctctttgcctggtaatgtgcaggatgggggatgcccagggtatctttttattccttttttttttttttttttttttttttgagatggagtctcgctctgttgcccaggctcccaggctggagtgcaatggcgcgacctcggctcactgcaaactccgcctccgggttcaagtgattctcctgcctcagcttcccgagtagctgg

SEQ ID NO: 2635 - DNA, 1108 bp, Homo sapiens
agctttggtcagtgaaagctgcttgaggtgggccctacatcccattggcgtgattgtcatggcctttgaggaccgtgttgctgtatactgtggtaagattcccggggtcacattgtctgttcctgccccagacctggagtcagcctttcccagagagccctggttctctgtgctgggaagcgtttgcggttcgctattgggctcagggcggcctgctttcctgttcctcccctgtgccctcggcacctggccggagcatctccaagcgtctgccaccatacactgcagtcctcactagcctcttgcatgcgttgggggtgggggtgggggtgagtgggcggtgttaaaggctacacctgggattctccaggcctcagcagctggtgttgtaaggttacatagtaacagtgttaaccagcttgccctgtcttttctcaaagttccacccattcagttccaggggtccaggacgtgcctatcaggaacagcccttggatgcccttggatgcctgccttgtggatgtcatctgctcccatgtcagccatctccagggctcttcccgagaagagggcagtccccgccaagggtgttgcctctcaaacctgccaaactacaaaccctcttggtacctccacacatccctggagtcggctttggggaacactgtgttccatgtctaagtggagtcccgggcctctcccctccagtgtcgcctgtgccagctggacacgaagcagcagatcagtcatgaaaatggctgctcagctccgatctgcccttccttccgcaggactcagggacgcacagctccccagggctggtcacccaaacaacagcattcctttctcctcggcctctccccaggctgcttgggagagaaaacttccctcatcctcctccgcacacactaaatgccctgccggtatcttctttccagtgactgtggccccaggtcgtcacacatggccagacacagctgaatctcaggctagatcatgttggcactgcttccaccccttggataaaataaaattcccagtgacttccttaatattttgataggctgagtggcttatatgcaaactttgatgtaaacactaggccaga

SEQ ID NO: 2636 - DNA, 1042 bp, Homo sapiens
ttgattcttgcctaagtagaggttttgggagctgttgggctggagctttcaaagcttgcagtaggctgatcttacttctctacctatattttacctgttctccctaggtgatgaaactaggagggcccatggctacttctgctacatggggcacaaaacatgcttcagaaatatttgagagactgaatgaagcctgtctctggtctctagggtatattacgttccctttctattctaatgatgagtaggaggaaagataccactctttcttgtaaaccaaactgttcttgctttcaatggggatttttattaagaagcaaaaactgatctcttttataaatgcatagataccagtgttttacacagtacaggcttctggttttaagagaacttttgccatggttcagagtgatcttactagcctagtatattggtttgttttacattgctataaaggaatacctgagactgggtaatttagaaagaaaaaaggtttatttggctcacggttctgtaggctgtacaagaaacatggcaacagaatctgcttctggtgaggacttcaggaaacttttcatcatggtagaaggtgaaggggagcaggtgtgtcacatggcaagagagtgagcaagagagagaggggaggaggtgccaggttcttttaaacaatcaaatctgtgtgaactctttcctttaccatggggagagcacaaagccatgcatgagggatccacccccatgacgcaaacacccccaccaggcctcacctccaacattggggatcacatttcaacatcagatttggaggagacagctatccagatgaaatcacctagttaactctggtgttcttttttcaggaccctttcccagtgagttaaaattaaatttgtgagtttattaataggtcacacagcctatttggaaagtaagtttttttgccttcttgtgagaagacctgaagattattcctctacactaccctggtggaacgccaaccttgaagaattagaaataagtccttctgcttctcccatgggtc

SEQ ID NO: 2637 - DNA, 1121 bp, Homo sapiens
tccaaactttgttttctctgcagtagatagcagctgaaactcagttttttctgccttcttaactgttgcttttcatgttggacttggttcctgtgtggttcagaagtcagccaaagatttaacaggaggttattgccagatttgggtcctacctcctttccaggatctccttcagtttccagataccagaagctctgaactctctatcctctaacaactcaagccaaaaaaggctacattgcagtggattggagcgcatcctcgtggaaaacgccgtataaacacggagcttactcagtgttattttcttattttaaggggttggatcctatctagtttctgtctgcttctggctttcaaattgctgctttttatattttgctcagagtttataattgttactggagcaaaggtttgccccatacaagttgttttgcaattatcacaacttaaaatctttagtctttttccctgttctagcatacagccacataggaatcactgaaaacccattttgactgtggaaaaaagtacttagcagacttgtcctcaccggttatgaatagttgcatcatcttcacatagaaagcccagcatatatagcaaaagccatttatgaccacaacatccagggataaatatactattatttattttattttattttttatttattttgagacagggactcactcttatcacccaggctggagtgcagtggcgcaatcatggctcacttcccaggctccagtgatcctcccacctcagcctcccgagcagctagaaccacaggcgcacgcacaggccaccacccacggctgatttttgaaatacactatttgtattttgtgtcataatgaacgtgcacattattaacacatcacaagtatataaattgtagaatttgaccaatagtataactaattttgtgtaaaaggcagacagcagggctttgcaacttatgttatttagctcctgataagtcttagaagacagagatagtcacaacactgttgcaaatattatcaccactaaaatcaacaccattagcactggaagtctctgggtgacaccttccttagcccagttagttagaaaactgctgctgtgtcagaggaatg

SEQ ID NO: 2638 - DNA, 1054 bp, Homo sapiens
aataaataaatgaataaaaggagctagcactgagtagcacatggagatcattccttggggctgcctagttatccttttctattacaaagacagaaaagagttgctttgcgtttaggaatttttaagtgatttagtcacttaaaaacttgagtgatttgaaaacagtatgactggagttgataaaacctttaaatcattaaggctgaaaggaacctaggacattctggaatcaaatcctttcatgtccctgttggggaaatccaggtgccagatgttacaagtatttaagttaataactggttaaaaactgactaggcataggttaaggcataggtcacttagcaaaaccccactaacaatgtttagtggctcttctgagaaatgatatgtatgatccagtatcccccagcactttaagtactcattgttgtatctgtatattttttaatagagagaaagtaaaaattcatcagtctcatcaccaaaccagttgtgccataacactctcataatttgatgaattcgtctgtcagtatctatttctgtctctctctcttgtttgctcactggctctccttctgcctctacacacatatccactatatgcaattctgcaaactattttattttcccacaagtccaggacatcatttctgtcaacatgtaagatgcacactcatgtttttagtggtcacagaatatttcatttgattccttcctcatatttagtcataaagtttctcttttttttttttttttttgctattataaacaaagcagaagtgagcatattttcacatgtatatttcattcctaattgattgctgccttgagataaatttctagaagtagagctgctgggtcagagaataggtgcattcatatgttcttatctgtgttgaatggcattatggataatagtccatattctacttactaaaatgaaaaagtatatatatcaccttatatgaaagatataggccccatacagaaattattttaataatggtatctcagatcagttgaaagtttcgccattttaaggaattatttt

SEQ ID NO: 2639 - DNA, 1143 bp, Homo sapiens
ttttctaaatgacttccaataagactaacattgaagagtatcaggagcttttccttcctttccaaaaaaaaaaaaaaaaaaaaatgacctgatatagaatataaagaatacttctgcaacatacagtcttaaagtgttggaagtccagagcctgggagaaatgccgtgtccctgacacacactacctgtggtaggaagaggcacgatgcctagtcactgggtctttctctcgttcctgtcacctgtcatgaggccactgagcaaaggggctggtggacgggagctggtggtcatgtgcagtgaagcaggtgattctcacgttgtttttcagggttccagaccatcaggatatagcttttggggccttgcagcagggaactaactgcctcgacactttgggacactttgctgatggtgtggttggagtttatgaatgtcacaatgctgggggaaaccaggtatgtgcatggggaagccaggtcacctgcaggcccagagagagcaggagttgggggggtcctgatgttagaagtcccagctgccacctttctcctgggatgggtgatgtctatgaggaagcacctggctcctgctggccacagcctctttggcagccagcaccagggccagatagaatgtcacacactttggtgcatcagctctgtcatcagcttcggaccaggctctgctgcagcggcaagggtgcactggtcacagttgctggttgcagggccctggtcttcctgccagctctgtcctctcggccatgtgcactcaaccgcaaagcacccattctgcctctgcgtctggccccagaatatgatgtctacacctcctgcctggtatgcctatacaacagattcttaactgtgggcactaaggcggctgctagttatagcccctgcctgttagataatagcttaagatagaagatactcagtattaattgcttccattgcacacatacacaccttttctgagaggcataaaaatgcacaaccgccaggcgccgtggcgcacgcctgtaatcccaacactttgggaggctgtggtgggtggatcacctaaggtcaggagttcaagaccagcctggccgacatggtgaaacccatctctgctaaaaataaaaaaaaaattagccaa

SEQ ID NO: 2640 - DNA, 1091 bp, Homo sapiens
cacagagcgcccattccttgcctctgcaccaacttcaggggtcagcaaagggctgtgccaaggagtgaacaagatcgggtctgcagggtgtgtctcccactctgcttttgcttttccttcttgctgttgtgcagccattactgttctcacatgtgggctttcccttcctttccagcagtaagtgctgactccctgctcactctctgtccccctccaatggccacatcctgggattgctcagagaaattttttttttctttttttttttttgagacggagtttggctgtgttgcccaggctttttttttttttttgagacggagtttggctgtgttgcccaggctggagtgcagtggtgcaatctcggctcactgccacctccgcctcccaggttcaagccattctcctgcctcagcctctcaagtagcagggattacaggcacgtgccaccacacccggctaatttttgtatgtttagtagagacgggattccactatgttggccaggctggtctcgaactcgtgacctcaagtgatccacatgcctcagcctcccaaagtgctggggttacaggcgtgagccaccacaaccagcctgcccagagaacttttacaaaatgctgatgccaggtgctatgcccagagagcctgatctaatttgtctagggtcagagggcaccaccagatctctaagagctaacaagtgattctaaatgaggatttggcctgctgtagtggtacacacctgtaatttcagcactttaggaagccaaggcaggaggattgcttgaggccaggagttcaagaccaggctggacaacatagggaagctccgtctttacaaaaaaaaaaaaaagattagccagttgtgatgacctgtgcctgtagtccaagctactcaggaggctgagatgggaggattgctaaagcccaagaggtcgaggctgtagtgagctgtgattgcaccactacactccagcctgaacaacagagtgagaccatgttcctaaaataatgtaaaataaattagggccgggcacggtggctcacgcctgtaatcccagcactttgggaggctgaggtgggtgaat

SEQ ID NO: 2641 - DNA, 1030 bp, Homo sapiens
ctattcctttttcacggaactgaatctagtgtgctaaattaaagaactatttgaactttcagtggcatattaaattcagtagccacattgtgttttatttaaactcagcttatcttgtcatatcattcttgtctcccaattttatcacaaaaaataaaataatgaactaatatattttcttctgtctttctctgcctcaaacccttccctaatctgaatgatggtagaaaaaaaggccaggatgaagacagtgaggagttgtggtggcgaatcatgtgctctgctttaaatctttttttaaaagttgttattttattttcagactcccagggaagcagatgagagtgcatggtttgtcagcccatgtctcccccacagttgtatctgtacagcctaatccaaggaagtagttttgaatgtgacctgttatttacttcactgtttagaaaatgtgtcacagggaggagggtgagtgtgaggaagcagatttgtaaagttttctttattgttttctctgaaatagatcgtttgtacttcccttttaaatgcttttttaaaaaatgatttttcttttaataggtgattatagagcagtttgttgaatctcatcccaatggccttcaggtcatgtataataaactcctggagtttgttcctcaccattgccgccttcttcgagaagtcacaggaggtgccatctccaggtaatttaaacaaccctgtgtggacccccacctccctttcagtgaccgcacctgctaattgcaggtgcacgatggacgatgactgtcttgtatgaactgtcttgtatgaatccattatgaatcttgttatttcattgtttctactggtgatactgtgaggcagattccattagcctcatttcaaagttgtggaaactgagatgaagctgagactgaagaccacatttccgaatccaaagcctagcctttcttcttctctgcactttttcctaaatttagtttgaagtcagaattgctttccttccatgattctaatatgtcataat

SEQ ID NO: 2642 - DNA, 1104 bp, Homo sapiens
tggtacatctccctgtcagttttcatgctatcttatttataaaaatgaagtgaatactcacatggtttgattctttctcttctctctctttcttcttcagaattttctccttctttctcctttgtgaggcaatgacgaactatgtcatttaatctgctgtcaattctaattccagtgggctggggtagggggccctagaacatgagcactgccatttaaagagcaccagacttagagtgcctgggtctcagatgggctttgccatggaagacacggaagacatatcacagaaccactttgggcatttatgtatctttaaatggggacattggaagaaagatcttgtaagttccttgttaactctagaaactgtgattcttacgtgttgagcttctttatcttgattacagttttcagtacatgctccctgttctagttagtgttctaataatgaaaattttccttttgttttattttagaaatataccataagtatggattttgtcagaagattggaacggcagtgtggatcacaggctagtgtaaagagattaagagcccatcctgcctatcacagcttcaataagaagtggaacttgcctgtttattttcaaataaggttggtcatctattcaccgcccccgccccgcacccttctaaaacagaattggaatgccagttaaggatgttgcctcagttagcggctccttttctctgatcatcataataagctttgggagacaaaattgaaagtggagaaagagatataagaagtattatggttgccaaagtctggcttgcatgacaaaaagataagttttcttttttggtaattggagagctcagaacacaagagttggaaggagctgactccaagcccagcctcattcccacccaccatgtcctcattcattgtgaaaagagaaagtaggagttatacagcagctctttttttccattttccctatttcatcgtctgcctcaaataatgaacctgtctcacatctgtttttgctcgtctgagatacttttcccctagagggaatggggagaagcagagctttaagtgttctttgcagctggttccatctattagtttatgag

SEQ ID NO: 2643 - DNA, 1032 bp, Homo sapiens
tacattcctgaccctgtatccttgcttctcaaacagtggtctagtgatcagcagcattcacatcaccttgtgggtgggagcttgctagaaaagcacaatcccagaactcaacccttccacccactgcccccaacagaattagaacctgagttttacgagatcaccaggtgattggtgtggacgtgaggccacgggaagcagtgccctagtttcggtgccctgagcggtgggtggctgtgccagccagcacctcaacccagtctggctccagacatcaccttcttgtgctggctcttcttattccctcatgttctccaggcagctttctgtggaccccagtgttacttttgggagggatggaagttgtccgtgtctcaaaactagaacgttaatagtatccttttggacttgagttctgggtaacttactgtttcttttctgtttttttcctgtgcatctttatctcctaccatcatcattccaggaggtcccaaccacagcttcctcctatgtggacagtgctctgaagcccttattccagcttcagagcggacacaaggataagctcaaacaagcaataattcagcagtggctagaaggcactctcagtgaaagcactcataagtaagtaaattaaaagcagaccttgtgggccttgcttagaagagtctgcggcagaaacccccaaggcaatcaagcactgcgtatggataaggcagtgagactgcctagcacttcttcactggattagtcagagtgtgtgtcccactgtttgcttcctccctccccacacccttgtggacggcctgtgggctggcttcctctgcctgggcttcagcctcggggccgggccatgtgcacagtgcccccgcatctccaggccctgcctgcgttccctgcaggtgccgttctcccaggtccagccacattcttctgggaggccctttcgttactcagaccctgtcagtccaaagtggctctaatcataacagatactcaaaggacttaggttggtgaaacccttgtaatcaa

SEQ ID NO: 2644 - DNA, 1020 bp, Homo sapiens
tattttgaaggcaatgagctttatttaaaattctgaaatacttttacactctaaaagatgaactgttcctagaactgattggaaatgaacttgttacttgatctggggcatgaactacagatgtccaccctcgatacatgaaagacaaaattggtctatagttttctccatgttcaggattaaaaatttaagcaaaatccacacacacacatatttcttaaattctgagggaatgctatgttagacacttaagaccatatgtgtgtgtgtgtatatatatatacgtatatacatgtatatatatacacatatatatataaaatgatcttaagaaacttaaatacttaccgtggttgaattttcgttggaagtgaatttttatcttaaaaatctctttttttggtccacaaagccagttactctatttggtgttacacacaaatgcctcttttcaccaataaacgtgtcttctattcaaggtactatgaaaccgtgtcagatgtattaaactctgtgaagaagatggaagagagcctgaaaaggctgaaacaagccagaaaaaccactcccgccaaccccgtcggtcccagtggtggcatgagcgacgacgacaaaatcaggctgcagttggccctagatgttgagtacttgggagagcaggtaacccatcagccgccggcagctccagcgagcctgaaaccaaattctgagagccgggcagttacttggtggctcgcgtgatcccagagatgctgtcgcagtggctagggaattgcttcctgtgttaagactaggagtcggggctcccaaattactttgcccctaggcagtatgagacggcaatatgagaattcccgttttgaagtctggtggcgtgctctctggtgctgttgccatctgcttgtttccccagtgcccatgctcacggagctcactacagtgagactttttggtccagtgcctgatacttaattggtgcgaaccccaggcttttgaaatgcttgctggtttagcttaaaa

SEQ ID NO: 2645 - DNA, 1045 bp, Homo sapiens
aatgtcaacccttgttaaatccaacatattgcctggtcttgtccctgtacccatgcagcagtacgttgctggggaaaaacaaatttgtgacgattaacctcatataggcctttcatgatttctggcaatcttatttcggttttttttttctttctttctttctttttgagatagagtttccctctgtcacccaggctggagtgcagtggggcactctcagctcactaaaacctctgcctcccaagttcaagcaattctcctgcctcagcctcccaagtagctgggattacaggcctgcaccaccacgccgggctaatttttgtatttttagtagagaccaggtttcaccatgttgaccaggctggtcttgaactgacctcaaatgatccacccacctcggcctcccaaagtgctggggttacaggcatgagccactgcgaaaacagaagagaacttccaccaggtttgcaacaacataaacccaatactagcatttgttatttctttactgtactgtcttcttctgccttctgctggatcattcccaccagcatgcatactgttacttcttccatcaaaaaaaaaaaaaaaaccaacaccaccaacaaaatacacttgctgccacttccccctttagcttctgctctttttcttcttaattagaaagcagaccttctaagatatgtttgtactgtctatttcctttcctagtttctcttgaacctgctttagtcacattcccacccgcatttcattagaaactgttcttgttaagatcaccacttccactttgctaaatccagtagtcgattctcagttaatgatcagcagcattttacctcattacttcctcctccttgaaatgctgtgtgcgcttcccaggattcagtgctcttcttattgtcttcttacttcactggctgttacccctcaatctcctttctgcttttgcttcacctcccttacctcttaatcatggtgtattccaacgcatagtcatcgtgcctctttctgtctgcatgctttcccttgaagagctcattct

SEQ ID NO: 2646 - DNA, 1043 bp, Homo sapiens
cctgaccgcagctttattttccttatattctctttccagtggtgtgctacagcagtcttctattggcttgcaagagctgattgttaaattttcatgaagtttgtgagcccattcttaaaacacagccattattaaaaattaaatagccgggcgctgtggcttacgcctgtaatcccagcactttgggaggccaaagcaggcggatcacctgaggtcgggagctcgcgaccagcctgaccaacatcgagaaaccccgtctctactaaaaacacaaaattagctgggcatggtggcacatgcctgtaatcccagctactcgggaggctgaggcaggagaatcgcttgaacccgggaggtggaagttgcagtgagccgagattgcgccattgcactccagcctgggcaacaagagtgaaactctgtctcaaaaaaaaaaattaaatattaaattatgtaaatttacgattaaatcctgtttttaaaaaaggtaataaatactgataacttaacattttctcattattgtactattacctgtgctcttgagattatttgtctatcgtgctggaaggtggagatcctgtatcctgtataactgtgtgctactgctcatttctccccagctttgcgtttgctggggtcagattggaagctttaaatctgccctggtgggagcgtatatcccacaaaaattgacaaatgctataactcagagctctcccatatcaagcgttaaatggttaaacattgaccaacatactactggtggtatcactaaatgaatttaccttgtttatttgttgtctgtctttccataaggacacgtaggctctcagtgcagtccctgcctgccttgttcatgctgtattcacagcctgtaaaacagtgcctggtacactgtgagctctcagtcactatctgttgaatgagtggatcctccagagcagttaaaagggaggtataagaaaggcctatttcactaacagtagggagaggcctgctctactaagtaagatgggggagagatagttcccctaaggctt

SEQ ID NO: 2647 - DNA, 1034 bp, Homo sapiens
aaaaaaaaaggccgggcgtggtggctcacacctgtaatcccagcactttgggaggctgaggcgggcggatcacgaggtcagcagttccagaccagcctgaccaacatggtgaaactccgtctctactaaaaacacaaaaattagccgggcatggtggcgtgcacctgtaatcccagctactcgggaggctgaggcaggaaaattgcttgaacctgggaggcagagattgcagtgagccaagattgcgccactgcactccagcctgggtgatagagcgagattccgtctcaaaaaaaaaaaaaaattgtacaggctacagttggaaatgcgtttttttttaaagaccagataattatttgaagtcaagtacctactgttctttgatcaacccaatactgaatacctcctctgtgctgggtactaccagggatatgaagatgaacaagatgccatccccatcctggacgttcccctgggttgcagagggcagggtgggtgggtaatgtgtaaacaagttgtgagggttcagtgaacagagacaaggagcaacatgcatgctgcagagggttcctgagagtgctgcagaggaaagggaccatactcaggaagacttcacagaagcgacttttgaacccttcaggaagaccaggagaggatcctcgccaaggcagggatgaggaatgcaagatgggaggcttgggccccagagattcatcagtgatattaaagtgttggcccagatggggtggtgggtagatggaaaataaagatggacctccccgcctcctccccaccatccaccatcagaagactggaggtatagaaacaagttaggaggctgctctgtcccaatgagaaatgcaggatgcctgagatgcctgagccgcagcagtggaggcactcagggcacagccaagagatgaggaggatttactgacaaaaatgccagtcaccaagagagagacaaatcagacacctgttctcagtgctgtgatgggctgggtctggtaggaggcaaaggatgtgttaattat

SEQ ID NO: 2648 - DNA, 1029 bp, Homo sapiens
gcgtgagccaccgcgcccagccagaaattttttaaccatagcataattctaagtatttttaggacttgctgtatgtatttcctatttaaattaaggagtggttctgcaaagtaaaagaaaatccatcacccaggttgtgatttgtaaggctcagaaatgttgtgtttgaaaacattttgaatgtagagcagatgcttctctggctactatctcacaaccagaattgttctggaggttggggaaatagctggtattctgttgtctgagggcatgtggctgcatatattcagataggcagtgtatccattaacctagatgagggggtacatgtattcagatgggcactatacccattaacctagatgaacattatggcttcctcttcccttctaggactttgaagaaggctgttacctgctttgtaaaagtgaagccatacaagtgactacgaaagacatcctagttacagagaaaggaaatactgtgttagaatttttagtaggactctttaaaccttttgtggaaagctatcaggtatgtaaatttggcaagttctccttcatgccccccatatcaaatataataagacattctcaccctgtgcttatttccagtctgaagggcaggtatcttccccaggcaaatggaagaaggagagagagtgactaatacgatcagtgatttcacctcaccagtgagaccttgctccccgcattcaggaggaagcttggttcattacagacccaagaggacaacagcttagtgatgccatggtcacagtattcacaggaccacagttacacccacgcatcatctgtcatactgtgtctcatgtcttaatgaggccttcatgtcagtcaatatgtaacctcgaggtttgatatatatcaggcactcagtaaaggcaagacttgagtgatacataaagtcagttacagattaccagatgtttatgttggaaagaaaaagttcaagtgcaagttctgaaagcgtttgtcagagctcttgggagtagttagagagatggga

SEQ ID NO: 2649 - DNA, 1047 bp, Homo sapiens
tctatagcctaggtgtgtgtatatatatatatatattacataggctataccatttaggtttgtgtaagtacactcttaagatgtttgcacaatgacaaaattgcctaacaatggatttttcagaacatatccctgccaagtgaggcacaactgtagttacctaaatcatagagaagggggttcagaaaaggaacagactttatctggttgaggaggtcaagaaaagctttataactgtacattttgttactaccatcaccactcctgctgctcactattgagcacctattgtgtgtcagactttggactaaacgtcgtctttaccacagccatgcaaaatgaggatatcccattttagggatgaggagccacttggagcctgtcccaggtctcatgctgtgattgtgggtttaggttccagtttccctgactctaaggctcttgttctgtcccctttaccattcaactcatcactcctgcgattaaaacatggagaggtgagcattaaaggacgaattgtacttttgacaagcagagataggacaggaggctactcttggcagaaagcatgggaataatgtgaacaaaagtgagttcagacaactgggggcatatttaggactagaggtagttcattttaacccgatagaacagtcatggaaaacagaggtattttgggactgtgttgtgtatagatccttgaattaagactaaatatggaaaatgatagatatttaaaaagttcagtaccattttcaagatgttttttaatgtttaattaaattgaaccaaaaatcaggaacctaaatttgtttctcctttatgagaatagatctttatcattgctctaatttagaacattgagaaacttttgcagtacctttcttgaatttgagtcttcttcgttgagcggcatttacttgaaaaataaagttctggctgggtacagtggctcatgcacgtaatcagatagatggattgcttgagcccaggagttgacctgtctgggtaagatggtgagaccttgtctctacaaaaaattgaaaa

SEQ ID NO: 2650 - DNA, 1022 bp, Homo sapiens
ccctgttgacattaggagctccttgtatattaggaatagcctgtgataagagttatacatatatttttctgagtttgtctttttacttggtgtttttttcctatagaattttaaagttttgtctgggtgcagtggctgacgcctataatcccagcactttgggaggctgaggcgggcagattgcttgaggtcaggagtttaagaccatccttgccaatatggccaaaccccatctctactaaaatacaaaaattagccaggcatggtggtgcacacctgtagtgccagctactcaggaggctgaggcacgagaatcacttggaccgaggaggcagagcttgcagtgaggagagattgagccactgcactccagcctgggcaacagagtaagaccctgtctcaaaaaaaaaagaattttaaagtttttatgtagttgaattcattgatttttctggattttgatatatagtcaaaaaggtcttcctagaacagggagttcttaacctgtgattttcagagctttagatgttacacaaatttgagtaccccttctctgaaatgcctgggactagaagtgtcttggatttcagatttatttggattttggaatatttgtgttattcttacaggtggagcatcccaaatctgaaaatccgcaatgctccaatgagcatttccttttgagtgtcatgtcattgctcaagagtttctgattttggagcattttggattttcagagttgggatgctcaactcatatgcaatattttgtgaatgagtgcttatataatttttatagaatgaggtgggttttttgttgttgttgttttgtttttgtgagacagtgtctcattctgtcccccaggctggagtgcagtggcacaatcacagctcactgcagcgtcaacctccccaggctcagaggatcctcccacctcagcctcctgagtgtagctgggattacaggcatgcaccaccacacctggctaatttttgtatttttttgtagagacagggtttcgc

SEQ ID NO: 2651 - DNA, 1028 bp, Homo sapiens
gtgcccatagtcatttaggagtcatttcaaatggtgctctatagtcttcagtgccaccatgctgggagggctgaccctcttttcagtcaggtcttttcccttacctgttttctgcttgggttccaaataggatttttgtctagagggtgaaaaagaaggcatcctacttaaggcctgaaaagcacacttcagagaattttatttgactcaatgaatgatgcttttctgactgagcaccttcttggtgccaaaagcactatattagccactagggacacaaaaaattaaaacattcagatcctggagaacttttcagtctggtaatagaaatatttataaacagataaaatggtacctcataaggcttattacagagacataagcacagaacttggagaatgtggagagtgagcttagcagaagcttcactgggtaagatacttgtgttgttagcgtcagtcaggcatttatagggagtaatgtagtcctttagaaccctttgctatttttacttatagggaaaacttcaatttagcagtgggaatgattcttattttagtatggtattacataaaatcttatctttatcctaatttttgatcatttacaaatttgatttctgaaacttttagtgttcatgaagattttctgtggttttgtttttaaaagatttttttgtcctctaatcccatgtgcatctatctttacacagtttatgaagtattaactgctgctgtttcccattaaaatcaacttttgaacagaaactaaatatagttgctttctctcctaaaatagaacttttcagaaagctctgggaaagtttcaaaaattaaaaaaaaaaaaaaaaaaaaaaaagactgcttatgtaaattgttttcttgcagttgttaacttgcttattgaatactaaaaattctgtctccactcaggtataccatacttttcacgatgaggtggatgagtatcggcgacactggtggcgctgcaatgggccgtgccagcacaggccaccgtattacggctat

SEQ ID NO: 2652 - DNA, 1009 bp, Homo sapiens
tttagttgttcaccattcataacactgttagcagcccttttcgttttagactggttggctgttcacaaattttgatattccttaaagcattaaaacattttaataaatacttataaataggtattaaaatgtatattatgttcaatatatagttatattttcatagaggatcatttctctaaatgaatgtaacaaattatgtgtaattaaatgcttcctgagccaaaaccacacaaggttctggggctgtgaagtagctgagatggtccatgtcctcaaggagctttacagcatagttggggagtaagacaaatgcacattaatctccttagagtttgctaagtgctatgacaagggtttttgctgggtgctgtgggtaaactgtaggaagaaaaattagctctgcccaggacttcgggggatgtttcttggaggagacaacatccaaagttgaatcatgtagagtgagtcgagttagcctggttaaagaagggtggggaagaacctttcaaagggaagaaggaacacaaagtcatgttccgagggaactgaatgctattccaagtgaatagagtaaaatgtgaggggcaaaatggccaaaggagagatggcagataggacagatctagctaagtagtacaagtttgaggccagggatctcatgttcctcactttatgtctggtttgtgtgatacctgctaataagcatctcttaattaaggtggggcttggaaaggcttataagccagtcgaggacatgttgagaagtgtttccaatggatttttctggggacagcatagataagagggggaagggtagtggcagggagggagaggaagagacaattttttgagaaacaggtagtaaagtcaggagttggtttcaggttctagggaatgatggaaatagttgagaaaatggaactcaatttgaaataagccttactacatctgttaaacacttgagaaaatttgcaccctaaaaattctgatattcccccaaatatgt

SEQ ID NO: 2653 - DNA, 1028 bp, Homo sapiens
tgtctcaaaaaaaaaaaaaaaaaaaaaagacaaagttggattttttttctgtctcatagatatgctgcaggcacagattatggtgactgctgtcttttgtctttatggtttttggaagactacgatagagctttagatttaggaagcagccaatattccttggaaaaccagaaactcaagtaccttcctcttaaatgtaaacacacaagcaagaggtaccagacatttaaggaaaacttctagcatgaaagaaaaaaaattgaaacagaaaaaagttaaatactgtatcaattaagagattattacatatattttcttaaattcgagaacaaaaaagagctcctgaaatttaggaacctgacaacagacaccatatactcaccagaagaatgggaaaacagatgtccccagtcaagacagatacacagtaactagagaagaaaataggttcaaaccagtagaggtcctgcctggacaaaggagtgccagaaagagagaacagagaatggatggagaaaatttaaatgtcccaaaatggtggggtgattttacagtctgcattcctagcacagaggttgacaagtggcacacattaaagcacactataaaactatggcgccctggggataagaatattctatgagcttccacaaagaaaaagattacatataaagaatcagaaataagaatggcttcagatttctcagtatctacacactggaacctagaaccagtgaggcaatgctttcaaaattctggaacatgatttccaaagttaccaatgaaatgtggtggtaaaacaaagatattggtctcagaaaatttaccatccatacatttctacaggaagtattagagggcatgctccattcagtaaaccaagaaagatgaagacatgggatccaggaaacaggagagctgaccgaagagtggtgaaggaaatctctagaacacaggtgaagggagacccaagaaagacagctgtgccccaggcgttaagagcaaccagtccagattggtgcaagtta

SEQ ID NO: 2654 - DNA, 1039 bp, Homo sapiens
ttgcctctcctcacctaggccagctgagcctctcccttcaaagcgcacttgcccgtctctccaatgtagcaccaccttcgttcctcaactcctgtagcacttagcctccatgccatctggcatttatttactataaactcccaagtatctgttatttattcatctaaaaaggacgtaaccaaaccaaactcaggatttcataaaaaggaaggtctatgaggcagttactgtgtcagaaaatctttacagaagcagcagggggcagagacagcactgggatgccactgggaagagacatgggattgaaaagggcacatcatgtgatgtgacagtctttctttggtttccattcaggatttcttacaatctccagctacaacctgcttagcttgctactcagtacgtgaattaggatgcaggcaacacacctcagaaggcaggaagaaaaaaggcacagctgataatcaagtcgttagagtcaaccatcattactaaagccaactctccacccagcgcatctaagcctgtgcctcttcttgccaccctagcatctcctaagccagatacagcaaatgaatgccggaagctcactatcagaatgttccaagacctttccataataaaaaataagtatttttttttaatgtgctatttttctacaaatatttactttcatgataatgtctacaatatcttgttttcacagccagagcattttaattgagtcaggataaatggtttttaaaaaagcatttgaaataaagcactaaatataataggttgcaaataccttgtagaaaaagtataatgaaacagatgctcattatttgtaaagctaataggatcatttttctaacattaactcccacacatggtaacctgttctctacttttctttcttctgtttttctcttcacttctactctctggttacctctgatttttctactctgtatccattttcctatgttgtccctcaccaccttttaaaaaacccttttccttcttgatctttctctctcccaagtaaaatactctt

SEQ ID NO: 2655 - DNA, 1076 bp, Homo sapiens
ttcctgtccacatgaacttcttgtgctgcttggatgtcctttggtgtggcatctggcctccttcagagagagagagtgcaagagagcaaggaggaaaccacaatctctatgtcctaatctcagacatcagacactgtcatttttgtcacattgtgtttgttagaagggaggcagttttaaaaactgtctcacattgaagaggaaggaagttatgtcccaccctttggagggaggagtctcaggttatttgtggatatatttgaaaaccaccacagtatctactgtgatcgtcagaagtttaagacagctggccgtaattgaataaagagcgtactgatacagaaggtggagttgcggctgggtgtggtggctcacgcctgtaatcccagcactttgggaggccgaggcggggggatcacgaggccatgagtttgagaccagcctggccaacatggtgaaaccctgactctaataaagtacacggtgaaaccccgtctctactaaaaatacaaaaaattagccgggcgtcagtagtccccactacttgggaggctgaggcaggagaatggcgtgaacccaggaggcggagcttgcagtgagccgagatcgtgccactgcactccagcctgggcaacagagcgaggctccgtctcaaaaaaaaaaaaaaaaaagtacgaaaaattagttggtcgtagtgggaggtgcctgtaatcccagctactcgggaggctgaggcaggagaatcgcttgaacccggaacgcggaggttgcagtgagccgagatcgcgcctttgcactccagccccggcgacagaatgagactccatctcaaaaaaaagaaaaggtggagttgcttctaaggtggtgtcctcattacccgtctgctgaactacagttttttggtttttttttttttttgagacagagtctctgtcacacaggctgagataataattaggcacgatcttggctcactgcaaaacctctgcctcctgggctcaagccattttcctacctcagcctcctgagtagctgggactacaggcgtgtgtcaccatgcctaatttttttaaatt

SEQ ID NO: 2656 - DNA, 1076 bp, Homo sapiens; identical to SEQ ID NO: 2655

SEQ ID NO: 2657 - DNA, 1076 bp, Homo sapiens; identical to SEQ ID NO: 2655

SEQ ID NO: 2658 - DNA, 1076 bp, Homo sapiens; identical to SEQ ID NO: 2655

SEQ ID NO: 2659 - DNA, 1059 bp, Homo sapiens
cccagtaaaggtggaaaagcaggaagacaacagggaaaaaaattttaataaacttgaaaaaaaaggtccaagtttctttttttggaggtgtttatattattaatatatgtggttaaagtaatttttaaaactttatgtaactctttgttacgtgtcattttgtgataatctcttgtttactaagttcattttttacaacttgtacagtattcccattgtgagactaagtagtaaaacccagttaatacatacctatatttaaagaggaaaatattttagttgagcctttttgatttccatgtaatttagaaataagatgattttattctcttcattttcataaactgaataattattgctttcttacatatagagacagtacttttaggtacagactgtttttgctttctagccatttgtattctaagaaaattaaaatcatttcccttttttttcctttcataagatttaccaagtgttttggaaaagtttgacataaaagcttacaggtctgtcagaggagattttaaaagggatttcatgggaagtcttttttttttttttttgagatggactctcactctgtcacccagactggcgtgcagtggtgcagtctcagctcactgcaacctccgcctcccaggttcaagcaattctcctgcctccgcctcccaggttcaagcaattctcctgcctcagcctcccaggtagctgggacgacaggcctgtgccaccatgcccggctaatttttgtatttttagtagacatggggtttcactatatattggctaggctggttttgaactcttgacctcaagtgatccacccacctcagcctcccaaagagctgggattataggcgtgagccatcgcgcccggcccggaaagtctttaatgagaagcactagcttccagacaaaatttcatgagatagtatagtttgttcaactcaaacccaggatctttaatgtccgagcaaccactttgctatcaaagttggagttaattgcattaaaaggagttatcagatcaatattctactgttgttgaatcatctg

SEQ ID NO: 2660 - DNA, 1059 bp, Homo sapiens; identical to SEQ ID NO: 2659

SEQ ID NO: 2661 - DNA, 1059 bp, Homo sapiens; identical to SEQ ID NO: 2659

SEQ ID NO: 2662 - DNA, 1059 bp, Homo sapiens; identical to SEQ ID NO: 2659

SEQ ID NO: 2663 - DNA, 1041 bp, Homo sapiens
agtttgatactagctattagaatattctgtgactttgtgaggattagaagacatcagcagtaggtacaacttaagagttaatattttaataaaaataggtctcagctgggtgtggtggcgcatgcctgtaatctcagcactttgggaggccaaggcgggcagatcacttgagctcaggaggtcgagaccagcctgggcaacatggtgaaaccctgtctctactaaaaatacaaaaattaggtgggattggtggtgcatgcctatcatcccggctacttgggaggctgaggtgggaggcttgcttgagcctgggaggcagaggctgcagtgtgccaagatcccaccaccgcactctagcctgggcgactaagccagaccctgtctcaaaaaaaaaaaaaaaaaaggaaaagtctgtaggggttgggtggacttaagaaagaaaaattcagagcagctagggattttgtgttaagattattcattaagatatagctattgtctgtgaaaatatatgatatattttgattgttagagcctgttacattaaactttatttggatgatatgcgtgaaaattttaatattagataaatgttaaaatctgcataacctattttctcgttcatttttgaactcatggcagtctggctttctgcctcacaattattgaaatgcccttgttaccttcatattattaagtctctgttttcttattttacatttttgtagcatatgatactgttgactacttaattctttttcgaaagttcctgtttcagttttgtgacttttgtttacatttttttctctaggactttactattttatttttctacgcaggctttgtatatttgatagacttcgtgattgcaagtaaaagaaactaacttaaactagtctaagcagaacggggaaattaattataaaaaaagccactatcaactagcagatttcttattttatgcactattttctattacagttgtaatcatattattcatacagttttgactagtaaactgagaaaatagcagacttcaga

SEQ ID NO: 2664 - DNA, 1041 bp, Homo sapiens; identical to SEQ ID NO: 2663

SEQ ID NO: 2665 - DNA, 1041 bp, Homo sapiens; identical to SEQ ID NO: 2663

SEQ ID NO: 2666 - DNA, 1041 bp, Homo sapiens; identical to SEQ ID NO: 2663

SEQ ID NO: 2667 - DNA, 1030 bp, Homo sapiens
tttccctcttgttgaaaaattaacagtttgggggaaatgtcctccatttcaaagaagaaatacatgtttttttcttaagtttagtttatatcactgataatgataagaattgtcattttttgagacatttcggtacacaaaactaagtttatatcctaattaatgttttaattcttttatccaagaatgtgaatgatgggtaaagtggatgttttgggccagttaagatatgtttttagccactattctttatattcacaatctcataggtttttgcaatacctctaaatcatagatatttttaccacttcacaggcggggagattgaggctcacaagttatgctcagggtcataagctagcacgtggtaccattggtttcttcccacatggatttcatttacctcttaactttacaacctaactcctagcaaaggctttattttgcttaccccaaatactgaggttttcctcataaacccagcacacactgtggcccttttttcatagcacttctcaacttctaatgtgtaatctctttatatattatatttcttcattatctctctttcccttactagaatgtagactctatagatctctacaaagatttcattcctgtttttcactttatatatcccagacacctaataagtctcccgaaatacaaatgttgaaaagaatgaagaacaaaactaattttaaaaggctttttgttgttgttcagccatatgctttatctgatgatttgctttcacaagtttatattttactgttttttgtttcttccgaaagaaagcaagtttccaggagctatttcttagacatactagcaggaataggatcaatattaatgtttagggaagttccaaagctactatagcagtacagagaaattcgatgtaggttcagcatattggcaaaattgtgagtgcccactggaaaaatgaactatgatgtgaatctctgtaagcttttggagtaacagtaggaagagtgtagtggatggaataatatagctaaaaattgaa

SEQ ID NO: 2668 - DNA, 1030 bp, Homo sapiens; identical to SEQ ID NO: 2667

SEQ ID NO: 2669 - DNA, 1030 bp, Homo sapiens; identical to SEQ ID NO: 2667

SEQ ID NO: 2670 - DNA, 1030 bp, Homo sapiens; identical to SEQ ID NO: 2667

SEQ ID NO: 2671 - DNA, 1157 bp, Homo sapiens
tgcttacatcctagacataggcatggtatttaacctctttaaagcttcagtttccccatttgtgaaatgggggtaattgcatcactactaaatctgtagcattcttttgagaactgaaaaaaatggtcaaagtaaagcccttggcataatggtaacagacaatagataagctcttaattttaaaaaatgtttaaaaattttttcgagacagggtctcactctgtctcctaggcaggagtgcagtggtgctatcacagctcactgcagcctcgaactcctgggctcaagtgatcctcccatctcagcctcccgagtagctgggactacaggtgctggcaccatacctggctagtttcgttgattttaattttttggcagagtctcgttatgttgcccaggcttgtctcaaactcctgggctcaagcgatcctcccgcctcatcttggtttcctgaaatgcggggattaaaatataaaccaccgtgtctggccggtaaactcattactgttggcttttattatgatttttatttgcctcccagtacctaggtatttaattataagaggaatgccctttcagaatccctgtcatagtattgcagttagcagggctagctccactgcattcctgagaagtgatgcttgggaggctgatatctctcctgcatcctgctgctgccctataaaggaggagggcagtggggctcaactcccagcctgcacacctcctcctcttccttagcttgctgatctttctcttaagggctttttcctccctctgcctaccccggtaatgactaccctcttttccattttttttaaacttttattttaggttcagggttacatgtaaaagttcgttacataggtaaactcatgtcacagggttttgttgtacagattatttgatcacccaggtattaagcccagtacccaatagttatcttttctgctcctctccccccacccaccctccaccctcaagtagacaccagtgtctgttgtttccttctttgtgttcataagttcttgtcatttagctcctgcttataagtgacaacatgtggtatttggttttctgttcctgtgtgactttactaaggacaatgacctctagctccatccatgttcctgcaaaagacatgatcttgttcgttt

SEQ ID NO: 2672 - DNA, 1093 bp, Homo sapiens
atctaaaggaaggcaatccagcagggatatggcaaccccacaaagttgtcatggaaccagactaattccagttatctgctttgccattactaagctgtggctttgtcttcaaggttcaagatggcgtctagagctccagccattgtatccatagtcccagatgcctgatgaatgaaagaaaagtctcctcttcccctttaagatttctttaagtcccataaaacattttgaaaccagattggaagtcttttaaccttctgattccaacctagagcaaggaaatcccccaaggagtgctctaccatgtgaaatcttctcttccccatgttgtcatgatcctgccctcatgtgctctgactattgccaagccttggatttcatttctggaataatgccttgctcaatattagaaccactttagttaggatttgggggaggcagcatgattgaagaacgtgagtgctgttgacgacagtattgttggtgaaagcagctccagttccacaacttacgatctgagacatcgtgtggccattcatgtacaggctttcagaactgagagaactttggtagactaatcaagatgagataggttatccggtggcaacaaagatacctacgtctcagtagcttaattcaatgtatgcttccttttctcttgttcatgttttatgttttatagaagtttacaggcaagatcctactcacagaggctcttgggatcaaggctgacagaagctccatctgaagacttttatactatagaggcagaaaaagagtgatgaatcaagcactggcttctaaagcttccgcccagatgggaagcatatctcctctgctcacatttccctgaccaaagccagtcacatggccatcctcagcttcagagaggttgggaaggcattcccactatgtgtctggatgccagcaactcagaaatatttggtgagtgcctctgtggctactggtagtttagttcttatgcctatgttccagttttgtcctctgaaaggccaaatctgaaattcaaaatcttacaaacaggtttatacttgaaaacgggtaaacattctcataacataaagcttaataa

SEQ ID NO: 2673 - DNA, 1121 bp, Homo sapiens
gtcctggctcgctgcagacttggcatctccagtgcctgtatccctgaatttgtggttgaacttaagtttggggagtcccagtggccctaatgagactggaaataccaccctaaacaacctcctttagcagctaaactgacaataataatctgttgtttactgcacaggattgagatgagtgtagcaatctcctagacgaagggccaagctgctcacccacctgggtggggtggtcagtctagggcggcccaaggggattcttgggtcacgatgaccctggggctgataaccaactcacaaatacataaatcaacaacatgaggctagcttctgctggggctttgttgtctggtgggcctgagttttaatcccggctgacctcttactaagcgattgtgggtaagtcattctaatttttttctctctgagcctcaaattcctcatctataaagtgagcatgaaatcctattctagtcattctgagggacaactgaagtgatatatgtgataatatgaaatatgatagatgtgatatatagaactgtaaaacttttaaaaagtaaaatgcctgttaaattgttaaatatgtgtaatatgtgaaaaactcctggcaaatatacctactaatatccatttccatatagttcttttatataaaaggtagagcagtatatgtaaaccttctaataaaacacttagctataactatgaattctcatgtgctcttcctgctgtcagcctctcctcctgctgttaaatctttgcaaggcctcctctagttgttatgttctgaaaagattcaagtttgtatcctagacttcaaagttatgtctctcctatgtggtgtgtagtgtatcaccctgtacttggaggtatgtgatacaagaaactaaggaactaaaataattctttttttttttttttttgagatggagtctcactctgtcgcccagtctggagtgcagtggtacgatcttgctcactgcaacctctgcctcccgagttcaagcaattctcctgcctcagcctccggagtagctgggattacaggtgcccgccaccatgcctggctaattttgtattcttagtagagatggggttttaccatgttgaccagactg

SEQ ID NO: 2674 - DNA, 1151 bp, Homo sapiens
ctcaattaataattcagttgccccataaaatatagcctcactgaatttcttgtcttgtcttccaagacattaagtcagggcttatttatagccatggctctcttccctggctaagcatccgggccacctgccccagcaggtgagcccttggtccaaggtggtcctggactcagcatgtttttcagagttctccaggtaattccaatggttagtcaatttatcattcatttggggctgattatcagtcttccatgtggataaaaccagttaatttcctgtggatcttttttgaaagccttattaagaggagggagccctgttttgaacttgtgtcatgagctctgcctgtctctggaggtggcaagggtgctcgtcttcattctggtctgtgtcgcatgctgtcttcctctgtctccctactctttctcaaccttcttatttactattccacacactcgctgggttagacaaccttttctgttgttctgctgaaggttacaatttggagtcgattcctgtagtcttcctttttctattcactttcaaaaaagatgttgcaaagtccaagtttcttcctcatgttccgtttctctggggagtgctgtagaagtttccataccttcctgcttctggccttcttagtattttaataactcctgccttgttcccaggtttctccaagtatctggggaaagtagaaacctcagagatggggtctggaaatgtaaaacgttgatgaatttcagggtcacccttgtgaaagctattgattggtcagaggtattctggaaaagtctgcaaaatccagaagctaatttctattttaaaatacaccctataactcttgagtgcccactcatcctcagctggctctggggaatggtgtctgagctcacggtctcatctgtgggagctgcatctcatcaacctattttggaaaccagcatacttctggttctgagaattcagcttaaaaacaatacctagtttcctgtataatccccccaccaaaaaaaagtttgcaatgtgccccatgtctatctgacacattttcacttgtttcttcattgatgatctaggtctgtccaccctgctctatttcttttctatttatctccattatcttagtctatttgggctgctgtaacaaa

SEQ ID NO: 2675 - DNA, 1025 bp, Homo sapiens
gcttagaagccaatactagactggccaaatagagtggcatgttgagacttaccctgagattttagtttttaatgcagcgaatccattgggatcacttataaaaaaggattttaccctattaatctttactagaatggatatttttaaacttaatttttttgtgcttctcattgtaggagtcctttgaatgtagcttccctgagtgttcattcagttcattagttattgagttcttatagtggatgacatcttgctagtctataggcttcatagggttttaaaaaatgaatacgaaatattcccaaacctgattaattacatacagtagaagagggcgtctgtagacaaaacccagagatcaaggcagaatgtaacaactctcttgagagtactacaaaatgccatgtggttcagagaaaggacatcacatatggttgtgaggtcagggaagaattttatattaaagtgacatgagccttgagatgggccttgatgaaatggttggatttcaatgggtgtggattttagagaaagggcataagaagtatgcatctgtaattagaaacctgtgcatttgttctgggaagagtgagaggtccactttgcaggtgtgtggagaactcacaggggtgcaatgaatgagtccagagtagggctgagggcatcttgggaaaggcctctgagaattttactctccatttgaaaaggaataagaggcattcacgtttttggagcaatactagatgggatagattggaagtatgaaatatttgaaggcagaaaggcccatcactaattgtagttttcctggagtaaagaaataaaatgcttaatgtggagtagtactggaaatggggaaaagcagacctgaacaatattctcagtttataatctgtaagagggtactggggctgaggaaaataacaagtttaaaaatgaccaagatttctagccttcatttggttcactctcttaacatgcattgagttcttgctttatgtcagcactgctctgggcgcttggac

SEQ ID NO: 2676 - DNA, 1025 bp, Homo sapiens; identical to SEQ ID NO: 2675

SEQ ID NO: 2677 - DNA, 1025 bp, Homo sapiens; identical to SEQ ID NO: 2675

SEQ ID NO: 2678 - DNA, 1028 bp, Homo sapiens
ccaaccttcagaccccagaatggtagatccactgatagcttgcaccatgcacctggaaaagctgcagacactcagtgctagcccgtgaaagcagccaggagggggactgtaccctgcaaagccataggggtggagctgtccaagaccataggaacccatctcttgcatcagcatgacctggttctgagacatggagtcaaaggagatcatttcagatctttaagatttgactgcccagctggaatttggagttgcgtggggcctgtagcccctttgttttggccagtttctcccatttgggatggagcatttatccaatgcctgtacccctaatgtatcttggaagtaactaacttgcttttgattttacaggctcctaggtggaagagacttactttgtctcagattagattttggacttggaattttgggctaatgctggaatggattaaaactttggggtactgttggaaaagcatgattggttttgaaatttgaaagggacttgagatttgagaggggctggggtgaaatgatatggttaggctttgtgtccccacccaaatttcatcttgaattgtaatccccataatccccaaatgttaagggagagaccaggtgtaggtaattgaatcatgggggcagtttccccagtgctgttcccaggatagtgagttctcatgagatctggtggctttataaagggctctttccccctgcgttctgcacttctccttcctgccaccatgtgaagaaggtgccttgcttccccttcaccttctgccatgattgtcagtttcttgaggcctccccagccacactgaactgtgagtcaattaaacctctttcctttgtaaattaacgagtcttgggcagttctttttagcagaatgaaaacagactaatacaatagagtctagcaatagagtggagaacaacatagttacaagctctgccctcagggaaaagaaaacaataatcacataaataattagaattgtcataaatactctgaaataaaagtaaaa

SEQ ID NO: 2679 - DNA, 1028 bp, Homo sapiens; identical to SEQ ID NO: 2678

SEQ ID NO: 2680 - DNA, 1028 bp, Homo sapiens; identical to SEQ ID NO: 2678

SEQ ID NO: 2681 - DNA, 1034 bp, Homo sapiens
cacacacacacacacacacacacacacacaaccctcagaatatgtgcctgtactgttcaataacttacacattgaactaggagccagggatctgggattactgaccagtggcagtggtcacttgttgtaatgtctttgttgcacttcccagcctaatggccatagtgccctgcatgggtaggagttcccctccctgagagaagtctgggcattagcactttagtgagcttcaaaaatctagtcagtcaactccctaactaggtaccagtgaagatgcactacctgctagcattttgcaatagttttatccactcatgcgaggttctgtgtagggacaacccatgtaaggcccctgttttacctactatggctgcatcaaaatcaacacaaacttagtgatttaaaagaactatttatgatattcgtggatctgtagatcagaaattggggtggggcacagtgaggagggtgtctctgctccacaatgtctgggtgttagctgaatgacttgaagacaggggctgggaccatctgaaggttcagtccttcccaagtctggctgttgactagggctttagctgaggctctcatccagacatctacaaacagcccgtccatgtagctggggcttcctcacaacatggagactgggttccagggtgggtgatctgaaaagacatgtcaccttttatgacctgactttgcaagtcaggcagtgtcaccttcactatgttccatacattgaaggaatttcaagggccatccaggtttaacaggagaagtaataaactctgttttttgatggtggagaggcaatattccagaaaagtgtgttgctatgaccacacctacactctgccatacctgggcatggcatggaaatggccaaggaagttttgcctagtccctcatttatggactaagaggcaggacctgggcaactttgcacagctgatacccatggttcttttttttttttttttgagatggagtctcctctgttgccaggccggagtgcagtggtgcgatcttgg

SEQ ID NO: 2682 - DNA, 1034 bp, Homo sapiens; identical to SEQ ID NO: 2681

SEQ ID NO: 2683 - DNA, 1034 bp, Homo sapiens; identical to SEQ ID NO: 2681

SEQ ID NO: 2684 - DNA, 1038 bp, Homo sapiens
tatatttatatgttctttgtatttttaaaagtacatataaaaataaaggacccaaaaaaatcacactattttcaggtctctgatataactggtacgaagatatttgttgttctaatctttctggaaagcaaactaggtgagtgtaaccaaagttataaaattattcgtagcttctcttatccctggctggtcaattttaggactctatctaaggaaatatcttctctcccggaacagggaaactaaaagtgcgcttcatggctgaacatttataatcagctgaagtggaagcctgtgaggggtgtggccaggaaggctagtgtgttacataggactgaggtgtggcactaggaagcaatgctgcctgggttgttctctgaggagaggctgtgaggggaggaaagggtgctccccagttggtgtgtacaccccagatggtgtgtacatcgtgattctgaccacgtggctgagagccacctacagtttttacacactccttactccagcagctgtaggtggagtttctctgggagctcattaggactctcctcacactgggggttggggaggggttcctgaccatcttcaaacctgggcccctattgttctaagtctgtgtctctatcaatttagaacaatgtaaagggggtgaatgtttgtttacttacttatttctttgtttccctctaaagttgcttgaatttatatagaaataaaaccatgttacacgttatagtggttctttttttaagaccttgagtgtatgatcttgtactatttagaaaagcaggctgagtgtctacatgcttcagagtggctcagcagctgacatctttctctcaactgaatatgaataacttgcatttttaattaaaaatcacagatttatttttgagattcctgaagttcttggattataaaattccccaattctggacagattgaggattttatgtaagctaaggttttaaaatgaggatttccaattggtagaaagtaatgtatacatgtgtgtccaaattcttttgtgctgaaact

SEQ ID NO: 2685 - DNA, 1012 bp, Homo sapiens
accttccaaaactcattttgaggtgccagaataagttttattttggcttttagatgacagcctccagaggaatggcatccacaattactcttcgtctctgggggcagcaaaatgtccacagcacttgggaacagtcgggtcagttggagtggcatgcccccaggaagacagaaaccttcttgtacagttgtctgtttttattatcatagacaggtggttgatagctgttttatttctcccaaatatggctttcgttttggaggaaaaacttggaataagtagtgacttacttcatagatgctctgcccttctccccgaccccaccagtggagggtgacattgctccttcagctccccacttctcagctctgggacatcggtgagttccccaggaaggatgcggacgaggacaaccatgtacctgccctaagtggggagaccaggcgtgtgtacagataaacttaatagagaggcaaaaatgaagcatgtcagaaacacagaagtgcggagattgttcagacctctcttgggtgattacagtggactccttattgatcttttagctaataaaatgaatggaaaaatatttcataagtgtacaatatgcagtaggaaaatagagtactgtttacttaaaagtctgaaaaacactgctgtactgcttccgtgcaatcacaactggggtttagacacccactatcttatcttgtctattccaaaaggagtctaacatttgtttctgactccacagccagcagtctttctagcacaacttgtgatcctccctggattagactctttcggctgtgggagaagattcccacctctgtgtgtgccttcgaaggcctttaggatctgggcccgcagccccgtctgtcactggctgcccctggttgccactgatccctaccaccagccacactgtaccatatgctgctttggcttttggaatttgaacaaaatctagcttaactcagacatgccctctaggactatattgctgtcatcattt

SEQ ID NO: 2686 - DNA, 1017 bp, Homo sapiens
tccgaatccatttttgagagtgcccttcacattcagtacttagtccatcgtttaggcacctgtgaggcatgatctctgccctcaagaaaaacagaccatggggcaatcaaaatctaggggcagggaagggagagatctatgtgagcagtggtagtggagaggtgtccaaaggaaggggttcttgagttggctcttgaaggaggaaatgggaaaaagaagggagaacattccaggtaagaaaatgagctatgaaaaggggtcagagtcagcgtccccttgctaccagctgaacatgcgtagtgtgaagatgagactgagcccgtgatatgggggaaatgtaccacacgaattagtaatattatctagacttattcttcacaatgttgggtgaacagagtactttccaatgaatatgcatagtgtgaagatgagactgagctcatgatatgggggaaatataccacacaaattagtaatattatcttgacttattcttcataacgttgggtgaacagagtactttccaaaaacacccgagaactcttccagttttagacaagatagagtagacacacttgtgtttatttttcctgctaaggatgttatttataatacaagcataagaagacctgaaaagtgaagagaaaaagacagactggctaggaacctaaggacctaaggaacaacacaacagacacaactgaaaatcatttgtcatgccaagaatcaggaatacctaaacctgagtgaggaaaggccatcagcagatctcaacagcaaggtgactcagatagtggaattatagggcaaggatttgaaaacagctatcataaaaatgcttcataaaattacagatacacatgaaacaaatgaaaaatagtctcagcaagaactggaaagtttcagcaaaaacctagaagatagaagaatcaaatgaaaattttagaactatacaatagccaataaaaaagtcactgaatgggctcatcagcagaatagagatgacaggagaaagaa

SEQ ID NO: 2687 - DNA, 1026 bp, Homo sapiens
tcccacaaaggcctgggaacctgatcctggccgtaaatctgaaagtaccacagccctcaggagaaccaagagatagggaggcaggctggggaaatgtcatcaatgtgcacccaggcgtggtggagctggtcagccccagctggagtgggaccccatcaagatggagcctttcctggcacctccgggaggccgttttgcgtttccgcccttcatgcatctgaaacaccaagggccatgttccttctggtgcttgtccttttgagcttggtgtttcagccgtgtctgttttgtagactttgattttgtcttaaatgagaaagaaagctggtgaaggttatttcaaagttaaatagctagtctgaggggcttatcactgaagccagttgtgcttatgtggggtgggagtgtcactgcctacttgaaagtatgcacttgtgtggaacagattcagggtggcccctagcacttggggctgcgggagcttctgcacactttccctttaacggtaaagagacaagcttggagtgtttaagtggttcgttcaggagcacagtgatagcggtgacaaaggagatttgaacccacgtctgcgtggctccaaagttcactctttcatcactccctgctgcgtccttcttgaggctttagcatttttagtgtgttttgtgcccccagacctcagagttgacatttagcagtgataaactgctgtaaatccaaagaacgtttagtgtctcttgtggtgaggtcctgaaatgattgttgtattagtcaaacagaatgatcatggagcatgtatggagatgtcagatgcaatccctgtattgtaaggcaatgacatttaatgaaggataagatgaattcacagataactagaactcagggccaaacgcacacagcctgtagcaacagtgtcatgctgagatttaaaggaagaagaggtgccgtggcagaactccacgtgaccgtcccctccctgcacgcagccaggatgagaggagcagagctgagcgccacctccctgtc

SEQ ID NO: 2688 - DNA, 1543 bp, Homo sapiens
aaacaataatttttctttgaagattccagatgattcagcaaatatagatatacagcaaagtttgaaagctacagttctgaggaccagatttatggattccttcttatatgttatctgggttgatatagaaattcttccatggctacagactatatccaaatcaagtaactgtctgctgataaatgtatggtaagtcatagcaggagccaggtgacagtatgcctgatgtattctggcgtatgactctgggaaaaggaacatctcagagcgtttgttcctttcacattggaggacaaatggtgttatttgtggtagtaggtttgagctctgtctgactccactagctttttgaatagggtgacgtgaggattaagtgagacagtgtatgtctggggtcggcaaatttctcctgtatagggccggatagtaaatctttttggttttgcagcccatatggtctctgtttgcaactatgtaattctgctgttgtagccaaaaaaaatccttgacaatatgtaaacaaatgaatgtggcagtgttccaataaaactttatttacaaaagtggcattgtgctggatttagcctgtgggctctagtttgccaattcctcatatatgtcaaagaatttagtaaactgtaagacaaaatttaaatgcaagctgttgactatattcattttaatattttacttagaaacacttctaagtgttttacatttaaaatatttgtgctttaaatatttcctaatgttgtgtgtgtgtgaactcattgatacctaaacattttctacaactctttacagcctaataacgttactatttttattctttctgcaaaatcaggtgtcacttaatcaggtatttgttcatcttggttggaggtgagggtctttttaatttggctaacttgggtgattccaggcagcctgcagtatgaggaaacagttctgagccttgttccctgcaggtgtgctgagatctgtacactttggcaggcctgctggtgacttgggttgataagttgggtcaaggtggaggcataaagtattaaattgctcttgtaactgtttcactaccacggttcattactagtttgtgcattttttaagctattggaaaaagagcaaatcacattccatttcgggaagtatcttgatggcatataggatgtttgaattgttacttctgaagatttggcttcacgtgattttaagtggtttattttgtttcagattttctgcaaataatgcatctggttgtattaaatatgttatgttcttgctaatatattaatgtagaatattatgaaagatttctgcctcagtatgctttattatgtaccttgactattaaaatactaacatgatagaaatttagagctagactttacatacaatgaaatgtaagtgattttctcattaaaactgagtatactacatgtccatgtaaaggcttgtcccatgaaagatggattttatttcagtatatgagcaatgtgaagttctgttttagcttatcacatctgttttttctttacagaag

SEQ ID NO: 2689 - DNA, 1367 bp, Homo sapiens
atgtaaatgacgagttaatgggtgcagcaaaccaacatggcacatgtatacctatgtatcaaacctgcaccttgtgcacatgtaccctagaactcaaagtataataataataataataataataataataataataaaagcacatttgttgtagttgcagagctacacaagagctcagggacagatgctggcatcagcttcactcccgggagttccccctgtgcatcctctacattggcaggaggctggcattgagaaaaccagcaactggatgaccactgtgtttactttttgctacattttgagctccagtaaagcaattatatctcctacattatctttatcagttaaagaatctataagcactttgcaaatttaatgtaagataatgtttgataataatcagctatggtaatatatcatctaatttcaatattctccacttcagtagaaaacattctgtacttaggtcagaaaataatgtattttttcatatcaggtaaatttttacagacttctgatcctacttgtgatatctcaggaaatgtttcttgctcttagaaatcatttactttctcagaaagagaactactcataaagagctctaagttgtgtcttaaaataacttgtaacttcaggcacagataacccactaaagactacaaaatctgtgctgtaagtaaaatggtaaaatgcaagtttattcttgtttattctgccaactacagtgaagattgtgttttacatgccacagaaaaattgtgacagaaaaattaaaagaatatgcaaatgtctcacttttgatttttctttagttttgctacttgagaagatagaacatgatgacatctgcaataaaactttgaagattacagattttgggttggcgagggaatggcacaggaccaccaaaatgagcacagcaggcacctatgcctggatggcccccgaagtgatcaagtcttccttgttttctaagggaagcgacatctggaggtgagcctttccttttgcaaacatcggcagaaactgcttgctatgctttatttcagtaagtcccaaagtattcagtaattctcagcataaatagtcgaggcctttttgaatgaatttttatggttttgatcaaaataattgtaatgacaacggaacagataatttgatgtttgcattgtcatatgactccatttcagaggagaactttctagttaaatcacaagtttagttaaaactggttataatttgaattaacactaaattcccaagattttgtaggatgcgccagtaaattaaagtgaattttccgtgatgcaatcatggctcattgtagcctcaacctcccaggctcaagtgatcttccctcctca

SEQ ID NO: 2690 - DNA, 1189 bp, Homo sapiens
catggatgcagctggaggccattatcctaagtgaattaatgcaggaatagaaaaccgaatatcacatgttctcacttataagtaggagcttaacattgggtactcagggatataacgatggcaacagtagacgctggggactaagagaaggtggagggaaggagcggggaaagggctgaaaaagtaactcttggatactatgctcagtacctgggtgacaggaccatttgtatcccaaacctcaacatcacacgacatacccaggtaatacacctgcatgtgtactccgtgaatctgaaataaaagttgagaaagaatttaaaaaaggatagatgtaaaaaaacaaaataaaatcctgcgttaatcattaaagttccatttttttctgtttttaacagcttcgttgagatatgattcacataccacgaaactgatgcatttaaattgtacagtttgatggcattttgtatattagtaagttgtgtgtccatcatcccagttgattgtagaacattttctttcatgcagaaagaaaacctgtcaccccttacctattgtccccaactcccccttccctctcagccctaggcaaccactcatttatgttctgtatcttgacttttgtttattctgaacattttatgtcagtggaatcttagaatattcctttgtgactggcttctttcactgagcctaatgatttgaggttcatctatgtcagagcatggatcaatacctccttcatttttatggcttaatcatagagtattactgtaccacatcttgtttacccatttatctctggatggacatttgggttgtttccaatttttggcgactgcaaatagaactgataacaaacattcctgaacacatttttgtgagaacgtgtgttttcagtttccttgactatatatctaggagtagtagtgagattgcttggccatatggtaattctgtgtttaattctttgaagaagcattagaccattttccaaagtggctgcaccttctttttttttattcccaccagtagagtgtcagggttccgatttctctccatcttccttgtcacttgtcatctgaccttttgattcgggccgtccttgtaggtgtaaagtggtatctcatggttaaaattacaattttaggattttgttattacttttttttccctttttttacataaa

SEQ ID NO: 2691 - DNA, 1023 bp, Homo sapiens
gaatattttccacacgtgattgcttgaatctgcagatgtggagagctgactgtattattaaaaaaactgagaaactaccgatccctggcgctgcttagttgtagggtcaaacatttctgcatatctccggaacccattcatatacaaaagcacattgtaggatatccggatgggcaaaagcagggcaggtcatctctttgaattatagataccattgctgtaaagtctctttcgatgatatttccataaaaaaaagtttcattcaaaaagcatggctttacctatgcagtgctagggattggtgattttatatttcttgattttcttctcttctcctcccttccttctaacagttactgtactacagagtaattgtcttatgcacttagatattgttatctaatttttacagctcttattatcctggttttgcaggttaagtagccgaggcacagagaagttaagaaatttgcttagagttgtaaaactactaagaagcagattttaggtccagggctgagatccatgactcccgactcacagccctgagtcattacaattctgagttctcaggagagcgtttcattatactatcttctacctggtttaagagaacagaaaaatgtgtactatactttagaagtagttccattgaaaaagttacatttcttttcacattggtttttcatgggataagccctcctctctctggaaagatgatccatcctagattattcatttcctgaaacttgcaagaagcagagttatattgctatttttttaagttttgttatttgttaataggaatttctttgaatttagacaattttagttattctatgtaagttttttttgtttttgttgaatgatctatgagttaagtttacttatttttgaaattatgaagatgtctcctataattaactataatatagatgatttttaagaaaattatcaaaaggaaacacataagctttggaaaataatgattttaactttagctaatagttacagcattgtata

SEQ ID NO: 2692 - DNA, 1079 bp, Homo sapiens
cattttcactaggtacatgagtagagttcaaatacagtattgaattggctccaaatctgctattttaaatttgaattagtgatcagaaatgccttatggtcttaacaggtgtgattttgccaggatcatgtctattttatccttatctttaaaaattgttaactaactctttttgtaagccgcaagttgccttccttcattgttaggctatttttgatttttagaacttctcatgtggatataacattttagaggctttgtttgagttacatgactccatatcagtaaatgatctggttatggtggcttaaccccctgaaacatggtatccatagtaaagcatgggaagcacacgtccatttattaaatgcggtataatatagacagcaacagccttctctaatggtcattattatgcatgcctgtgacatggacactatgtaaaataaactattcaaactattaccaatggattcttaaaatcttcaggagcagatactataaatggaagcttccagtttggaatgacaaatgttaagttgaaatacacttcagtgtaaaacatttcttagcaactctaaactgcgttgagagatggtattaatgtgatttttgtttattttagaatgctggcaacaagaccctcatattcgtccatcgtttgccttaattctcgaacagttgactgctattgaaggggcagtgatgactgagatgcctcaagaatcttttcattccatgcaagatgactggaaactagaaattcaacaaatgtttgatgagttgagaacaaaggaaaaggtgagagaaatttttaaacagcataatgtactcaaatttatgaaaactatggaaaatatgaggcaagaagcactgttagcattattcaaaaatatctttagatatcaatatttgttgattctcaccttctttcaggttaaaaataaaacaaaaataaaacagaagggtactcaatatgtataattggggaaaatacccttttattagaggaattttcaaagtaaaaaagagagagagagcaaatagcataatggacactttgtatgcattaatcagct

SEQ ID NO: 2693 - DNA, 1542 bp, Homo sapiens
tcacacatgtgcccaaggaaacgtgcttaaagttgttcacttaggcatcatttgtaatagtgcaaagcttaaaacaacctgaatatccattaacaggggaacagatgcctaacctattgtattcttacgcaatgcaaaaatgtatagttcagtaagtcctcactcaatgttgtggataggctcttggaaactgactataaatgaaatgatgtataatgaaaccaattttactataggctgattgatagaaacagttaagttcccacgacatatttctggttgcaaacacatctccaaactttgaaataaagaccaaagcccttctaatattaaacattgaaacaaatgtgagctatacgtaacatttaagaaagactaatgtccgggtgtggtggctcacgcctgtaatcccagtgctttgggaggtcggggcaggtggatcacctgaggtcaggagtttgagaccagccttcttctaatcaacttcttctaaagacattttttaaagtagacataaccatcattctcagcaaactattgcaaggacaaaaaaccaaacactgcatgttctcactcataggtgggaattgaacaatgagaacgcttggacacaggaaggggaacattacacaccagggtgtgtcatggagtcaggagaggagggagggatagcattaggagatatacctaatgtaaatgatgagttaatgggtgcagcacaccaacagggcgcatgtatacatatgtaagaaacctgcacgttgtgcacatgtaccctagaacttaaagtataattaaaaaaaaaagaaaaaataaaaataaaaataaaaaaataaagtagacatacaggtaattcactctgtcccttagatttttcagtatttggttacattgaaaaatgcacaacaggtaaatgcaacgtaagaccatgacaccactaatgagtacttagagttcatcaaggagaggcaccaatcccacctgccctgttctgctcaaacccatggagttgcgtctgactgcgagcatcatgtcctaaggagcctcctggcatgcatgggagaggatgggggagcctgggagtccaagaacaggaagaacacacagcacacaagggggtggggactgctggggctgcccatgcatggggaggactttcaagtagggagagaagaaaccagttgcttgttattccagagttacgcagtaggacttctgggtgaatgctgcagggatggcaatctggtctccaagtcaacgacttgctagcacttggagctggctgacagagaaatagactgcttgggtgactgcctgtttccttctccaggacaagactgaatgggaagtctttatgggattctgaaaaatatgatagacctccctcaccccccaccaggaactctgagtcagacagccctgttggcattcgggctcttgtgcctgatgggttttttttttttttatactttaagttctaggtgtgcctgatggttttgaggcctctgactctgttactctgtacctcctcatcattggagc

SEQ ID NO: 2694 - DNA, 1030 bp, Homo sapiens
ttggccaggctggtctcaaactccagatctcaggtgatcctcccacactggcctcccaaaatgctgggattacaggcatgagccaccaggcccggccttattttaacgtattttaattattgacaactatttataaaactggaagatataggcatctctagtgagttcataattatatgttgtattaaaataaaagcatgcttcaagggtggatgtcagctctttctctactttgcgatttgtagtaatttattttttggttgatttttgagctaccatgtagtagtgtctatttttactttgtgttttatttttgtgcattgttccttgaaatacagcatttatgttaccctgtaagcctttggatttacaattaaagaatatataatgcttttttttggcttcgaagtttccagctgcatcttttttgatgaagtaaaaagcatagtgtacgtgccctatctccctttcttgtccacagattgcttaaggtaggaggcatcagacttggaattaatggtgagtaacttggctgtggtctgtgttattcagtaagccgtagcctccgtagatactgggtcctccctaaactcctggctccttatctctgtgtgtctgtatttgtgcattttgtgcatgcacctgtctgtgaccccccacacagaggcatgccaccgttaatgattaacagccactgccagggatctggatttgccattaccagagtggcctgtgccaagcaattcaacaaatattactgctagtaatctcatcaaccgaaagaatgtttttgtgcttcatacttttgaagtattcaaagggttctaataccccagttttaaaatttacttttgaatgtgttcaaatttattcagaaggaagattacttttgctgctttctcttcaatcttatttttttcttttctgaagtcttaggcaagtgattttttgtttattattcacaaatttgttcacagggattcatgatttagcttgggacctggaattaaaaatgtttttttattcaatt

SEQ ID NO: 2695 - DNA, 1047 bp, Homo sapiens
aataaatacatttctttattattagctctccctagtctcttcgtgatattgtcccatttatttgtgggaggatggtcttcctgtttattttctttacgataattgtactgataggctcagattactctttgagtccgtctgtaaaaagtccaagtattagtagatttgaattgcattctagtcccttggtttgggtctagtttcttccaggagccctaatcttactgtgttttttcatggatcagaatcgttgaggtgggcctatttaaagtgtggcctgtttatataaagtaggaaatgtttgcacagtactcatagctctcaaagctcagagcccaacactccacctgagaaggcatctgcagtttccaacaaagattgtggtattagggtattctaagattaagtttatctggaacagtgtaaataaaagcttgcagatgcgttgatttttatgtgagtgcttgatttcttagcagagtaatttagaatagaaactggttcagcactgcaaagaatatttatgtctctggtaaagaacagaacactttatggaaatgaaataaaaatggggatataattttaaaactttgtagagtcctcagttttactgtttaataatttttcctaataggaataaaagtatttttaattcttagattttctctttcttagaagttcagtacttcaaaaaccaaaaccaagatgaggtctaactttaatcagtatcataagagaggaacttttgttagctaactcctgagatgtgtaatgaagtgataatttccatgtatcagcgggatctgaaaagttctttgtatacagaatatattttcctttggcttgcaattttagaggtggcttcattttcatttccagcaggtcttcaacagactcctaacaccttagcttgattttctcccttactctctccaccaagatgttttattccttaagcaaagttgtaaataccctaaagaaattctaagtcgtctgaactgcagtcttgtgtaactaaaataattatgctttaattaattgagcttg

SEQ ID NO: 2696 - DNA, 1049 bp, Homo sapiens
tccacaaggatctaggatgtcatctggtatctgggacactgatattgttgtcagcactttcaataaaatatatcaagtaccctgaggtactttcccatgaaggtttaaaatccttcagacacaaaaatcacccagtaaatctagggaagcttttttaaacattgtgataacaacatacaaggattactaaatcattttagtaatgtgttaggagaaactaaagggaatagaaaatatatcaatcaatcaatacatatagatattattgactgataatcaaaatatatcgatcaatatagcagacatagcttgattcactaaattaagttctttaatattatatattctacttgttgtaaggaaaaaacaaatacctccatggtattttgtgattctttctagtaccagagcaggatgatgacagagcaatgcagacttcacttttatagaatctgtatgaaatatctctatgtctatgtctatacctgcctatgtgttatatgtattatatattagagtgctcggacggattctagtgttttcctaagatgtttgttaatggcatggtaatttgatttaaagtgcaacagtgacagttttgttttatgtcgagtgtgtataaattgccttataaaatatgtattatgaaacactggaaagcttgcagaatcctgtgactaatttaggttattgcagatgtcctcagttgatcaaaaaattgctagtatgacatctgggtgcagtggctcatgcctgtaatcgcggcactttggttagctgaggtgggtggatcacctgaggtcaggagttcaagactaccctggccaacatggtgaaaccccctccgtctctatgaaaaatacaaaaagtagccgggcatggtggcaggtgcctgtaatcccagctactcgggaggctgaggcgggagaatcacttgaacctgggaggtggaggttgcagtgacccgagatcacaccattgcactccagcctgggtgacaagagcgaaactctgtctcaaaaaaaaaaagaaagaaagaaggctgggca

SEQ ID NO: 2697 - DNA, 1030 bp, Homo sapiens
caggcacctgtaatcccagctactcaggaggctgaagcaggagaactgtttgaactcaagaggcaaggttgcagtgagctgagatctcgccactgcactccagcctgggtgacaggagcaagactccgtctcaaaaaaaaaaaaaaaagaatgttttctttctgtttacaacataaagtatgcttttcaagtggaagtatttaggtgtttttggaaggttggaagcactctgaatcttaggtgttgttaaaatgcagccttgtatctttgctgctctcacccgtggctttccacgtgttccatgttggtttcctgatctgtgcttagtatttattgtcccatcatttgttccaaataacttgtcaatcagatcctgtggcttggttcttggctttcttctgttattgacaggagggctcctcttgctgtaaaagttctcagagcatttgtttctgtcgtgttgtaacaatcaggtggctagctgaacatttataaatgactttagtctaaactgtttcctttctatggttaagaattttttttctttgaccacctctttcccccaactaccaccacctagtctagtcaattttttacctcaactgctctgccctggtcaagtctttcaaaaggaatgacttggggctaggtgcagtgactcacgcctgtcatcccaagcactttcagaggccaaggcaggtggattgcttgagcccaggagttcaagaccagcctgggcaacatggtgaaaccccatttctacaaaaatatacaaaaattagctgggcatagtggtgcatgcctgtagtaccagctactcagaaggctgagacaggaaaattgcttgagccaggggaggtcaaggctgcagtggactgagattgcaccactgcactccagcctggataacagagtaaaatcttgtctttaaaaaaaaaaaagtatgactcagcagatggaggagcctcccatttggtctttcctttccgtttggtttgtcttccaaatctcctccagcctgctgtgtatt

SEQ ID NO: 2698 - DNA, 1067 bp, Homo sapiens
gcctagagcacaaaatgcttttaatttacattttctgttttattcaacaccacgaccaccatgtgaaatattgttgttcactttagcaggtgaagaaacaggctcagagcagttccttactggtttgaggtccatagcgtgttatgttatgagaaccaggactcatttaaatccagggccatttcaatttaattttatttatttatttgtgtatttatttgagacagagtctcactctgttgcccaggctggagtgcagtggcacaatctcagctcactgtaccctccacctcccaggttcaagtgattctcctgtctcagccttccgagtagctgggattacagatgtgtgccaccatgccggctaatttttgtgtttttagtagagatggggttttgccatgttggccaggctggtctcgaacttctagcctcaagtgatctgcccacctcagcctcccaaagtattgggatttcaggcatgagccaccgtgttcagacttaattttaactatctcagactgaatgcagataactcttttttcccaggttataaattcttcaatgattcgtggctttcatattttcctttgtgtgtgtgtgtgtgtgtgtgtgtgtgtgtgtgtatgtgtgtgactatatccaacatataagctctgattcattatttgtgtgactatatccaacatataagctcagaatcattatttattgacctgaaccccgagaagtaagaaaccaaaataagaaatcgatcctgcaatattctttgcagttagggtctgaccatttttgtttttattgctgtgtgctaaatacatggctatgaagataaaggaaaaccatgaaataccagttctccctttttgcctccaacagatttccagcacaagataaccgtgcaggcctctcccaacttggacaaacggcggagcctgaacagcagcagttccagtcccccgagcagccccacaatgatgccccgactccgagccatacagtgtgagctttctgcactgccacgggggctcctgtgttgacttctctcctttcacttgacttggatt

SEQ ID NO: 2699 - DNA, 1033 bp, Homo sapiens
aaagttgaaatgcagccagcttagggaggcgcatccttggcgctccttctcagaagtaacatggtggaaaggttctaatcgagacagtccacacagggccagctttgtgtgtggcagctgttggctcaagttctccagcctggatgttgctcatcttcattgtgaccctgggtgctccaagaatgcctcttgtcttcatgtgtgtgcacacccccattcaattctgacagcctcattgagtggacccttttatgatccccaaatgcgggacagagaagttaccattaagctgacccaagttggtagctactaactggtgaagctggattcagacacatctgagtgtagatttcaccatccgtttccggcctcttagtacaggaaaagttcaatcaatgtggaaacaaaagagaaaccagaggagcaaatcaagaggggaaggaaagtaggaagggacgaaggtgaggagactaaagccgagagtgtagatagctctgggagtgtagatcagtcagtcagtcatatagccgagatgaacttgggtctaataacccccagctgaaagcttttccggttctgctgccctcacttaaatgaaaactgctgatccgtttatctgtcattctactgtaaaactcttttaataaaaagaatgaacagctgattcaagattgttacacatgcacacttacatttaggcatgcatctacatttttttttttttgaaatggagtctcactctgttgcctaggctggagtggtgccatctcggctcactgcaacctccgcctcctgggttcaagtgattctcctgcctcagcctcccgagtggctgggattacaggtgcccgccaccacgcccggctaatttttgtatttttagtaaagacggagtttcaccaccttggccaggctggtcttgaactcctgacctcatgatccacccgccttggcctcctgaagtgctgggattacaggcgtgagccatcgcacccggcctaagcacatttatatgcacagacacgtgtatata

SEQ ID NO: 2700 - DNA, 1028 bp, Homo sapiens
atggtcatacatatatgatacaaatccagagttattggtgcagaaatggctacccgagagcttggtaaatttgccttggtttcttatgttaaatgtattgtgcttcccttctgtctctagaatgtggctcttcagaagacagacaatcgacatttaaatttttccaaacaatgaaaaactaaattaaaaacattgcttgatatttcatttaaaattgcaccttgcttaaggtttactgaataactgaaatgtcagcaatttaaaataaattcaattgtgtgataaaatatctcacctataatagaagaaaaggaaaatcatattatttggcaattttgcagcattgtggttgcctaacaggtatatccagcagatgagaaacagtatgaaaggattgtattaacatggtaagttttgccctaaggaaaacgatcttgcattctggattcttgcagcaaagtctcagatacttaatacgttttcttgttttatcatctgttctatgattcggcttcactttgtgtggttattgaattatgtaacagagatttggttttcccaaaatgttatcacatttgaaactatgattgctttgtgttcagtccttttggaacacgtagcttccagcttaagggtagagaaatatatacctaaaatcatcaatacatgaaagaaaaaggatggaaactatgtcctcagttttacttctaccaaaacatccctgtatgtgtgtgcatgtatgttggcgtgtgtgtgtgtgcatgcatattagtaaatgtgtgtttgcatgtgtgtgttggggagtgtatgtgatctgggtgtttgtttatctctgttattattcccctttagctttattttagtcaactctacattatgatgaatttcaaaatgaagctgtattaaaataattgtaatataacaattcaatctcacatgttactgcagatagttaacttttgctgcaatctattgtacatttgcaattttctgtgttagtaaacttagcagaatctggttatttattt

SEQ ID NO: 2701 - DNA, 1046 bp, Homo sapiens
acagaaagtttacaactgggtcacaatgttgggtaaacatttcgaaggatgcttatagcgtgtggtgttttcttactaatgatattgtgaggatagaacaagaataagaacagttttgaggaaaaaggtttgcttttatctgggtgggatttttcgtgactcatgtatagtcttaacatcatattgtctaattaaatgttaaaaattagtttataatcttgaatagatgaaatattcttcccagaggagaattagaaaaagggatagtttctgtttaagaaaggggtggggtgggaatagacgtcttattattggtattcagattgctttgtagttcctaagaaagtctgtattcatgcaaaacaagtgttcatttaagaaatcagtgcaaggggcacttaaggataaactaaatgaaaaaggtgcctcttggtttgtaaagttagcacatcaatgaattcttgttatatgaatacaactattctaaatgaaaagtactcttctgttggctttgtactgccccattatttgacacatttgatatttcttaaggtttcaaaattataattacccattatttgattcatttgatgttttttaaagtcttcaaattatcataggtgccctggccatgaatcttataatgggtgagaaatcttttcttccctacaaggggaaataaagagatgttaaattgtgtgctggaaacaaacaatattttaaatcacttgctggaagcagacaattttttagagtaaagctgatgtgcttcattactaggaaaatattttctggaaaagcgccaaccaaataaaatgagttgcaatcgcttttcgttttttgggtggatattagacatgttgtgctttttttttttcttttcttaacacttctagtccttttgaaggcaaatcactgagataattgttacctaattaatcagtacagtcaatccttgacttattcagaatgctaacaatgagcattacaaagatgctgttattggtagtcattgttgtaacacaggcccatgagtgcttttatgt

SEQ ID NO: 2702 - DNA, 1019 bp, Homo sapiens
agttctaccctcagtatttcaaaatgtgactgtatttatagataacatctttaaggaggtgattaagataaaatgaggccacagtgagaaggtggccatctgcaagccaagagaggcctcagaagaaatgaagcttgcagacacattgatcttgaacttgaagcctccagaactttgagaaaataaatttctgttgtttaagccacccactggtgatattttgttaaggcagccctagcaaactaatatagaggtacatgatagtttttatttagttgcacaaaacccatacaaatagtggaggacaagagacagaatcttttaagtctttagtcttgcaacgaacaattttatatacctgaatgggatgtcattgttttagagcgcaatatagtaatccacgtccttgaatcatcaagaaaaatatctcaacatgtttctacttaagaaggcagggaagtgtataataaattctagaaacatttccacccaataatggtcaaagagaagagattcttagtgtttaaatctgtgaactcatacctgtctataaaacataccagtttttagtattttgaaggtttggggtttttttttaactataaatttgttattatctatgcctattttatagcccctggaagatactgctactattatcaataacgtggaagaaatgatgtctttccttttatgacataactgtgagtcctatcaaggacagaatctttgattgaaccagtatcctaagggaactctggtgctctcagaacaagctattttatgacattgctcattggagtgttactgtgtgtgactgtcattttatagcccccggaagatactgctactattatcaataacttggaagaaatgatgtctcttcttttatgacataactgtaagtcctatcaagaacagaatctttgattgaagcagtaacctattgggaactccggtgctttgagaacaagttgttttatgacattgctcattggactgttgctgtgtgtgagtgt

SEQ ID NO: 2703 - DNA, 1031 bp, Homo sapiens
cattggccagttttacatagaaaggtggaggaaaagttttatggttttatggctggctttggggaaatggggttctggtctctaggatccaccttggggaagaggtattccagattttatggctagcctgggggaggatgaggggtgagagataggagggcaggagaaggtcggagaaaaacttttgcttctgggaccttgattttgggttatcattttctgagctccagcatgaacaaagagataactaagggaaatgcacaggatgttaggtggtgataggtgctcaggaacaacaatgcagagcaaaggagatggggagtgtgtgattagtgtatggtgaagggggcagagtccaggatcgtagtcttccataaagttgcccgtgaaagccttactgagaagatggcacttacgtaaagagtgagaggaggtggggagtgccttatgcagttttctggggagctgtgttccagaacaaaggcacctattggaggtgcagctagaaagtgactgtggctggagctgagtaagaggggagtgatgaggtcaggaagaaggggagggagcagatgctgtaggatgtcctaggccactgcaaaacatctggcttttatctgagctaggggaaaagcaccaggagattttgagcaaagggttgacacaatctgactgactgttccaacgcgttcactctggctggtgtaggagggcaaggctgaggctgagactaaaaggaggctcttctgatgacccagggggtcatcggaccaccgatgcctctcggtgactcagaaaagtggtgatgagaagtggtcagattctggattcatattgttggccaaaccatctggctttgctgatggattggatgtgaggggtaaaagaaagaagagtgaagaatgacccccgggtttctgacctgagcccctggcaatgtggttcttctttacagaccaaaggaaggccatggaaggagaaggtgttggataaagaatctcaagcaggttccagaacctgctgaacttgag

SEQ ID NO: 2704 - DNA, 1040 bp, Homo sapiens
atggaagagcagtaatggttatggaaacaaggcaggttcactgggctgtgtttttgagcaggtgaatggggctaagaccccatacccaggaagcgagctggcatcagaagcagaagactgaggtcatttttatggatgggagatgtgctggtgggtttttagaagagctcatgtcagttggcatccatttcttcagtaaggtgagaaggtaaggaaaattagaaacaaaggacttttaaaaactcaccaatatacataccaatttttctgcctatctctcaattttcaccatcctttctttcaagctagactctcagctccttcaaattaaaattttccatttggcaatgcaagtttatcttttcttaaagacggaatgaccagccttttgatggaagattttatgactctggtgtcttccaatgacgtgaccagtgatgaggtttgcatctgtgtaaaacctacagattggaattctgctttctggtgcaatgtagtgttggaatgtaatgtcgttttgggaacctcaggattgagagcaaacccaattcaatcattggaggagcaagaaactcattttacgttttaaatggttctattcactgggctgaatagactcaatatttaaaacccttaagaccagtgattctcaatgggttgtggagggagagggataggcaatttgaagactcagtagtatatttaatatttactatttatcatgcaatttatagaaatgaatgcttgacaatgtcgtgggctgtggaaaaatgaaaaaaaaaaacacagggttgtcctctcctgcttctgttatatttatttttgttatgttgtttatccaaagggggcattgattataacagttagtaaaatactggtgtggctattcacctttgttagcttatatgtcttaagtggtacaaacaaagccaagtaagtgtctgatgtgagatccttaaaaccgggaggcctgggtgctccttcttcccctgactccagtattcctgccctggacagtgagcccacctgaagctctttcc

SEQ ID NO: 2705 - DNA, 1029 bp, Homo sapiens
cagaaaaggggaagagacagagggggaaggcatgtggagacagaggcagagattggagttatgcagtcacaagctaaggaagcctggagccactagaaactggaagaggcaagaaagccttttcccctacagccttcggagggactgcttcgaggcactgctaataccttgatttcagatttttgccctgcagaaattttgagacaatacatttctgttgctttaagccactaagtttatggtaatttgtacagcagccacaggaaacgaataccagtgtctcataggcttggcgtacattagggggtggaggattggaatcatgggggaaataacagaagctgataaattaatccaagagaaaaatcacgtggcttgcatcaacagcagtgggaatagcgagaagtgctctatttagaacattctgaaagtagaaccaacaggatgtgctgatagattagatgttggagacaagggaaagaaaaaaaagcttcttggtatttggtctgaagaactaaacagattgcctaatactgttacctgaaatgaggaagactaggggagggacaatttgggctgaggttttcagggtgagaggtgagaggtgatggtggggatggaggttgcctagggtgtaacatggtgaagacttctttcatggacgtattgattttgagatgcctacgtcacattcaaggtggaagtttgaataggatgtcaggtatgaatttggagctcagaaaagagatgaaggtcagtaagttaggagtcatttgtgtgtcgatccatgagtctcaaccttagctctataatggagtctcttgaagagctttccaaaaaagatacccatacttgtgctccatcctgggctgattaagatgaaatctctaaagtatttaagaactctccaggtgaggctaggggcagccagggtggaaaaaccacaaatgtaagcaccgtatttaaaggcatggatctagacggaatcacgcagggagagctgcctagaggataagatgctgctaatat

SEQ ID NO: 2706 - DNA, 1105 bp, Homo sapiens
ttattattattttggtaggccatgaggtgaaagagataggaaaagccgagtgcagggagtgagagcagatggaaggtctgaaggccgagtcctggagggttctaatgtggtggggtcaccaagaagaaagaaccaacacgggaaacagacagaaattcttgaactgggaggtagcagtgagaatgtggcatgtgtgaagccagaggaagaaagtgtttcaggcagaacaggggactcagtttagtcaagtggtccttagaagttgagaaagatgaggatagaattaattcagggatttgtgaagatagaagccactggtggccttgagacgacagacctgtttgagaagagcggcttggatggaagctcacattgaaccagctgaggggaagcgagtgcattttgagcctatagatcttcccaccaaactcgaagcagtgagtgacgcctcttattggcacattgcttctgctatttccccttaaaatctggcatttctgagagttagaaaattttattcaaagtgactttattgaagcagatgtttaatcttctggaatgtagtacatggatccacttattaatgtgtcagttttataaacggcatgtcatctgtgcttctgtttctttcctctaaatcgttttcttttgactttgttccagatgaaatcctcttggtattttcctgggtatgtgtgatggtttagcgttgctagccattcatcttgagggaggctgttctggtttaatgaatcacagctgcttcagacgtgaatgtcagtggtgctgtcaaacctcattgcctagtatgtagttggggctcaggaaacatgagttgaagaaacttagggtgaaagtaaccctgtggtggacactgcagctgccttggggagggtgaggtgaatgttttgaggtctcttcagaggagggcacaggagccatggctgtggattggagagtttctgccctttaccaactcctgtccttgttacctgctcatcgtctgttcagtcctcggtgctctccttagggcctcacgatgctcaacagggagggagggctgccttgtcatttaagttttggctatgaattctctgctccactc

SEQ ID NO: 2707 - DNA, 1023 bp, Homo sapiens
agcgattctcctacctcagcttcctcctgagtagctgggactacaggcacccaccaccatgcccggctaatttttgtatttttagtagagacagggtttcaccatgttggtcaggctggtctcgaactcctgatcttgtgatctgccctcctcggcctcccaaagtaatgggattacaggcatgagccaccgcacccagcctaggattcttttttaaaaatcccaaaggctcctgggtctgaaagggatggcttttgtgaaacattcaactgagaattaaactgtaaacaaggaagtaagaagggcccagttcctcttctcagtggcaaaagtcctccaagctccacattccatgtttttgaaccaaaccacttggcagtattcctgggaattcttcaaattatcatctgttgagtggatccagggcccagaaagcacctgggccacaggagggactcaataaatatttgttgaatgaatggatggctgctgcacgaaatactgacctctgggacagggagctttgaatatgcctctgtagtgatttgtatcatttacctctttatgctgacttcctgttatgtggaattgctctactctttcctagttcttccatcacaagtgcttcctgaaccacagactggaccagaattcttggtgataagctttggtttggcccagggtttcttgatctcagcactattaaccctttgtgctgtataagtatttgttgtagggagctgtcatgtacattgtaggatgtttagcagtatctctgacctctgcctattagatgtcagtagcttaccaccctgccccctaagttgtagcaactcagtatcccatggggggcagcctttagttgagacccactcatttagggtaacccccaaatttatgctgcaatagaactctcttctgttgcccagtaatgctaaacaagcaggcctaccttacaaattcctgaccctctccttcctcacctttcttcctggaccactttttaggttttcaggatggcca

SEQ ID NO: 2708 - DNA, 1029 bp, Homo sapiens
atggggatgaaatgaaatgtttcttcatggtatccacagcatctggaaaaggttcctatgattttgagcaaattgttcaggtcacatatctcagggatgttgatacagtttggctgtgtcctcacccagatctcatcttgagttataataatccccatgtgtcaaaggcagagccaggtggagataattgaatcatgggggcggtttcccccatactgttcttgtggtaatgagtaagtctcacgagatctgatggttttataaacaggagttcccctgcacaggctctctggcctgctgccacataagatgtgactttgcttctcattcaccttcgaccatgattgtgaggcctccccagccatgtgtgactgtgagtcaattaaacctcagcaatctcaggtatgtctttattagcacagtgagaacagactaatacagatacattcaatgttttaaatagccaaaagctaccactttggggccaaactatgataacttttaaagtggaagatagactttcagaacttcttaaagagaccaagctggtacatacaatttgattgctaaatatttgattctttcccagtagtcactggttttctttaatagttgaagtaagaaatttttgactgtacaaatactgcaactgaccaggaagaaatacttgacagagcccagtgcggaaaagagtgctggagcagtcacggtgtacaactgctcaagctttagcacttgaagggcactgaagatgctgttgatgtagcatctactgaagcaaagatttcttcaacaagattcttttatctccccacaaattcaggatacatgtttcatctgaatatccagaactcagacaaagccagccaacactggctcatgtttcaaatggcctataattttgtttggacttactaatagaatacaaataaaaattaagaaaagatatcgaatgaatataatccaagctctctgtcttggaaccagatatacttgtgaacagttgcaaattatcccattgctgtgaaa

SEQ ID NO: 2709 - DNA, 1059 bp, Homo sapiens
cagaagccagcatggctgcagcagaatgagggagtggaagaagagatgagagctgggtacaaagcatgaggagtagaggcctggtaaggactttgcttttatgccgaacgaagtggggagctaccataactgtcattggaccttcctcctgtgactattcacttgtatattaagtttcctttgcttcctttgctctttagctaccaaccataaaagtcacagcacagcttggaacccacaggattgtaacctcagatgtaatgctgcatgttgaaatttttggttaatgggcagtcattgcaatgatctcaatatacttttactaacagccttaagataatcataaaaataaaagtgtaaaaatgcttagaattggtcattaaaaattcatggatttcccaggaatatgtacatggagtcctattggatctgcattgtgccatagtcagcttttttacatgttgctttatatggaattcaggttggtgatgggtggcatagaggaacattatgagactagggctaaatagatgaatgcatttaaggaaaaatgaaggttagtaattaaaaatgattaagatttatcttctctgtattccacattctagagtcctaggaacggattccttggaggctctgttgtcccagatgcctttgcactggaacatattcagcatgtacctttcttctctcgttccttgtcttctctcactcatctattagattcttctaaaaagagtttcagcctccaaagatcccattatgatagctatttagtcaacaccaatggaggacaccatgattgctggtattgaattcagggaaggcagaaacatgctgtcaggagccaggttttctgaagctaaaatactgtttcagatacttgcttatgatgcaccatcatttgcttttccctgttatttgcctctgtgttaggactgtatgctctgaatgaaagagaacataatttcctagccagaagtaggtccctctctggtcaggggtctaaaggtgttcattctttcatccttttctcttctttttgtccttgatggtaaa

SEQ ID NO: 2710 - DNA, 1101 bp, Homo sapiens
acatcagtgagaattctggtaggaattgcactgactaggtagattaatttggggaagtattgccatttaacagtgttaaattttctcatctagtaacatggtatcctttttcattcatttaaatcttatttaatttctttcagcattttagtttttagaatgtaacttttgcacttcatttgttgaatttattccacagtattttattattttttatgctattgtaaatggaactgttttcttaatttcattttcagactggtcatttcaagtatatagaaatgcaattgattttttatcctgctagtttgctgaactcatttattagttctaatagctgtttagtggatttcttaggactttctgtatacatgattatgtatctgtgaataaaaatagttttactttttcctttccaatttgggtaccttttatttctgtttctgtttcaattgctttggctagaacctccagtctaatgttgaatgaaactgatgagagcagatatctgtgtctttctttatttttgagacagagtctcactctgttgcccaggctgtaatgcagtggtgtgatcttggctcactgcaatctccacctcccagattgatgcaattctcctgcctcagccttctgagtagctggaattacagttgtgcaccaccaggcccagctaatttttgtgttttttagtagagatggggtttcactatgttgaccaggctggtctcgaactcctgacctcaggtgatccacccgcctcagctacccaaagggctgggattacaggtatgagacactgcatccggccatgtgtctttcttcttatttgagtgggaaggcatccattctttcactgttaaatataatatttgttatgggtttgcatacatacccttatcagggtgataaagttcacttctagccttaggtttgttgagcgctttaatatgaaagagtgtcacatattgtcaattttttttggtttgctttgggtttttttttcgaggatttttgctttatatttcattcacaataccaatttatgaatgttaaaccaaccttgtattcctataataagtctcagtctcacttagttat

SEQ ID NO: 2711 - DNA, 1085 bp, Homo sapiens
ccctggaatcagccaagtctccaaggagcaatggtttatcttatggaggatggtctttaaaaacagagatctagtgactaatggaattactccaaggtagattgccttcttattacctgtctttattcttgtcaccaaaagcaaaccaaattcagtaagagaaagttaatatttttaccttagagcatctatgtaacccaagctgtagaatttctggtgcttcaaaaagcgaggactaagtatccctttgttgggcctacccctgctgacactaagcatgactcttagctctgagtgctatattcagatgttgaccccaaacagctctggtttgaagggtttcatgcaagattcaccctaatacaatatacaagaggccaggtgcagtggctcacgcctgtaatcccagcattttgggaggctgaggtgggcagatcacctgaggtcggagtttccagaccagcctgggcaacatggtgaaatcctgtctctactaaaaatacaaaaattagctgggtatggtggcacacccttgtaatcccagctacttgggaggctgaggcacgaaaatcacttgaacctgggagatggaggttgcagtgagccgagatcgcaccattgcactccagcctgggtgacagagtgagaccctgtctaaaaaaaaaaaacaggctgggcgcagtggctcatgcctgtcatcccagaactttgggaggctgaggctggtggatcacgaggtcaggagatacagaccatcctggctaacatggtgaaaccccgtctctactaaaattacaaaaaattagccgggcgtggtggtgggcgcctgtaatcccagctactcaggaggctgaggcaggagaatggtgtgaacccggcaggcggagcttgcagtgagccgagatggtgccactgcactccagcctgggtgacagagtgagactctgtctcaaaaaagaaaaaaaaaaagactatatatgtgtgtgtgtgtgtgtgtgtgtgtgtgtgtgtgtgtgtgtgtgtgtgtgtgtatatatatataaaaccacaagaaactgtgagatacacagaaagagctcataacc

SEQ ID NO: 2712 - DNA, 1031 bp, Homo sapiens
gtgcccctgcactccagcctggcaacagagcgagactccatctcaaaataataaaataaaataaaataaaataaaataaaataaaataaaataaaataaagtaagtgacttgaacacaagtactgagatactgcaactgtctatctgatagcagatctggctactaagtgactaatgggcaggtagtgtatacaacatggatatgccggacaaaggggtgattcacatcctgggcaggatggcagagatcctctcgcactactcagaacagagcacaattttaaacctatgagccgtttctggaatttttccatttacgtcacaatgcctatgttatttatctcatctcatttcatctcatcacgcaggcatttaatcatctcgcatcatcacatggaagaagggtgagtacagtacaattagatattttgagagagagaatatattcacataaattttattataggatattattatatttgttctattttactattagttcttgttaatctctctctgtgcctagtgaataaattaaactttattataggtaagtatgtatgtgggaaaaaaacatagtagttgcaggattcggtactggccagtttcacccatccagtggggggtcttggaacatatccccatagataagggtgtctactgtagtggaatgatatcctctgatctgcttctccccattcaatctagacgcttaggcttcggtaaatcacacaaaagttcagaaacggcagacgaacactcagggggatgctcataataaaaattcggcaatggaaactatgcgatgtattgtcttactcacccctcctttgtatatctcgaagtcaggttcaaggcaagctacggaacctccttgctcatttaaaaaataaaaagaggctgaccctgtttatctcacaggcctaccctggtaaattttgcccaaatgaaattcaatttaagcctcaagttgccaaggagtcaccattctcctgggttggcaaaagggtttacttatagaatccttgatg

SEQ ID NO: 2713 - DNA, 1027 bp, Homo sapiens
tgcactaaaggttggcttccccaggctctggtgagatgctgttcatgaacaagaaaggagctcatgcccacggccctgagcagcctgggagactaggaatagagccgttttgtccactgcggtggagagggctgctgcagtgaatgactgagacctctggaaagggtttcggggtgcagagcagcctgttggaattagacgttatgcttgctcaaaaaaaggagtttcattttcattaaatggaaatatttactgcccaggggcatttggtgaaaaacagtttggtattgggaagtggggtcaggctctgtgcctttgataaaactcatgccagcctcaaaaaaaaaacgcatgatgtgtcgctatatggggggaccctatggttggaggtcttacaaatccaatggggccagtgtattaaatatggcccttttcccatagagttggtcatcatgatgtttaccatgtttcagattcaaggtatctgatctcaccagggtcacatggccaaatatgtaactctcattaaaagattgagttatatagtcagtatggggaaatctctattcactctggtgaactgtgacatattttatttatcatttttaattatatatatttaaggtgtacaacatgatgttttgatatgcatatacatagtgaaatgattattacagtcaagcaaattaacatatccgtcacctcactcagttaccttttcttatggtcagagcacctaaaatctgctttcttagaacctgttcggtataggcacaatattattaacttatcatcctcatgctgtactttagacctctagatttcttcatcctatctaactgcaactctgtaccctttaagctacgtccctactctttgtaccctttgtccctactctccctgactctacctctgggaaccactgttctctctgcttctatgagtttgactcttttcttttcttttctttttttttttttttttgagataaaggctcactcttgtggcccaggctggagtgcagtgg

SEQ ID NO: 2714 - DNA, 1031 bp, Homo sapiens
tctatgtgggcacgtggacagatgtggatgacaattgttgttcttgaccctaaggaactcacaactgagtgggagacagtctcctattaaaaaaaaaattatatatatatatatatatatatatatatatatatatatggaggaaatggggcgagagctgagggcagactggcttggctgtagtttggctgtgaagacagggcacagtagatcttgggactccaaattcagctgaaggccagatgggaaggacttggggtgcccgatcaaggagttggggctttattctccaggcaagtggagcctccagaagtttttagtataatcagagctgctttcaaaagtaggattcatggtactaattatgtaactggctacagcatacggtcccatttcacataagaggtggaatgactgtcaggtgtttgtttgttgggggacaggatgcctagttcctgagcagtagcaagaactttgagtgtgaatcctgaagtattataaaacttgttgaactgtcaactttttgagactacatcacactcttctgttgataaaaagcactttaattgtcattttcaccaaactcaagtgttctgaaaacatgggaaatatcttcttttcaggaaatatttgtacaacttttcaggcacagtggtaaatgctaaggcattgccaagggagccctaattagcgatgcccagcatctccctgccttcctgctgtcaggcctcacatttcagaaagctgatgcatttcttaccctgaaccccagacacattccagcctgttgttcctatcaacagttgttctttatagagtaaggcccctttggaaacaaggtgacagggcccctcatcctaggagagagatagtgcttcattcgttccacaaaatctttccagcaccttctctgtctcaggtgctgttctaggaactgaggatacagcagtgacaagagcaagtggaaatgccctttaccttcacccttcctcctacctcatagcagtctcatttcctgtctgatttcttcg

SEQ ID NO: 2715 - DNA, 1047 bp, Homo sapiens
caagtcactattgggggtttccatcactttgagtatttgtcatttttatgcattgatatcatttcatgtcctctcttctcattagtttgaaatacacaaaatattgtttgctaagcatcgtcaccctagtctttttccttagtactcttttcttctatctaactgtatgtttgtccccattaaccaacttcacttcactcctaccctctaccaccacctacctttcccagtctctggtactattattctgttctctgtgtccttgagatcaagtgtttttagctcctgcatgagtgagaacatgcagtatttctctttctgtgcctggattatttcaattaacagaatgacctccagttccatccatgttgctgcaaatgacatgatttcattcctttttacagcggaatggtattccattgtgtatatatgccacattttctttatccatttgtccattgatggacacataagttgattccatatcttggctgttgtgaatagtgctgtgataaacatgtgagtgcaggtatccctttgagatactgatttattttcctttggataaatacccagcaatgggattgcttcctgctatgggatttgagaacctacatctgtttcagttactattactctttaacaaactaatctgaaccttaatggcattaacaactcctttgttggcatcaagggatggcttttcccctgctccatgatgcttagagcgtgtgctggagggggcaactcaacagctgggggctaggcacatctgttgtcttcctccaatgtctggaagttgatgctggttgtcatgggccacctaagctggagctgtcaacctgagggtctacacttggcctcttctgatggcctgggcttcctcacaggagggtggtccgtggtaatcacactgcgttcatggttgcagctcagagccccagagggatcagtggacacacagcagaaactccattccttttaggacctagcctcaaagtcacatagtgtcacttccaccatagtttatgtcaaggcagttacgag

SEQ ID NO: 2716 - DNA, 1092 bp, Homo sapiens
ctgttctcaacacagaacagtccttgagacagaagcctcctgtcactcccctactcaaacccctgtagtgcccccaccacatcactcaaaatgaaagccagagtctatgtaccccacatgatggaggccctgatccttctcctcccttctcagctgggtctctgtcccaggctccacccacactccagcctttcctcaggtcccctgccctttgtgtttgctcttcctccatggctcttcccatgacgtctgcaggcctcaccctcttactctgttcaggcctttgctcaaatatcaccccttcaggcttttcctgaccctacagctcagcagtcccactccctctctcctgcccagctctgtttttctctacaaggcataggagcattgacacactatttactctatatgtgtttgtttgctctctgtactaggatacatgaggagagggactttgttttattcactgctgtatcccacaacctagagtagtgcctggtgtagaatgagcactccatttctcaaacaacttaaatattttttaaagttctgcatattataaaaaaatacagtagaaaatgggcaaaagattttgacctgcatgtagaaaagacacaaatggccaacaaacatgaaaaaaaaatgctccacttatttagtagtcttggaactccaactaaaactaacagtttatgccttttgtgcccaccagaatggcagaactaacaaagcagacagtatcaggcgaggtgaggatgtgcaagttctgaacctacattcattgtcagtagaaggataaatatttactattccttttgaaaacacttttacatcatatccatacagtcttccatcatgtaacattggggatacattctgagaaatgtatccttagggatttcgttgttgtgtgaacatcatatagtgtacttacacaagcctcgacggtatagcctgctgcacacctaggctataatgggatagcctaattgttcgtaggctgcaaacctatgcagcgtgttacggtactgaatactgtagacaactgtaacacaatggtaagtatttttatatctagacatatctaaacat

SEQ ID NO: 2717 - DNA, 1151 bp, Homo sapiens
gagctgagagctgaagggctagcaggagttaactaaggaaagagaaaaggaaaagacattccagacaaaaagactaacttgtcagaaagccctgtggcggaagggagcttttccaatatgaagaactgagcctggagagatgggatgagggggagtgtcgaaccttttaggctttgtaaaggagttttggttttctcctaatagcaatgggatatcttccaaggaatctcaatcaaaagggagagatggctccgattggaatgtcatccctggctgaagagtagaggaagcgaaaaaaagaagagttaaagaggcaaatgcagggaacccgacgaggaggctattgccgtagtagttcacatggtgaaaagaatggagcgtttgtattaatgattatggattcactctttgaacaaatttctggcagctttttagttttgaaagtgagaagtttcagactctcactgaggtattctgtagttttttcactctaaaaggaaactagtagagttcatgtaacacacactaatgcctctttacatttaactttagtatgtgatagctgaaatttccagctgtgataaattgggaaatcctttgatttaaaagaaaaacaaaggcgggtgagggtgagagtatatgccacggtgtgtagaatcctttagactcttaagaagacacaaggcggctgggcgtggtggctcacgcttgtaatcccagcactttgggaggccgaggcgggcggatcacgaggtcaggagatcgagaccatcctggctaacacggtgaaagcccgtctctactaaaaatacaaaaaaattagccgggcaaggtggcgggcgcctgtagtcccagctactcgggaggctgaggcaggagaatggcgtgaacccgggaggcggagtttgcagtgagacgagatcacgccactgcactccagcctgggcgacagagtgagacgctgtttcagaagaaagacacaaggcaagttggttgtcgatacctggaaaaattgaagttcttatgttttcataccactgaaaatgcttgtatgtaaatatcctctgggacaggaaattgacttaagtgagtattcttaaacatctctaagtgaggaaaggaaatattttttaaagcataattagtgtttt

SEQ ID NO: 2718 - DNA, 1031 bp, Homo sapiens
ttcggtcaaatgtgttttggaggctgtgagaaaatatacaaacgtgattcttgctcccaacttgtagttgagaaaagatagatactaacatttaaatagagaagtatatgagatccttttttaattctacttttaatgatgttcgataataatcttttagctaagccattattcttcctgttttgcatcttcttttcttacttcaatccctgataataaggtcacgtgtcagagatcaaatagtataggtaataggttacctaaataggtatttgcataataggttacctaactaaataggtttttgcctaataggtatgttgattatttcgcttacttgattctttatgagcctttttttccttgcgacgtctttggtattaattgttagtcaagatggatgtagaaattttccatatgggatgtttctctttgaattcatgttgttaaaatgatttcttttggtggagtgctgatcttttttatgattgtttcatatagataagaacagactacaaaaaaatatgcctttcaatcctgaagagtaacctgaactatacactagttttgtgctttaattttcatttgtaatctgccttcaataaagagttaagctagtggaatttatgtcttagcttgttataacacaaacacgaatatttgtctgcttggcattaaagggtaaagatattccatagctgggaatcttaatctgaggtacgtgtaaacattcagggactatatgatctctgagaatttgtatgttgtaagtctttgtggcagtgtatacatttgtgttgcaacttattaacacatacaccgggcttttttttttttttttagaagattcatagctttcatcatattctcaaaaggtttctgtgacccatgagatggtttacagtatggggaagcatcaaagcacttgcacagttgatggttatatgtgtgtgttattatttcagccacccattatcatgtgcttaccaactgcctaacagtgcatacatatgtagaagttttattctttt

SEQ ID NO: 2719 - DNA, 1071 bp, Homo sapiens
catactcatcttagtgctcatttaaaaaaggatatgtttactaattagtgtaatcagttaaatacagaggtatctttccaattctttggatgtgttttgacatttgccgtcaacaaattaagccttttgtggttgattaaaataggaaaagcttaatataagttatgtgactaagaaaacaacttaaaaaccaagacaacactttgaccaatataatcacttgaatgaagaattttctaattgagatataatttacataccacccatttaaagtgtacatttcagcagtttttagtgtattcacagggctgtgcaaccatcacaatttaattttataacattttgatccctgcgaaaagaaaccctgtactcattagcaattagtccctgttcctaaccactaatctactttctttctctgtagattggcttattctgaacatttcgtataaatggaatcatacaatatgtagtctcttgagattggcttctttcacttaacatgttttcaaggcttcatagctgtagaatcttgctttgtttttttgagactggagtcactctttcgcccaggctggagtgcagtggtgtgatctcagctcactgcaacctctgcctcccgggttcaagcagttctcctgcctcagcctcccaagtagccagaactacaggcacacaccaccatgctcggctaatctttgtagttttagtagagatggtgtgaaggctggtctcgaactcctgacctcatgatctacccacctcagctaatttttcatatttttagtagagacaaggttttgccatgttgcccaggctggtctcgaactcctgggcttaagctatccgcccgcctcagcctcccaaagtgctgggattacaggcgtgaactaccgtgcccagcaacagaatcttctttttaaaccagactaggtgtcttttcacaaacaccctgcaatacaaattcctttgcagtttgacactgaaagatgattagtttcatgtgatctttatgtttctcctttttgacagattagctttgaagtttaaatccaatggagaagactcaag

SEQ ID NO: 2720 - DNA, 1030 bp, Homo sapiens
taggccgggtgcggtggctcacgcttgtaaccccagcactttgggaggccgaggcgggcggatcatgaggtcaggagatcgggaccatcctgtctaacacggtgaaaccccgtctctactaaaaatacaaaaaattagctgggcgtggtggtgggcgcttgtagtcccagctacttgggaggctgaggcaggagaatggcgtgaactcgggaggcaaagcgtgcagtgagccaagatggcgccactgcactccagcgtgggcgacaaagcaagactccgcttcaaaaaaaaaaaaaaaaaagtaaattaaaataaattaaataaattaaaataattaaaataaattaaaataaattaaaataaaattgtagcattgtataaatgagttagcactaaagataaaatatatacaatttaagacagtattataacgattaagaaaaaatctgagtataaattctgatagttcagaggaaggcaagagaggatccagcaccgtgagaatgtcattaatattgggagaaattctcaatttattgagactgaaagtcacctatgagtatcaatttaatgaggaagttggaagaatttgatgcagtttcctgtgtcacatcatggctccaataggaatatattatttagctagtgactgctgcaacaaaccaaagatcacaccagtaattcccagctggcttggaatgtcatagcatatatggacaattaatgtttcctgacttactggatctgttctttcagcccatcttgcacacaactgccagattaatattactgctttttatgttgaatacctctgttcaaaaatcctttgtaggacaaacaccttagcttcactgtcaaagctctctataatctgcttcccgtcttatctcccatcattccttaatagggtttacttcacctaaccctatctattcattcttaactaaagatatccagccaggtgcagtggctcaagcctgtaatcccagcattttgggaggccgaggcagaaagatcgctggaggccagg

SEQ ID NO: 2721 - DNA, 1045 bp, Homo sapiens
tgatggacacttgggttgcttccacctcttgactaccaggaataatgctgctgtgaacttgtgcatataccgtggccttttagagatgtgaagtctgaggcacagaggtgctaattcacttctccaaagccaaaggagatggtggaattgggatttgaacccaggtggtctggttccagattctgtgttcttagacattatgtatgcggattcttttcatgaatagaaagcacaagattctctacacttaacaaatggctgccggaagtatctggtcatgctgaagctgggtgcgctctctaggaagtaccttagggaggcttttacatgtgagtgcgagaagcactccatagcatgtacttctgcgtggttgggaacaatctaaatgtcagcagaagagtatgtacattccttgtggtctgttcatataacaaacgctgtaaggtgtgaagatgaatgtcctggagctccatgtgtcaccgtagtgaaatctcaccactgaacaatagactgttgaggaaaaagtcaggtgcagaaggctctgcggagtagaataccatttatatcaagtttcagaatattaaaaaatgctgtaattgtttagggatatggaaatatatggtaaaaatattaagaaatgcttaagattaaataaacaccaaatgtagtataaggccctggggagggccgggcgtggtggctcacgcctgtaatcccagcactttgggaggcggaggtgggtggatcacttgaggtcaggagttcgagaccagtctggccaacatggtgaaaccccgtctctactaaaaacacaaaaattagccaggtgtggtagcaagcgcctgtaatcccagctactggggaggctgaggcaggagaatcacctgaacctgggagggagaggttgcagtgagtctagattgtgccactgcactccagcctgggcaacacaacgagactctggctaaaaagcaaaaagaaaagtttacctctgggagtagagggagaattgtgtttggagagggccccagaggacttcagttgc

SEQ ID NO: 2722 - DNA, 1031 bp, Homo sapiens
tgtgctcctctcccagatggcgttcccccatttccctcagctctctgctcagatgccctcttagaggaggtggtcttccctgggcactgcatatagaacagccacacacctttcctgcatgccctgctctgtccctgagcacagacaggcctgcctgtgacacactgttgaggcccctgtgtcgtgatcgtctctccccgatgacactctgctttgctcactgcgatgctcctggccctaaataattacttgcagaatagacgagtgcattgaataatttccacacatacacatattagatgagagtgtagctcctccagtagctggcccggtcctgctgcaagctcctctgtctttctctgcggggacctggctaagctgtgccccttcctgatggtgctgcacctgcacctagcccctcacctccacttgtgttgtctgtcggctttgcttttccagccccactgtgttatcctctctgaatccctgtatcaggggcagttggagtgatactgttacaactgcttccaggctaccggacaccctctcaattcctaagtcatgcgcttttgcacatgtgtcccaagttgacccctcttctctgccctgtagatgctatttatctggagattcctatggtaatggtgccccatagaaggtcatgtgctggggtgaggcttgtgtgtataccttaggtgcttcagaaatcaaagttaccctcactgcttttcccctctccttttgttggatagtgctaggatggtttagcgttatgacatttggttctttgtcatttgattgtagatgtttgtctcaagttttgagtatataacaatgaacttttaatttatttttagttttttgagacagtctcactctgtcacccaggctggagtgcagtggcgcagtctccactcactgcaacctccgcctcccgggctctagagtttctcttgccttaacctcctgagtagctggaattacgagcgcgtgccaccacacctggttaatttctgtatttttagtagaat

SEQ ID NO: 2723 - DNA, 1045 bp, Homo sapiens
tcataaatatataatgaaaactttaaaaaatgtataattaaaaaaataatgaaagaagaaataattgttgagaaatttatgaaaggatatgaaaaattagcatatcctttacaaacccagattggcatttagaattgaggaaaggtgtgtaacatcaatttacttattttggttaagcaaattctatcaaataataatatgtgcagttagtatctcctgttccacctcgtagctgctttacctaaaccatgcattgacacgtacctccaaggcctcaaagtgcccacagtgtgtgctcccacagcattaaaatgcacccccttaacattttatttatcaccccccaccactattccaggcctgaaacagtcttatgaactgtccgtgaggcacttgtttgctgaaacagtaactgagctgaattcttgtggtggttcctatgaacacccgggaagaaacagccagcagaggccgcctgagcctgaaccgagtttctcttccaggtgctgcggtgtgtcgcggggtgcccaggcctggaggaactctaccttgagtctaacaacattttcatttccgaaaggtaactagcacttacttaaatgcatctatccccatttaatcatcattctgagtaaataaatggtctcaattatatctaaccttaatttttagaaggatttgcaaacaagaattaggaaaaatgcttattattcattgccttcacaaattagaatttcactaattggttctaatcaaaggaaactcatcagaattaaatatttgtgaagacatgagttatattagttttgcatcagtgtattaacttgctgtttcttttttttctttttctttttttgagacagagtctcactctgtcgcccaggctggagtgcagtggcgatcttggctcactgtaacctccgcctcctgagttcaagcgattcttctgcctcagcctcccgagtagctgggattataggtgcctgccaccatgcccggctaattttctttatttttagtagagacggggtttcaccatctttta

SEQ ID NO: 2724 - DNA, 1032 bp, Homo sapiens
ccatggctgaaaggggccaacgtagagctcgggctgtggcttcagagggtggaagccccaagccttggcagcttccatgtgttattgagcctgcaggtgcacagaagtcaaggtctgaggtttgggaacctccgcctagattccagaagatgtatggaaatgcctggatgcccaggcaaaagtttgctgtgggggtggggccctcatggagaagctctgctagggcagtgcagaagggaaatgtggggtcggagcccccacacagagtccctactggggcactgtctagcggagctgtgagaagagggccactgtcctccagacctcagaatggtatatccaccgacagcttgcactgcgctcctggaaaagccacagacactcaacaccagcccgtgaaagcagccgggagagaggctgtaccctgcaaagccacaggggtggagctgcccaagaccatgggaacccacctcttgcatcactgtgacctggatgtgagacttggagtcaaaggagatcatattggagctttaaactttgactgacctgctggatttcagacttgcatgggccctgtaaccactttgttttggccactttctcccacttggaacggctgtatttacccaatgcctgtatctccattgtatctaggaagtaactagcttgctttcgattttacaggctcataggcagaagggacttgccttatcacagatgaaactttggactgtggacttttgggttaatgctgaaatgagttaagacttttggggactgttgggaaggcatgattggttttgaaatgtgaggacgtgagattaggaggggccagggatggaatgatatggtttggctgtgtccccctccaaatctcaacttgaattgtatctcccggaattcccatgtgttgtgggagggacctgggaggaagtaattgaatcacgggggccggtctttcttgtactattcttgtgatagtgaataagtctcaggagatctgatgggtttatcaggggtttccgcttttgc

SEQ ID NO: 2725 - DNA, 1044 bp, Homo sapiens
tctaccaggctcaggtggaacttcagcgtccactgtgaaatgatgttggtcccaaggagagcaatttaaagtacaggttgagtgtccctaatctgaaatgcttgggaccaaaaatatttcagatttcagatttttttggattttgaaatatttgcatatacaggccgggcacggtggctcactcctgtaatcccagaactttgggaggccgaagcaggtaggtcatttgaggtcaggagtttgagaccagtctggccaacatggtgaaaccccgtttctactaaaaatacagaaattagctgtgcgtggttgcaggtgcctgtaatcccagctactcaggaggctgagttgggagaatcgcttaagcctaaggggtggagattgcagtgtgtggagatcatgccactgcactccagcctgggcaacacagcgactctgtctcaaaaaaaaaaaaaaaaggaaaaagatatttttgtatacataatgagagatggggggattggatgggacacaaatctaacacgaaatgtatttatgtttcagatacaccttatacacatatcctgaaggcaactttatacaacattttaaataactcagcataaaacagttgtaactgtgttttgactgcaatccatcacatgaagtcaggtgtggaattctccagttgtggcatcaggttgattgatgctcagaaagtttcagattttggagcatttcggattttgaatttttgggttagggatggtcaacctgtataaagtacaagtagacagttccctctcttctccagtaacaagatagtagcctctcctctgcatctatagtctttgccctgcatccccccagccagaaatgtaggtcaaagcatgagtgaagatgggcataggaggagaacattctgtctgatcggaccgtggaactgattttatcttggaagcagttgaggctggggtaattagatgtcttctagaggtggaatataaaagcactggtcagaaaggaaattgtttaaaaagctttcaacctctgagcacggggact

SEQ ID NO: 2726 - DNA, 1043 bp, Homo sapiens
tttgtcccagaggggcacctgccagatgccagccagagctctcctgtatgaggtgtctgtcagcccctactgggaggtatctcccagtcaggatacatgggggtcatcgacccactgaaggcggcagtctgacccttagcagagcctgaacgctgtgctgagagatctccttctctcttcagagccatcaggcaggcacatttaagtctgctgaagctgtgcccacagctgccccttcccccaagtgctctgtcccagggagatgggggttttatctataagtccctgactggggctgctgcctttttttcagagatgccctgcccagagaggagaaatctggcagtctggccacagtggccttgctgagctgccatgggctctgcccagtttgaacttcccagcggctttgtttacactgtgagggtaaaaccacctactcaagcctcagcaatggcggatgtccctccccacaccaagcttgagtgtcccaggtcgacctcagactgcttctgtgctggcagcgaggatttcaaaccagtggatcttagtttgctgggctccgttggggtgggacctaccgagccagactacttggctccctggcttcagccccctttccaggggagtgaatggttctgtctcactggcgttccagatgccactggggtatggggaaaaaaaaaaaaacaaaaaacctcctgcagctggttcagtgtctgcccaaatggccgcccagttttgtgcttgaaacctagggccctggagaggtaggcaccagagggaatctcctggtctgcgggttgtgaagactgtcggaaaagtgcagtatctgggccggagtgcacagttcctcaggttcagtccctcatggcttcccttgggtaggggagaaaattccctgactccttgcacttctcgatcgaggcgacaccccaccctgcttcggctcaccctccgtgagctgcacccaccgtccaagcagtcccagtgagaagaaccaggtacctcagttggaaatgcagaaatcacccaccttctgt

SEQ ID NO: 2727 - DNA, 1033 bp, Homo sapiens
tcttttgggtagataccagcagtgggattgctggatcatgtggtagctcaatttttatttttgaggaactgccaaactgttctccatagtggttgtactaatatacattctcaccaacagtgttcaagggttcccttttctccacatccttgccagcgtttgttactgccttttagatataagcgattataactgcagtgaggtaatatctcactgtagttttgatttgcatttctctgatgatcattgatgaacactttttgatatgcctgtttgccatctgtatgttgcctttcgagaaatgtctgttcaaatcttttgcccatttttaattttgattactacaccttttcctaatattctggttgttaatcccttgtcagatgggtagtttgcaaatattttctcccattctgtgggttgtcttgactttgttgtttcttttactgtgcaaaagcttttaacttgatatgatcctatttttccattttgctttggttgcttgtaggatattgctcatgaattcatttatttttatttttatttatttttgagatggagtcttgctctgttgcccaggctggagtacagtagcatgatcttggcttactgcaatctctgctttctgggttcaagtgattctcctgcgtcagcctcctgagtagctgggactacaggcatgagctaccacacccagctaatttttgtatttttggtatagatgggtcttcaccgtgttggccagcctggtctcgaactcctgacctcaagtcatccacctgcctcagcctcccaaagtgctgggattacaggcatgagccactgtgcgtggccaagaattaatattatttttaaatttttgtcttaatttcaaaagtttttggggaataggtagtgtttggtcacatggaaaagttgtttagtggtgactgctgagattttggtgcacccattaccttagcattgtacactgtacccaatgtgtagtcttttatccctcaccctcttccacccttcccccaggtccccaatt

SEQ ID NO: 2728 - DNA, 1112 bp, Homo sapiens
ggaatatctttttccacccctttaccttaagtttatgtgagtacttatgcattagttgagtctcttgaagacagcagatacttgatttgtggatttttacctagtctgccattctgtatcttttaaatggagcatttaggccatttacacccaacattagtattgagatgtgagactgttttattcatcatgccagttgttgcctgaatacttttttttttcattgttttataggcctggtgagatttatgctttaaggaggttctattctggtgtattttgaggttttgtttcaagaattagaactccttttagcatttcttgtagtgctggcttggtagtggcaaattcttagcatttggttgtctgaagactttgtatcttttccttcatttatgaagctttgttttgctggatacagaattcttggctgacaattattttgtttgaagaggctaaagataggaccccaatcccttctggcttatagggtttctcctgagaaatctgctgttaaacagcttttaaaattctttcctttgtcttgactttagataacctgactgtgcctgatcatctttttgcaattattttcccaggtgttctttgagcttcttgtatttggatgtctagatctctagtgaggccagggaagttttccttgattattccctcaaatatgttttccaaactttagatttctcttcatcttcaggaacaccaattattatgtttggccatttgacataatcacaaatttattggaggctctgttcattttgtaaattcttttttgtctttgtggattgggtaattgccttgtcttcaagttctgaagtcctttcttttctacttgattctattgttgaaactttacagtgaattttttatcctccaagtgcgtctttcatttccagaagttgtgacagttttttattatatctgtttctctggagacattttcatccatatctgtattttaaaaaagagtacttaagttggttttcacctttctctggtatctctttgagtagcttaataatcaaccttcttaattatttatctggcaattcaggtatttcttcttggtttggatccattgctggagagct

SEQ ID NO: 2729 - DNA, 1042 bp, Homo sapiens
gtcagagtccctgtacctgttgcccggttcctatgggccagggcactgatactacatgccttccgtgtggagttctgagattggctgcccaggtcattaattatgggttcagggttgtaagatctaaatccagtgactcagcaactcctaatgacatctacctggttcctccaagtctggattctctacctctagtccttgagctatggctggaccctgtcttctgttttctcaaactgattaacatcttgctaatactaattctctagctccaaacctggtctgcccttttggaccttggatgtcctaccactcaaaatattagactatgtccagaacagattttctgcccctgaacttaagtggagatcagatgcctataagattcccaaaattgccccctttttctattgattcctgttactatgaccttttccccatgaatcgcgctaacctacaacagtccctccagtctcttggcaggcccaagttacagtgctccttgaacggattaactgcattaatggattagcatgcatttatcctaaacaaatagtgctttaccagggccattaaatatgtgtaacttagtatcctttgagtgctatctccttggtgaattcactagccaagagtctgggctccaggtttgcaggtttaagctcattaaagggaacagaacacacacccatttggaggtatattctatgaaggaaagccatagcagaagttaaatgataccagaatgttgcttggaatgttaactccgctctgaccagtgttaggggaatgactttaattgattaatagcatcaatctatgacaatctgatggcattgtcaagacaacactaagattcattcatgttgaggacaccttctgcactagatgggtgtctagttggccatttccctttggttgatgtattttttcttttggtgcattctcactacaatctaggtaggttataatgtcttaagttatatgatggcaggaatgtttgtctgttttgttcactgctatagtcccagctcctataaca

SEQ ID NO: 2730 - DNA, 1045 bp, Homo sapiens
atgagaaacatcctttcacatacatgtaacacatatactttaattttttcatcaacagaaaaaacaccttggatctgcctattcctaaattctaattcaatgaacaatgaggacattttaataaaaagcttggactcagtggaaaaaataaaggttagtaatggcttcaaaagagaagacaacacatatacctgtaattttccccataatctgcatttgtcacatccaacacagtccattatacgggagatattcttgaaatgtaatcggaattcctcctagcaagcagaaaatattttcagtctaattagacttttaaaattgaaccgcatttggctaaacgataagtaagttttgatgcttattaataaatcagttgtgttttttgtttgtttgagaaggagttttgctttgtcgcccaggctggagtgcagtggtgccatctcggcttagtgcaacctccacctcccaggttcaagggattctcctgtctcctcagcctcccaagtagcttagattataggcgcatgccgccatgcccagctaatttttgtatttttagtagagacggggtttcgccatgttgtccaggctggtcttgaactcctggcctcaaatgatctgcccacctcgacctcccaaagtgctgggattacggtgtaagccaccatacccaacccgagttgtgtttttcaacagtaaagaaaaatacttgatacttgtatactataacatggtacataaaatactgacattaatggaaattaataaaattcattctgcatattaattcactttccactgaggagctactttatgcaaagcaccaaaatatgcactatgggagatacaaaagtaaataatacatggtctttacttttaaggaacttaattgctgcttccatttgttatctacatacaaccaacaataaatatgtctagtttatgtttcacttatttttgatcctttgctttgtgtaagcctatatcagaaagctagtcctagaacaatgatcaatttttgtatcactccttagtaccacac

SEQ ID NO: 2731 - DNA, 1034 bp, Homo sapiens
ttacaggcacctgccatcatgcccggctaatttttttgtatttttagttgacacggggtttcaccatgttggccaggctggtcttgaactcctgacctcagatgatccacccaccttggcctcccaaagtgctgggattacaggcgtgagccacagcacccggcctctcccgaccctctatcagtcgttccttcttcccccaccccctccagttacttgaaacagttctcttcatagatgctgttccacactctccatgcagaggtccctttatagccagtgtaacgctctgggttcagcaataggtctacatactgagcagctggagatctctcatctgaacaagaaaaaattcataaaaaccatccatatttcaccatttatctaagatttaacagtacaaagcaaaccggactactcaaaggtaagaaaaatgtcatgcttttcaagtaatctccaacttaaatggtatagtggttagtatacttgtgactgtacttgatgcaagatttgtaataacttggacaaattccttaagagaagaaaaaacaactcttccatttcctttggatacgcagtgctcttttaagtaatataacatccccttcaccttattagagacatgaatcatttcttaagttttaaccacccaggattgaaaagaccaaacagaatcataacctgctttaatatttcatatgatttcttctctaagaatatatccacctaaccacgcacttggaaacattttgtaacatatattgtattaaaaatagagatttccctgctactctctgcttggactcatgaagtaaacggctccataactttgtgatccaaatctgattattcataaagctataccatgctctagtttttaaaagttatatattactatttttactgatgtcaacatattgaagtgttttttttgctctcaaactaaaacatagtaggcacaactttcacaaacttgttgaaatatttaaaactaaataaccattttccatattgaaacccaaatgagtatttac

SEQ ID NO: 2732 - DNA, 1046 bp, Homo sapiens
tacaactgccttggaaaattatttggtattatttctaatgttgagataggcatgccttatggttcagcaatcctgcctttacaggtagacctagagaaactcttacatgtgtgcacaatgagacaaaggacaaaaatgctagtgcattactgtttgaaatagccaaaaattgggaacaactgaaatgtccatcaatagaggaatggctaatatgtgttatagtcatacaactgactacagctattaagatgatgagcaaaatccacatataccaacagagaaaatttcaaaagtgtaagactgagtaaaagcacaaactgaaaaaaagtttgtaacctaaagaaatagaaaaatattattaatattatttaaattaaaaaaaatttacacacaataaattacatattacttgtggatacacatgcaataaaagtgtaaaatatattacttgtagatacacctgcaataagaatataaaatcacaggatacttcagaaaaatggttagctctgggaggaaggaattagaacgaactgggaaatggctgagggggtttcaactgcttttatatggttttatttatttcagatctgaagcaaaaataaatacaataaagtaaaaacaaaagattacacgggagagagagcaagaagaaaacgcaaaggaggcacaagaaggagacagagagagagggtatgatgatctttattatggatgcgcagtagtgaaaaacaggaaataaacggttctctaaaaacatatcaatggcaaaatataatactctcataaaaggacaagaacaataattaaaaatgaatatcttaataccatctgaaagtactctgctcaaaatatcttgataattatttactctatacaatataattctgaacctgccaggctaactagttgaaacagaagactaaaaatagctatgtgataaaacacctgctgactaggggatctgacactatagttacatttaatagttgttccagagattccaaaaacagtactgaagcaatttcaaaagaatctagaaatgt

SEQ ID NO: 2733 - DNA, 1032 bp, Homo sapiens
taaaaactacccctgaaaaataaggtatggaaaaaatgtaccccagcataataaaggtcatatacccacagctaacatcatactcagtggtgaaaactgaaaagcttttcctctaagattagaaacaagacaagaacgcccactcttgccacttctattcaacatagtactggaagttctagtcagagcaataaggcaagaaaaagaaataaaagacatctatatagaaaaagaaatgagaatgtctgtttgctgatgacatgatctcatagagagaaaactttaaagactccaccaaaaaatctagtaataaactggtgataaattctgcaaagttgcaggttacgatgtcagcatacaaaagtccatagcatttctatacactaacaatgaacaatcccccccaaaattgagagatcatatttacagtaacatcaagaaatgaaatagttgtaactttaaccaaggaggtgaaagatctatgcactaaaaactaaaacactaatgaaagaaactgaagacataaataagtggaaagacatcccatattcactgattggaagaattaaattgttaaaatgtccatatcacctaaagtgatctacagattcaatacaattcctatcaaaattcctatatcatttctttacagatacataaaaaacaatacggccagacacagcagctcacatctgtaatcccagcactttaggaagcagaggtgggaggatcagttgaggtcagtacaaggttttcaaggctacagtgagctatgattgtgccactgcactccagcccaggcaacagagcaaggctctgtctcaaaaacaaaaacaaaaacaaacaaacaaaaaaagaacaatcctaaaatttgtatggatccagaaatgactctgaatagccaaagcaatcatgagcaaaaaatccaaaggtggactcattgcacactgtgattgcaaaatatattacaaagctactgtaatcaaaacagcatggtactggcataaaaatagacacatcaaccaatggaac

SEQ ID NO: 2734 - DNA, 1026 bp, Homo sapiens
cggggtttcaccgtgttagccaggatggtctcgatctcctgacttcatgatccacctgcctcggcctcccaaagtgctgggattacaggcgtgagccaccgcgcccggcctcttttctttttttctgagtcttgctctgtcacccaggctagagtgcagtggcatgatctcgactcactgcaacctttgcctcccaggctcaagcaattctctcacttcagcctcctgagtagctgggactacaggcgaccaccaccacacccagctaatttttgtatttttagtagaaatggggtttcaccatgttggccaggctggtctcgaactcctgacctcaagcgatccatccacctcggcctcctaaagtgttgggattacaggcgtgagccaccgcacccagccaaagtaaggtagactaatgctacccttaagaagtctgaggaacttgaacttaaatatagatgctgtttgggggtgccttttagaacaacgtgttaattaaatgtagaagtagttcagtttgaacacgtgaagagaaaacaaacaagtactaggaaatcactaaataattcaaaagtagaaaggtctgtcctaaaactaggaagccaatatgttgtatttgatatgatttcctacctcacggattgataatgatgccatgtgaagagttgtccctgttcccacgggaaactcctcatcctcccacctgtgtggtttgctctgtgttctcatcccgcttgttcaataaatacactccccgcccccgctccccaagccttgacagagaccctcttgggaatcttctgttacagtaaactaaaaaccaacctgccctcccctcccagtcatggcaagaatacaatggtaacaactctccaaaacattttttaatcttttgtgcataagaggatagaggggacggagaggactatgaccatgggagcatttggaaagccacctgagaaaagtcgctgttaaattcaagttctttgccagtgtttcaagaggccgaggcaggaggaccac

SEQ ID NO: 2735 - DNA, 1062 bp, Homo sapiens
gatgctattgacaagatcaatagagaattcaggaagaagaccatcagatgtgtgtgtgttgttaggattgagttttctttgttggttggttcagaaagaggagataaaggtgtgtggagtttggggtatgtgagatttgttgtgccagtgagactgcttgtgtagatgacacagcactaggtactgtgcttaggattcatgcattgggaggttatagttgaagccctaggcatggatgagactgtcaaggaaaatcgtccttataggaaagcggagaggttaaccaagatgaaaccttgaggaacacttactcttggaggtcagaggaagaaaggagctcagaggtaactagaggaatagccagagaagaaaaccatctgtgctcaaggcaacgattctttccttcatagcactgatcctagttcatagtcacatgtttgctgactatttcattgtcttcacccattgattaggctatgccccttgagggcagggactcctgtgtctttttgctcataattgtatcttcaatgcctactacatagtaggtcccaataactgtgtattgaataaagaaagggaaaagccaggggagggcatcgcttcacatgtcgaggaaggaatggtcaccaccctcaggaggcacagcgtggtcaagagggagacctaccaagatgtcattggatttacttgcaagagttaagaagtgagtatgagaatgtttatgcagttctatccagaaattcattaaggtagcaaagaaaaatattaaaatgttatttgaagatattggaaagtacagaaaaggcttcctttctacttttcaggatgagaaacttcaggattttagaaagaaaaaggatcagcaggagtggaggattaaaaataatagagagaagggggataatacgtgggatgttttcctatagaaggtagaggggattcattttcttagcaaatatttattgataacatatgtttggtagaaaacacacagcactagattttcctcaaggaatctgtaagctggcaaggaagtcaagatatatgcacacataattt

SEQ ID NO: 2736 - DNA, 1008 bp, Homo sapiens
aattctcttgtttccatagaccgcctttttcacatatatccatatatttatacattttgttgtaaactctagtctataggtatttttaattcacattgtatattacattctggaatgtacaaggaactaacacaaatcaataagaaaacaaattagctttagacattgaagaatctcccccaacccatcgtctattatttttgtctatggtgactttcgtttaacagaaatccttggtttttatgtaatcaaattcattgtgttttttttttttaaattaagaggttggtctttttgagtcttaagaagttccttttcattcgaagtcataaagttcttcccaataaattatacaataagtttgtcaggtttctgaaaaaccaaagcagatgtttttaaacagcttttgatctcttgcctatacggtggctcaacaaacaagatgccagaatttgcatgtgtggggctgggttgttttgtggtaaatagtgaactgtcttaaagtccaaaaacaaagcttattatttctggattgaaaagggaatacagtaagggccccatggaaaagtactaagactttttatgaaaatgaggggtggaggcactctgagtggttagatttgctcaacttgtgtgcactcgctcagtggaggagataggaagaaggacatgtaaataataggatattgattgatattgattaatcattttgccgatgccaaaggacatacttcactgtctgtggaaaagattgcctttttctccctaggaagtttgaataccttttaaatatgaaatttcatgtgcatgacctatttccccactgccacacctcatgctcacactaggcttatgattcagtcacccacttaagttcacgtgatgtcatttcagggagaattgcagctacatccttttgagaagaaagcgattcagctgggcatgtaggttagagtctttagttcttagtcttctcattcctcctgtgaaattatctacatttaacag

SEQ ID NO: 2737 - DNA, 1050 bp, Homo sapiens
agaggtccagttcttaacacatggtctcattttagtatcacagttctgatgatgaaggcagggctgatgtttcctcatcttgctgaagcatggagaggacttgtctaaaatcccatagctactaaggggagctggggctaaaacccagatttcttgggttttcacaccctgctactattagcttaagcctatcaaattctgagtgcttattggctgataggatagtcacatcatggagtgcctaaattaacactacatgtgaatttaccgtgtcgactatagcttgaaatggcgcccactgcctgatgcctaccagtctttctattatacatgcttcattaagccctaccttttctccacatttcccaagaagtgattttctttggttcttgaagtacttttgtacagatcattggagcttaacttcgttcctttatcaggaagtgttttatctcacctgcaagttcagtaaacacaattagcaagtgaggtggctttggaaaggaatagtacaccctgaaagaaacatagtgcccagaaactagatattggatattgcaaatttttcttttaggttactagagccaccttcctgaagcccacttggagaaagtcactcaaaatagttctgtgaccaccatttagccccagttctcatattgtatacttgagactctggacagtaagacgaggcagggttgtaagtttgcacccaataccagcttacaaatattcttacattactggtttgggttttaaattatctttgcctcttctttctcatcttccctcacttttttgtcatttcaattaaagaaatatttgccaagtactgaccttagtgttgctaggcatgagttccaaggagctcagatagcttagaaccagccccatttgacttgagcttttctcgcctcttagcacagaaggaatgggttggcgtcattatggtttgttttgagtaacatgtattcagtctgatatgctatagggagttgttgaaggtgtttgagcaggggaagcaactggtttaaaattgttgtataggaa

SEQ ID NO: 2738 - DNA, 1232 bp, Homo sapiens
atgagacagagaatatatgcaagtttggttttgaatattagattgaggggcaggtgggtagttgaggtagccatatccagtggacagtttaaaagctgggtctaagattggggccaggtgtttttgatatttagaaggtcattggtgactttagaaagtaatttcaggagagtggtggaggaggaagccatgtcagaaggataagaaatcggtggttgctgaggtggaactgtgggagtgggaagggctagatgagggagcagtgggaggtgttggtcatcatgcgcttttccttaggtacagaaagaagggaaatagagtgagccagactgcaagaggattttgaggtggagagggtgtgagtttgaggagcctccaacagaaaacttctttgtacgggattaggtgaaatcacttgtggagtgaggaggaaaaggatttggtgctaaaaaaaaaagtagaaattgggacagtagatgttggaagtattgagggaggtcaagaaaaggtgaaccaaaggaggctgaacgttgcaagttttcagtgactccagtcagcatagttttgtggctttccagtaggtcgtagaaaccagaaagcaggattagaaggagtaagcattgggcccttttctggactgggaattagaagtcaaggagcatggggagagttgagaagttcaagggtgttagccagttattatttcatagttgggcagaggtgagtaaaactctgtttgcaggccattattagttctggcaataggtgagggagaaggtcaaagctaatattttaaagaatagtttggaattattgatggttttcaattatctctgctaaatcattttatttagggagtatctgcacagaattaacaaggaaagagagcaaagtcttgtatcactggcccattattgcctgttttcctcatctgtaaaacaggagtagtgtagcctaccttcaccttggtttcgtgcttcaccaggaattttgtgctgtgtgcaatcttgtattaggcattgtcacgacttaatgacctttttgggcagcgttttcctatatagagttatgagtgcatcttttataaactccatttactccttattggagattattataaatttctctaaagctcctccctcacacatctttttcacctttcattctttgaagtcaaactttcactttctttaaagaaggtctgaagaaaaccctgcgggatgagatcaatg

SEQ ID NO: 2739 - DNA, 1174 bp, Homo sapiens
tcagaagttgaacaaatttggatactaggtttgtggtctattataaaatagcacacaatatcctcatttatcagaaggcagtccaaactatctagacatctgtattagtccattttcacactgctgataaaggcgtacaagactggacaatttacagaagaaagagaggtttaatggacttacagttccatgtggctggggaagcctcacaatcatggcagaaggcaaggaggagcaagtcacgtcttacacggatggtagcaggcaaagagaaagcttgtacagggaaactcccccttatataaccatcagatctcgtaagacttattcactcttataagaacagcacaggaaagacctgcccccatgattcaattaccctcaccaggtcccctctcacaacacgcgggaattcaagacgagatttgggtggggacacagccaaaccatatcaacatgttagcattatacatgttataaactaccatatataaacatacttatattgagatctgacaaaacatccaagtatctaggtcaatttctaagcatcaagactatagaaaacaaaaagcattaaaatatcagagctgaatagtcatgataccatgtctggtagtgcagtgggtggagatgatgagatcaagcaaatatggtttgtaggtttttggtttatggaactttgtgtgctgtgataccacactttttcactaggagttgttcataccaggcttatgtgttgttgatgctctctttggtctagacctgccagtggggagctaacttacccttgctcttgggctgtacaaggtgaagtacggtaagtcttcacttaacgtcattggcaggtttttgaaaactgcatctttaagcaaaatgatgcatagcaggccctcaaataatgtcatttccttcaacagaatttcattataatgttgattagaaagaaaatactggttttgttacatattgtctcagtcaaagttgcaatttctgagaacctgtcaacgatgttacaagaggactttgttgtgtaggcttctctgttggatatctgagcattatcttggcttactgcagcctccacctcctgggtttgagcgattatcctgtctcactctccccagtagctggggctacaggcgtgtgccatcacgcctggctaatttttata

SEQ ID NO: 2740 - DNA, 1053 bp, Homo sapiens
gttcacgccattctcctgcctcagcctcctgagtagctgggactacaggtgcctgccaccatgcccggctaattttttgtatttttagtagagacggggtttcacctcgttagccaggatggtcttggtctcctgacctcgtggtccgctcaccttggcctcccaaagtgctgggattacatgtgtgagccaccgcgcctggcctaaatgataattttaaaaatatcttgtaaataatttctgaaagctgtcagtagttaaatattgcttatctttggatcagcaactatttctttttgttttgtttcctctttaaaaagaggagttgttttaaatgtctgtgtgtatgtttgtgtatatctatatttatatctgtctgtatatatgtttgcttcttttacttagacattcacattctaatttggggacagtagagtagagcaattcttactggtcctgataaatttagtggagtagccacatttttctggttgatcaaagacatgatttattaaaactgataatgttaaagggagtgcgaatgactaaaacaaatctttaagagtaattattttggagttttagtgctttatgtctatgtaccctccctactgtgtgtgtgctgtagtaaaaacagatccactggacctaattctctcctctcctagcccctctgcttgtgcctgctccttcttgccaaaggtgaaatcctttttctgttcaaattttgagtaggaagcaaggattgtgtgtgtgtagatttgacagagtaaaagacatctgtggatgtggggaagatggaaggaagtttgctgtttgtatttgtgcaaactgtcatatagctccaggttcatgtctcagaaagtaaaaacaacacagccagtgcatagctgatgggcaggcacataaaaggtacagtttatagattaattttctgccttgttgagaaaactaaaaggcatgattgttgctgcacacttggaagtaggtatataattatatgtatagttatgttaaatagacttaattttatagttaaaattagttttgaaa

SEQ ID NO: 2741 - DNA, 1048 bp, Homo sapiens
tttacaataacagtataaagcagacactttactgtctttgtaaactcagaggcatatgggaagttgccccaaggttgttcattcaggtaagtgatttgaacccaaggccgtctgtacccagaacctgcctataaccatctaatgagactgcctctcctaatactttaaatgtaatgaatagaacaaaaacagttcagagccttttctgtagtgatactttacactgtatgtttttacttcagtgtgatatatccacatgtattatctgatatttgcccctaaattggccagtggcaggggagatgttattatgttggtggataaggaaacaggcaccagaagtccacctggcttacctagagtcagctcattagtgatagacctgccacagtgactcctgtctctcaggtctcaacctggatccctgattcagccttgttgattatgggttctaggcctctgaatcaaagaaatgaagtaatgttgtaaacacaccattggtgggattaaaaaagcttactccatatagctttaagctaacatctgagcagacagctgtggagcacccctctttcaattctaactttgtccatggtttttgcctcagcctcttggttaaataggggttgatgattatttttccttttttctcagagatggtatgatttggtcctttaggttatttgcaacataaaactctgaaatatttcttcttttgagagttatggttgtaaatgtagttgtaacaaatagcctttactgcatttgaatctccctagagacgactatggccctgtttccacattggatctcctatctgctcagatgggctatggtgcaggaacttctctttcttattgaatacatttgtgtctgtctgtctcatgtcatccatatgcatttgcagaaatttttcaaaatgcttctccttttaaggtctagagcccttcaggattggaccgtacaccaactttgttaacattggagagcgctgtaatgttgcaggatcaaggaagtttgctaaactcatcatggcaggaaactatga

SEQ ID NO: 2742 - DNA, 1035 bp, Homo sapiens
atgagaattgagtctcctcagatgtctggacagactaacaacccactttccatgtatgtgaaggaaaatcattggctctatttctaccataggcaagggaactcagtgaattctttcttataacaggaaggagagaacttttaggcttatcagattaagacaaaaatataaaacaagattaaatcaagagattatgtcagcttttacatttgttcttcaaaaggtgaaaattgattttcgtgtcagtcttttaaacatttttaaatgagttctaaaattaaaaaaaaaatcttaccttgtttttctgccgttaagtttgttatgagaagtgatttttttttttcccctcctgaggcagggttttgctctgtggcccaggctggagtgcagtggtgcaatcatagctcactgcaacctcaggcttctcccacttcggcttcctgagtagctgggaccacaggcacgcatcatttaaaaaaaatttttagtagagaggtcgggtcttgctgtgttcacaggctgattttgaactcctagtctcaatcaatcctcctgccttggcttcccaaagtggtaggattgcagttgtgagccattgtgcctggcaggaagtgatttttgaagttcttcttttttaaagaaacttcctagtgctctaagagttgcatttttcaggttgagctcttggtttttttattaggcttcagcagattcagcagatttaagttagagtctatggtaggtactgaattacatttgtccatctttcatttgtgtcttaaaactctttactaaaaagtcttgtcattcctctgggagtaaatattttgagaatttaaggtacaaagaagcaagacaacttgttcaaagttagttagaatcagaggtatagccaattgtttatcagcttagtattgggaagagggtagactcgccttgtaaggcccaatcaagtcaatggactattgaccctactttcctcatctctaaaatgggatcatcaaaccccctttgtgaattgtaaagatgcaagtg

SEQ ID NO: 2743 - DNA, 1038 bp, Homo sapiens
agccccttgggctagcccattaggtgggcctcctttgaactgtttgggcttcggtttccaggtctgtctttgaggtgctcttggttgtattgaattgctttctgtgctggcccctgcctggctctggagaactaggtgttccaccctaaacaaccctgccttgctgagctgcttggcttcctttccaggacccttaccagggcaccatcgtgctggccactgttaaaggcgacgtgcacgacataggcaagaacatagttggagtagtccttggctgcaataatttccggtaagttaggacctcacctctttcaaccccttttccatttaaaaatgaaagccttttaacagaataattcttcaatgggtgggaagagtagggcatggcagtggatgttagaggttattttttatttctttttgcttgctgtgtttttgaattttctacgtgaacacagcatttcaaatgaaataagttagtaattatccgtgttcaaaaaggacataaagaatagtaaaagctattcaagtggggtggaaaccgtccagaggattcctggggttggatgttgggacagaggtgctaatagccggaatatcaggctccttcccatggccagtggtgttcatcatatcctctttttcctttcaataaacttagattttagaaccgagatcttatgagaccttggctaaacagttttacaggaaggccttctctgtacaagtctcagttggctttgcttagagccaggaccctgtgttcttggtgattaagctagattttggaatgttgtatacaagtaaaacccctttctatcttattataattaataaatattcataacaaaatcatttgcatgtgagagctgatgacctgtagtaagtatgtgtttcgcttagatttgaacatattctttgtaatgaaaagcctgatggaaataatgctttcccatatccatgtccagccaacagtccttttgagtcatagacttctttccaatgtgccattttctctagatagagaagaaaattgac

SEQ ID NO: 2744 - DNA, 1074 bp, Homo sapiens
tgtgaagactgcgtattaagcctgaggctttcctgcaacaaacccagttgctatgtgttgggcactgagggtttgcgtatctttgctaataagtctaactggagaaacactttctgatgaaacgttactttcattttacaaaaacaagtgaatgtgcaaacttcatgtcaaacactcctttggcttgtgtgtgataacacatagactcttccattggtgagtttaattttatggtgtcagctagtagacaagtgtccctggagattgtcttatggaataatgtgtacttttactgtcagtaccaggctagtatgcttgaaggaattacctagcctagtgagtgagtctagcaacctatcctgtatctaatccttttctttcctggctttttatcattgttgcagtgaatctcaaaaatgataacaatgttttttctttgtggggataaaagaaataaagagggctaaaactgacagttctgtttagagagaaaatgtattttttaaatggggaagatatgatgcaatagaattgcaaatttgaggatttgaatagaactaaggatgtattcaccaagaatctagtattacctaccatttgtttaccacttcccaatttatacagttctttagtatcactgatttttttttctttgtcacctttttgttgttgtcattttggttcctttcctttcttttctttcatccttccttttcatggttttgatcctactaccctgcctgttattgtatttctccttttatagatgagaaaacttaggcttagagaacttgagagatttcatcatagtcacatggctagcaagtgtcatgggcaagcacattcagggcttttggttctaaaagctgggacttcgtaatatgtcaccttactttacaatattttttttgacttgagttgtaaacaagtataatgtctaatattgacacaggcataccttgttttattgtacctcactttattgagctttgcagatacagcattttgtaaaaatttgagttttgtggcaatcctgcatagaacatgtgtcttgatggcatttttccaatagca

SEQ ID NO: 2745 - DNA, 1024 bp, Homo sapiens
cattctctttcctgctggagagtggaactgggcctctgtcctacatgggttgaccagggctgtgagcaacttcctttgtgcatcccagtaccataagtgtcatttcagtgtgtggaaatagtgagaattgccctctaatcaatagtacatttgactatttccccagcaagacgactttgaaggcaggctaattagctggaaattgaacttgtcacccaggcctctggctcagtgttcttggtcgttttcttacctcactgatctgtggttatgattctctcctgctgatctctccttctgggagtggtctttaaacacagaaatgttctggggctcagcccttggacctcttctctgtcttcactgtctagatgtgtgtttctcaaactgtaatgtaccttcttgtcacctggggattttgttaaaagtcagattctgattagggtaagtctggactggaggttctgcatttccgacaaactctcagatagggctggtgctgctggtacaggagcacacctggagtaacaaggcctggggtgggctgaagtcgtctcattcgttttgtgacttcagtatcatctgatgtactgacaagtcccaaattgtatctccactgtggatctctcccccagactttagacttacatatccagtggactccctgacagctccatttggatatctaaagaaatctcaaatttaatattttgaaaactgaactaattgccaccattttgtgaacacctccccagctctcccctatttcaagaaatagcaacttcatttttcttgctgctcaaaccgaaactcttgcgtcatcctctcgtcagataacccgcatgtaacccatcagttctcctttcacagtatttccaggatctgaccacttctcactacctacactgcttcttgtctggatttttgcagcagcctaaccagtctctctgcttctctaccccggacttgtttcagtcccaagtaaatctgttaaatctaagtcagatttcttactccactgttc

SEQ ID NO: 2746 - DNA, 1059 bp, Homo sapiens
attccattgttgattggaggagcaaccacttcaaagtaagttatactaatgagctttgtcctcacttcaaattttcttatatgccagtgtttgaaacagtgggaaacctgtgttgttttggattttcccttatgtttagtacattgactttttgttatataaacacaaacattttctggtgttcacttgggtgagagccagaatactttcagagcatgctatagaaaactttttgtgattcctattctttgctttttcttggatttctttggcttgcaataatctttttcttaacactctcacttgcgattcagttcctgagaattataatgaactcttctcgtgaaattaaaccgagtggagaagctgtgttttttggcacaaaatcattacttgaacttttgcccactctgtcttgaagcaggtgtctgactgaatgattacaggttcctttgaaggaactctaaccttgtagtagtttggagacagaaagcccatctagcaagaatgaactaaatggtcactttggggagttcctgaaaggggagctttgtgggaacctttgggttaacaacataaagaggtataaaatgtaaagatgagaaagttcaaatttgttcacatgataattattcagtttaccagatttttcctgggatcatgatcatagtgatatgtggtaagtgctacgttaactgtgggtactagactttttatgccatgtacagttcactttctcagcattatcatactggaacattgaacacagtggtcccatagcatctagtttatttttctgatgcagaaatacaataaaggtctggttataggtatgccagaaatacaataaagatctgggtataggtatacaataaaggtctggttccataggtatgccacaataaaggtctggttataggtatgcaaaagaaaagtgttccttttgcactacaaacaactgtacttttagccaatttgtatagggttgttcagaggaacagaatcaataggatatgtttatatatagagagaaagagatttattttaaataattaactc

SEQ ID NO: 2747 - DNA, 1026 bp, Homo sapiens
aacaccttttcatttatatattgaccatttggatatgctttttaaatatttttaaaaattgggtattctgctttattcttattggtttgtacacattctttagtttatagtagttacaagtcctttatcagaaatacatatattgcaaatagattttttttcaatctggcttgccttttgctatcttagtgctgtctttggataacaaaagtcttaatttttataaagtccgatttatcagtctcttcatatatggttaatgccttttgcatccaaataagtaagtcatctcctaggagagccacctttgctagaaatagaaagcattcaggagttgaagtgtctcagaagcccatctgagagcccttatgatttcccacaaaccagtggaggacttagcagtagctcattagctcaggacttccacgttttcatgaaaacatcgctgaggggagataaccctatggcttttccagacatcagtgacttgcagtagcgtgagtagaactggaactgtacccccaagatactcgaaatgaaggttaaggctgtctagtgcaggagtgtccagtcttttggtttccccgggccacattggaagaattgtttcaggccacacataaaatacactaacactaacaatagctaatgaactgaaacaaaaaaaatctcataatgttttaagaaagtttatgaatttgtattgggccacattcaaagctgtcctgagctgcatgttggacaagcttagtctagtggatgaatcgatatttggagagattgaaagagttcaatagatttggggtctttggtccctgagcacacactgggcataaaacaggagggtctcaggaggccatggagttcattaatctgccccagggccatggtctggcctccctaccactctgtaccccagccttcccattccaaaagatggctcttgactcactggcttatgcctgaatgcccatcttccagctcagttctcatagcctaaggctttgtagtcctttgcttccgttt

SEQ ID NO: 2748 - DNA, 1030 bp, Homo sapiens
atgcagggatggggcagtgctatgtttattttttaactgatgtgatcagtagctgccgtttcttctttctatgtaattttattttgtgttttgatggtagctattcttctatcaacttgataatcataataacaaataatatttagctgatcctacttttacaatttaatgagtagacttcacattttctcagattattggtttcctttccaattttagcagaaagtcagtggactatgaagattagcctcattccctcagcaaacatttagtgagaatgcacctccagacactgggctaggcaccaggggcatgaaggtagtgaatgtgtgattgcagctctcatagggctttctagtaagggaagtggatatataaattggaactaaaaggctttggaaagtgcagtagtagatgaatagaatatctttgaaaccttgagttgggagtttcttaacccagagggttcccaagaccaccttcaggttcaaagtttcactagaaggacacagagaacccagaaacactgttatgaccatggtttattgttgtgaaaggatataggttaaaatcaggaaaggcaaaaggcacataggatggaatgcaggagagaccaggtacaggctttcaggagtcatctcccccatagagtaatctggatggtgcttatttcttccgctgatgatatgtgacaacatgtaaggagccttgccaacccagaagcttacctgagccttcacgtcctgggtttttattgggggttggtcacataggcccagaatgcccatgtgtctagccttaattgttcagtcttcagtccctgcagaggtcaaacataagcatgagcgaaggtcccccaccataaatcagactgttagcataaacgatgtgacgtggcccagggtgccaggtatacagtgactctcttatcaggcaggctgtcccaagggtttagagtttgtctcccagaaaccagtcaaaggccagtcccttctttggcttgtgcagggtttgaacatcccaagcccac

SEQ ID NO: 2749 - DNA, 1047 bp, Homo sapiens
taattctgtttttctaataggtggagaggccaggaaggtctacgatgatgcccacaatatgctgaacacactgattagtcaaaagaaactccgggcccggggtgtggttgggttctggccagcacagagtatccaagacgacattcacctgtacgcagaggctgctgtgccccaggctgcagagcccatagccaccttctatgggttaaggcaacaggtatggaaggtgtactgacagccagcacaccgctttcgcttgtgagtttaagcactacacaaaagagctttgcataaatgagggtctgcttcacctcctcccaaatgaccaatcacatgcccaagaagtgaccagtcacacgcccaagcccaagccatctgtgaggacgagggagagaaggcgccaccatgggtgtcagaggcaggaccactcagcaggagtgaggcgtttaatattgtgttccatggatgggcgaggaccattgctgctgtctcaggtggtcacgtgtcaggatctcagtcttcttagcttctgaagaaagagaacactcacttgttcaaaaacgtaggttaatatctatgcatattattaaaatagactgtcaggtggcttcccttgaaaggggaagacaggtggaaacaaacatttgcagaatgtataccaggtgccaggtgcatagtaaggtgcttgatggtcatgcttttaatttccacacagccgtgtgaggcagtttaagtttgtgttttacagagaagatgaaggatgatggagattgtgctgggccccccaatatagagaggagagcccagcctgtacatatccccagtggccgttctttgactgtgctggctttttttctttcgagtgacgagaacagactcttctcagcaacttgtctctcatcccccccacctttgaaaaggcaaatatcatatgcatgtccctttagctgctgtaaaaaagagtgtcttaatcaagaattggaaccagaattcaccagagtcattaacaaatttaataatttgcagaaaattactctgttttactgc

SEQ ID NO: 2750 - DNA, 1191 bp, Homo sapiens
accctatgtgataccaagttttattgtcaagacagtgtcatggtgcagaggtaggcattctgagcaggggaacaaaataagggcctagaaactcacccgtgcatatgttgacctttgcaaaatgacctggtgacatggcaagtcagtggggacaggaaggaccactccctaagtaatcccagaacaatggctattcatgtgggaaaaaaagaaattttactttctctcaccttacctggtgataagttccaaatatgttaagggctttaatacaaaaagcaaaaattgtcagtgtttggatgaaaaaagccttagggcaggaaagaatctcttgagacataaagtagtaatcataaaggacaagatggttaagtcaattctgttaaaactcaaggcttatattaagcaaacacttgaagtgagaagatgatccacaacttgagaagacatttataatacaaataactgatgaaggattcataatcacaaatatagagaattcctatttaaaaaaatagaaaaatagtgaagactacacaagaggaaatagggcttttaaataaatagatgttctgtagcattggtcagggaaatatgaattaggaccacaatgagattccattttatatccataagatttgcaaaggttgggtctgacagtaccagttgttagatctgtagggacttgtacaacattgtggatgtgtaaacaggcaccactgctttaaaaaacaattatcccttacagacttgaacatttgcagacgttatgatcttgcttccaactcccacctgtatgtccagcaaactcttgcatgtggccactaggaggaatgtgtaagaatgttcatagttacatatttataatagttaataactggaaaaagtgaaatgtatgtctgtctacaggaaaataggtgaataattagatatatatattcattctacgggatattattcagtagtggaaatgagtgaactacagctatacctcacaataagaatgaatctcagaaaatattaaggaaaaaagcaagtttgaagagaccacatggggcgtactatttttattgagcccaaaaacaagcaaaaccaaagaatatgtagtctaagcatacgtatacaataaaactatgctattaaaaaaaaagaaggtaactgataaaccaaaattgagcatagtaattaccc

SEQ ID NO: 2751 - DNA, 1552 bp, Homo sapiens
cctgggagttgcccctgacccctccagtcttagctcctgctcctgtaacaaaataccacaaactggttagcttatagagaacagatgtttatttcttacagttcaggagtctggaagtccaagatcatggtgccatcatggccgagttctggtgagggccctcttctgggatgcagcggccagcttctcatgttctcacagtgggtggagggtaagcttgctctctggcctcctcttaaaaaggcactaatcccattcatgagggctccaccttcatgacctaattacctcccaaagatgccatctccaaacaccatcattctggggattccatttcaacatgatttgggggatacatcagaccataacacttttctttttctcaaccttcacatccagttggttctcaagccctggcgattttacgcgctagataggtcttaagttcatctctacgcctgccctggttaaggttctcatcatttctcctctggattcatctgcaacacaggctgccgggttggttcccacctcctagagctggaagagtgggctctctgattctttacacccccgcctcaatcctcctgctgcctgaataaccatctccccgtgacctaggatatatcccagccccttagaggcatgcaaagccttccatgtctgaccctgcctcatgtcttggaagccctagactgctgctgtaccctgaaggaggtacctgctcacattggcccctctgtctggaataaccccaccccggttccacccaagtcaggaaagcttcccaacccctccctcccaccaccccaaagctaagtgaagtgacccctcttcttgcctctgtaacaccgccatgcacatttcatacagcccttgctgaaacttcatctagttctctgttagacttaacattccctaagggcaggtttggaaccttactcatctttatatggcgtctaaaatagtgcttgctttatgataggtgctcagtaaaggttgtcttgaattgagcagatcctctagggacaggagttggatggagagcagactgtaaagcctcatgagggcaggggccctgcctcttcctgagctcaggatacccagagcctagctcagtgcctgccatgaaattgttcactccatcaagccttgttaaatgagttcggggcggggggagcatgatggttttctctctctcagaaagaaagcgctgtatcaaagccctagcaccctctctacacccaccttcagtatttcatattagatgcggcccaagtgatactttctttaccgtcccgtgaagacagcatattggcagccctgcaaaaacaaaacaaaacaaaaccctcagttcatggcatacttgctataaatcagctatgtgtattgtcaaattgtagaactgaaagtatattctgattcggtgtgtgtataaggaaatatacaccagtatatgcattaaaacgtcaagaagagctgggcacagtgtcacatgcctgtaaacccagctattcaggaggctgaggtgggaggatcggttgaggccagg

SEQ ID NO: 2752 - DNA, 1034 bp, Homo sapiens
tacaggtgtgagccaccatgcccagcctatttatttattcattttaagatagggtcctgctctgttgcccaggctggagtgcagtggtgcaatctcggctcactgcaacctttgcctcctgggttcaagcaattctcctacctcagcctcccgagtagctgggattacaggagcgcgccaccacgcccggctaattttttgtatttttagtggagatgaggccttgccatgttggccaggtcggtttcaaactcctgacctcaggtgatccatctgccttggcctcccaagtgctgggattacaggcatgagccacagcgcctggcctgttcttacttttaaatcttgtactatgtacatctttctgagcttcatcaagtcctttctggaatgaggcaagatttatgagtgatacttcagatgaaacataatagatttaaacacttatttcagaaaggaataaagacttacgtgtcaatatgaaaaaatgaaggaagataaagcaatagattaaatcaaaagaatgtaggagagaaaacataaaaataagagcaaacactgattttttaaaaaacaacacatcctagaacaaagcccaaatttggtctttaaaagagactgataaaatagtcagctatctggtgagattggtaaagaaaaaaatggtaatattgaggtgagaaaaagggatataactatagatacaaccaaaattaaaagaagataagaaaatactgtgaacagctttatggtgataaatttggaaacttagacaaaatggataaattcttagaaaaatatgacctatagggaaactgtctcaaaaacagaaatagtaagactgactagctcaatatatatataaggaaaataaatgaaagtagtagttaaaattttttacccaaataaaacaccgtgcccagatgatttttacaggtaagttctaaaaagctttcaaggaacacattgttctaatcttagacttagttttctagagcataataaaagatcaaatattctccaactcattctat

SEQ ID NO: 2753 - DNA, 1024 bp, Homo sapiens
aatgggtaaacaattcatggaatattcataccctggaatactattcagcagtaaaaggaatgaaacaactgatctagacccaacagtatgaacaaatgtcaaactcactctgttgggcaaaagagcccaaatgtagaagaacacataatttcatgatttcattcatatgaagtacaagaataggctgaaataaagtcagatgcagtgacttacgcctgtaatctcagcactttgggaggccaaggtaggggaattgcttgaggccagaagttcaagaccagccagagcaacatagtgagaccctgcctctacaaaagttgaaaaaataaccaggcatggtggtgtgtgcctataattctagctactctgaaggctgaggcaggaggattacttgaggccaggagttcaaggctgcagtgagccatgattgtgccactgtactccaacctgggtgacagagctagaccctgtctctaagaaaaaaaaaaagaagaataggctgaagtgttctacagtgatagacttcagaacggttatctgtgggagttggggactgactggaagaggacataagagcaattttggggataatagaaatgttccatgtatcttggttgcagtaataattctatgaggtatatatttatcaaacctcaatgaattgtacacctaagatatctgcattgcactttatgcaaatttaacctcaagaagaaaaataatttcaacaatatcgaactctagttaataggcttgcttttctcagtggcttggcttagcaattctaaaactattgtagatatttctctctgttggaggaagtagttacaaacatggaaaggagaaaagaccattgccaaagccagcattctctggtatttctttaatccgaatttcttaaaaaattctagaatttggaaacattttggacaaatgggaattcattgtaaaaatagattagaatcttaatacttacatctttgatatgtcagttctcacttaacattaatttcaagaccatatc

SEQ ID NO: 2754 - DNA, 1709 bp, Homo sapiens
ggcgaagacgagatccagttcctgcgaactgtaagcgccgtgcgtcgcgtgtgctgtcaggggaagggggcgtcagggcatccactagcggggtccgggcagagtgacagcgggcagcggggactcgcgggcggggcgagggggtgccccctgaggatgcgggaggagcgggcatcaccaagtgtgtgcaggtgtgcgtgttggggcgagggaaggcaagggcgcgtgtctgtgcgcgcgtgtggaaagctagaggatggagcgcggctagccggcggcaggcgcccgggctcggacccggggcaccggggacaggagcgtcggagctgcgggaaccgggagaggaggggacggccggtccggcctgcctggtggcacggctgggacctcccgggcggccgggggcagggtgcagagcagggtggcccgtgggggcgcggggagcggcgggaactcgggctgtttctgggaataccgccgccgggaggtttcttgggctttcgggctggacccgcgcgttgtcacggagcgaagacgttggttcgcttactccgtgtagcgtgcggcgcagctgaccgggggcgggggtgatggtgcaggacgctgcgcggaggtttcccccaagtcaaggtgctgcgaaagcggaggaggagtcgcctccgtggtccccgcggttcccggggctggtgccatccgtggtggtgctgtgaccgcttgcaaagcgtggaaggcatgggaagcgagcgtgtgtttgcgtgtgtgcgcgcgcgcgggtggtggtggggagaacatcgtgaacgtgtcgttctctaaatgctggcttattgcatgccaagtgaagcaaagtgtgtgtgtgtaagtgtaagggcagggtggctgcccgggaaaggttggctccacactaatacaattctttctccttaagtacctcttggcactgctccttcctttctctcatttgttcgaacactgcagatacttcccaggctgaggcattgcacacctccaagctgggactggagagcctctccagaaaagaaaatgccctaacttcctgctaataataacctagttagcatcctttcagtcgttccttctccacttctgtcctccttcccgaaggatgttcccttgcaggattccccagacttccccaacctagaactgcagcttctgctggtacttctttcctcagcagtacaaaaacaaaacaaaacaaaacaaacaaacaaacaaaaccacttcccggttacagttacctataatcacagaaaatcgtagatacggtggaattttggaatattaacttttaggtgtgaaaatagtcttgatgtatttgggtactaaacatatgaaaacagcgaatttgcaaaggaacgttgtaaacgactgtctctttctcttttgtgcattaaacggactgggagaaagctttgggaaggataaaaacccagggtccacatcagatgacaacctaatagtaatccagtctaatagctgcaggttatgcaccattgcatatgctttttgaagtactgttggcccaagaccgggcttggaagagcctcttcactaataccttggtcacggtgtataaacctgctagtaatacagttgtctttttcatagaaaatagactataagggtttttttttttttaagtaattaacaccacattagatttttctcaaaactaaggactattttat

SEQ ID NO: 2755 - DNA, 1050 bp, Homo sapiens
gaaggggaggtttcaggggaaggcagtgggatttattttggatgtatttattttgagatatgttatggactgaattatggctccctaaaaagtatgttgacatcctaatccccaggaccttagaatgtgaccttaatgggaaatagggtctttacagaaggaatcaagtgaaagtgaggccattaagctggcccctggtcctatatgactagtgccctcctaacaagaagggattaggacgcaggtccacacagagggaagatggtgtgaagatacacagggagcacacctgtgaggactggagcactgcacctgtgaggactggagaccgtacttgagaggactggagcactgcatctgtgaggactgcagcactgcacctgtgaggactggagcactgcacctgtgaggactaaagactgtacctgtgaggactggagcactgcacctgtgaggactggagcattgcatctgtgaggactgaagcacacttgcaaggactggagcatcgcacctgtgaggactagagactatacctctgaggattggaacactgcacctgtgaggactggagcactgcacctgtgaggactggagcactgcacctgtgaggactggaacactgcatgtgtgaggactagagactatacctgtgaggactggaacactgcacctgtgaggactggagcactgcacctatgaggactggagccctgcacctgtgaggactggagcactgcacctgtgaggactggagcactgcacctgtgaggactgcagcactgcacctgtgaggattggagcactgcaactgtgaggactggagcactgcacctgtgaggactagagactgcacctgtgaggactggagcactgcacctgtgaggactggagcactgcgtctgtgaggattggagcactgcacctgtgaggactggaacactgcacctgtgaggactgcagcactgcacctgtgaggactggagcactgcacctgtgaggactggagtactgcagctatgaggactagagactgcattgtgaggactg

SEQ ID NO: 2756 - DNA, 1040 bp, Homo sapiens
tttaaatcatggtttgtggttttttttttgtatcttctttgcctacccaaaggctgttctcccatgttatcttctacagcctttactattttaaggctgatatttaggtctgtgctcttagaattgatattttgtttatagtttgaggtagagatcagtccctccacctatggatgtccaattgatccaggactagttatttaaaaggctaccttttcatcactgcattgcagtggtacctgggtagtaagtcaggtggctgtaagcagggatatctattacttgactctcttttatttcattggtctatttgtcttttcttgttccaaatttataacttttaaattaactccagatttctgctgttttgttatatgttggtgttcatcttctaactttgctctaagtcttcaaaattatctttgctattcttggctcctttcatttcagtttaaattttagaattagcttataaatctccacaagatgagctgctggaatttttaatgaaatagcatcaaatctgtagacccgtttgagaagaattaacatcttttcgatattaagactcccaatctatgaacatggtatatctttcttttatatatttagatattttaaaatttctctcagtatttgcacttagttttccatgaaagactttgcacattttgggggtcagatttatttctaggtatttgatgtttattgatgtcaatgcaaatgtatctttaaaaaattgtttcttagactgtaaaaatataattgactttacatttgaccttgtatctagtaaccttgccaagttcacttattaattctaatagtttatagattcttttggattttctatatgcccagtcatgtcatctgtacatactgaccattttattttttgcttctcagttttcatttcttgttattgcctcattgtacttcccaggatctttgtaaatgctgactagaagacatgatagcagatctttgatcctttccctcagtttcagggaaaacttaagagaatttcatcaaggatttta

SEQ ID NO: 2757 - DNA, 1107 bp, Homo sapiens
tggtactttgaacctgaagtaagcaacgtgaagaacaggggacaggttagggctacctcaggtgttggtgctgaattatcgtaactgcttctgtgtgtgtctgggccgtgggccttctgaccaccaccttcctttggtttctgcccattttccaggctacattgtccagtgtccctgtttttttgagacagaatttcactcttgttgcccaggctggagtgcaatgccatgatctcggctcactgcaacatccacctgccagattcaagtgattctcctgcctcagcctcccgagtagctgggattacaggtgtgtgccaccacatctggctaattttagtatttttagtagagacagggttttaccatgttggccaggctggtctcgaactcctgacttcaggtggtccacccgcctcggcctcccaaagtgttgggattacaggcgtgagccaccgcggccagcccctgtcaattctttgaacacctgttagctagcattccaacttggttggtttctgtcatttgcaaccgagaattctgtctcttttgtctggttgtctctctgtggtcaccatgcctttatcagtctgtgtcatcccgggctgaagttcctcacgtgatatttagttgcttgtggccaaaacccgccttcactgcaaatgcatcggttcctcatcatttctcctctggaccagcaaggggctttcctctcgcccatccatctcccaccttttcgttttgtaggtagaacctggagggagcggcagtaattcatcatccatggaacgtgcctgtctgtggcctggacctgtgggatttggccggcgttccctttgcattacatttggtacttggaagcaagcatccctcagtagggacaaggctccagctgtccctttcattagggccctgccaaggacgtttcctttgttcagcacctcctcctgcctgcccttaggaccatcttccaaaaaactctgctctgccctcacccgctgctgtcccctcccacctgtaagaccaggccagctcagcacctttccctgtctccttgtctagcactgctgcttctgtgtgatgctccggcatggtgagttgaccaac

SEQ ID NO: 2758 - DNA, 1035 bp, Homo sapiens
aggtctcaggcttggagcctctggtactgggccactggtcttccttctctctagcttcaacatccttctgaagagcaattgggtcctttgtgaggatgcttcgaggttggaccaagtaaatgaatatctgtttggtaacattgttgacactgctgtatcgagctgctctaagaaagggaaacatttttggttcagaggacattcacagcactgtgcttgttggagtatttgtaccattgcctcttccaacagttacattttgctcttctttccctcaagagtagaagagggtggagaagaggaaatgattataattcattcctttcccctccctgccaatttctcacaatacccttattgggaggccaaggcaggtggatcacttgaggtcaggagttcaagaccagcctggccaacatggcgaaaccctgtctctaccaaaaatacaaaaattagccgggcgcggtggcaggtgcctgttgtcccagctactcaggagactgtgggaggagaatcgcttgaacctgggaggcggaggttgcagtgagctgaggtcgtgccgctgcactctagcctgggtgacagaatgagactccgtctctttaaaaaaaaaaaaaaaaaaaaaaggcacatttgaagttctgagtgtgaagtgtgcttcaggatagtaaatggaaatggcaaaagaaaatatccagtggaaatctttgccatctttgggattctctttagtttttgctcatttttgcctatcctgcaagggtaacagaaagctctgagatttggaggtcagacaaacctgtctggctcctgccctgattctgctccttgagggttctagtgcagggaggacctctggcaagttggaggattgtacctctctgagctagagaactggcagaaggacaaaatgtaatttactccactgtaagcccttggaaagcaggtaccttgtctgtttggcaccccagtggcagcccatgcccagcagctgtcattggttgggggtgggtggtgggtgagtgcaccctagtg

SEQ ID NO: 2759 - DNA, 1053 bp, Homo sapiens
ggcctcatgattcccatttttattttgtttaccttttctgttaaagaaatttttgcccaggctaccctttaggcagggaggagaacttccccctacctcttctttctaagctacaacatcaaaaaaaaaaaaaaaaaaattagctaatggctctccccttccaggcaaatttctaggattaaacgacttgatgcttttttgctctgatccaggcccacctttccagcccacatatagtaataattatggttttatgtttttagggctccacttttgtttgatttatctccccatgaggatgtaagcctcttaggaatggggatcatgattcttcctgacttttaaaataacaactgtttctggctcctatttggtttatgctccatcatgtaatttgctgtcattcttgtattcagctgatttatccttaatcctgtatctcggttgtttgcttttttatccctaagtgccctaccttgcagagccctggcgtcatataactatttattaaataagcttcacggaacctcaacggggactctgttcacatgtaccagcagtgtgctccttctcctttctgcatccaagacatgatcctcagtaggaattgagaacaaaacccagctctttagccaaaaatggtttctgaggttcggttttcataaattcagaaagggggcttttttcccctccatctggccataggatattgttggcctctcttttatttattttattttatttttatttttatttttattttttgagatggaatctcactctgtcgcccagactggggtgcagtggcatgatctcggctcactgtaacctctgcctcctgggttcaagcaattctcctgcctcagccccctgagtagctgggattacaggtgtgcgccaccatgcttggctaatttttttgtatttttagtagagatgagttttcaccatgttgaccaggctggtctcgaactcctgacctcagatgatccacctgcctcagcctccaaagtactgagattacaggcatgagccatcgtgtccagccggcct

SEQ ID NO: 2760 - DNA, 1156 bp, Homo sapiens
ggctggagtgcagtggcatgatttggctcactgcaacctccgcctcccggattcaagcgattctcctgcctcagcctcccgagtagctgggactacaggcatggaccaccacgcctgtagtgataccatgtttagttacatcttttataaagattttcctattctccttattaacaatattttaacaatattattctaatagttatggttcaatatttaaagaaaccggaactacttagtcttttttttttaaaagacctaattcacgtgaaaaaggaaaaaccccttgtgcaaaaaaaatgaattttagaatgaaaccattctgactgggtgaagaagtctatttctaatgtggggggtatgggctgaatgatgttcttccaaaattcataagttgaagccctaaccccctagtaccttagaatgtgcctgtgattgcagatggggtctttaaagaggtaatgaagttaaagtgaggtcattaggttgggtcttaatccaatagactggtgtccttagaagatgaggaagagacaccgggagggtgtgtgcacagaggcaaggctgtatgaggacacggggagtagacagccatctgcctgccaaggaagggcttccagaagaaaccactcctgccaacacttcatctcagatgtccagcctccaggactgtgagacaagacgttcctattaagtcagtcagtctgtggtacttggttaagatggtcagagcaaactgctacagtaattgggaaaactgcatgtgtgtgtgtgcatgtgtgtgcgtgtgtgtgcgtatgctctcatcttggtgcacctgcgccagcatctgaatgcttgagttggtcatggcacactgggccccaggtgtccagagacagatatccaggtgcagtgtcagatgggccgttcaggttccttgggtccatctctcctacgatggccagtttgtttggaggatcacatcggatgaatggaaggaagtggtagctggtctcatggccatggcactcttcagcctatcaaatataaatgcagaagtcaggaccacaggaacagtctctactaaagtggaggacctgccttccattgcctttcggtgccagggagacctgggggaaagcctttcacctggatgggaaggtcttggtattga

SEQ ID NO: 2761 - DNA, 1135 bp, Homo sapiens
agctgccattttctggtgtggagaagattgaaggaagagtagctttgagtgggaagaggaaaagtttatattttgacttgttaagtttgaaatacattttagacattcaagggcaaatggagaacaggtagttggacatctgactactttctgccacccccactacaaccttcccagcccaaggcactgccttctctcatctggattactgcagtgcagtagcatcccagctggtattcctgcttctgccattgtcccttttctatttccacgcaacagctagagttagttccttgaaaatataagtcagacttctgcttcatgtattgatggactaggcattttggacacatattcctgttgaaggcaaccaagaagcccagataaagtctttgaaaaaatctacttgaagacagatgttagtgatggctaataatatgatgaagaattactgtccaggattcgggagaacatggaaatcaagagaggagaaactgacattcggatgcatttttctggagatgtacacttagtctagagaatgttgctgagagttctagaagcaattttgacagattgaagagtctgcaggaatgcagatctctcttcagcatgacacttgccaagatatggaatccacctaagtgtctataatgggtaaagtatgagatatatatatgtgtgtagcataatgatatatataatatatatagtatgatatatagtatgatatagtataacatatatagtataatgatacatatatatagtataatagtataatgaaatactattcagccataaaaaagaatgaaattctgtcattcttggcaacatgaatgaactatgaggacattatgctaagagaaataagccaagcatctgaagaaaagtgccacacatcatctcacttatatgtggaatctaaaaaagtttaattcatagaaatgactagtacaatggtggtttccaggagcttggctggggttagggaggacatgaaatggggagattgtggtcaaagagtatgaagtttcagttagatagtatgaataagttgtgaataagttctggagatctattgtacagcatggtgactatagttaatgtatgcttgagaattgctaagagagta

SEQ ID NO: 2762 - DNA, 1029 bp, Homo sapiens
agccaataagcacatgagaagatgttcaactttgttagttattagggaaatgcaaactcaatctgcaatgagataccacttcacatccaccagaatgactgtaataaaggcagacaagtgttgtcaaggctacagagaaattgaaactctcatacactgctggggacctggtatagctgccacggaaaacagactagatttccttcaaaggtgaaatatagagttaccatatgaaccagcaattccactcctatatataccctagagaaatgaaaatatatatccacacaaaaacttgctcatgaatgttcctagcagcattattcagccaaaaagtgaaaacaactcaaatgtccatcagttaatgagtggatgagcatgatatgctgtatccatacaatggaatgttatttggtcataaaagggaaaggaatactaccatatatactaccacatggatgagtcttgaaaacattatcctgagtgaaagaaaccagtcacaaaggacaacatctgtgggattccactgatatgaaatatccagaataggcaaatctataaaggcagaaagtagatgagtggctgtcaggggctaaaggcagtgggaggattgggtggctaagggatgcagagttccttttttggggggataaaaatgtccttaaattgattgtggcaatcaactgtgtactttaaatgggtgaattgtatggtttatgaattatatctcaagccattatttaaagagttgaatgtgcaaaagtgagatcatagtcttacatgatattaagtagggagtgagtggtagagaggaaagatcctgttcctgagaagaagataccatgacaatatctctgtgagaggtacttggtgtctatctcatgggttccttttcttctacactgtttatgactagagtcacctcttctggcatgcctactgcctaatgactgtcttcattaccactaacattcatatctccaaaatatttctatttagattcatttttacacagcgcaaaacactaac

SEQ ID NO: 2763 - DNA, 1050 bp, Homo sapiens
taggataaaggagaatacccagtaatctggggtgtaccacagggcatggaggaaaggggaaccctacaacctgactgctgcagtgctgccagggttcctgccaccctgtgatgaggagctcttcattggtggggcagttgggaagagcatgctgctctctttgggcaaagagatttcccatgtcatagactttgatctcgtccgcactgtgagctccaggtcagacacacagagggaccgctaagccctagagtgcaacacttcactgcccattaacagtttattttatttttgcctgcccttgtttcactggaagctaggtatggagagagaatgccagaggtatcattacctctcacttttctctaatacagatggaaaccagcattgcaggtaatttcgggggcctctcggtagcaccggctccccactgggaaagacatgcattagatgcctgcctgaaaaactggccggctctcaataggtttagactatcgttcgaacaccttcttccttgaaaaaagaaggttcagtagttcctcggtgttcttaaacttaacattcacagtttgtcttcagtgagtaacccttaaggtccctaaccagaaattcataaatttgccagggcacaaaagtacctgcatttccctattgttttgctgttctgatttgatgatgcagaaatgtaaatcaatgtgaatcactatgtaaaacataaattgagtcattccttgaaaactctctgagaattcccattgcatttaggctgaaacccaaactttctgacatgagctgatggtagccacagtgtcagggtcccgcctgtatctctgatctcattccatcctgctttggctcacagggactttctgcaactcttaccctctcctcaactttggagagctttgtctttccaatgtagaccctgtaactcaactttggaggagattcctccaaatgctgtagctgctttgcctacagcagccagtggctggaattaatgtccctggctgtccccagcctcccataactgtccagtatggaagcatg

SEQ ID NO: 2764 - DNA, 1068 bp, Homo sapiens
ttattggccatctgcttgtcagaaagcctcttcctcatgaataaccttagtctctaatctcaaggagctgaaaaatggttaaatagggctgggtgtggccctatttaacattttccacaacttttaatttcatttcctatcaatattactcaacaacaacaaaaaattggttttgcaatccaaatattgtattaacaacataaagttggaaactttcagctaatgttcattctatttaaacatgctttgggttgttggtgcccaggatacagcaccccaaaatatgattataggagatcagaatatacctcaaaatacatgtttttggcatattgatgattttgagctggttattttgagaaactgcaggcacaggcagggaaggaggggtattgtaaagtggaagtgtacttagcctgttaagtagagaaacaatttccataggatagggttttgtgggctggaaagataaactgcaaggctcatcgtctaaatgcctgctgttcatagagttagaacgttctgcaggagtctaatggggctgttacaaaagggtggctactaagcaatctgagactctccaagggaaagaggcttcatctctacaactgctacttcagtagaaacaggagtccatcagaaactccatctgcttatccagtgctatttgatattatagttattatgtactctttatggactagagacggagaggttgaacaatagcacacactggccttagatatgttcctattttatcttttaatttttgacttgaaatatacaaccactccggtcaaacctctctactggttgctgattttgggaatccaccgtgatctctaagatacctgcaaccccattcctacatgcagtgttaaccagcagttctcccttttactgtccacctaaggaacatgccataccacattcccatcaatagcatttcctcaccagttacagaaaagaggttgtagctagcaaaaagtaccgcccacccccaaccccctaccccccccacccccacccctccacaactgctggtctttccagtatgcaggaggtatg

SEQ ID NO: 2765 - DNA, 1040 bp, Homo sapiens
atatataaatttcttatgtatggaaaatatgtattttccaggctagcaaatacagattataagacaatgccaaatgtcttccagagttttccaatgcatgctctcagtgataacatgtaagaattctggttgttccacatctttgccatccttgatattgtcaggcattaatatttttgcttatgtaatggatgtaaaataaaatcttggggttttaatgagcatttctctgattcctaatgagctcaaatatcttttcatgtggttactgggtgtttatctttcttctggaaatgcttctcatttgtctatttggttgtcatttttgttattttatttattctagatgctgtcagtgacatgtgccaaggacatcttacttcctctaatttttggcttgtcttttccattctctttccggagttctttgaaaaggcattcttatagtaggagaatttgtctgtcatttttctttgttgttaaggcttttttgtttttgtagttaaggctcttttgtagttaaggctctgtgtgtgtgtgtgtgtgtgtgtgtgtgtgtgtgtgtgtgtgtgtgtgtgtgtttaaaagagatccctctgtcttctaaggtcatagagttacagctttaaaaattttctcttagatgtcaaagttggctagttgcggtggctcacacctctaatcccagtgctttgatcacttaaggccaggagttcaagaccaggctgggcaacatagtgataccctgtctctacaaaaaaatataaaaaattatctaggcatggtggcttgcacctgttgtcccagctccttggacagaggtgggaggattgcttgagcccagagttcaaagctgcagtgagctatgattacaacattgtactctagcctgggtgacacagcgagaccctgtttcaaaaaaagaataaagtgtcaaagttttgctttcaacctttaggttcttaattcaccaagaatttctaaatttccatttatgtactatgtggtgtgagatagatatataatattattttttcaaa

SEQ ID NO: 2766 - DNA, 1027 bp, Homo sapiens
cacgaggtcaggagatcgagactatcgtggctaacatggtgaaaccccgtctctactaaaaatacaaaaaatattagccaggcatggtggcgggagcctgtagtcccagctactcgggaggctgaggcaggcgtgaacccgggaggtggagcttgcagtgagcagagatcgcgccactgcactccagcctgggcaacagagtgggactccatctaaaaaacaaacaaaaatatcttgaatgcttttgagtgactccttctaacttgtcacaatggtgatgttcagtgattaaaatgtggaatcctgagggagttcattgcatgtcacaaatcagtacttctactcccctcagcactaagcattgaatactgcttttttttgaaggggtgagggggaagaagctgttttaaattgcagatgtatttggatttcttttttatgtaactcacatttcttattttccaaaaactctggaaacgagttgcatatttccactgatgtcaaaactgatgatcctcacaaagaagcacaaatatgatataaaactataaaacaaaaatattgatagcaagactttgaccagattccagaagaatgtatttgttacatctctgtcactttttttcctcactgcatttctaatagtttaataaaaaatctcttatgaagaaaagattgcctttctcttgcgtcaaacattctcataacttttcattctatcttgaagttttccttttttcttctaaactttgaagaaacagaatccttttgatgtctttgagtatttgccattgattagagcacttggaaaggaattttgcttggaaataaatgtcttttccctgcattctaaatatttcctttgcataaatgcatttcatttcttcttttcttgaccttgacatagttgctggcagagtacagcaaggaactctatgaattttgagttccttggcttctactgatttccttttcttatcctggacattcagggctggcttggagagacccggattagaaatctaga

SEQ ID NO: 2767 - DNA, 1047 bp, Homo sapiens
tgtatgtgaacgaattgggtgtatatttcctacaaggctgcactctgaaataatgcagataaattctgtgcaagatagttttaacattttaatgtttgagtctgaagatactatgttttttttcaaaaccagcataaaccaaaatttttagaccatcatcaagtttttacattattttaacaatctactcttgaaaaatcatatctacattatttaaatatataagttattatttttaaataattcagtttaaaagtatttcttagggcttatttacaaatattttttggtggtccatttgcaatgagatgataagtgttgtcctttcacaaaaattaggtttttctgtaatatactttgaacaggaaacacatgcaacaatgaagaatatttaacaaaatccatagtgaataggtcctgtggaggatcacaaagccccagtagcttataaagtcaggtggaaaatatgttgtccataaatatgtgtaatacaaggcagtttgagtcatcaagaagtgtttcatggatgagtccatatctgagcttggagctgagggatggtagaaattggacaaaggacaaatgggagaaatgaaaatgtgtttgtgaaaagcagagttatctagtgtagtttaatagtaaccattatgtccaaactttataccaaaaatttaagataccagatagggagtttggacttaaatttttaaacagtgggattttttttcttctattaaatctctgacaggtctaacgtgatcttgagggaagtctaatttggtggtaataagtagaagggactggagatgaagagatgggggcagggggatcaggttagagagatgacatctaggaaattagagaagacaatcaggtgtgacgattaggaacattaccaagtaaaataaaaacaactaattttagaaattacattgagaaactgaatttaaagttcccttttatgtcagagtttaaagagtttttgcttgatttccagtatcagatatgggtattacagcttcttctttaggacattgatgctttaat

SEQ ID NO: 2768 - DNA, 1027 bp, Homo sapiens
ttgctataccactaacatccaagacaatgcatgttatgtactaggtagtaaggaaatatttgctgactggagggactgcaagatggaatttatagaccaaaatcaaggggctgaaaagtaccaaaaattctgtttctgctactgtagtaacagttttgaacatatgatagagcttttttgtctgttaaatacagctgtttttgaattgcctctctattgtgggagaaaaggaatgtttttgaaaggaaaagtcagaaaataaccttttgggttcggtaatcctccatcctcatttgcctgacacagtccaggttaatacctgtggtcacagcataatcactattagttccccctttcgttgtccaaagtgtcccagtctggatgagaaattacatggttatccctagtcatggtgtctttgtgaatcagataaaacttatagaatctatttacagaaggcaatacaaataatatgcacgcatacaaaatcttgtatttcatctctgatttgaagacttaaaagaagtcttcctttttgttgagttaaataacttccttttttttttttgagttaattcttgctctgttatccatgctggagtgcagtggtatgatcatagctctctgcagcctccaatgctgggtctcaagggatcttcctgcctcctgagtagccaggaccacaggcacaagccaccatgcctggctaattaattttttttttttttttttttggtaaagataggttcttggtatattgcccaggctgtccttgaactcctgaccttaagtgatcctcccaccttaacctcccaaaatgttgggattacaggtgtgagccacctcaccccactcatacaacctctttagtgattgttgcagtcacacattctgagaagatacacttttttgcaagtaatccctgaagtgtgagagaagggcaaagaccagcaggatctacataacttgaggattacagagaccagatggaacattctgagagtgagcatgaggtcagtactcgtag

SEQ ID NO: 2769 - DNA, 1074 bp, Homo sapiens
aacaaaaacatctatatttgcacatgtagttatcatttctagtgctctttttgtgtgtgtgtgtggatctgtattttcttcaggtattgttttcttctgcatgaaggactttctttaacatttcttatcatgcaagtctgctggagatagactcttttggcttttgtacaactgaaaatgtgttttttgccttcattttaagtgatatttttgctgtgtacagcattctagattgacaagttttttttttctttgggttgactaattttactccctattgatgattgtattttatagttctttatatgcctggttatttttgtttagttaccagacattgtgaatttgttaggtgctggctatttttatattcctgtaaatattcttgagctttttcctgggatgctgttaagttacctaggaagagtttgatttgtttggatcttgcctttagaattttctgggtgggaagagcagtgtttactctggggcaagtgattccccactattgagacaagaccctctgaatactctatccagtgtcccatgaattgtagagttttccagtctggctgctggggacaggcgctgttttaggttctgtgtgagggccagttgctgttccctctaatcctttcaggtgattctgttccctgccttgagtagttttctcatgacattctcatcagtgttctgctgaatatttgagggggaccttctgtaggtctccagggttccctcttgtgagccctctcctctctgtgtcctgtgaattctagcaaccttggtctcctggatgctcagcaatatctcttcaactcatggagactgtcaggccacacctgggttcccttcctgctccatggcctggaaattctcctaggcagtaaactgaggcagctgtaggactcacctgatttgtttccattcctcaggaattcctgtcctttattcattgctctccagtgtcttgaaagttttcgtgtttgtttggtccctgccccgccactccccattatactttgtttttttgggttgtttcagagggaagggaaatcctgccctgtcactttg

SEQ ID NO: 2770 - DNA, 1062 bp, Homo sapiens
tctagtctctttaaatatattaacttacttaatctacacaataactttataaagtgaataatattagtattcccatttcacagctgggaaactgagacatggtgaaattgtctttccaaggccagacagcatgtaagccaccgaggcaggccttaagggacccccctaccctcgcttaccatctggctgcaaatttcatgctctttcccttcataatagataatgtctcagttgggggccagcgggatggatagtgatggaatgagtgtgcactgtatgttatttgaatgtgatgaagaaatagaataactctctcatgtaaataggcaagttcaattgttgcagatctgtagaatttcagtgaaagtgaaagtgttttctggaggcttcgtaacccacctagcctcccttgtggctttactacccctctcttgagttacattgggtgatgcaggcttagtggcgaatgattcaaaatactactcttcattaaatcacaaagtgttttggtcttctggtagtactttctcatattctcaggtctgaagtgatttgctcagttttccaaaaatacatccactttgaaatgcattaagttgttgtatttcaccctacacatactgatatatctcacaactatataccattctgcacacagtgccctatctaaaattgtgctttttgtcaatgtattgcacaacctttctccttccttccccttactttacacttgctaactacaacaactagactattctatgcacctttatttgttttctttgcgatcactgggaatgatgcgcttggtttgtctttatactgcaggagaacttttaaaattgatgtaacgatgaagctgatgctatgctcagtttacatttctgcccaaaatgatagctctcaataaatatttgctgctttgaggtacacatcttttggaagaacttgctccaggggatccatcttaaaaaattctcaggtgtttatgtcttgtaaacctttgagtaaggctttagagcaaacagttacatctgccagcatttctgtgggtactgacgtttc

SEQ ID NO: 2771 - DNA, 1052 bp, Homo sapiens
tcagaattataatttattttctcttaggagaatgcttacatattccagataaaacatgaactctgtatttgagttgtagtatctttggagtactgttgtcaataatattttaaagcatttgaaaatggaatttattcttatttactacaaggtttaatcaagatttgaattgttttatccaaaataataccagaaggttgaaaggatggctgattaataccaataattttaaaaagtattatcattagacctaaaagattctagatatgtataaaattttagcttttccttatagcttcttgtaacttaagattttaatgtatagttagatcttgactgccctctagtggcatatattttcttagctatattgtttggagagcagagtgtatggttactttaggcctttttaggccctagttaggtgattggtggtgtgtcatgcctgggaggtacggggagcacagtctttgctcagtccttggccttaatcttgaggtagttcattaataatataattcctgaattgtttctgctttgaataccaacagacttgataatgtatgacaggaatatgtctcccaactattcatttttaaatgtccattattattatattcattataacagtataaaaatcacttatataacatacttacatgagttataattgcctatcaaacacataaatatatcgtgtttaaaatcgagcaaagcataaggatgttcgggggagagttctgtgcctttgacaggatgctacccattagctatttgtctgggctgctatatccggagcccggaagagtcttcgtttctagatacagtttggcaggtatatatggagcacttactttgtggctcaggtgcttgatactacaaggtatgcaaaataagtttgttacggattgcttggatctttttaaaaaactcctacaaacccagatttcactttgtattagtattttagcaagaggtataatgttgaactgttgcttctttaaaacgtagttgcaaactaccctaaactaacttaataaatatatactatg

SEQ ID NO: 2772 - DNA, 1033 bp, Homo sapiens
aaggatgccttccagaatgtggctggagattaagatggataaaaggtagaacaagtccaagttgaaaaggtcttgtgtgccatgtgaaaaggttagcatctattacatagacaagggaaatccattggaaatttgaagaaggggattgagcataatgaaacttgttttggaaaaatatgttgttattaatgtggaggtgggcaagaatgagaataatcagtagcaatgaggtgtcaataatttgatactgtctacatggaagacagtgattagagccatggaagtcagaatgaaaaatgataaatgtgaaaacattctagagaagaaatgaatacgcgaaggcccgtggtgggtgatgacatgatgtgatttctgcccagtgctctgaatgtcaaagtgaagaaattcaatgaaggacgggtaaacggcgggagtaactatgactctcttaaggtagccaaatgcctagtcatctaattagtgacgttcatgaatggatgaacgagattcccactgtccctacctactatccagcgaaaccacagccaagggaacgggcttggtggaatccgcggggaaagaagaccctgttgagcttgactctagtctggcacggtgaagagccatgagaagtgtagaataagtgggaggcccctggtgcccccctgtcccagcaaggggacagagtggggcaaggccagaggtgaaataccactactctgattgtttattcactgaccccgtgaggtggccccaaggggctcttgcttctggcgccaagtgcccggccacatgcacatgccaaattgtaaagaccatcgatgctaggaagaaactgcgtcaactaatgagcaaaataaccagctgacatcataatgacaggatcaaattcacacataacaatattaaccttaaatgtaaatgggctaaatgctccaattaaaaaacacagactggcaaattggataaagagtcaagacccatcagtgctgtattcaggagacccatctcatgtgcagagacacacatatgc

SEQ ID NO: 2773 - DNA, 1060 bp, Homo sapiens
atacaaatggatgagtgaagatcatgtgtagatgtgattctgagcctgaattcctcagctttttttcactggggcttagcactccctcagggacacacaagtggcccatggttaacggcagtatctggcacagccaagcctggggtgacattctggtctcacccatgagtacctagctggtatcgtgagcttgggtaaactggttaacctctgtatgctgcagttttctcatttttaaaatgaagctggtatgagcatcggctttgaaagaatgttgtgagtgttctggttatgatgcttgtcaatcacttaaaagaataactggcatatatttcaatataggtgagccataatttttgtcgttatcatcgttatgtggatcaataacctgatgaatgtcctttgtttaccatgaataccacaggaagacatgaatcctgatttcaggaaatttactgtccacttagggttttataatttgcatatgtaagacaaacttaaggacatgaataataccagtatcaacttgacagaatatacaatagagtatataagggctgatcaaagttacaagaagctgattggagaggggttaactgggtgggttttgaccccctccttggtagggatactaaagaaaacagcaaaaaacatttctgacaatttcaggcatatcccacaggttttcaacaattatttactcccaaattccaatttcttaccttgtatctgtttttcagtactacacatgtaggacaaaaactatttaaaacaaatgaaaaataagcttataacccggaaggggaatggagattagaatgaaacttttggaatgtgtttcttatctagaactaaaatacaagataggatagaggaatggtgcattcattccttcaacagatacttattgagcacctattatgtatgctgcattgttctaagcttttcaaatagatcagtgatgaaatggaaaaaaatctctgctgtcaaggagcttacattctaatgggggaaataaacaacatacttgaaactgggcaaatttcaaaagaaagaggtt

SEQ ID NO: 2774 - DNA, 1002 bp, Homo sapiens
ttttaatgaatgagtcaatttaacagtacaaattattcatcatattttttctaataaacttactgagaataatctcttacaagttggtatgtataaaaatgggattcatgcaataagcatatctttttggaacagaagtataattcttactgctatggttcagaagattataggtttaatataacacttcaatatgtagtttaattattacataattgtatattttataacgtaatatataagctatcattgctatatggtgactcacttgtttcactactttcactatggtaaaaatgtctttcaacctcatgctatgatacactttaccttctgttaagtaaaacaaatcatttgtatattaaattctattatgttttttctcaatagcccaagactattacaatgtatttatatttataaatattaaaatatttttcattatcatttcattatcacgaaactatgttgtaactttgaattactgctacaaaatattcaacatgcacaaataagtggatgtgggacaattattttaattttgacattagaacatgccatcttgatagaatactcattacccagtgaaaattagattctgtcgtttaaggtgaccctgtgttactagcataagcctcaaaaacatcacaagagagcccttgagtaacatggcagtattcagttgtaaactggttatccagatcgtcctgaatatttatgaaactccaatgagtatattacttctatttctactagacggggactgaggctctaggaagacaagtttgcagactgtataaaagaaaaatgcattttataattgttctgatatattagaccacacacacacacacacacacacacacaccatatacatgtatatatatttcaaagcaagcatttgtcaaaacaaaaataagccctttattcttatatttcttaagcattgaaaattagaaagcacacaatatctgaaattactatagaattttttatatattt

SEQ ID NO: 2775 - DNA, 1046 bp, Homo sapiens
ccaggctgaaatctttctaacatttgattctgtcatacactgttatctctttccatttgtgttaaccacaaacttaagtgtgattgatttctctgtttatctcagttggtagtgtgcagctgaaatttttataccctttcccagactggttaacctactttgttttcaatccatctaaacatacttttataaaactcatatttctcatctcctttcatgagattcttaaagaaatcaagatgttactgtgattgcttaaactcgaattctaactttggtaaaactgccaaagatggatgagtattcctcagtgatttgcttgataacccattttagactattgttgattattaatatcgaacttcctagcgggtagtttttggaagctgtctttcctcattttaaaaattagcatcccagttgtctggaactttcacttggccttcatggtttctcggtttaccaacagtcattctgcatccacggatgttacttttgctttgagtcttgatacttgagacttgaactcactttaagagactgttgtatgtgtcttcctccaccactgcaggtcccttggaaggcatcatttatatcttacttaggtttttgtttttcagttttaattgttttttaaacttaggaacacagagttgggttaatgataactctgaattcatgatacacagtcactgttagtccactagtgtctacttttaaagttacttagtcatttctaataatgtagtaactacccataaacccacttctgacaagaaacaacctagagaatttacgtgttatcctatgggcttctcattaacctataccctgtctccccacacaaagaaaccatcattctaaaccttgtgctcaagatgcccttgcttttcttttcatgtagttttcatttatttatatatagatagataaattttcatatatatataatttaagttgttactgacttttaaaagggcagtaggctgtgtgtaatattttgggctctacttattgaattaatagtgttttctaagattcctcca

SEQ ID NO: 2776 - DNA, 1023 bp, Homo sapiens
tgtatataatattggaagaattaagctgtaaagtcacattacacagtatatctaacgtcaaagcctctagtgcattaactgaattacttgaccctggtttagtgtttcttttgtctctgtagattagtcaaactttgataccatttttacagagtgttaaagagacagcattagaaactttgcttatcctatcaagaagcagaattctggaagatcattacactgtttgaaagatcagtaataaagagagtggataatgatgaaagatctgaacaaaaaattaaatgagctaaagcccacaatttgattattatttgtatatgtataattctgaagacctctttaaacatgaactgaaagacaaacttttagagctactaattttgtagcacttcaaacaaaaaagataacatttgtaatattttagattgtgatcacaaactataggatatcacatcatttagttctgtcatttattcatgcaaattttcttgaatacctattattttcagagaactgtactggatgtacagtatgtgtgtactggtgtggttaaaacaaagaaagcccgctctcttcatggatcttctaggaaacttcatgtttgtttgtttatttatttatttagaggcaatgtcttgctctgttgctcaggctggagtgcactggcgcaatcctggcctcaggtgattctcccacctgggcctacaggtgcacaccacgaagcctggctatttttagttttttgtagagacagggtcttgctatttgcccaggctggtctagagctcctgggctcaagcagtcctcccacttcagcctcccaaagtgctgaggttacaggcatgagccaccatgcctggctcatttatttaattaaaaaaaaaaaaaagaaaatttaggaaccactcgttttaaacaaagttgtagtcttagtattttcccatcactgtgagtcaactctacagaaatgtagctaatctacatttttcaagaacttaaatacaacagaaaaaaataatt

SEQ ID NO: 2777 - DNA, 1034 bp, Homo sapiens
aacctccgcctcccgggttgaagtgattctcctgcctcagcctcccgagtagctgggactacaggcacctgccaccatgtctggctaatttttgtatttttagttgagaaggggtttcaccatgttggccaggctgatctcgaactcctgacctcatgatctactcgcctaggcctcccaaagtgctgggattacaggcgtgagccaccgtgcctggctgaagttcttttgaaggtcacatgtattttgtaaattaacagagactcccttggtattttgactagtgttctgtttatgtgaaaaagttcaaataggctttgcaaaatgagatagagatgaatgccctggtggctccaggaagtatgcagttttttcaaatatgcgagaaacaaacgctttattttccagtgatgacagaagaaacaaagaaatttgatactctcagcctgactccttcccttgatccaccatcagctataggagtccaaagaaaatgaactatgaaccaaagttaaatccaacaagtcacatgcacagaacaagattaacatcaccattaacatcgccattactgaagcgaaagctggcccaaaccccactactgagtagcccatcctcattccagcaaagaaataactaactcagtaagtcttttggaagactcagggtcagggtgccatattgtatgttttccaagtccaaaccagactaagctataaagaagtaatgcccactgaccctttacatttctgcaaagcctctctcaattacagatgcttttattgacttccaaggtagcttggccaagatcattataaggcagctaggttcaggaggggataaaaaaattgtgtagcaaagtcttgaccctagatgtgtgtttataatctacaaatatgttaacttgtaaaatagagttgtctgagccaagttgttcttgggaatcagagggtgaagaagccaaatctttttggagagataccaggcatttcttcttttaagggatttcacttgagagatactttaaaggacca

SEQ ID NO: 2778 - DNA, 1052 bp, Homo sapiens
tagtggtcttatgtaaataatgcattgttggtataaaatatgacaggcagaagtgcttaattttaatgtttgccatagattttcttactcggtaaaaattaaggaagaaaagcagaccctgaatatacacatggtagcaggacgctgctatggggcctaccttctttgattattcactgttcagagaaataaaagaggctcttcagaaacagaattaagtatcgtggggaagccaaatttgatctggatttcaaaatctattttaaagaaataaaatcttagagaccatgcttcataagattttccagtggtcataggttgatttttattaaataaaagttttgttttttggactactttttatcaggtttgatcactgattttctcctaacgtttagattcaaacaaatgaccatatactatcgatacaggaactaaccacgggcatatgcagtaaaggatttcaaacccgcccttgattgaaagagagatttttctctacagaacaataatactactctcggtggtaaagagtacaacttctgacagatattttatccgttttctcttgagtattacggtttggaagaataatattcagtattatgaacaagaatgaaatatacttttatcttctttccaatgaaaacatactggtctggattaatgacaggtatcagtagcaattgtgaattgttttcttctttttgctgccaattaatattttctttcttttcagaaaatgatttcaagaaccactaatgtttatgtcaagaggaaaaggtttaagttaaagaagtgtcaggtttaacaaggaatatgctccacatattctatgactggaaggctaggagactttctggaagggtttatatatgtttcttctctccagtagattagaaagacatataatttggaagcccagatgcctgccagccagtaagctacctcaaccctctcaataagtatgaggatggatagaaaaggaagataaactaccaaggtaacaggtaacaccatagttggtgaggatggaagtgggaaaaacagta

SEQ ID NO: 2779 - DNA, 1101 bp, Homo sapiens
ttcatattttatattgatattgaaacatattgagtctcctcttcagtcatctgggtttcatttgtgtctaatcttacttaattagataccagtgtgctttgctgttacgtgaagagtgaatggggaaaatgctttatatgtagatgatgagcagagttgcttttgctaatttgggcttacactgaccccaggatatctcatttgtaagtgctgtgctaggatatttactttgtttactttgaaaacttagctttgacattcattatatgaaaatgtgatgtgataatcagcaagataaaggaacgtatgaaaatcaattatggtatcatttagtaaactaatttaaggagaagattgaggttttattggtacttcaaaatggaaacagaaactgtcaaatccagtcaaatccattttctatctaaggatcatattggcctgtgaaataatttgcaaatattgctttctaagccattttcacgggttcttttatttttgaatattgggcttcccaggatggtattcttgttcctctaattaattcaacaactatttattgtgttctgtcctatttttactctctgagataacacatttccagtcttgactttttcccctacaactttagctatcacttcacattgtcttcatccagctcagcgctgtgttttcaaatctttacctttatttctagctttctcctcctatccatgtttccatcaggcaccctgaatcccaaactcaaactcatgacccaaactgactgctccccaaataccacaacctacatatttttaaagaatcttatcctattctaagaataggtttatagtctcacattagatactagatttttatactaagaatctaaagaatgctattgtttatctgtggtctcagtgaatggaactcggagattctcagttgttcaatctggaaaactcccatggagcctaactccccatattttgctctaagcacctccttctaattcagccatgccacgactgtctcctaaatctcttttcttctatagcatctctattgtgttagtttaggctcgactcatttcttgactcaacatatgcaattttctttttt

SEQ ID NO: 2780 - DNA, 1051 bp, Homo sapiens
ggggctgtgctcaccattaaagtggggaagtggaaagctgacaaagtggatatatagggtattttttgaaaatagtcgtggaagacaatgtgaataatgatcgtgtgagacaagtatctttaaaatgaatatgtggatgtgaatatgtgtgtgtgcatgtgtatgctcatgggtgcgtaagagggagaggcaaaccttttagttgtatggtttagcattatagaagacagtaaggttggttatggaggctttccctgaagtcttccagcagattgtaaacatattaattaaaaaggtaccactttgggctagtcaagtcacttctgagctcccgcatctgagggatgcaagcgatttggaatttggaggccctgggatcccgttggtcctgagtgtcgcagagcagaggctgcagggctgatgctgttctcctcacagtggacagagctctatgtcctgctgctctcactggaccattaggagatgagtggtctggctgcccctacccccaagggattttcttgtgggcagcacggtgctgtgtgcagtctggagataacatagttttatgtgtccctttgaatcgccggctctgcttgttcatctgtctcaccaaccattcaggaacagccaagggatagtcacccatccttattttgattgaaagaggaaaagctttatgaatttttctcacattcattaatcatgctcagttactttttctgtatggtgcttcttgtaatttccttccctcaaatgcattagattccaagacctctaagtaattgacagctacttttctagggcaaagatattcattttagttgccatgtggggttttatctttctacttgttcttttccccagcacccttccctaaaaacctgatttaacggatgctgttactccgtcttcatggggactggtgcttttgcctatctattttctgttttaccttatcattaaggacacctccagtgaggtgatctctcgtgggattactaactccaggccaacacatgaatggctcaccagaccacactgtatctca

SEQ ID NO: 2781 - DNA, 1044 bp, Homo sapiens
ttactctataaaagtatagctgtagtactgggatgtaaaacgtacatcttatctagaaatcttgattttttttcatacacacacacactcaagtaaagctagcccagtgtttgatttgaagcccacatccagctgaaagtggggttacactttataaactaataaagagcaagattctgctttgacttggtaaaacattaaataggatgtgggcatatgcccactgacatctctctgctttatcttggtgtgctgaccctggtggcgttcacttctatattttactttgatacaccacagcttatcgtatgatctccttcttgtagattatcctcatgatatggagcatagtgaataccatggttactgtgagtttggcagggctattgtgcgattatttttgagatttgggaggctttcatggactacaaaaagatttaagagctctatctgttacaggagctaatgcttacctttatgaaggtgtgaatcccttgtaaagaacatcgaggctttctgataagtgtgcatctaaaaagaaggtaattctttttcagtatatactatttttcagtagtgatgtgctgctgaaacctattttgtaattctcatataacacaagcaaaaagttgcccaaatgtgcaccagtcattaaaaaatagaaaactaaatcaaggtatctcagggactctagaaacaaataatatttaatgtggaatcaaggcacagtgcaaactggtttccttcatgaacataataattcccctcctgagcagttgtgtaagttgggcctagcttcatatccaatttcttaaatagttgcagcagcatcttctcttggcatacttagtgtgaaaatctgcaggctcagatcagttagtggcagaaactgaaaaggcacactgtgctttgggttggccagagattcctctgaaggtctttgaatattggtcagtaaaaatactttgaaacatggtccttaggtttgtatccgattagaacccctggaatatcccaggtggtcatgtcaagatagtaaccatc

SEQ ID NO: 2782 - DNA, 1087 bp, Homo sapiens
ttaaaaatggaagggtgggtactatttagaaaatgattttttatactctattccactagttgatctagatagcaactttgatttggaccgaaagtaaaactggtagagggtgaaatttgcagatggttccaaattctcttgtattaagtagaatagatactactaagataatagttaattacagtatttactgtacttaaagctgagacctaattttctcagctttctatttaggatgaattgtcacattctggtgtgtgtgtgtgtgtgtgtgcgtgtgtgtgtatgcatgttgtgggtgtgtataaaattgtatcatagaggcagtgtaacaaagtggagtggaaagagacataggtttggaagaagacctaaattcaagtccctgcgtgttaggaaggtgatcacttcagcaacgtgaattactgggggttgagttccggctttcaaattatgttgtcttaatttagaattgtctgggtgccctggaccagctaacaatataggaagtagacaccactgccttaagcatctcatggctgtttctgcacatagttgcctttgtcaagaacacgttttgcacgttgttgcctttgtcgattacatgttttgcccttcctcctccccgtgagagtcttgttacccttctatgctcatttcaaacattccttctgaagttttcctccaaagcatttttagttatcttttgtttaaaaaatattattgattgtaaatgaaacttaagtaccttgtggaaaaatacacaaatacaaaggtaaaagtaaatatcaatcgtaactgcttgaatcagggataaatatcattagcattttgccatatttctttccagttttattttctgcaaattcatatttcccctccaaagaacaaacaatagtaacaaaaaaaccaacttaggaatttatttgtatacttttatattctcttttaacattaaatcatgtccatttgttcatatctttattcttataaagcatgattttcagatcttcatagtagttcatcccagatgtatagcataattaatagctcctcttttttttggccattggggctgcttaaaata

SEQ ID NO: 2783 - DNA, 1028 bp, Homo sapiens
gtattggtgtggtttcaactaagaaatagagcagattgcagataaaaagaaatatattgcttataccaaaatggaagtccctactatcttagtactaagctgataaatttaaatgctgagtatatttaaaactaatgtaggaatgaagatatataaagtaaagcataataattataataatagggcatattatgcctaaattccataaggtatcatcagtgtacaagctttataacccaaagcatttgattcttgaatgcattttgaaggaaccttcaaacttcataaatctttgatttgaaagatacttctttttaacctgcattagttttcactgcataagatcctcatcagaaacattaaggaaattgacttggtattgttatgggcataatgatccagactcaaaactctgaaatagaactctgtactttgctgctcatctgaatgcagaaagaagaaatgggagacccccccccatcagggtggaactcttccggctacttgcaccttagatgtacaggtcttacttactctcattataatgaaatggcacattgtattgaacaaagctgtaggggtctttttaaaagaattatgttcactgtagttagggctcattctccaccattaactgctcttctcccacaagtggtcaaggtttctggatttcctgtgacacaggaagaggtggacaggggattttgtaacacagaccagtggctagaaagatatttccaaagaagtagcatgaagtttaaccatcatcttgaatctggagtcctttttgtccctaaatctaaatgaaaaatcaagtacctattttcaaataacagtcataattaaagccaagaaaaaaaacatgtaaaaatcatttatattcgttttgctacattttctacttatattttaacaaaatatggctgaaaatacattggatttaaaagtaactgtaaggacctatttaaccctcttaaatttccttctaccctgtctaaaggagtcttcaaaggaatgtatattattat

SEQ ID NO: 2784 - DNA, 1033 bp, Homo sapiens
tctgactgagcagaaaattaaaatcccctacttggaactacctataaggaagaatgagaattcagaccctaggcattactgatgctcagttgaaggcagcttgtcaaagcactgctttttattaatgcccaatagttcttaaatacaaactatatacaaatggtaaaactatacttctgcccagttgaacctgatgcaggaaaggcaggtctcaaaattggggcttagcccaggagggttcttggctttacacaggaaagaattcaccaggaaagaattcaagggtgagccagtaatatgagacagcaatcttttattgaacattactactccttgcagaacagggctaactcacaggcaatgtgcccagatttggtaatgtatgggctcttggcaactgtatttatacttacttatattcatttttaattacatgtaaattcaaaggcaggttaattcaaattgagggatgcattatttagaactttctaggaaagaagtggcaacttctgggtcatggctgtggaatggggtgataacttcctggttgttgctatggtatttgtaaactgccatgatgctagtgggaatgttttatgctaaagagcaatgagagcagctagggatggctttcattgccgtctgctggttcctgccaatttgatttcttcacttcattgcctagggaccaaatcctgttttggtcagcagggttgtgaccaaaaaacaagtcctaccaatctcctacctcaaatccgtactatgtgcacttcagtagacaacttaatattgaatatatgtgtgaagatacgtacataaaaaaacacctaaacctaaacaacttagcaaaaatgtgtatatagttcagactttttttttacacatggcttgcttttattttttgtttattttttatgttccagaatacatgtgcaagatgtgcaggtctattgcatagttgaatatatgccctggtggtttgctgcacctatcaacccatcatctaggtattaagcccagcatgcattagttc

SEQ ID NO: 2785 - DNA, 1003 bp, Homo sapiens
gcataatcaaattattcttttttgccttatcacttatcagtttgaggcattctttataagttactttttactggatttattgttgattattttattccctccaccatatattatgttcaatgagggaaataatttccttcttcttctttcttttccctcatgctgctcctcctcctctttctccttctttttcatcttttttcttcctcttctttctttcttcctcctcttcctcctcctcttcttattttcttcttcttctaacctagaataccctgtggcatatattaggcattcaaaattatttgttgaatggaggtaacaatcttttattttattttattttgaatggaggtaacaatcttaatcaatgatttggctctaatgttgccaacagaatagacggcaccatttcaagaattactaatgctgattttatagtggtagaatctatgtcctgattctgatgtaaaaataaatatgttggtagagaaactttaaatctcatacatcctatgataaggattagaggatttaaattaaatagactcaagtcttgttttgttttttccagctggtatattatttgtgtaggtaagtttctctttttgtaaaaatgccatttaaataagaacctctacgtattagcaccttcacataaaaaaaggtgaaaatctctgagtaagataggacaggaagtgggagtgattcctctttcagttgagcagcctaaagggttgttgagggtgtttcttatacctccggctgactaaagccattagtctgttgtgaatgaagagagtgaaacttcaagtcctaataaagctcagggacaacccaaataattcatattcttttattgttaatatcttacaagatttctaatgcaacaaccacagtatttgtttggcttactgtgtctctgaattaataggggttcatgttttctcctaggttgagccagtttttttgggttctgtgctaaaatacgactccattctag

SEQ ID NO: 2786 - DNA, 1005 bp, Homo sapiens
ttgaagtctttttttaatgcaagtgggctataatactttaacattgcaatgcttgtttctttgcttctattcacttaatattgaaaaatgttttatattttgtgttctgcattctgttttatgattgtgacataggtatgcattatttgtttgcatttagaattagagaaagctttcactgggcaactactcattgcctcaggagtttatgtattttaaaaggaaggcgtcttttcacttgaagcaatgcccaagtatttattaatagcaaagttgttttcatacttcatgaggttctaactacctttatttgtataggctccaccctatatcataataaatgtaaaaaattgcactatatccaatgttaaatataatttttgttatagttacattttaaagtttatgtctaattgtattttgaaaccatttagttataaataaaattcctttctcattggctgagatttctgaacaagcgccatggtaggtgtaggatgcagcccaagtattctgccatctgagtccttgtctgtttatcacatatgtctccctcattgttcaaaggttgctttgcttttgagaatgttccccacatacttattgttaagtttatttttgtgggttttaataaattagaatttctaaaaagagctgttctgagaaaattcttgtttgcaaggatatttcctcctagatattttcatctctttttttttgtatgtcctaaaataagcaacatgagtacttttacatagaaggaagtgccatagctacaattgtcaaatccacaaaacaataagccttggtaattctgtgtcttagaacatttcgtatctttgagcaccaccttgcaagtgccatagaatgacaatggcgctgccgagccagcagcacaggaacacgaacgaaggtcaacatttgtgggttccattacttaactctggagaaaaaatggcaagtttcagcaagacaacagttttaaatgtaaaactattagacaga

SEQ ID NO: 2787 - DNA, 1063 bp, Homo sapiens
attcgtgtggttaaacctaaatttaatatatgtctttttaaagattgttttgtgtatagatttgtgtttataagactgtggatatgtccacacaacttatctctaggttgtttgtgttttgctgaacataacatagagtacattttaccatgcaactgttctttgcaaacatatttttaattgggagtttcttttcaggcaccccttcctcggtgcctttgatctatagagccagggtgtccttggttccaggcaggcatttattcagcagtaaatattaaccacttactaatcaaaaatatcacttaagccagcaggaaaaagctgtattcactcaggacatttgatcattttctgaaagatttttttacaagaaaaacttgagggaatccaattaaatatgttgtttgccgtaccagcagtattatatttcctgagaacagctgtacaacaggaattgccaaaattataattcatcacatcaaaactgacctttccaaatatttaagaggttgaaattttagctacatacagtttcaggagctcattagattttcaagagtatatctaagaatgtcatggctacatttcaaaatgtggtatttgaagacaggtgtttctaaatgatgttatcagatttttaaaaatattccaaatccattagtcattgttgtgcaatgcagagtgcagcattcctttcttagaaagatacatttacttttacgatggtatagagtctatgaaatctgggcaaatacttatctagactcaagagcacattcagtttttagctaagctagattctgaagaataattttgtttctttctgtactgatatagagaagaatcctgaactgtttgtgcagggcatcatttagcatagctcccctacatggtcaaacaaaattgagaaaagcaagcatcagaatataactgcctttagaaaattcacagtccacatctcagttttgacatttctgagtaatcccattataacagtaatggtaatatagtatttaacccagaactttccaaatttatttgaacaccatatctctttctc

SEQ ID NO: 2788 - DNA, 1046 bp, Homo sapiens
tcctcctcttcttcttcttcttcttcttcttcttcttcttcttctcctcttcttcttccttctcctttctcctcttccttctcctctcttccttccttccttgtccttctccttcttctttctcttcctcttcttcttttcttcttctttttcttctgttttttaaatctctcacatgtattgctgtgtttgggaagcagaaggtctcagtcagtcggggctgtcccggtgccgggcagctctgatgttagggctgaggaggtgcctctgttctgcccactctgctgcctgctgctctccactctcacctgctttgcatgtctctgcctgcacccccctccttttccagcagatcactagcagagctttagcttttacctcagctaacttaagagcttttgtcttctcaggtaactcaaaagagtttacaccctggattttgtgaacagtttgttaaattcctgagtttctgcaattcccattaaacacagccatatgtctttcgattgtgccacatcccctggagagggaaagctgaatgtttcctgtgacaaccaacggaaggaaatctggtcccatgccggtgccctcagagtcgatgggatggagtcctaagagaaaggaagaatacacactagtaaattaatttgtagtgtactgcccacttatttttaggcctgtttgtatttttaaagcacaataactaaaactgaagctttatatattaggtttccaaataaaataagttaggcttaaatctgagactggagttgaacagtgccaatgtcctcgtaaattttatacaatggaaatctaaatacatgcattttgcacttcgttaattgtagaatgcgcttaccattttcactattcctttagacactttaaaaatacatattcctgggccttacctcaggcctcctgaattagaatcactggagtggtacccagaaagctgtccctttaaagaaatctcaggaaatttctgatgatttcacatagctagggaaccagtaggatgaaatgttggttggtaagtgatccat

SEQ ID NO: 2789 - DNA, 1059 bp, Homo sapiens
catcttcattttttgttcattatacttgcagttaatgtacattgtacttaccatttgaccattagtgtggcttaattagcaaaatcactggctgggcgcggtggctcatgcctgtaatctcagcactttgggaggcccaggcggggggatcacgaggtcatgagatcgagaccatcctggctaacacggtgaaaccccatctctactgaaaatacaaaaaaattagctgggcttggtggcgggcgcctgtagtcccagctactctgaaggctgaggcaggagaatggtgtgaacctaggaggcagagcttgcagtgagccaagattgcgccactgcactccagcctgagcgacagactgagactccatctcaaaaaaaaaaaaaaaaaagaaagaaaaatcacttaagtatcagacaagcaattcaaatcccaactcaggccatttcctgttgtatgctaagtggatgagcctctcacaaaaataattttttcaatggtaaattggcaacaatggtgtctcctttacaagactgttgaaacgatttggtgaattaatcaatacctggtgtgttcgtggccatacaggaaattattactcctcctcgctgtctctgcttctctaattttatctaccttccctcccactcctgacttcttcttgcatggattatccattcgagttcttttgatacaaggttttctagactccattttctcatgccagaatttatgttaataggggtcaattatcaatgttctctagaaacctgatctctcaatagcaagtgcttaattagattgcaaatcactgaggtcacttctgttcaccctgtgagttttcttgtgttcacccaaccaaatgggaagtacattcagaataaatacattttcataaattgctcatttttgaatgcttcgtacagtccaatttctcttttaaaaatcttatccaagcttgtgcccattaggtttctcagagactttttgacttgtttttctgcttctttgtcttggtttcagataatacttcagtttaatcttctatttgttgcatccta

SEQ ID NO: 2790 - DNA, 1024 bp, Homo sapiens
caggggtgatacaatcagaattgtgcctagaaaatattagctcagctcagttgtgaagaatagactgaggggcaggagaaccagagtaggtgaggtgacaaggaaggaggcaaaatttgatgagtttggggattttagatgcctgatgtcttgaatgacctaagtggacagttgtacagtggtaactacagcatgtgagagagatgtgagagagacatggcattgcatgggatgaagattttgccaatagtttaagctgagaaagagtactgtggaaaaacttgctaaaaggtagacaaatgaaaagaacccagaaaagaaaagaccatggaggtaagggggaattcagggaatgatgatgtcctgaagccagagaaagagtgaattataagatgggagtggctaacaatatcaaataccacagattaagtgagtaaaaactgagaaggacccattaggtttatcaactatgagttactgattaccttggaaatatcaacttcaatgaagaactgttaagaattaaaggcatatttaaattggttaagagcaaatgattgggtacacactacatattttaagtagttagaacataaaaggacagagggcactataactagaagaggaaataggctatgcaccagaatttttgtcaatgattttatttgttttgttttgagaaggcgtgtgtgcagtggtgttctgataaaccaggcctccagaggagaaataaaagctctaatttgtagctattacagatgaccatggcgtaaataccgtcaccatggctggagtaaaactatcatggaagaatgcagaaggcattcagaataccttattgaatgcagatttgagaagatacctacaattagctatcagctccagtgcaccaccacatagaaaccaatgggatgggagaggttgaaggtttgtgtgagaagtgggattgctaataaaacagataaagagggaggaaggtaggatccagagtaaaagtgggaagattagttttggataagagaaa

SEQ ID NO: 2791 - DNA, 1029 bp, Homo sapiens
gtgacttccattttaatggcaaaattaataactacttcattcaacatgtattcattgaaccaccgtgtgtcttaggaactattaatattttagtttcttaggcccttaggtttcagagatgaacaaaagtgatgtagttcctgacattattcaggtcacattctagtcaggggaatggatacaaaaagaagtaaaatatgtagtgtacaagtaggtgataaatattctaggggaaaaatacaaaaagggaaagtgtgtggaatggggtggtgatgggggaatagcagattgcaattttaggtaggaatttcagggaaagcgtcactgagaggtgatggttgagcaacaacctggagaagttgagggagcggccggtggctatgggggagggacctttcaggtaagggaccagcaggtgcacatgccctgagacaggcatgtgaacggcttgttcccaaaaagcactcaggtcagccgggcagggcagcaagctaggggatgttcactgagactgggaagacgagaggacaggttgggagggaaaggtatattttagagattttcattttacgtgctcattgaatatccacggggagatgttgaggaggcacataggtagatgtaagagtcagtaatgatgcctggaagacatctgggctggtaaatacccatggaagtcattggtccctactgagtgtttaaagctgcagcagctcagagagggaagagaataacagacttttggggagttgtccatgaagagatgatccattggggtgggatcctgagccttgcatgagaaggtcaagaagcagaaattgaggaggaagacagtgcaggcgaagggactggcttagtgcaaggacatggagcaaggggtggtttggaatgataaggggacagggaggagtcagatgtggcatttcaggacatgacatggagaggcaagaaagggagtgggaggaagtggtgatgaggtcagagaaacagactggagagccagattgctaacgtctttctgtgacatgc

SEQ ID NO: 2792 - DNA, 1096 bp, Homo sapiens
cctggggttgcactggttcacagaaggatatgggggaagtccctcaatttagaaacaataattatctgattcctgtcttgtcagatatttctactaacaaaaaagaccaggaagtgtttcccttcacagaggaaaggacattgtttattaccatcagatgttttctaacagctactctggaatgtagagagggaaaaatttgagggaaggggaaaaatgtgagggaagcttatttaaactttagtatgcaatagttttggaaatctccttgccataggagagtgaatcaaactctatagagaaaaaggatgtgaaaaaaagaaaaagaactactatatagtctttatatgaattcagtctttctagagactctactgaattaaaactttgcactaagtgctatttgatatttttccatgttctgatagtctgtcttatctaacttgggatcatggctaaaaaaaaaagtttgttttacctcttttggtaagtttattttaaaaaatcagattagttttaagaattactgaaaaatcaagcaataattttatctttgacattcatgttaataataagttatacttattgttgactgtctgaaaagcatttgggaaactcaaagttctttttttatatttaatacatttagctttttaagaggtacaagattgtctgtgaaaaatgttcaagattctacccagatgggaggaattcttcagttttcaaagccttttctaaaacaattctgctgtgaaaaagtttaaaacacatattttcttttgttatatgaatagagacatactcctagggtctctttaaacggaaagtacaattcagctttaatttgtactctaagaacttccaaaatctcagtgccaagtagcagttgctgttttctctggatgtgtgtataactatggcaatgcccgcagggagtttgatcaagattccattttaggcggcctggtggaagaaagcacaaggtattgtaaaagaggaaatcgtggaatagcatcatgttatgagacacactagaatgtggcatattgcaccagtcatcatatgatcagggagaaatcgagaggcgaaacagact

SEQ ID NO: 2793 - DNA, 1035 bp, Homo sapiens
gagtcaaaagttatatgtgggttttcgattgatggaaggggcagggttggcacccctaatccctgcattgttcaaggttcaattgtatatgccaggtcttcctcccattccagaatataagctccttgatggcaaccccttttttgttgatccctctattcctagcacatagaacagccccatgcacacagcagacactcaataaatatgtgctgaatgaccacacagtagacactcaacaaatatgtgctaaatgaccttgcagatatgcaaggtggaaataatgcaaggtagaaaagtcactctgcacatcatcaaacttctcaacactgtactgtcttggggagaaaaatggctctgtgaaataccaaaggacacggattactttgtgactcttcactgacacagggagaaagaaaagttcttctaggcttgcaggccatcaaagacttcctgatgttaataagactggcactcagcttgggagatggctaatcttaaaattaggtgctggtaagtagaaatactgtcaatcatatgcaaagaccagtcaagctgtgggacatgtattatttgatcctaggggaaaactgagattttcataagtgtattttggaggcatttgcagcgaagcgttgtttgaagctgttagagtggatgagtgtctaaagatgaaagtgtagctagcaggaggcaggaactggacctcgggaagtagctgtgtttcacagacagggtgaagggtcagtccattaaaggaaacacagaagagaagaccagatatgctgaacaccagcaaaataatgaggtaccaatggaagagagaatgttaaaaagagaaaattgtttcaaatattggagtaaagtcttagcagaagaccttccagaaggccaatggaccgggaacttaacaggtcatgggtagacttagagagagcaacttaagtgatgaggagtggagtgcactggattgaatgagtttgagacagagcctgtgggaaagacaggtggctagtatggaaaatgttcatgatg

SEQ ID NO: 2794 - DNA, 1029 bp, Homo sapiens
agttagggcatttgagctacattgtttccgctctgtgtaggcggaggtcctgcctaccacttattactgttgccagtgacgtcttcacttggatcagaactgccatttgtttttaagagagtttgtttttgcagttgggtttcaaaaggaaaggagccgatgatgactttgaactccatagaatctttcctgtgcagtcacatccctccatggggcacgtgcaagttcatccccaaatcctgcaactcggttcgagctaaatgcagcgccttcttcctaatcgatgccgaggaggcagcagaagatagaattatgattcttcaaaatcttccctcgcctctcgcattgactgttttctgtgtcattttgcactcatatattttccccttaatctgtctctgtccggctgtgtcttgtgccagctcttttcttctctttaaaatgttcgcttttatcacttcctggtattactatttctactatttagtctctgctaattcttctcaaagatcattaactcatttccatctcctgttcttccacattctgaaactatcctctgcccgtttccttaactcttacataatttcccttctggacctaaaacaagtcataatgacaagagtaatagttaccctgtgttgaagattgctatgtttcatgacacactgggatacctatttcacacttggcatctcatttaatccctgcaaatgggaggatggtgtcatgcccttttcatggatgaaactcagtgaggttcattcagaccgtgaatcactggcagacctgctagtccagcgcagatgacatgacctctggtgttacctaagagggatatgttttgcttaatcatgaactataactcataggcctggagctaagttcgccatttcactcgggacccttcacttacccatatccactgaacagataaatacctttgactgcaggtctatcagcaagtacctattgagaatttatctgaagaagcttataacttaggtattatacatagacaagtggagg

SEQ ID NO: 2795 - DNA, 1048 bp, Homo sapiens
ccttcatatcttgcctattcatagtcaaattaaacatatatgtgtgaattaaaagtgtccttccttttaaagtgtttttgaattcgaacagtttatgaatttgaactgttttgttttattgatagaagccgtcctgactcaaaatcccaatagcatttcaaggtatcccagaggatgtgctgtgactggagagcagacccacacaatgaggttcatgcgttttgtgtttcctaggtagtctgccattagatttattttagctcttatgatgtggcagcacaattggcgccagaaagcgtgctgacatgctaaccgcaagacccattgtctcccatgcaggccatccaagaccgctgtgaaaattagcttccttgccagacactttgatcttgtcactcctgcaccgaaggctccttgctgtgccctaaagcccttcacatcagcctcagctgttgcagcccagcccttccctcaccacagattctcccctgatctgctgtcagcctcctctgctccagcctaacaaagctattcacagactcctttgacagcatctgacacttttgatactttgcttttcctagtacaattcaccagaatagaatgaggtaaagcattcttataaagcaaagtctctctctcttgcatgtgctggtttcattggctgcctaacctttagaaattagaaaaagatacaccggaatgggacctgcatattgactcatgctttgcatattttatgtggctatcaggccacctaatgttaaaagtttctctaggggaaatttctaggaggagaaggagctgtttcaatattactttaagcagcacagtttgaggatgttttaaagcctttaaaaaaaaatagacaatttgtagcagcagaagatacctgattatgaggacgcaaccaaactaatggatagattttgcaagtaagcaacatggaaaaaggcagaaggcataagtcagtgtttaattcatatcgatttatgagtttattcatttgtttaataaaaaagtctatcaagaggctgatatgtgctag

SEQ ID NO: 2796 - DNA, 1055 bp, Homo sapiens
atgggagtgggtcccctcatgctgttctcatgacagtgagtgagttctcgtgtgatctgatggttttataaggggatcatcccccttttgcttggcacttctccttgctgctgccatgtgaagaaggacgtgttttcttcttccgccatgactgtaagtttcctgaggccttcccagccatacagaactgtgaatcaattaaacctctttcctttataagttacccagtcttgggtatgtctttattcacagcatgaggaaaactaatacaagtaggtttccaattatgggatatcagacatccctgacacaggtaccatttttatatctgctgtgaaccccaagattcaggcccaaaggacagtgaagctacagaaaaaatgagaaaatcagagctaacctagcttaggaaaaataatactgatgaggaaaactcactttgactactttccagtgaggcagagaaaatgagttgcaaaaatgaaaaattatgcttcattttgaagtcagggtaatgtagcagatttaatcattggtctcagaaattaaagaaaatctgaagaaagcaatctggtgttttttaaattcttctttaaaaaacaattagttatttgaactagaatttccatcactctgaaagatcctaaaagttataagaaaagataatttctttttattcagggagaaccatgtgtctttgctatgttattgcaaatataagtaaagcattttattttatcttccaatattatttggcaggagcaggcaaaaccctaaaaagagggacttcagcccagtgtttatcaccctcactttgagaagaagctgttgcatataatgcaattgtctgacaaatgaaattgaggtctttaaggatcccaaatttgaccacatttgattaaaaatcttcctgaaatgtattaaacacccacagcccttttcaaatgggaaataaatagcaacatctgacaccttcttggggacccagaatcattgtaatatacttatggaagcagcatgtgctgttctcagcagtggcctagaacttagtttat

SEQ ID NO: 2797 - DNA, 1025 bp, Homo sapiens
tccttaaggttttcatcgttgttctttttcaactttttaaatttaatgatgtttattttctttctttctcttagtagagggaaactatcactaaaaattaacctctcaataaagtgttggtcttatcctatgagattttatttataaatatatattttatttcagtattctccccatgaccaaatgaatatttggagaagtagtttttaaatatgtgaagagttagaatttcgagttttattagagtaaacttaatgtcaaattctgttgtaaatgtattttttaaaatctgaactctgcccaattttgtaaagtaaatccaacatcttgaaatagtcttgtttttttcttttctttttttcaatgccaacagttgtcagtgatttggaaaatgcaatttctagccaagcatagtaccagtttttttgttgctaaatgaaaatattattttttcttatacatttaataaaactctctaagttccaatattataagacattgcctttttaagtagaatttaactgtttttgaatttaaaagaagaaaaaaataaatactcttttacctcttctgtttatttgtacaaaaaaattaatcagttagtgtattctgttgtatagatgacaaactgtatcttcaggaagcatgcctgattcacctgtgtgttcctcttcctctcctctatgcaaaaattcagcacaaaatcaatatttctcaaattagattaagttaaaaggagaagggataatggaagaaattccatcttgcctctaagccataaaaaataatttttgaaccaatcttatttacctttgtttctatccttttcgtagtataaaatcctagaactaaatctcaaaagaaagatttgaaaaaacaagaaggaagaggatgctatgtaatttacttaaagcttagatgttgtcccacattggtggagaagttaggaattgctctgtgttttcattttaaagattttacctacatcatagcttttatggaggatacatgtgatattctattta

SEQ ID NO: 2798 - DNA, 1023 bp, Homo sapiens
ggtttgctaattggccagtgttaagggaaggaatgcagggatcttaacgctacttcttctatcatgtaaaacccactcaaaggactcagtccacctctgtttttggctcttacccatggtttatgcagactgagtaaccaagctaagccagcaacggaggacaaccaagtacgttgtcatctccatagtgggctggtaattatactccagtccatctgaagcagcctcattgtctggggtgataaccaaggttcactgtctcatggccagggaagtcaaggacgcagacacacaaagagtgaagtaaagagtggaagtttaacaggcgtaagaaacagaatagctctctgctggagagaggggtcctggaggaatggatcaccggatccacagtggaatgcaggggggtttatagatgcctggtgaggaggtgttgtctgatttacatagagcacggaagattggttggatcaggtgtaccatttgcttagggcacgaaaaactggctaggactaggtgcactatttgcataggggtcaatttctggtagccccccctctaatcttttattatgcaagtaggttttctgcctgacctgtgccatgttgtccatccctctgctgtacacatgataacacaaacagggaagatggagcctccgtgttggacatgcctggcccctaggtagcccttttctattggcacagctgccggcgttcccctgtacaagcttccagcttgcttatctatgtttgcagctcgatttttcaggctgctttttattagaaaaaaaatgatttcttgggccgctttttgttgaaagggaagctctgccaaggactcttttacactatctgcctaaataatttctttctacctcctgtatcacattcactttatcagtggttcaggagagatgatgtttcagccagtcagtcctgggctgccacacctgggctgggatgggctgaggctgtgcttatgagctcaatcagaaatttaaccaattttaaatgacagtct

SEQ ID NO: 2799 - DNA, 1058 bp, Homo sapiens
cttgtttcctggccctatagggacattgtcttccttgataaagctgggtacagccttgatatgaatagattggggagcaccaggaatgtacctcacctgggctgtcgagaaaagacagtgtgctcagaagaggtatggcaggtgctgaatattcccttggagggacgaaggcaagaaaggcccctacagcaatgaggggagaaaatccacaacccaagtagaactaggatttcttatgtgtgagacaatacattgctcatttacatgtaaagtgtgtataatatttttaatccatcgtattcaggcgagcaagatcagtcatttcatttttgtataacttgcctcgaagctgcctgttgtggccccattctgcatagcaaatcaccacaaacttagcagcttacaacaaggttccctgttcagggtctcaacactgaaatcaaggtgttcgcccagctgagtttacgtcttaggcaagactaaggaagaattcattaccacaggcattcaggtcatcggtgcttctgccatggtgacctagtgacctctgagcagctgccacctctgggcaccagacaggagggcatgaggcacgcatcttctttgagtctgatcaatattatcagatgcgacctctttttcctccaaccttctccgcatttaaaagcaacagcagagtgtaaggcaagattccaagccctccttggcaaccatcaccaatatctgcccccttttaactctcttcttcacttccttctggcttcggaaactttgggatttttttttttttcctcattcgggacattacagattgagctgaagtcttctttgtccatcaccctcaatcctaattttatcttcctcctccaaaataccactgctaatatatgatttgcatgtaaatctttctatccttctatgacaattttaattatattaatatactaaaggtggtatctgtctatatgtctgtatacaacctttagtatacaggcatgtacaatctttagtatactattgctgtgttttattgtaaactaaattttatcgtgttgtat

SEQ ID NO: 2800 - DNA, 1082 bp, Homo sapiens
ttacccattacagcctgcagtcttcctcaatcttcctttagtattaagaaaataaatcacataaaatattcagagagcttcttgattcttgatgcttcccatttgaaagaaaattccccatgttgtgctgtgacttgtgaagtttccttcctgagatttgtttacatttttcctgctgcaattttttaaaatgacattgcagctaatcgctgctaggtagatctctttctcttatgggaaaaaatatataacttaaatgttttcctcccttctcttgtatgacaggtctgtgttattgtagaggcagaacgctagaatgatggtgtgttaaatgttatagagctcagttctagaagatatattgatttggcaagttggaactataattagtatagtgcaggcaaaggcaaacactagccatgtctagcacttgctttttgattcaaactgttcccaagttaacggcattttcctcctttaaagcccagaagtgaacagtcttgccagtcgataaatgtagaattggataaacagaaaagaatagggtaatcctatttctttctctctctcttttttaaaatcaactaacctggttgtttcttatactcacctcactccatccttgtgttagagactagtaactcttccccatcatcttattttggagggcagctgggtgtggcatcgagcgtgaaaaacaaacaacaaaggtataaaatcccttaatgttgtgtgaaggcatttcctcagaattgggaatttctttccttcaacttgatgtgattgcattttgtcttcctttattcattggctctgtacgacctctctactcccccatcaaagtgaacataaaacaaagaagaaaattaaagatactcttgtatgaaatgttatgccctatacttaaatagcagctcagtaacagaactatgcgttcattggatgcgcagtcaaggagtttcttgaaaactggagagggcgacgatataatgatacagggggttctgaggactggggtgtcaatgagggatgaggaagaatgtgcttatctatggggagagaaattttcgataattagtatc

SEQ ID NO: 2801 - DNA, 1050 bp, Homo sapiens
acttccaagtatccagggagttgcactagtacaagaattggagcttttcctttaacaaatcatacatcttaattttcttctcataataccacaatagttaattaataaaataatcttacttatatttgggaaagaaatttgggattaaataaaaggcagattctaattatacttggattaatattgttactcctactaatctcaaactccaagagtcagaatcccccgaagggcttgttacaacacagattgctggccccacccccaagtttctgattcagctggtctgagttgagatcagagcatttgcatttctaacaacttcccaggtgatgccaatgatgccggtcggggaccacactttaagaagtgctgccttagagggtagacgtgagaagccttggggatttggttgctcatgtaaaggtaagggagtgggcagagacaaggagaatgtccaggtttctggtctgagcactagggtagatagagggtgatgcaattcacactgtgtgtaaaattcacaatgaggagcaggttgtggggatgattggttcaattaaaatcctactgaatttgaggatacctctttaaatatatacaaaaaggccattagttttttgtatctgaggtcaggagagagagcctaggagaagagagattgacgactcttcagtgtgtagatgatacttgaagccattatgctctggaaagtgccagtagaatgggaagcaagaagagactgacgtatagataaatacttacccaataaggggaaaaaagctacaaagagaatgataaagacaaaaaaacaagatattttttaaaaagaaagaaggagtgttaagtgatattcagtgttgccaagaaatcaagataaagactgaaagctactgataataccctagtagagaggaattccagtggagcgctgagagcgctgcccagatttcagcaggctgaggtttggagacgaggggtgtagggtgtggtgggaagatgggaggtgaagtcagtccacgtgtgtgattagctctgtgcacttgggct

SEQ ID NO: 2802 - DNA, 1053 bp, Homo sapiens
ttgttggattatgataaagctaacatgcagtaaggggttcaagaagtgtgaacaccagccgggcgctgtggctcacacatgtaatcctagcatttgggaggccaaggagggtggatcacctgagttcaggggttcgagaccagcctggccaacatggcacaaccctgcctctactgaaaatacaaaaatcagccaggtgtggtggtgcatgcctgtaatcacagctactccggaggcaggagaatctcttgaacccaggaggcggaggttgcagtgagccgagatcaggccactgcactccagcctgggcgacaaagtgagattccatcaaaaaaaaaaaaaaaaaaaaaaaagtgttactacctacaaggcctacccagttaagaataattcatgtccgtgtcttaggagaacgtacgttctcactggagagagggagcagacagacaatgcatcaaagagaattctcagttcaaacacagtcaatgctgacacagatagtacagagtgctctgggaacacagatgaagcaataaacacccgtgtaagtggaggaaggccccattctagaaaggtggcatttgaagtggcacatgaaggttaagtaggagttttcaaggtggaaaagacaggttgttcttggcggaaaacctggtttctgcctcagagatacggttggctgtgaaagatcctgacacattgaagaaatggtgagcaattccagttggcagaaaccaaggtgggctgtgaaggatgggcggagacagggatgggtgatacctgttactaagggcatcttcataggcacatccgcaatcccaattccatctcagaatcattagaggtctcaaatatttgtatttactcatttttaaaggctagtcaagtgtagtagtgagaagaaggaaagagtagaacaaggaatttgatctgtaactgattctgaacaatcaattgaaatcaattgaaataactcactacccttggaccaaccagagatctcagatttgtagtagcaagaaaggaatatgctaattttttccttccttcctt

SEQ ID NO: 2803 - DNA, 1049 bp, Homo sapiens
agataaaagttgatgaatttgtgactcacaatctgtcttttgatgaaattaacaaagcctttgaactgttgcattctggaaaaagcattcgaactgttgtgaagatttaattcaaaagagaaaaccagcgtccatcctgtcgtgatgtgatgggagcagcctaacaggcagagagaagcgcctcctagaccttcagcagctactccagagaatggtgtgatgtgcgtcattcatgaatctctgtaatcaaggcaaggataattcagtcatggactggactctcctccacataaataattgctagctcattaaggaatattttaacataataaaagtaatttctacaaaaaaaatacagactattggacaatgaaattttcttgcatatggaagaaccagaaaaaatgttgatctgaaatattttaaggtgggaaccaaaccctcatcttacctgtaaaaatctcagcgaagcactcttagaatgcctacctttgagcattgttattttctggtggacacactatgataaattatttgtggattatagctctgagttattttaggtgttgttatttataacctagtgaaaagatggggaaatagctgctaaaagtaacttttctctttcttaagctagcaggcctgtagcctactttacgccacttttaggttgtgtttttaaagtttctcatatgcctatggtagaaagtttgttttctttaataggaagatacaatgtcattccgcaaaagccaaaacagatctgaagaatttaaggatgtggagtggagtcatgaaaatgcatccctgctttaacccaaaaataaaactgtgatttgctctgttaaacaattcttatccatcctgaccttgtccttaatactcacagtatgttgattatttatacttgacattcctgagaaaacaagggaatgtaggatttggtaactggtagctagaaactcatataccctattcgggaaaataacacatttgtgaaatattacacatacacatacacacacacacacacagaaaaagacatttat

SEQ ID NO: 2804 - DNA, 1053 bp, Homo sapiens
accaccacgtccagctaatttttttgtagagccagagtctcactctgttgcctaggctgatccagactcctgggctcaagcagttctcctacctcggtctcctaaagtgctggaattacaggcatgagccaccgcacctgggcttttcttcattttgttgtaataaattcccaacttcctcctggtggactgaccaggcataaatattgatttctgaagcatgagtgaggagtaaatagaagaacatcattgctattcatagatttctcctccacccgattttcctaaatggtaacatagatattagagttaagaattttgattttttttttctcattggctcatagagaggaagacagtcattagaaacttattttggatgcatagtagaagagcataacttaaaagcatggagcttgggctctgccaacttattagctttgtaatcttaggcaaatttcctaacaactgtattcagttttctcatctgtaaaatggtgatgagcatagcatgtactgtgtagggctgttatgagaattataggcatttatatgaagcattagaatgtagaatgcagtgcctagctccgtgtatttaatattatttattacaattattatcattgtttcatgtcattgccttattcatgaggtccctttcaaccgacaatgaccaacaatgtaaaaggttttattccagtcccccacccaaagttctgcacttgcctcccatttgcatcccagtctctggaggaatgaatttgcgccttttttctttccactgatgcactgaaatgagggcccacacttgaccttgaatctcccttttgagatgtccagtgcttttgaaacactgtttgatattcactaggtgggctgtactccctgaaatgaacaacaaatgagagagagggtgtaggaagtgttgttccaggaagtgttgttccaggttactgagtttatcgtaacacttacagagagcagtttctcaaaggccaaggcagacttcctttaagcaaagatcttcagagatcagagacctctaacatgata

SEQ ID NO: 2805 - DNA, 1057 bp, Homo sapiens
aaatgcagctggaaatgagaggtttgaaggcagttttctcagtatgaatgatgaacctaagagatttttctggtccatcagcgttgcctgcgttcttctgtggtcgtaatgtgagatccccaggactgcttagtcagaggcttgcagccgagttggaaagcatcctctctaagttattcttcagatgtgtgttcagacacctgttctctcaatctgagcacattggaatttattgaatgagttttgacttttactctttctgtagttaataattctgagagtgcgatatccctagaaaaaacacatgactcataaagcctttcctcaactcacaggagtagaaggctgtggtgttgccagagagtctgatgcttaaagcaaatacagctggcactcaagtgaaaagaacggactgtagctactccttgaatgcttttattgatgaccctgtggaattaggttttcaaataaaattacattcttgagacctcacttactgattattttaatttcaagtaatatgctctgaaaatctgctctatctgaagaattatgtcataaaactgaaatgcgactgtcttttgattctgtttattaaaatctttgccatttgaaatatttaaactgtaaagccttttatactctgtagtatataatagcttagtgtcaattattttatctaagaacatttgcttctaagttaaagattggtgtatggtaacatgcttcacctggtagccacctagtttctaactttttgcttttgaaattatatatacaatttttgtttcaaagcatttttctaaaactcttggtatctttctaatatacatggactagctggaagggaaatagaataacattttgatttttaaaaactctagctttgggtaagaattgaaaataacaggtaattgaaagtcaggtctttgaacattataatatttatcatttatcaatagtcacatctattacaaagtgctagacaataaaaaggaattagacgatatcagcactgtcttcccccatatgttgtatgatctatatgcaaataaat

SEQ ID NO: 2806 - DNA, 1060 bp, Homo sapiens
atggagctttctctagagcgctttacaggaaatatctcagctgactttctgaactggtactctctgagagccagccggcccttgactgatagccctggataaggaaggccagataagattctttgaagactctcagctaaattcagagccccaaatcctacatacatttggctactctgtagtagtggattggtggccttattttacaggctagtcagttaaggtttgagatgcgcttagttgctctgcttgtgtggaatagaaaagggggattgtaacattaatacagggccggtcgggattttagggtgcaggtaaggataggtcatagggagaatgaagattctagcaggttggttttttgttctctctacagtgggaataatgtaagaagcagatagtttgttgcccccaactctttttccatgttctcttctatcaaaatgatctgtacaaaaaagttctgtttataaaaattttagtctttcatctttgcagtctgttatcatctttatgaattttttgactcttccaccttcctggcaccacaaggctagcattgctatatttattaaagattcagatttggaattttgtcctcttatcactacttcctctgccatttgttagctctggttcttattgtatcttacatttgaaaacctttgaagcttatggggtatatcaattctttattttctcaactttttattatctaagtaccctcaattatcaagttgtttaaaaaataaataaaatacataacagaaattgttctgttacgcactaataaattgatcatttataaaagtagatccaaccccaaatccctctccttttaacacagaccatctgttattatccaccatcctttagtttggcagggtcagtttatcaatgatttttggatgttttaaaccacatgacacaaatgcagcataaagtgaacttgttaatcatgcagaagttggagggtttcttgaagtcagagaaggtgatggtggagaacttgaattgcatgaactgtaattgatttgtgagcacctcgtggagttagcta

SEQ ID NO: 2807 - DNA, 1051 bp, Homo sapiens
ggtatcatttgaaaatgagacagatgtggacttaagattctgtggtaagtcacgtgtgttaaccactttgaaatctcagggtgcaagccaggggacacatagaaatattaataccatctttctgtcaaggagtccttctggaagtatgacaacaaacagatataattttgcttaattttttgctatttgcatttttccttatttcataactaactgtgtctgtccttgtcgcccttcaggaagttgttgacatgaagtctgagggacaggccactgtaattcagcagctggaacagactattgaggatctgagaaccaaaatagctgaactagagaggcagtatcctgccctggacacagaggtggccagtggtcatcaagggcttgagaatggagtgacagcctcaggcgatgtctgtctcgaagctctcaggttagaagaaaaggaagtacggcatcataggattttagaggcgaaatcgatacagacttcccccacggaagagggcggggtgctgacactgcctcctgtggatgggctgccagggcgtcctccatgcccccctggggctgaaagtggacctcagacaaagttctgttcagagatttctttgattgtgtctccaaggcgaatatcagtccagctcgacagccatcagcccacacagagcatctcacagcctccaccacctccatcccttctgtggtctgctgggcaaggacagcctgggtcacagccgccccattctatttctaccgagtttcaaaccagccacgaacactctgtttcctctgcctttaaaaacagctgtaacatcccatctccaccacctctgccttgcacagagtcctccagctccatgcctggcctgggcatggtgcctcccccacctccccctctccctggcatgacagtgcctactctgcccagtacagccattccccaacctcctcctctgcagggtacagaaatgctgccaccccctccccctcctcttcccggagcgggcatacctcctccgccgcctctacccggagcaggcatactccc

SEQ ID NO: 2808 - DNA, 1030 bp, Homo sapiens
tgatagtgacgctactgttgaccttcagcttcaaacagggtttatgggacagtctccatcatgactccagataaacctattcagcaactccttggcctgggtcttggtgctgagctctgcacttcagatctgtttttggagggacaaaagatttttttaaatgtatgttagagaaaaatcactacaaagtgatggattgctgaagaaacatagttttatttaacttcattgtatttggaagaaaaatctgtccattccatttacttgagacatttaaaattttgtttaaggaaagtgtattttcaggatgcatgcaaattgttcccctttttatgggaaatgtgcactgattgtatgtgcagacattttggtaccttatgattcatttccagtaaaattaatagcctttaatgccgtggcatatgtttatggaggtatttcaagcaattcttcttatatacaatggaagctggaagttctgtttttgtttaaatatttaaaaatagccaaataatttttctgtgatctctgttctccttgaaagtaagactgtggttgaatgcactggtgtttaacgaggtgcctgtgctgtttttaccgtcatggcagagacgttttcagtgtgataatagaagattcctcagctgggcacattgccgtttggcataaggagaaagagggttattttctctggatgctcagactgatagaaatgaagaatatcttgtatttccaaatccttttttctccaaagagcttaagacaaagcattttatacttttctcatggagcatggatttaagtttgttctatgatgatttcttcatttctccttctttactttgaagcattacacaaaagattagctgagaaggtacatagaagtttatcagaatatagtttgacatagtttttcataaccaaatgagtgtgacactttgacattagaattgtctgatgtagaaccccgtctcttaaggaataaagaggaaaatagaaaaagtgatcttggccgggtgtggtggctcac

SEQ ID NO: 2809 - DNA, 1594 bp, Homo sapiens
gcacagttaaataaaagtttgagtggtatgagatttaaatacataagcttccgtaagcagtaaaagtaagagccacttgcttgtgtggcatataaatagtggttagaggcagacagccattgtggttaaaccttgccaaatgtgaaatgatgctacatttcatttatcccatggtaaaaaaaagaatcatctttgtaaaataagccataggtaaataatgtctaatcatgtttaaaggatctgtaaaggaacatgatacccagaatgtaaatttgcacatagaagtcagcaagagtgtaaaagaagaatctgatattttttaaaaagtacataacttgacattggtctaaccatttaatgcaacacaatgaatctctttgtgggtttcttctatgtaatctatcagattaaaattctttgcccagagaatgggagaaaaagtatgacagttaaatatttgttggactttagcctctggaaatctgatcagaaaaaaaatacatagttaaatgtgctacttattataagggcaggtaataaaaggatttgttagaattcacatttattacagatactaactttaaggattagatatttggtatcatgtttagtctttccgctgtgcttgatgacctaatccctaaaaaagactttttaaaaatgttcgaggtcaggagtttgagaccagcctgacaacatggtgaaaccctgtctctactaaaaatacaaaaaaattagccgggagtagtggtggatgcctgtaatcccagctactcaggaggctgaggcaggagaattgcttgaacccgggaggcggaggttgcagtgagccgagatcgcgccactacactccagcctgggcaacagagcgagactccgtctcaaaaaaaaaaaaagttataaaaatgtgtaataacgacaggaaaagaagtattcatcattcagctgctcttatatgggagtacataacgtaatacctgtaagtgttcttacgggaagcagtaattgccaataaaaggctgcttcttactatgttgaggaatctgggagaacaagagtggcacacttcaggtattgcctgccactgtattattggctgctatgaaaaggaaaaagagattacatattttatctttgatctttgctgcagttttatttattgcagatattcatttttagattgaaaactatgttttattgtaattagtagatatttcagtgcttgcagagtgacagactgaatgataatttgtgttatagaagacatgttttgtattggtgttaattgttccagttgtagttggcaagggtgtgttttggttgatttggacagttatatttgtcttttgaccaaagacataaaataatgtctgaaacactaaatatcttataataaaacaatttaaatttgttttggggatacataataaacatttggtactttgtaacttttaacatctgcttttaatagaatacattcctattgcaagccttaaaaatgtatttacatagaaaaccacatcaaaattcaaaactataattagacaagcataggttttgtggaatctggatttgtttaagatgttgaaagatt

SEQ ID NO: 2810 - DNA, 1041 bp, Homo sapiens
tcagttctgctctgatcttagttatttcttatcttctgctagcttttgggtttgttggctcttgcttctctagttcttttaattttgatgttagagtgttgattttagatctttcctgctttctcctgtagacatttagtgctataaatttccctcttaattactgctttagctgtgtcccagagattctggtacgttgtatctttgttctcattggtttcaaagaacttatttatttctggcttgatttcgttatttacccagtagtcgttcaggagcaggttgttcagtttctatgtagttatgtggctttgactgagattcttaatcctgagttgtaatttgattgtactgtggtctgagagactgtttgttatgatttccattcttttgcatttgctgaggagtgttttacttccagttatgtgttcaattttagaataagtgcgatgtggtgctgagaagaatgtatattctgttgatttggggtggagagttctgtagatgtctattaggtccacttggtcctaataggaccaaagatttcaagttctgaatatccttgttaattttctgtctcgttgatctgtcaaatgttgacagtggggtgttaaaatctcccactattattgtgtgggagtctaagtcttggcatgagtcttaaacatactcttactgaaacaccaggggttcagtctagttcgtgctgctcgccgcacagaaagccaatcactgagatgacaagtattgccaaggaagaaggctttaatcatttgctgcagccaaggagatgggagctcagtctcaaatccatctccctggctgactaaaattagaggtctatatagtgggggagaaatgtagcaatgtgtaagaaaacaagaactagcatgcagcaaggagtcaatcatggtgaatgaggggtctggtgtggtgagctggtgagttttagttctttgatacttatttagaggcctgaaggtgctttttggaggaaggaactcagataaaacaaatataagtttcaagcattaagaccaa

SEQ ID NO: 2811 - DNA, 1077 bp, Homo sapiens
acttctcaactttatgaaaaacattaatacacacatccaagaagttcaatgaattcctcatagataaacataaagagatccacaccccctatatcatagtcaaattgttgaaagctaacaattaaaaagtatgaatgcagtgaaagaaaaacaacacatctcatacaagggaaccccaataatactaacagcagacttatcagaattaatgaagaccagaaggcagtaggatgacattcaaagtactgaaagcgaaatgttcaaccagtcatcttacatccagtgagagtttttctaaaatggagacaaaagacagacatttccagataaacaaaaactgagagaatttgttgctaaaagacctggctttcaagaaacagtaaagaaagttcaagttgaacgaaaatgatatggtaatttgagatcacatatacaaaaacaaggagcactggtaaacattttttatctgcacaaaacatagtataattacatagttctcttaagtgatagtttgtggctgcagtgagctatgatcgtgccactgtactcctgcctgggtggtagaatgagaccttgtctctaaaaaagaaaaaagacaaaagtccgtgaacatctcaatagctgtagaatccgcagttaccaaatcgtatacactttagtgacacacacacacacacacacacacatacacacacacacacaaatgggactagaagggaacttcctcagcctgatagcatctgtgaaaaacccagggctcacattgaagactggatgtttttcaggaaaaagacaaggatgttcattcttgttacttctgtttagcaatgtgctagaagttctagtcaaggcaattaggcaagggaaagaaataaatggtctcctgattggaatggaagcagcaaaacattttgcagatgacatgatcttgtatgtaagaagtcctaaggaattcattagaagaaactattagacgtaacaaggaatctaattgtatttctagacattagcaattatcattgtgaaaatgtaattaggaaaacaactccctttgcagtattattaaaaagaataaga

SEQ ID NO: 2812 - DNA, 1059 bp, Homo sapiens
aaaatagcaatctgttatactcaacaacaatatggattttacaggcaaaagccattataaacaaagtgtttccatttatgatgctcaagaacaggcagaagttatctgtgacgatagaagttagaaggagacttttgtgtgggggagtattgaaggaggtataaatggagccttcaggagtgctgataatgtcctatacaatgatctgagtgatagttacaatgatgcatttgtaagcaataattaaatgaactctatacttgagtttcgttcactttactatagaataacaatattttaaaaactaaaatttcttaatagtggccactttagaaaaactttttattgaacagcaaaacgctaatttgagactctgggacaatagagttgaagatgtcttcagggataggaataatgaatgatttggctattgttggacgaggatgtgatagaattgtttgacacaatatgataaatttcttcaaatggatttgttaaagaaaggaaaaatgctaaatatatgatctctgaaaatgatgccatcagaaagaagactatttggtctgtaaaggcttaaaatcacatgttgaaatttttattctctgaaaatgagcatcataaattaactcactgacatgccactgtttatctctctttaacttccaaactctaggaggtctttgaagaatcagccacttgcttattcagtatgtcatttctaggaataaagattgtagactttcaaggaagctggacatgtcttcctccataggatagggtcaaatccagttttcatctttgtgtcttcacagtgctaaaagcaccagcatactctatggatggagcaagaaatcaaatcttgtccctataaaagggccagaaagaaacatcatgccattggccaaagagcaggaagtgaagcaaaacgcctgaataccgaatgaccatttactaaatcattaaaagtttattatgtgattctagtcaataaacatatgctcagtgattcatttgttttctgaatatttaacattttctctatcaaacttttcatctaaa

SEQ ID NO: 2813 - DNA, 1074 bp, Homo sapiens
tttcaaggagtttaaacatctgtgcatattttctttttgctttaaagagtggagacttaggatagttggtttaaattagaaaggcattttgttttaagagcctgctgatactgcagcattatagtgcatgttactgtgatatttttaaacaaactgtgaaatttagaaatgcaacctgctagaataaaaactttaataaaatatatacctaatgccattttgtttcttcatcggtttgtttggaatcactttggtgtattttcaactctggattttttttttaattgtattttttttttttttgtcaaggtcatcctaaatgtttcagctttttctaagaaaggaaaagttaatataaataagaaattgagtttctaattcttttaaacttatccctttaaagaaaaatatcaaaaagcctaagaagttcccttggttttttgttagcaaattcctgtgctgtatttagtgttgtgttatggcagaggtgtgtgtgcacatggctctcagggactgcctacagcagaggacaagtgaactttggagtcggacttagctgacaggaaatcccagcctgcctctctggctttggtctttcagccatttttcatactgaacatcattcatttctgtgactcaatacataatagttattatttttacagatgtgatttatgcgtgtcacgctgctgggacatttaattactctattcaacttgactgtatttagaaaaggctatggcgctactcctcttgtttaacagcttctattctaagagaagaatctaaccattgattgggttggatcataagtgtggctaatcttgtaggctaggtaggtatcattttctttattttagtgtgccttgctttttttttttttttttttttttttttttgagacggagtctcgctctgtcgcccaggctggatctcgcctcactgcaagctccgatctcggctcactgcaagctccgcctcccgggttcacgccattctcctgcctcagcctcccgagtaactgggactacaggtgcccgccaccacgcccggctaattttttgtatttttagt

SEQ ID NO: 2814 - DNA, 1949 bp, Homo sapiens
agttaagatttaaaatgactgctgttttcatgaaatagtatcagacagttcagaaaaggctcatggttcctgattctcattgggtcaaaaatctagagatgaatttatctttccaaagtaagaaaactgaatccaaatcaaggttatgagatagccaacaacagtatgtctaaagagttcttggagaaatcacactttgtaaattcccaaggggcaggagttggccaatgtatgggttgttctccttcttaattttagatgtttatttcttatcgccttctattgtctctgctgttcctcttgttggaataaactcaagtgattttacaacatcataaatataactgccggttattggattacaaaataaaacactagcacctggcatttgcaagacattttatgctttgaaaatattttatactttaccgaatttgtttatctcaagttatgggaatattgcatatggattattaactgtattctacaggtaggaaaatttagatcttgaggccaaggagcttgtccaaagttacatggatgctaatttaggcaaagacatgtcctgaaatatggatctcctactctgatacagatcaaatcattggaaatcttgagtttgggaattgttctctttgcctttccttctattcttacatctcttgttcactttggatttactatttcatatttacttatattctcctggtcattagggtattcttgggtgcatttgatagctcttattccttgaatacattgcatacctctggatataccaccttgtgctctaatgtcgtttgagaaacaacagttttcacattctgaggttctgctttgaaatttaccttaattcatctctatcgttgagtaatcttatctttttctcttcagagaaagatttgccttattggatctggccatttatcccttatttaatgtccacttttcagcaaggtcatgacatgccatttcagaagaaagcaatatgctcttttaactaggaatcaggaaactaaaacttttgttgtggctctacatttagactgtgtgcaaattatttactagcttgtaaaaaattgtgagattttactagcttataagaaattgtaagattttactagcttgtaagaaattgcaagaaacttcaagttatctctattggatatttaatgtggagctctttgatgtcatcttaattagctaatattccatgtgacacatataaaatgcatactatgtttaaacttccgaattagcaataaacaccatgttgactgatcaaataattatttaaatgtggttttggctacttgtgtaataaatatagttcacataaactttctactatgtcttgatatgattctaagttacagaagatattatcttgcagttcttgaatttaatagtagaatcacagttcaaccattattcaaatacttccttttcaaaagaagtattcagtggttcccaaatctgcaccagcatcagctgtggtatttttttaaaacatacatattccagggccctactctagagaaaattgacttttcagaaggttgagcaggatcctttatttaagaaggtacctaagtaattctgatgtctagccaaggttggttgtctaaccatttttccaagtttattgtgggacatctaagctgggcatagcagtttaaacaaggtttacttattcagcggacatttttggatgcttacaatatatcaatcattgtgctgagtactacagtaagcaatatgacacagagtttgtctagaggtaattatactttagtgaaaattgcccccaaatcactttatcatgtatatgttgcagtaggagagtatatagtctcaaaagagtaaagaagtggctcctaagtcagctcctgtaagagttctgtgggaagtacagggatgttcaggagaagcatcacagtggaatgaga

SEQ ID NO: 2815 - DNA, 1111 bp, Homo sapiens
tcatggtaaagttttgctggtgatgaggatgctaggtgggccagtcctcaatcactggcaggtgcttgaggtggcagtggcaggctgagcatgcctgtcctttggtcttagggtggtgtatgctggccctgatattagcaggttcagtcaggccagttggacctccaggtggcttgcttgggtgccagcagtggaagaagtgggctgggtggctgggagggtccttaggctcctaggcagtgggcatcgtgctgagggacgcagtagtagtggtgagacaagccttaggctcccaagtggtttgcgctggtgttgcagtggctatgacaggccacgcggggcagtctcaaggcttgcaggtggcatgggtgagtggatggtgtgggtgggtgggtgctagctgtggtgttagcagtaggttgggtgggtttgtcctcaggccctcagaaggagtgctcaggtgtcaatggtggtgaatggggcagggccattcccaagcctctgggtggtggtcttgggctctgggggagtgggatgggttttaacatggttaaatggtcctgttctctggcccctaggtggtacgtgtgggtgctggctgtggtaagtaggataggggtggaccccaggtcccccctacccctggcagaatagctggatgggggtggcagcgactgtgtggtggccctgaggccctgctgctggggagggtggagttaccatggcagcagttgtaaacaggtgactgggggagcttgtgctgtggctccatatggcggctgcaagaggggtgccccatcctcagggtgctcttaaatgcacagaggccttgttgctaggggcagcagggtcgttggcaaaggcttgtgctttggccctggctgcggttggaggatatcaggggagccccggggatgtggagatgcaggggctattgggccccaggccaggatgcagtctggtgggggctgacatttcaaaacagtgccctcctgtaactgcttgtgacacagcaggtgagtggaactcagtgcgcgctccctctggaggggtgccgctgcctgatctccgggtggctcccaatgttagcctcagggcctgtgcaggccgc

SEQ ID NO: 2816 - DNA, 1021 bp, Homo sapiens
tggtaatgttatttcaaacttagagtttctgtgtaaaccgaggttagtatatatcccgtaagtgtgatcaagctatctcccatgattgtttctggaaggattactattaatttgcctgtggtgttatttatataccttactaacagtctaattatcatgtgacattattatcttagttcaggctactataaccaagtaccccagactggtgggtgataaataagagaaatttatttctcacagttctaggaggctgaaagttcgagatcagggtgccagcatattcggttctggtgagggccgtctttcaggttgcagactgccatcttctccatgtatcctcaattggcagaaagaaggaaagagagctctcttgtgtctgttttataaggggactgatcccacgcacgagaattctacccttgtgacctaatgaccacgcgacctagtgaccaccacctaggatcctgtctccttgtaccttcacatgggagtgaggtttgcaacatatgaacagaaatattttctgtttggaattagagtggttcttaacattttataaatggctttagtgtcaatattttaatacttggattctactgtacaattgacggccattcttatgccatatcctcctatgatatttatgctgagagatactgcccaaaggtgaatagagtaatgaagtgtaaattcagagtgtcccttaagctgactagaacctaagaatagatttaaagcagattgaattatccaatggaatgccagtttacctattaaagaaatatggtttcaagaataacacagaccttataatcacaaaagcatttaactggctttctagcttacccctttatgaatgtggattctatttgttgggcttaaaatcttgtgtgggataattcataaatagcacaagcttggtatgccctgtcaattgatgagtaactcttaatcacaatttaagtttttattaaattgttttgatggggaggagacttcctcaagctgaaacatttgg

SEQ ID NO: 2817 - DNA, 1039 bp, Homo sapiens
tgtcaagagcagtgtaagtattttgcatgagtggacgtaagcacattgaggagtcaaggttttgtttagtaatgggtttgaatgtaaagcagttgtaaaaaatatttatgttcctaggtcaaatgcttctttatgttctgagctagaaaaaagtaatgtccatcagatatttgtgattttgtgattaatgtttcctaaagtgaataattttcattcttatgtctaatgtataattacaactttttaatataaaaacaatacaaaataactttttatattgttttaatataaaacaataatttcttttaccatatctttcccatgtctgctaatatttatccttttggaatctgaaggctaattattttctatgaattagacagtatatctttttttctttgtcatgttaagcaatgaaggccaataggtccatattttgaaaataacacaatgatgagtaaaatggcttgtaaacaaaatataaaaggtgattctactctgctgcatatgattttctccttgatactggtgtgtagggggatgtctaagctctcttgcagacctaatcattttttggtactacttctgcagttgtgtttgtttgaaattaatgtctaagcaattgtgagagtgccagtagaaatatgaggttaggaatgatggttagagtcacagactcaagtctgagacggtaaacttaaaaaataaaagagttacatttctctgataaaaaaatcatcacacaaaaaagtaggataaaggaaattctggacatgtttttgaaatattaagtttaataattggcttgtagaaataaaaatatgtaggactgtccttcctagataatgaaataatttccttcatgggggagagagagacttttaaaaatcttttctgccagccaacaatttgtttattgttttatatacagatgcttctcaacataaaatggagttatggcctgataaacccatcctaagttgaaaataccataagtgaaaagtcattcaatacatctaacctagtaaacatcaaagct

SEQ ID NO: 2818 - DNA, 1047 bp, Homo sapiens
catatggccacattttgtttcccagaggcaagttgttataacaaggtttagaaaataggataacgtatagaaagcatttatctcaatacctttcatacaataaatatccaataaatcttggccattcataataaggtaaacatagaataagcagtgggattagtttgataaagacagttaagcaataatcatagtagctcatctgctggctctagcacttctgtttctgcttagagacttgatttttatttctaaggaaaggctgaaaaataatgtgttatggctcagacattttaatgagacgactgaatctcattttagcattttataataacatccactgtgtttagtttctctgctcactcccaagatttccatatttcctcagggtgcttccctggctttctgagctcagcgacttgtagttcgttaagcaacctgatctgcttttgatctcttctggctgtcagcagcttttcttgatgtagtcatgccaaatgatgactctgttccagtgcctttcttgaataggaattgtagcatttgccacatgacttaaatcaactcaacatgcacggagcattgagtaattaagttaccggaactggatgagaatgttctcatgcaaattcttctctgtatcctctttctttctgttcttcctccctgtactcacacactctctctcttttcaatatctgagttgaaaacaagtttaaaattcatcaactataccttcaagttgaagcaatgtccattttccagagatttataggaaaaaccagccctcaaactagtttagggtttattttggcttacaactactagtttgtaactattacatttaaattgttcatttctgatatttccttttttccccttatgtttgaggacaggaaacaaataagcttttttaaaaataacattttacagtggtccttcccacctatccaaggttttactttccttggtttcagttacccacagtcaaccttgatccaaaaatattaagtggaaaatttcaaaaataaacaattcatatgtttt

SEQ ID NO: 2819 - DNA, 1023 bp, Homo sapiens
gcaactctaagctgtgattaacattgattgaacttgtagacttgtataaattattccaattccctactcaaaaaaaaaatagccagactcttcatgatcatggttcattccagggagtggcatgtcatgtccttgctttaatctgacagtgataaactggtgtttgccccacaacgtgccactctgtggatggcatggatgtattggaacccattgtctggtgggaatgtctgacatttttctttctttcctctggctgggttattctttgtatttggaaacctaatgcatgctttctgatactagcccttcaacatgatataaaatctttttgactcagagaagtctttaaattaaacaaaagttgagatgattggaattactcggttatgccaacagtctcctaacaaatgttttttaatatttggatttgactgcaatgcaagttttccaggaactctatctttgttctgtttttaataatgtttctaaatgacccttcaagtttgtgagattgtagtgttcggtattttttttttttatttacatagtcacataccaattttgaggatgataagtaatagccaagatgatatgttgtgcaacttgatgtgctacagttaagagaagaatggtgtccagtcttctaaatatattccttatatgtaagcacattgagcatatttatatgtggcattgtgtatgtacaaaatatatgagagttatgaatgtagaaactctagaacgtgacattctatttttacatttatccaacaggctcttccttcttaatatagtgaataagtaaagcaacaattaccaagaaataactgtacaggttttatatcacactgagctttggaaatttggatgtgagttttggtggtttacctcagtgaccactggagacttaatatccctattaaggaaagccttggccttgattatgggcatcattgaaagcactttctttcatacagggtcttagtacttcctctgcatttcagacacttgacacacaga

SEQ ID NO: 2820 - DNA, 1477 bp, Homo sapiens
ttgaaatcactgaaacttataattatatcaaagcatttactactcaaaatatttcaactttggaatgttccatctcttctaaagatcagatttatatcatgccatgctctgggaaagttcttgctgtttcaggaattctcctagaggctgacatggcttgagactgaggccaagaacactctgaagattggctccatactttattttgttataggttgttcaagtgtcattaatgatgatttaacaatgaattagtcatactacaatttgattaaatgttaggcacagcttttttaagatgggaaaatactatttaatcatttaagataattgtgaagattgaaacagaactctggtgaaattcataaatcacgttgaatgtcattttcaaattctgaggtcttcataacttagagtggaaaatctactcattgattcttaaccgaaatcattagtcctgtagtaaatattagggaacattgtaaactcatcccactcttagtagtgaataaaagtgaatcatgctttttccatctagtggggttgtggaatcaagaatatgtagcacattttttaaaaatgtaacaggaaataatataggtaaaagcatagaatattcatttttgtcttataagaagaaaggaatccttaatcctaggaggatttattcaaaaaagcaatcaagcaatttgctggatttcacatccaaaatataaacaaatgtcactcttattcttggtcacattatatgtgatttattatataatattttgaatctgcaatttatagaccaggcattgagactagtgttttccatactgaatagtgaaattatgttttgcaacacatttggaatttaggaattgtgctttcaaaacacagatgatcagccgaatatgatatctctggtagtcatttataatgatttgaaaggcagttagaggtgtttaggatttgtctagtagttccctggtaggaaagacgggattgcccagtcatactaactgtgtaagtaagtatctcttcagattttaacaaccttacgggttttttttttttttttgagacggagtctcgcactgttaccgggctgatgtccagtggtgtgatctcagctggctgcaacctccacctcccaggttcaagtgattctcctgcctcagcctcccgagtagctgcaattacaggcacccgccaccacgcccggctaattttttgtatttttagtagagacgggttttcactctgttggccaggctggtcttgaactcctgagcttgtgatccagcctcttcggcctcccaaagtgctgggattacaggcgtgggccaccgagcccagccaggaagatcttttaacctccttgttatgaaactcagatattaactttttttttaatacttctccatgttaaatgaaaacaatgttgtaaggatactaacctatatactgtattcttagaagtaggaaatgcttc

SEQ ID NO: 2821 - DNA, 1049 bp, Homo sapiens
ctctacaacagtatactgtcattctcccttctgttgtttgtgctattgttgtcatatattttacatctacatatgttataaccaaaacaatatattgctcctacttgcatttaagtcattatcttaaaaaaattttaaatgacaaaattgtattttatattcatcctcataattagcatttccagtttatttcactcatttgcatagatccagcttttcattaggtatcatttttattctacctgaataacttccttaacatttctcattatgtagatttacaggtggaaaatttatttagccattgctttcttgaaattatttatttcccatttttgagagatattcttacagaatgtagaattctcagttaacaggttttttttttttctttctgcagttaagatattgttcttttgtcttgtgtttgcatagtttctgacaaggaatctatattagttttccgttagtgctgtaacaaattaccacaaacttcatagcttaaaacaatacaaataataaatttgtaatttcttcaggtcagaaactcaaaatggacaaaaattatattagcagtgctgtgttccttctggagtatctaggggatacatttctttgcctttttttagactctagaagctgcccacattccttggtttatggcttctagctatcttccaagctagccatggctggttgaggttttcttgtgatgtatcactctgtcgctaactctcctacctttctctttcacttacaaggacccagtgattgcactgggacaacgaggtataatacaagatgagcttctcatcttaaggtcagctgattagcaaccttaattccatatgcaatttaattcccccttaatttattatattatattcccatgtaatatatttacagctggggattaataaattaattcccccataatttattatattatattcccatgtaatataacatattcatagctggggattgggacatggacatttttagagggccattattctgcctaccacaaagtcttgggaatttatatt

SEQ ID NO: 2822 - DNA, 1065 bp, Homo sapiens
agggcgtccatttcgtgtctttgcttactcatagccatttggaacaagttcagcagaagtatttcacattgcgaaagagtctggagccagacagcgactacagacactaatcactgggtcaaaatagtaacttagtaggacagcaaccaccagaaagtatttgtggaggtagaaatgtggagtcggatatattagtgccgttggagaagatatcaccaaatgcaaaaatgctgtaacagaaccattaaatcactatttgtaatcagtttcatgttcagtggcacaggactgtctgagccgatggtctctttggtaggatcagacctaaaaggtaatcttatgcccttaactctagaataaatagatggaaagagaattaaccaaataaataaaggctgcctcctaaaacatttggtgtttcttttattgtatggttccaagtacaggctttctttgcctcaaactgcagatctctagcatttgagatttgcggggtgggcaaaaggggaaacatcattgctaaaataataggtgcagcaattgatcaacttccctaaggagctgcaattttaggtctattcaaataagagttactggtattctctgaatattgtcattataaaccacttttcattgttgccttttttcttaaactacatcatcctgttcctttcctccagtgtcagtagagaattgattgctttattttactatcactctactccgctactacttctattttcagtagactctatctcggaacattttccttggcagtggatctcaaactccaagctatgaataattacccacagtatgtttggaataaaaaggtgagctttagaagaggattaagcattttttaaaaatcattcttttagatttcatcaggttctcactaaattcacatgaagtattatcttatcccttgtagcaattttatttactgctatgtctttaaaaagtggggaggggactaaggagctattagcctctgtgtttatcctgtaggcattggacttctccattctatgccaattaaaacaacttcacacacaaattaag

SEQ ID NO: 2823 - DNA, 1300 bp, Homo sapiens
cagatggttttgaggattccaagacatcagtggagaaagtaactgcaaatgtggtagaaatagaaagagaattagaggtagagtctgaagatgtgactgagttgctccaatctcataataaaatttgaacagatgaggagttgcttcttatgaatgagcaaagaaagtagtttcttgaggtggaatctactcgtggttaagatgctatgaacgttgttgaaatcacaacaaagaatttagaatactacatcaacttagttgacaaagcagcagcagggtttgagaggatttactccaattttgaaagaagctctactgtgagtaaagtgctaccaaatggcatcatatactacagagaaatcttttgtgaaagactgaattgatgtggcagatttcattgttgtcttattagccaccccagccttcagcaaccaccattccaatcaatcagtagtcatcaacatcaaaaagatattaagtcactgaagactcagataattgttaacactttttagtaataaagtatttgctaataaagtatgcattttgtttttcagatgtaattctgttgcatacttaatagactatagtataatgtaaacataacttttatatgcactaggaaaccagaaaattcgtgtaactctattacaatattcattcactttattgcagtggtctggaaccaaacccacaatatctccgaggttttcgtgtgtgtgtgtgtgtgtgtgtgtgtgtgtgtgtgtgtgtgtaaagaaagatagagaattgactcatgcgattgtaaaattggcaagtctaaaattagcagggcaagctgacaattctggtaggagttgatgttgcaatcttttttttttttctctttataaattttaacttttagattaaggggtacacgtgcaggtttgttacatgggtacattgcacgacactgaggcttagaatctaaatggttctgtcatccaggtattgagcgtagtactcagtgggtggtttttgagcccgtgatccccctgcattgttgagtagccccagtgtctgctgttcccatgcttatgtctatgtgtggtcagtgtttagctcccacttataagtgagaataggcagtatttggttttccgttcttgcgttaattctcttaggataatggtctccagctccatctgcgttcctgcaaaggacatgatttcattcattttatagttgcatagtattccatgatgtatgtgtaccacattttctttatgcagtccactgctgatgggcacctgggttgattccatgtctttgctat

SEQ ID NO: 2824 - DNA, 1041 bp, Homo sapiens
tagatggggttttgccatgttggccaggctggtctcaaactcttggcctcaagtggtctgcccgccttggcctcccaaagagctgggattacagggatgagccaccgtgcctggccggcgacatcttttatattcactgaacagatatcacatatttagtagttcttggcttgatataaaatattgtcttagcaaactagtaaacagaattctccagtttctgtgaaaagcaaaagctgaggtcaaaggcctgaaattataaaatcagaaatttcagtgagttgcatgaaaaaattactagcaaatgacaaaatcgttagtaaaagagccatcttttataattaaacaatgaaccccaaaattcaaaagtaaaaataagaataatgaatcatatgaaacatttgacgtttctccgaagaaataagtctgtgtgccattttctcagcagtcctatgtaaccggggcaacaatcagtagtaattctgtgcaggaaagcagtgtaactctgatcctctggccttttgagtctgaatcttatcttgcctcttacacatgatagctctatgaccttagaccaatcccttcaccccaggaaaatagtatctactttgtaggtgagaattaaatgatctctggcagatgcttagtcccaagtgatcaatagatgttaattgctatgttattttcacattatttttataatcagaaattataaaaagtttagtggtagaattagaaaccagagtcagatttcagactcgggcaatgtatttgtttgttgtcatgtttctcgctgtctccatggattgcagccctgggcagtctcggatggttatggagcatagattttggaatcagctctgtattttggtacctgcaccaaactgctggcaccatggctccgaggatttatctcaggttttgaatccatgtccttatctgtgagaaaaagaaaaacaatgtccacattataaatgtggtgatcagttcattacttaactgattaagtaggttaaatgagtaaaatatgtatgtcgagta

SEQ ID NO: 2825 - DNA, 1029 bp, Homo sapiens
aacaacatggcaaaacctcatctctactaaaaatacaaaaattagcctgatgtggtgacaggcgcctgtaatcccagctactcgagaggttgaggcaagagaattgcttgaacccagggagcagaggttgcagtaagccaagatcatgccacatgtttcaaaatagaagtctttttttttcctccaggagctaaagatatctagaaagattatatataactaatcttctgatgagaccgtaagatgatagtgaatttgtttaataaggaagcaaatagcacaattaaacttagagaattaataagtaatgtgctttatttggacattattatgtgataaagattggactgtatagtttaaaaatgtactcaatggatctcataggatcttttaaaaaatattcttaaagagaatacactacattccctctcctacttaaataatagcaaggcaattggaaacaaccagtaataaaaggcaagaaattgtaatggaagaacgcatatttgtagaagaactttaaatcacacattttaaaaaataaatactatttctgcatgtaatattgcttaagtggtattttagcaaagccaagattgtataacaaatgagttgaaatggaaaattaatctttcatgcaaaataaagacaaaaaaggggaaagaaagaaagcggaatgtgggttccactagtttcatacagtatgtaactattcatttgtcacaggagagaaaatatttaatcggttctgaactgatgcacacatactttatcatgtttagtgacttttagagtgtcagtttgtaaaatgtttatccaaggaatggacttctggcacatggataaaatgaaaagtgaaatgtttagttcataataggcatattttccagaatctttctgagtaactatccggagatgaatagaaagactacaggtctgtgtttatctggcttaggctggccgaccaggcaggctccagcctggtattaaaactgaagtgacatggaatgtctttgcaaaagccccaaa

SEQ ID NO: 2826 - DNA, 1061 bp, Homo sapiens
cagaatgaagttggtagagctagtcagtgggtggtttttatggaacccgatccatgggggtgtcattgcaaggagaagaaggggagttgggcttgggaaggagttatatacttatcggtgaggaagggtgggttaaaggctcataggagtgacatgagaactgaagagcatcctgggcagaattattttagtggctagtgccagtaggtggaccaactcatcatgaaatgttgtagctcagcttctgcatcttgacctctgagatatgttggccttaattggcttaggaaaggctaatagagatcctgacttacatttacactgagagaagggcttgtttcctttgggtgagagagaatatgagtacacacagttaaagaaatagaggggcattgtcaggctggaccagagaacatagaaactcagtcaaagtgccccagtagcttacaatggtgtcttcttggtgacattgtcttttcatgtttggacatcataggagatgggccctgtagattcggactagaagccaaagaatttttctttatgttataaactgcattcgtgccttcaaaaatgttaggatgccaaagaatctaattagcttgcaaatacttctatggtagtgcttgttctctgccttaacaactgccgtgaggctccttgctcactcttataagaaagatattccactcagtgtggcaatgctatgcggttttcaacatgccaggaatatcttacaaatatcgttgggctagtgaaacagagatttatccaagcactgaaggaacatttttaaaatgccaaatagtatgtgatgattattattttctttttttagcttcacaatctctgaatttaccccagggtgaaatttaggtttgtgtggacttggttgtggtgagtgcctcctacgtgagaaagggagttctgtcatagttctgattgtcaatgtcaccgaagctaaggttggatcgtctgtgccttttgtatctatatctaagatgaggaggggctgcagggctttggaggccttagccagctggctctccccatgttctggt

SEQ ID NO: 2827 - DNA, 1034 bp, Homo sapiens
atggtactttctagtgagcagatacccagtgaagattaaccatgctgatgctgaagaaccggctatagaattacagtgtggtcttggatattgacacttctagttcattcaagtttccatcgattaaaccacaatcatcatggcaaattaggatcatgtagcttggagttcttcggtttgtgtgaaaagctattgtatacaatttgttcctccttaaagggacatgtaaattgtcatcatcattatttaaatcattacatatatatgctatttcattttccagatttattgaggcttaattgacaaataaaaattatatgcataaggttatacaaagtgatgtcttgatatacattgttaagtacttatcacaattaagcgttaatatatccattaactttttgcggtaagaatacttaagatctttaagatctgttatcttagcaggttttaagtgtacaatacatattattattattataggtactgtgctgtacattaggtctttagacttgttcattttataactcaaagttataagtattctttgaccaatgtctccccatttctcatatacttattataatgtcacatcaaaattaaattctaaaattcttggtgttttagggcctatgattttgcaatttttaagagtaataattctgcagagccaaataaatgaaaacagcattacagctaatataattcctaaaataatgtaaaacatttttgttttacaattaggctttctaattataactataatttattaatacatagattagattatgaatacaacagaggtctgtctgcagaatccctttgaatattgtcttatgtgaagcctatgagcattttcatttcatttcattctatttcgatttactttgcttttgtttcctaagatctgtaataaaacacctaggatcccagataccttgaatgtctttctaagtctgaacactttaggtaatcaacctcatctgtcattttatcttgttggtaatactaaacattccctaactaatctttta

SEQ ID NO: 2828 - DNA, 1086 bp, Homo sapiens
aatcctatttatataatagaatcaatctcatactctcagctgacaatgaggggtatttcattttttacttgtatataagattccttttatataggatgaaatgcatacacactctgcatagaaattcttatgtgtttgtatattactccattcaatcatactatgattccaagttaagaactcctagataaattagcgtctgtagctgtaacagttgaggctttcaattcaaatgtcagataacattcttctgtgtattgtattattttctgcagtaattcaaatctttattgagttgaggtttgctcacttactataaggtagaatgaggtgatctaagtaggttttgtttaaatacatgtgtcttctccccatcagagtaaaagaagccgaagaggtgtgtagacagaagaaaggaaaatcactttataaaataaaaccaagacatgactctggaattgtaagtattactgatttttaacttgttattttctttggcttttaaatcctattttcataatatatacaaactcataatattttaattatttttctactaagtgtgaataaataaggagcttctgacttcaagaatctcctttttcttatgcctttaatcaggcccagaaggctaagagtcttgatattgattattcaaaacttaagaattgggctgggggtggtggctcatgcctgtaattccagcactttgggaggccgaggtgggcgggtcatgaggtcaggcgatcgaggccatcctgcccaacgtgatgaaaccctgtctctactaaaatacaaacaattagccgggcatggtggtgtgtgcctgtagtcccagctacttgggaagctgaggcagaggaatcgcttgaacctgggaggtggagattgcagtgagccaagattgcaacactgcactccagcctggcaacagagtgagactttgtctcaaaaaaaaaaaaaaaaaaattaagataaatctactgaatctactgagggtgtgcatttatgtggatatgtgcatgttggcaggggcagggtggggagaccatctttcactttctttgttacacacagatcacggca

SEQ ID NO: 2829 - DNA, 1074 bp, Homo sapiens
tcatgggatcaaatgcgataatacctgttgatcatctagcacagtgtctggcacacgagaggacctatgcagaggttagttcctctctttcctcaatttcttgaaaaaatagctgcagccatacctgaagtaactctttttctctgaaactattaaacggaaaatgcctagagaacatggttacccagaaatgccaaatatcagtactctctgccagtggtgccaagagcaccattaaaatgcttttctgaattcggtaccacttctgagtgatgctgagatgattcacagtgacatgtataaagctggcctcctttggcctctttagaagaaagatgttaaataaaaatgaacaaaatttcattcataccattctccagcagaaatgccacatttaagctctgtaatgtatgacttttttccttatggcatatcccaaggggtgggtctttagccatgttccgcaagactgtgcctgtcaccaaaaatcatgatgggacaccatccaggacaacacatgttaaagaggtaagagagactggacagatgtaaaacatgagctgctcccagggacagatttgaagagacagcagcaggctcttagagcaaacttgcttaaaaagcatggtcatcttaccttgctcatgagttgaatttaattatgctgtaatgccactgcctttttcatttctctaatgcattatcaaggacagtcagagccatttagcaatctacagagcccttcagtgatcaagaattgaataatggccactggcatggagagccaatttggagtgaatgaaaatgggccctttcagcaccccaggtgaatagaataagaggtcttcatattttgaacaaaaaccctcaaaggcctgtatttataatcttattcctaccatagatgagagagcagcaaaatcactgaccactgacccttgatcagtatgcaagatggctgctataacttggctatttgtcactcccaaacctcatgttgaaatttcatccccagtgttacaggtggggcttaatgggaggtgtttgggtcctgggtatgaatccctcatgaaa

SEQ ID NO: 2830 - DNA, 1038 bp, Homo sapiens
ccctagagaaactctgtgcatattgggcaggaagaaatgttataaagatatactctgaagcattgtttattatattatagtgaaaaacaggaaatggacctccatcaaaagggaaaaatgtgtaaataaactgtgaacaaaaggatggaagcactgcttggattcaccttaaatccctgttggtgacctctggggaaaggaggtaaaatggaatggaggaaatacataagtgtgaattttatctgcaatattttaattctttagataaaaacaaatatagaaataccagtctttgctcaatgggtagtagatacatggacccttattgtattattatttgcatttttctgtatttaaaagcttttaagtaaattacaaaataaaattcactgaggatatggaggtgcaagtagtagacaatcagaagactggctctttgaagaaagaatacagacagtcataagtcaagggacaactggggatggtgactcgacttgtcaactgatgggaatgatccagaaaggagagttaaggctgtgaacaagaggtgacagctaaagttttatattccctgcacatctgtgtgacaaatgtgagttcaattttgcaacctcaccttgggagagtgttgatgaagcaaagggttttatagaatgagggagtaatgcctcagaagcagcagtgatatttaatgagtcacctattctactacctggtactggggtatacctggtgttaaggaaaacacagctgggacaggtgggaaagtagggttcttgggggcagccagggttaagttaaaggaaggaggtagagaaatgttcaaagatgttgaagttataggggagtgtacggctcatgaagggaggatccagtggaagctcaggattggaacagatcaataagtataatgggtcataaagagatgtgagcccaggcatggccaactggaaaggttttcccttctggcatcaactgattttcgcagggatgtgaggtactatgggatcagttctgatcaacttctggggagaggca

SEQ ID NO: 2831 - DNA, 1048 bp, Homo sapiens
atcttttgctttttacttttctatctggttggtacttatgtttcaacagcaggggtcattaccaatgttatgtatttataaaatgagaacagaacaatgtacagctcatttctccataatacttcacttaaatcattttaggaaattaactgtattattaattgcctaaaaacaagactccaagcacctcctcagccatacattcccccaaatttttcctttaaagctggtaaaatactgcaatggttacacaagctttaactgtaaacttaacttacaaatatagtaaaattaacttatagtaatgataaaaaataaagtttccccatactgggtaatatttacttttatgtcagagatgaatacggaacaagtaagagtctcaaatgagcagcaatagagaactcaagggctttaattatatgatgtataataaaaagaaatggcataaaacacactgtactagtatcctcaaggattaaactataaaatgcctaaatatgtatctcattctgactgaattataatcaggtattcatcttcctgctacactttgtcaaccctgcacctctgaatccagtcattcctctgatgtgtatgccttaatattaaatagttgtccagagtgtattagaattaaatatatatttagcaacaagcaaatgccaagaatcataggacatcagcagggaccaatgaaggtattatatataaagattttaagctcgacatatcagaataaagagatcgtttttctgatttcaggagtgaacttaactcccttctctttcaatcggagttggcccattttattataattataaaaactgtaatttataggattatttcgctatttgttgaaaagccaatctaaagttccagaagccaccactttttaaatagtgctttatgtgttacatattcttacatgtaataaatcactcttgagatgcaagcaaagcgaaacagtagcatttcatttctcattaatgggtctcaatacaaagtaggagagtccaggcaagtcacttaactcctccaggtttta

SEQ ID NO: 2832 - DNA, 1034 bp, Homo sapiens
caccagcaccatgacagtttacaaatgtcatggcaacgtcgggaagttaccctacattgtctaaataggggaggcatgaataattcaccccttgtttagcatgtcatcaagaagtaaccataaaaatgggcaaccagcagccctaaggggttgtttatggagtagccattctttgttcctttcctttcttcataaacttgctttcgctttactctgtggacttgccttgaattctttcttgtgtgagatccaagaaccctctcttgggagtctggatcaggacccctttcccataacacggccatcacagcatttcctagaggccaggggtcctggccatgctaaccgtgtccatcattacggccactgaagtcatccggcagtgatggctggaggtgtttgcttcaggtgttggtcctttcatttcatgcatgccctccaaaaggagacgtgtggactagcagacagcattcctctggggacccttcaaattacctctcagtctctgacttctgtgatcgtttgctggagattttctcaagtgagaatctcctgagttcattgtattagtgcatttctggtaatgcctaaagagagaggtagaggaaaacgaaagctgaaacctgtcctgcttttgtgcaatcagtattttgtgcagtcacctcttatggggaaaatgtcatccctgtgtgggaaaaaagagtgggaggaccacatgaaggtgagttttcatgccaggttggttggagagggatcacactgcaggccaggagatgggtgacccctgagacccattcatgcaatgacccacatttctctttctcccttaagaaccctgtctataatcagggacacgcagaggttaaaagtacggactctagggccagactgacttcactcaaatcccagctctaccacttcccggcaagtggcccttcattatcaggcccccagactatctcatcagctccatcccctccgcactccccctcttacccagctaaagtggcttgctttccatttcctggaggaaa

SEQ ID NO: 2833 - DNA, 1028 bp, Homo sapiens
cagtgagccgctgtctacccagcgagacggagagctcaggacgcaaccctatgagttggaagccgcaggaggcggaaccgggttgcgggatacgcgttgacgtcacatcctctgggcggggccgcaaggaacccgcgcaaattgaaaggtcagcctttcgcgcgctgtgtaggcaagttacccgtgttctgcgttgccggccgtgggtgctctggccacagtgagttaggggcgtcggagcgggtttctccaaccgcaatcggctccgctcaaggggaggaggagagtcccttctcggaaggtgagaggagcgggctgtgcggaggctaatgggtgggttcccttgggggtcgacctgcgcgtcacctccgaccctcctctcgggattcgggtcttccaggaagggaaggagagggtctggcgtgatcttcccaacccaacagcggagcccttagcctgagtggagtatgtgttttgttccgaggggacgtctggcaaccagaggtctgcagttcagtgaacggagggagataagagagcagacgattccgggctggagcaggcgccagggttgccagacttacctcatttttccgcagaagctggcagtccaggttttacatgcaatctctccacctttaaatgttgacaagtacattttcccataatattttgcaggcctaaggaaacgtgtcgtctggaatgggcttgggggccacgcctgcacatctccgcgagacagagggataaagtgaagatggtgctgttattgttacctcgagtgccacatgcgacctctgagatatgtacacagtcattcttactatcgcactcagccattcttactacgctaaagaagaaataattattcgaggatatttgcctggcccagaagaaacttatgtaaatttcatgaactattatatccgttttcctcggagtgagagaaaactctttttagatatcatctgagaggtaagagactgtttttctgaaactgtggcttgaggaccacctgcatccagatt

SEQ ID NO: 2834 - DNA, 1018 bp, Homo sapiens
agatgtcatctcttatctttctcagaatatgataattttttgaacgttttcttccgctctctgtaactgctgtgtacctttttcctgtgttgatattttctccctcatggtggtaacttctggccagtcatatttgaaggggccccgaaaagctcatggggaacattgtgtgaatgagtggggcttatgatgttggacttcattcttggatgatgtggttggtaacacattggatttgatttgtgaattctccaatgttggaatgttctctgcacagttacatttttccaaaaagagatgtctgcttagggtatctaaactttggctgtctgtattttgaaagcaggatagggaaagtgagttggggcaggccaggaaagggtagcatggttccttgccattcaatatttagccttttgtttcatctctgttttcagacaaatgaatctatcttcagaaatgcctgctatgtctgttactctttgtgggtttcaaaagttcaattgttctggttctgaaggcaggtagatgtttgttgactgtatagtcaggttggagatggggacacagggtcaaataattctctctttcgttagtcattcccccaccaggggcttctgtaattccaagactttaattcttgagcctttctccaggtttctgtaggtggaattggcttctctttgatattctcttctgcagacaaagtcttttaatttcttccatctatgttctatcttcaccgtggtttagaagtcacagattatctcctaatttttttgcaggttaattttgtgtttcttattgttttgaggaatgattatggaaagaaggagactgaaaagtgctatctttacacagctgaactattgacagtatttatcatttctttctttctttttttttttttttaaatttgagacagggtctctttctctgtcctccaggctggagtgcagtggcaccatcagagctcctgggctcaagcgatcttcagtaactggcatcaagcctcttg

SEQ ID NO: 2835 - DNA, 1027 bp, Homo sapiens
tggctgtccttctctgttagaatatcattgacatcctcttagcagatcattgtcttccaaaatttgtagtaattgtgaataacttatattagcattaaaagtgattgctttccttttttgtttgtttgtttttgagacggagtctccctcggctcactgcaacctctgcctcctgggttcaagtgattctcctgcctcaacctcccaagtagctgggattacaggcacacgccaccacacctggctaatttttgtacttttagtagtggcagggtttcaccatgttggcaaggctggtctcgagctcctgacctcaagtgatccgcctgcctcagcctcccaaattgctgggattataggcgtgagccaccgtgcctggctgctttccatttaaaagacaccgttttcctgaccacatttcttcagttgtggtcttatttcttgcaccatttgtattacgaagatttttatttatttatttatttatttacttttaatcttttttttctacagctgctagcaactcttgattttttttttttttttttttagaaatgagctaacaaagttgcttgactctcatcagaagaaaaacaggcctaggaatataagacacatttaatggaaaagtataggaccagcaaagtaggaaatgttattcaaggacagctgtttcatcaacagctattgtttttaagggtaacttaagatgtttatttataatttatgttgatacagaaggaaataaattgattattttctttctgcaaataatctttttccttttccttttctagcctgcccattcaagaagtcatagttgggatgacaaaacatgtcaaaagtcagctaatgttagcagcatttggcataggaattactctcccagaccagagtcgggtactgtttcagatgccccacaattgaaggaaaatccaagtactgtgggagtggaacgagtgattagtactaaagggttaaatctcccaaggaaatcatccattgtgaaaagaccaagaagtggtac

SEQ ID NO: 2836 - DNA, 1050 bp, Homo sapiens
ccaggcttggcaacacactgagaccctgtctccacaaaaaaaatttttaaggccgggtgcggtggctcacacctataatcccagcactttgggaggccgaggcaggcagatcacttgaggtcaggtgctccagaccagcctggccaacatggcaaaaccccatctctattaaaaatacaaaaaattagccaggcatggtggcacacatttgtaatcccagctacttgtgaggctgagacaggggaatcacttgaacctggaaggcagaggttgcagtgagcggagatcacgcagtgcactccagcctgggcgccagagaaagaatccatctcaaaaaaaaaaaaaaaaaaaaaaaattaagaaagctgtcagctggttattctccaaagctgcagcttctctgctcaaagggtcttactagttcagaatacattatcgtaaaacaaaaaataaatacaaaagaaattttttaaacattagtcaaatgtggtgacgtgtgtctgtagtcccatctattcaggaggctgaggtgggaggatcgctcgagcctcagagttggaggctgcagtgagccatggccacatcactgcgccccagcctgagtgacagaacaataccctgtctcaaataaaaagtaaaaagtctattgagagttagttaaatccatacatcaatttggagaaagtggacattttaacaatactgagttttctgattcattcatttaagtctttaatgctttgtagctttcattgtacagatcttaacatatctgttgtcaaattatctttatatttcgatttttgatgctgctgtaaatagtattttcagttttgttttctagttgttcattgatggtatatagaaataccattgatttttgtacattaatcatatatttgcaaccttgctcacgtcacgtattagttctagtatctcttttgtggactatgtaggattttctatataaatgactgtgtcacctatgaataaagacaatcttgcttctccttttccagtttaaataccttttatttctttttcttagta

SEQ ID NO: 2837 - DNA, 1028 bp, Homo sapiens
gaggtaaactatcatacttccatacacaatagaagtgttttgtttgtgctttccattttgtcacagaatattaaaaagtataccaaagaattagctgagcgtggtggcatgtggccgtagtcccagcttctcaggaggctgaagtggcagaattgcttgagcccgggaggtggcggttgcagtgaactgagattgcggcactgcactccagccagagtgcaacagaacgagaccttgtctcaaaaaaatttaaaaaaaaatgtaaagtataccaaagggttgagatttaataaaattaatgatttgtactgcttccatcaagaacatttttgagacttttttttaactgcaagtgcgcagaggtggagaatacaaatagtcctggtatgactcgtacggtgtgatgccactgtcttgattcacactgagttgtcagcagtttcactctgttctgctttagcaacatccatgcaagggtcagcacagtggaaaggatgaacaaagtctgaatattgtaagaatagttttggtcttggaaaccgttcaaaggatcttgggactctccaggggttgtggaacatgctttgaaaactgttgctagacagaaattaagggtgcaacagtattcttaaatacctttgagaaaaaaagatgtactggtatttaatttttgttgacaggagatagaattacctgtaatatcttcataacaggattaatttttatagatagcttccttccagaaaagaaaaaagagaaaacaaccgagaggggaataaaagacagggcttaggccaggcacagtggctcacgcctgtaatcccagcactttgggaggctgaggcaggcagatcacttgaggtcaggagtttgagaccagcctggccagcatggtgaaaccccatctgtagtaaaaatacaaaaattagccaggtgtggtggtgcacgcctgtagttccagctactcgggctgaggcaagataatcgcttgaacccaggaggtggaggttgcagtgagccaagatcgt

SEQ ID NO: 2838 - DNA, 1033 bp, Homo sapiens
ttatccagtttttcttgttactaatgtgagaatgaatcttttttccagcttcctccatcctaggcagaaataaagtcccaaatctttgttttttaacgggtcatagaggacccatcatcaccctttattcattccttgatcatctcaggctagagaagtctagggatacagctatatataacatgaccagaagaattaactgggccgtagcataatcacatatttgaaacaggtaagtgagtcatctgtggctagagacaagtcctggtcacttccctattctgccccaatactcaacttattacattcagatgttgcttaatggctagatgcagctttgagggtaatgcttctattaaatatgtcagttcagttttacaatggaaaattctgaagatggatggtggtgatggttgcacaatatgaaggtacttaatgccacttaatcatccccttacaattgttaagatgataaaaattatgtatattttaccccaataacaagatcttttaaggccgagcatggtgactcctgcctgtaatctcagcactttgggaggctgaggcaggcggatcacctgaggtcaggagttcaagaccagcctggccaacatggtgaaactccatctctactaaaaatacaaaattagccagacgtggtggcacgcacctgtaatcccagctacttgggaggctgagataggagaatcgcttgaacccaagagacaggcagagtttacagtgagccaagatcacaccactgcactccagcctgggctacaagagtgaaactctgtctcaaaaaaaaaaaaaaaaaaaaaaaaacaagatttttaaaattaaattttacaatccagtacaaaataaaagcattgtccatccttgtttctcaaaaacccagaaagaccttggtgatctggtcacccttccacattcttattattcagtgacttctcataccaggtactgtatgttgtatagcacctgaagtctttctaaacacatttcagtgtgttttatttatttatttatt

SEQ ID NO: 2839 - DNA, 1414 bp, Homo sapiens
tggatctggggcaaggaagtggtccacgtcaagagcagcatctttttctagacagggaagctaagtcctaaaaccatcctgcataaaagaagtgcactaggatggaacatcctggtctgggaacaaagagaactgggtctgtctaagcatctctttggtcctaggcaagtaagttaatctctatggacctcagtttcatcatctattacatgcaaactcttagttatgataatggtcctacctacattcctgaaacagcagaagtatgataaaatatgctggaaaactgcagagtacaatgatactttgataacacatcaggattttaatgctagtttcacctctttatctgggcaaattgctcaacctttctatttctcactatgaaaaatggcaacatatttcagggtaaggtgacccaatcttctgtccgctttataactgtggtattaaaatgtccttacttgagaatcacttgaacccgtgaggcgaaggttgcagtgagccgagatcgtgccactgcactgcagcctgggtgacagagcgagactctgtctcaaaaaaaagtcctcgcttgagactaattctatccagagctcctgagctaaggcctatgagaccatattatagtgaagactagtattacagtaccacattgtaaaccttaatttctttggcaaagataaattcttaactaatagtgagcaaagtgactttctctgaccaatatacagatggtgattccatttccaacctcagaactgacctcctgctgcccagggagcgggagtgggaagaggggagggagaggagaggcgtgatgtcactcagccctacagaggggcctcccttcaggctcctgcaggctatttggaagcagctggaagaacgagttaggtcctggttgcaggattttttttttcttttttaagtcagacatagacacagatgttgagtaaaatgctgcctccactgaaaatcccaagcctcagacctttcaagcagaggaagaacttagtaaagttctagaggtacctttctggctgactaggggaataaaagaagagcagctatggcttgccttgccatttgcttattcttttatacttgaaatcgtcacagcaaccagacaagaggaagttgctggaatctgggcaaagttcccaaagaagatcccagtgagacaccattggacttctattagggggacaccactggacttctgttagggggacaccactggacttctgttagggggacaccactggacttctgttagggggacaccgttggacttctgttagggggacaccgttggacttctgttagagggacaccattggacttctgttagggggacaccattggacttctgttggggggacaccattggacttctgttggggggacacca

SEQ ID NO: 2840 - DNA, 1245 bp, Homo sapiens
cctgaattgattctgaaatgcactagggtggggagctgggatgtgaaaatccagtcgtttataggtgagggtagaggggggtggatgccagctgggcaaccagtgtctgatcatccaccaatgctcatgattgaactagcagagtcaacaagccacaagggtggcggctgaaggtcagaacggggtgggtcagccatggggaaggcaggctcacaaatgtgcgaggaagcacacaaaaaacactattactatatcatttgttcatgatgccaaatgatatattttttccttttttttttttttttttttttgagacaaggtcccactccaacatccagactggagtgcagtggcgtgatcacgattaactacaacctcagcttcctgagctcaggtgattctcccacctcagcctctgcaatatctaggactacaggtgtgtatcactatgcccagctaattatatatatatatgtgttttgtttttttttcctgagacagagtttcgctcttgttgcccaggctggagtacaatggcacaagctcggctcactgcaacctccacttcccagattcaagcaattttcccgcctcagcctcccaagtaactggcattacaggcacacatcactatgcccgactaattttctgtatttttagtagagacgggattttaccatgttgatcaggctgaacatgaacttctgacctcgtgatccacccaccttggcctccacgaactcctgaacttatgactcctgatccacccacctcggcctcccaaagtgctgggattataggcatgagccactgcgcccagccaattttttatactttttttggaaggaacaggatcttgctaagttgcccaggctggtctcacactcctgggatcaagcaatactcccaccttggcctcccaaagtgctggaattacaggcatgagccacggccctaggctgatatatttttttcatttgtcaaaaaatataaaaatgtatcttttggatttttgtggcacctaactgtgggccactgtagcagaagactcagctcaggtttctgcatccaggtggggaagacaaacatgtacacagaaaactgcaatagggccgggtgcagtggctcacacctgtaatcccagcactttgggaggctgaggcaggcggatcacaaggtcaggagatggagaccatcctggccaacatggtgaaaccctgtctgtactaaaaatacaaaaattag

SEQ ID NO: 2841 - DNA, 1037 bp, Homo sapiens
gtgtctcttgtatagttgagtaatagaatttcattgtcgaaccctgacctgaaatacatgttttcttttatcaaagtagaaaatgagttgctgcaagtaaagaaactgtattagatattgtataacagagactttttttttctattaagtactaacattgcttttgtttctgttccaaactttgaaatcagtgcacttggacaaaatggaaactgcttttcaaggtcctacagaatatatgtttataaatgtatttttatacatggttggtaatgaatcaggtctctttcgtgccattgcagttagagggcctctggtgctggagtcctctggaggactgggctgtcagagtggggcagcggggtgcagcgcggggagggcttttctctttcttcgtgcctctggtgctggagtcctctggaggactgggctgtcagagtggggcagcggggtgcagtgcggggagggcttttctctttcttcatggggtctcagggcctctctcttcctctccacgtatgctcttcacaggtctctccagcagggtagtcagatatcttacatagcggcttagggctcccaaaagcaaacattccaagaggaagcagaagctgccagtccttttaaagatgaggcttgggtgtgacatggtataacttttattgcattctattggttaatgcagattacaggcccagtcagtttcagattagaagagaacaagggaatgaggctgggttccttggaggctatttttttttttttttttttctgaaacagtctcgctctcttgccaggctggagtgcagtggtgcgatctcggctcgctgcaaccccttggaggctatttttagagatgaactatcacagtaatataccttaaaatacttcattttagacagtttttgtgtgttctaggggtggtcagttgcactaaccaagaatctatgaggtgtggttggccagcagtatatagaaagagctgtaccgccggggctgccactataagcacttcagctatgcaaattttgatcaaa

SEQ ID NO: 2842 - DNA, 1006 bp, Homo sapiens
gggagcaggcatttcatgtggtgagagccagagcaagaagtgggagaggtgtcacattcttttaaacaaccaaatctcaccaaaactcagagcaagaactcattatcatgaggatagcaccaagattcattcatcatgaccgaaacacctcccaccaggccccacctccaatgctgggggccacatttcaacttgaggtttgtgggggacaagcatccaaactatatcaagactataagctacattgtgatcgattctatgtttatatcacatcagtgcaaaattgagtatggagaaggtaacaactgattctttgctaaatccaaacatgcttaatttggctttttaaaatttatgtatttatgtatttatttatttattttttgtcatagaggtcattagaacatgaggaaaccaatatgcctactatgcacgaccttgttcatactattaatgaccagtctcaatatattcatcatttagaggcagaagttaagttctgcaaggtaagtttctcattaagaatttaaaactaaataaatgaaagcttatattaactatagattgtattaaaatttgctgctataaatcttcatgtttgtagcaatacattgacaattgctattcttacgtgattgagagactgatgtgtcacaagagcttgtcagacttgggaatgatgctcttgaccataccatttctgattgcttgatttcccagtagttcattactatgtctaatgatttcataatatgctttcatatttcagaagttttccttctcaccccgcttgctgtagcccagcaaatggcaaatgctttggaatacaaataccaatcattctcccatacttgtcaacctactggagcagtggtacagcaatcagggattctaaactggtagaccaattcttctccgctgtcagtattaaggctcttactttgactttgaatgagaatggttcatagggtactgacagtaatgatcaagaaaccaaacacatcat

SEQ ID NO: 2843 - DNA, 1026 bp, Homo sapiens
caattctccatgaaatgttttactacaattctctcttatttggctaccatttcatagataatcatcactcccgtctatgcctttctatctcagagcctccctctatttaatcttccatcagtttttaacaagttgatggtatttgatcatgagtaataatatatcttatttttcagaatctactccattctttaaaatctcttggataacccttttaattaaggcttttctttgagcctcgattccttggagaaaaggaaattgtcagaaacgacacacttctgtgatatgccaccagcaggcccattactatataccccagccttctctttgttatctagctaatgttaggctgccttgtttgtctaaacatataattatatttcaggaaaaggagaacataagtcttccgtactttatatcatgctgtgccctctaataatcaacaaataaaaacactgcttaataatgcttaatgtgtttggttttgtttattataggaggaactctctggaatgaaaaataaaatacaagtagttgtgcttgaaaacgaagggctccagcaacagctaaaatctcaaagacaagaggagacactgagggaacaaacacttctggatgcatccgtgagcattattttaaatcataaattttattttagtgtgaatattcccttctgccctctctcctcgccttcttcgctgcttagattttctccctgaagtgtggccaaagtactatgttggtatttgtttgagacctcaaatatcaaacttcactgtggtggaatgaatcctcagatgaaacgatcttgtgatattttgctacagtttcctctctgagcataccgtttctgccttaccatatggaaagagccggtctgaaagcaggaagtgtgttatacaggaaggactttgctaagtctagaaaccgttcagaactttaacttagatttctgttggatttctctaaattttccttgaggtctgaaatctaataagtctaattagctgcatgatgtagcag

SEQ ID NO: 2844 - DNA, 1266 bp, Homo sapiens
ggttaaatcaatggctgttggcgattaagtcaatctccagtcctttccccccttgaggtgggggagtggggctgtaagttctagtcttctaatcatggactgcagccaccagtcatcttattagcatacgaaaggatactcttatcaccatggagatcctaagggtcttagaagcacttgtgtcagaaacccgggactaagaccaaatattttaacgaaagatgctcctatcacccatgtcactcaggaaattacagggttttaggaattctgtgtcaggaaccagggacagagaccacatatatatttggattcagattgacaggtttcagattctagtgctgccacttattagccacttcctacctctgtgaccctcagctactctatgtgactcagtttcctcctgtataaaatggaggcaacaatgaaacctatctatcccatagaactgtaatgattaaatgagttaatatatatgacatacataaaacagggtctggaacatagaaagcagcattttgataaaaattattattagccatgcatttatgaaacatggaacatgaaagacaaactaagagagaggtgtgtgcttcaagagtatatgtcttcagaggagtaaagaataattccatttgttgaatgcgctgaaatctagccctctttgcccatatttagattactgcctgtacctgaaggaattttactttgcaacacttgtagaatatgaccctaatagcctgaaaatgtgaagtgattcttgacctgtagtgtagaagcatatgctttttcttttcatcataggtaagaataggtattttatttgtaaaatatgcatgtttatttaaagttgaattcagttgcagttactggcacattttattttagggaaacatgcacaattcttggattacaacaggtgaagattctggggtgggcgaaacctccaaaagaccattttcccatgacaatgcagattttggcaaagctgcatctgctggtgagcagctagaactggtgagtatttgggtgcttttctcttatacatcttttttttctttttctcttttgtacttttttaaaattctggtaaaatatatataacaaaatttaccattataaccatttttaagcgtacagtttatctgcattaagtacattcatgtcactcaatcataaacattatccattttcagaactttttgatcatctcaaacaaaaagtctggacgtattaaacaatatctccattcccctccctgcc

SEQ ID NO: 2845 - DNA, 1047 bp, Homo sapiens
actcggcctcactcttctcccgtcactcttacaaatcttatctgtaggcatgcagaccactcaccagttgctgcttcataaatttataatccactttcatttctctttgaagaactggctttggtttatgcagtcctccctccccaaaatgttcccttcttaccctctacctattgaaatgtttccagtcttcagggtatagttgaaatgcgccctctcattctgctttcccgaatagcatgttttctctcttcccttttctgcattagaattcctttctcttttatgcctccccctagcactgtgtttatgactattggagactcatcttttttccttgtttatgaaaaaggtcaatttctgcatttgtgtgctctacctcacaagtgtttttcactttttccaagggtttcattctgggacttttctttctcttgtatcttttccctatcaatggtttattctttttattttatttatttttttgagacgggatctagctctgtcacccagggtggagtgcagtggcgcaatctcagctcactgcaacctgtacctcctgggttcaagcaattcgcctgcctcagccacccaagtagctgagactacagtcatgtgctaccacacctggttaatttttgtatttttggtagagatggggtttcgccatgctgctcaagctagtctcaaactcctggcctcaagtgatccaccatcttcagcctcccaaactgctgggattacatgtgtgaaccactgcacccggccaatagtttattcttagcagaatatattctttaatagctcccataaagcaaacaaacccaaaatatattctcctgaccctacattcacttccaactatcaccctacatctacattctccttttcataccaaactttttccaagcagttgtctatatttatgtctccacttctttacctcctattcttgcttcagtatgcttcagttgagcttcgtccccctgtagtccaccccaactgctctttttttttttttttttttttttttgagacggagtctcg

SEQ ID NO: 2846 - DNA, 1112 bp, Homo sapiens
ctctaaacctagtagcagctttgtataacatgtacattggttgattataccctcctcctttatattttctaagacacaatttaacataacattcagtaaagtacacaaaacaaaaatttacagctcaaagatttatctgtaaatgaacacctatgtgattatcaccactttatgcttcctcctagttactgccccttcatgccattaaagctaatcatgatcctgaattttctgaaaatactcaagtatgcatcattaaacacttttgagttctgttttttcaatgttatataagtggaattgtatagtatgtattctttgtatctggtttctgttgtccaccattatatttgttagattcatccatgttgttacattggccgaagtttgttcattttctttggtgggtctgctatatgaacatatgactttatccatctgctgtcaaggaacgtttgtgttgtttccagtttgcagctattgtgagcagtgctgctatgaacattctttcatctgttggtgtgtatgacacaaatttacgttgcatatgtatgttggagtggaattcttgctctcaggatatgtctgtgttcaacttgagtaggtaatgacaaccttccaaggggttttatcagtttacactcctacccatacaaggggttttatcagtttacactcctaccagtagtacatgagtgatacctttgctccatatccttactaatcatatagtattgtcaatttttctggtgaacttatagtgctatcttgtgattttcatttgcatttccctaactactagtgtgattgagtattgtttcatacatttattgtccatttgatgcctcttctgtgagccgcctattcagatatccttcttattatttttattaaggtatgtatctgacatatttatttggggagttctttatatattctgaatgcaagccctttgtcagtatacatattataaatatatattcccactctgtggcttcgcttgtaactctcttgatagtttgcttgcttgctttgatggctagaacttcagtttgttttccttaattatgtagttgttttttatgtccttttaaaaaagtttttttccaact

SEQ ID NO: 2847 - DNA, 1037 bp, Homo sapiens
tagtaacacctgagtgaatgagtagataatcctaaattgccaaaatgactacctacctgcaagcttcccaggtgggctcaaagctaccttgaagcatgcgttgcatttgccttacagaaaggaggagtgtgtcagcccagtggttacgtggagtttgagtgtaatcgttttgtggtctcactgttgaatgatgggcctaacaagacatctgtatattggagttttatctttgataattttctgtggttccatagtctaaatttggtgagttaatattctgaaacacttttgaaccagaacgactgaactctagtttctaattcaaaataggtaatgttttcagtttagatcatgaaatattagaactgagagggagctttacctcacctcttttgacaccatcctatagcagactctttattcatttatttgttttcttgttgtttattctgttgagcatctactgtgtgacaaacactactcttgacaagaggatattctgaaaatagataaagtctattaaacgtaagtttcccataagcagcaagtttgttagatttttatcctgttgtggatctgtctgtttgcatacttataaacactgagcttttttgatcattcttttttgagatggagtcttgctctgtcacctaggctagagtgcagtggcacgatctcagctcactgcaacttccacctcccaggttcaagcaattcttgtgcctcagcctcccaagtagctgggactacaggtgcgcactaccacacccagctaatttttgtatttttaatagagacagagtttcagcatgttggtcaggctggtctggaactcctgacctcaagtgatccgcccacctcggcctcccaaagtgttggaattacaggcgtgagccactgcgcctggccttttttgttcattctttttccttggaactttggctttggtgactgcatggtatcaggaacagataagaatctcattgaatagttacttttgctcttcattaagtcttagtgatttaagaaaggtgact

SEQ ID NO: 2848 - DNA, 1090 bp, Homo sapiens
tttcaaatgaatttgaaaccgtggtttagtcttcaactctttaacaaaacagggaacaccatatgtaacagtccagcatacattttttgctttttatgtcttgaaagtttcctgcctcactttctctttgtctactggatatttttattcagttgataaattgcaaatatcctagaatattttatatgggacttatttaatcaatgagattgtatccttgctattttacatgccagagcattttggcatttggttcacttctactcccaataaacagcttaggatagagtacttctgagaattgctgaagaagggtgggtcttggcaatgatcaaacccagtgggataagattgtgttaaattgtgaatgttatatgcatagccaggagattggaggagttcaacagtactaatcattgagcaacaacaagtgttcataagtaactgaaagaatgtaattgaaagagaagtgcaaaaaagaggattgtggagaaagataaaaaggaaaggacatatatttgttcaagtaaatgagaggagaatctgctgcatggacaaagcctcagtccttccttaaaatgttgactgctaccttgatttacaattcgtaccttccctactttgctgcatttttccttttcagcacctccccccacttttaaaaaactaatttgctcttctctgggctttcccctgcagccctctccacaatagatgattgtcccgcacagatgccgtcctgccacgaaggctcttagcctttctggctgctccgcccgccgctcgccaagtgaggacagagggtctttctctggggtgtgctttatttcatatgtgctcagccggcctaccctggctcttctaatacatattaatgcttttctctccctgacttatgaggacaggatcgtttgatcatttcttgttttgaatgttctttttgtgctgacagagaaagagatgacttgatgtctgcactagtttccgtaaggagcagcttggcagatacgcagcaaagagaagcaagtgcttatgaacaggtgaaacaagttttgcaaatatctgaggaagccaattttgaaaaaaccaa

SEQ ID NO: 2849 - DNA, 1032 bp, Homo sapiens
atgttgctgatacacaaaacactaatactcttcagcttccttaactctactatatcccctacttctacgctaacatcctgcatgaactgaaatgcccctaagatctctctgaaaccacactctctgactagggcctttgctcttctttcctccctatcaaagttaaatctactccatgtcttcattttcacctctagttcttcagcattctttctttttatctctcattttatctgttgtgtccaggctggtcttcttttcttcccatttaaacataaattttaccatctcaaattgaactcacacattcactctcccaaatctgctgccccttctgtattctcttactggatggcacttttactcactaacatgctctgatcagaaaactggatttcaccctgtccttcacccctaacttttaaccagtcactaagtacagatctgagtttctaacgttttcttgaattctttccctcattaacacttttcttatggaagctaagtaatctctggatttatctattacacttcttcctagcttgcctccctccttcgttccactccctacactgcagccagaagcgatctttcttaaagacacatttgatcatgtgactctgatttaaaattcttcggtgaattttcactgccttcaagacagtctccacattctttcccatgcccgtggtctgtcctaatgtggctcccttttgccctccaaggctgctgcttttttcctcctctcgcgccctgtctcccagtacactcagctatcgtcaaaggcaggagggcttagggggtgaacatgggcttactagagttagccagacttagattcaacttctggccccaccattcactggctgtgtgaccttggacgagttactttaacttctctgtgccccagtttttcctcatctgtaaaatggagaaatatgtgactcctaggattgtgaatgaggactgcattttaaaatgtatattggttatcttatacaaacccaggcaggcacaaaatatttctcaata

SEQ ID NO: 2850 - DNA, 1072 bp, Homo sapiens
caaagaaaaaaaaagtttcttaaaattccttaaagaatatttgcttagagtaaggattgattaaatagccacattggaagcaattggaaaactgaaaagttccacaaaaatgttgcatattttattgggaaggctgaaaggttaagttgcacgttgattcttaggctggcgtggagttcatcatgttgtaaaaggtgtagacagtgggacttgaggctaagcaaatccaaacctcaggacgtcttcaagtcactagccctaaagtctcctgcagaaatgcttcttcagagtgaaccaggcccagggctttgcacattgagatccttgtgtttggtagcatgatacttgacccatgtcatctgggttgtatcttctcctttgtctctgtgctatttgtgtcttccacctatgtcacattataggccaagaggttttagaaggcagactgtgtcatttcctctttattttctcttgtatctaggattgtttagggagacaatatggtgtagtagaaagattataggacttgaaatcagactaactccgttttgaatctcagctctgccactgtataatcttatgtaagttacttaacatctgtgagcttcagttttctcatctgtaaaacaggaataggatacttatttttatatggttgtcatgaacacagaatggaattttaaaatataaaatgctaagacagtgcttggtacatggtaagcactcaaaagtgatagctggtatcagtgttactattaagtccacagtgaaagcatgaagtcagcgttatgtgcaatcaacaatggtaaccgtgaacaggatttctagaatggtatcagcaaccttctgcatctgctacagtgaagaggataatcatttttggctgtttctaaaatgagtttctacttataatatccttttgttcacataggctggttccccaagtgtctagcttggagaatgagtcttagaaataaattttgctatattctagaccagtgctatgccaaaaaattttctgtgatgatgaaaatattttatacctgcactttccaatatggtagccatggaa

SEQ ID NO: 2851 - DNA, 1035 bp, Homo sapiens
aatccaaaataaaacctcattcatgtgcatttttggatgtgctaattccttttgtcataaaatggaagctagcctaaattttctaataattttttatcaaattgaaattcatggcaaaaaataaaaatgagctaattttgaattcaagtgcatgtattttatatggatgctttttccccttctctctacctaaggaaatagagaaattgagaatagaactggatgaaagcaaacaacacttggaacaggagcagcagaaggcagccctggccagagaggagtgcctgagactaacagaactgctgggcgaatctgagcaccaactgcacctcaccaggtactccctaatcccattatgcgccatagcaccgatttcattccactgatttttgccacaggcttccaaacagttgttagagttagtcttagtcattcaattcacacttagctttcaggcatattaagaaaagtggagatgtggtaagcaaaacacccagacatgtgaatgataagtgtggcagggaattactgatagattacaaaacctttcatctacaatgctcaaatatttaggtgattctctatcaatataagcgaaatgacatatttctcctaccaccactactacctcttctgctaattctacgtctaataaaaatcttgaactgaaggatgtgaggaattcatttaggaaaataataaaatactgtcagtggtgagagagacaaagtaaataaattgtaagatgcaaattgaaatggaactgatacaaaataaggaatctgcatcctaaggaggtgtaaaattttgagatgaaatagattggcactgctcatgttcaaatcattattataaccaggcttacaccattgaggtttcaaattacttcatttccatcatgagattttgtgatgtgatcatcattgtcatcaactttagtaaatatgtagctcggccctaaattacagtaagactctttaggttgtaagcattgtgaatttgctgcattggaaaaaaacatacacacacatacac

SEQ ID NO: 2852 - DNA, 1048 bp, Homo sapiens
agtggtagtaaagataacctcccgcataaacgctgcttaccctgtaataggcatattcacttaatccccacataaccctaccaggtagattctgccataagccccattttacagataagaaaactgaggtattcagaggttagtaccttgacccaagtcacagcactgctaagtggtggcgtaggcactgaagcctaggcagctaggctcccgactacgattttatccattacactatattgcctctgatggtggatgttgtgaaaaataacttctgtcaccagttccttttggaaagttgtattcaacaggctaaaccaggtttcttgacagtagggcttctcagcgtttttaatatgttagtgcacactgtgactctcttagaaaggaatttagttttcagtgtttccgaaatttatatgacttatggaagcttttctatcaaatctccacacatcttccaggaatcacgtttttaggaatacacttggggaaaaactgaactaaactaatttgtagtaggactgctgaaaactatcatatggggattattcgttattgtatctcatcagtgcctctgcaacaccctactccatcccaccctgccccgcaacttcactttcattagaacacacacagttcatggaaagagtagataggttggtaactttcaattttcatttagtcatttctctaaaatgggggtgtggggtggggaagcatctttgaccagacttcaagagtagctggacagttagctgtgccagagtcacgttccaagttcttccatatcttactgtcccaactttgcctttatgtgataattctatttattttaaattatgtgtttattctagaaaacaaatttgacaattacataactagattgccagtcagttcattgaagttagacaccttttaaagcatgactctgaatgagatttcatagaataagatgttattgtggatgctctcctgtataaacgttttaggcaatctcctgccaggaattattggcacaaatttgaagtatgggccactaagtcag

SEQ ID NO: 2853 - DNA, 1074 bp, Homo sapiens
gcagtgccatggaatggaaagaacactggacttggagtgagaagacagatttggattccagctttgctacttactagctgcatggctttgagaaaaatctcttaattcccgagtttgagacactttatctatcaaacaggaatatctgttccatctctctgccccacagagatgttatgaagaatagagaggtcggtgcatttgaatgtgccttttaaaatagaaagtacagacatgcaaagggtgatgcgctagtaactggagttgatagagtctgtggttttgttttaaaagtagatgggaattgtgcatatgtaatagaaacaggcaatagctagtctactgtattgtcttttgccttgaaggtaagttttcaaattattttggagatactgtaagaacatttttggagggaaaattatttttagagatgtttctgttaaatatttcctttcttttgtgtatattcccttgaaagaagttgacctcctttctgtttctgctttcttccctagaagtgactcattctctgatctgataactcatctttcaacattgtgcttgaagttctgacatactttgcaatgaagaaaatagaagtaatttactccaggaaatatgccattaagtcttttgcatacttaaggaagtagagattccagaatctcattcctgtgttttcctttctgtttcttctcagtagttccacatttgctcaaataagggaatacagcccctgttagctgtaaataagcatagaattttgggttcttctgaaacatggaagacatcatgctgtctaccaattttattattgtttttgttttgttttattttcaataataataataaattcttgcaaaaatagagattatcttatcatattctctgactgtagtcagtagacaggatgatacttacacctgtgaggatacttagtactttccgtcttttagtagttgatcattcattcattcgtttattcattcatgaaatgttcattgaccacacaactgtgtaccaggcactattccagattttcgggataaattagtgagcaaaacaaaggttcct

SEQ ID NO: 2854 - DNA, 1611 bp, Homo sapiens
caatctgggttttatataaatgtattaggtctaaaattggtttgtgaatgattagtgatcttgctctccaaggagacctaattagggaaatttattatataaaagagacaaaaaggtgcttggtatgttatttaattctcaccacaacttgaggcaggaattattatcttccagataaggaaaccaaaactgtttaaataactggtgagtgggagagctacggttctaacataggtatttctggttccaaagtatacgttctttcttatggtaattacagtattttacatctattgctaaagaaaattcaagccacagtagttatgatgagaaagtttgggaaggaaaaattcacctttaaatttccgtggagaagtaagcgtccttggcatgtaacggttaacttactctgtgcccctaggccctctttttcctcctctagatctgtcatcttagcctgtactggtctaactcagaacctctattgctcctcctgcttctcattcctccagctcctgaacagtactttgtaaattggatgtattcttttgtatctgacatagatggcatttaatgaataaatgatgaatgaatgaaacaaataggtgtggtgctattcgcacctcctgatctgacttctgatgccagtctgtcccattgttgatggctgacagtgtgcagtaaagaacacatggcaattcagaggaactaggtttgaatctcactctcccacttggagctttgtaaccttgggtacatggcctcatttccccaaacctcagcttctccttctgtaaaaacatttctaaagccacactgcaggattgttatgggaattagaattgtgtatatagatacgcatacatacacgtatcaagtgcctagcacagtgcctgacacatagtaatacacagtagctgctattattttcactggtggcatttttaagggtcttgactggtaatttgggtatcactttacatagctattgtctttgccagggaaagtctgactgtcattttccgacggacataagtctatgccacaatgaaagcctttttaaaacagccagatcaggaaaatgtggatctagttgtattttgtaactctgatgaattaaagcaggcacctactctaagtttacaatttgactcaaccaaggcctggcaagtagtaaacacttgataaattgttacttactatttttaaaactctcaagcgcccctaaaacttacgaaaagtgcattttgtgtgcctcacaagaaggtagtgaataggacaaattttgattttagggttgtttgttcttaatttcttttagttccagtttcatttctccctggcttcttactatgacattttcaataactcattcatgttaagttttacattccattttgatgttaccttctgctttgaaaccacctataaaacttgaagggcttaaactgcttcttttaaaatacaaattattaatgtagtaaactctgaagaagccctccaggagtgtgcctctgcataccccatgccaaactattgggataaataattttccctgtgctttgaggtaaggaaaatcttggagtttctaaagttttgtcattgtggaaa

SEQ ID NO: 2855 - DNA, 1071 bp, Homo sapiens
catacagactttggagtatcttaacattgagattgttttatacaagtcagatcagcacataggaggagtcacaactgtcattgatcataatttatgaccctttctagactttctgaatgttgttatagaaagaaatgtcttatattgagcttgattctttaacatcatagaaattcattcagaaaagtttgatgaataacagaagaaatctttattcactggcccaaagcttagtttatattctgtgctgttataacatctatatgtgtgtctatattagtactatcagctctctgtggcaaaaagaggctctttaaagatggaaactattataataaaacttcgtatttttacaaaatacctcaaattggtagcattcaaaatgaattcatgttggttaataatgaggtgtacattttgctgtgtaagtgaatagatcatcatattaccccaagaggtgatttttacatctatatcaacagtgtttcttgagattgaggaattgtgaaaaggattttagtagaagggtggcaatttgcagcagatgtgtatctgcacctctggtatcactggttgtaattgaacaataaaaatgttgcaaccgtctgggtagcaagatggctaaggtcggctcttgcctgtgatagtaagaatggaggagatttgtttgacgtcatagactctggattataagaaggagacatgtcaagcagtaactacgtggcatgtggctgtgatgcgtctacagccaacctcctggtgtggccttcccaaagacaaggaagcgtcccattcaagtgtgtctcagtgcttgcatgacacagtgcctctggattttacgtcagttctgccttcagtgtaaagccctgattttcatagataacctaatctgtagggaaaaagaacattaaaaaaaaaaaagtatagccacaaaagttctttccactcatgtgtggatctttccagttttttcagacagaaaccaaatgacagcctcacagtcacagaatcttccaacactgaaagttaaagctgatttcttcttcatggagaaaagcttacaaacctttt

SEQ ID NO: 2856 - DNA, 1036 bp, Homo sapiens
ggttgcataggatgggggccatgtgcacacacataattgtgtgccttagtgcagaagagttcctgggaaagttttaaagccccagcaggtaacctcgcaaggcagctagaccccaccagtgtgcctgaatcctccacagttctcatttgtaagctcttaatgagactggtattgtcggtcaggaaatctagaacactggagaaatattattaggaagaatatagtaaaaataatgacaagatcgaaaacaaatcctgtcagagcccaagaataaatttggcttccgcttgctgtgtctgtctgtttccataatggtccagaatagaaaccggatgtttaaaatctctctccttttcacatgctctcctcccctcctgtcttccttcctcttcagtattagtagacttactatttttattattttttatttatattcctagttttcaatatttgccatttgtgtggataacacattaatttttaatgaaatattttcagactcttggaactcttggaatagctgaatcataaaagaaaacttgaaattgatatagactccaaggcagcacacaaactgaaaattacgcttgtttttattcttcccactgacaaatgacaaatggttatttgaaaggatcatgtgtacttagatttaaacttcttatgtttctatatgagcctagtttgtataatttttgtggcacagaaggtaattcagacaccattttaattaataattaaaatgaaagaagcagcaaaacaatatgtgaggtagtgagctccagtaattttctttttatctagaaatacttatttttgacaagccacattgctagtaaaggaattcaagtgtgatttagattacgtcataggcttaactttattttagttctgttgcggcactaaagtttttttgtttgtttgtttgttttgtttttttttttgggatggagtctcgctctgttgcccaggctggagtgcggtggtgtgatcttggctcactgcaaccttcacctcccgggttcaagtgagtctt

SEQ ID NO: 2857 - DNA, 1033 bp, Homo sapiens
ctcccaaaatgctaggattacaggcgtgagccactgcgcctggccagatctaaagatctgaaagaaagtggcatttgtttctttgggtaatttatttccaccaatcaataattgttgttagtgaaattaaagttaatactgaatattatttaattttatactgcatggtattctcagaaatgcaactttgtaatccactttggaactgtaaattaataagaatagtttcttctaaaagtttgttttttgttatagatagcatggacatttaagatataacatcttttagatcttttcttattctcaaattataaggatatcaatttctattttatgttggcaacttaaatcttattttaatcatttatatatgtggttacttttatattttcttcttttaaattaaaattcctaaaaaagtctacttatctcaagtaaatttacttattctcacattaataacaaacatatttttccaaatattattttctaatgtatttctaaagactaataaatttttaaggagctctgcctgtcttatatgacccgagttatgtagaatggcattttatagaatcagaagaggcctgaaagattatctagtccaacttcacctcttgtcgtctactcccaccctccattcccatccccatccccagcaccacattttatagataagaaaacggaagcccaaagaatacaagtaatgactcgaatccgttttctgacatcaggtctagtgttttctactgtacccactcaataacttatatgcttccagaaatagggaggtggactagtactaatgatgaaaaggaaaatatacaatggacataaataatcagatgtttaccagaagctattttgtccagtgaccttgagaccagaagttggatggttaattggaaggtcaaaaaatacatgacaggtgatggatatgtggggctgaggcatattttttgtgtgtaaggatcacctgatttggcatgccatgtcatttgccctggataaacaacacccaaaatacatcttt

SEQ ID NO: 2858 - DNA, 1353 bp, Homo sapiens
ccatactctggtcatctttgtatctcttgcctatagttcagatcctggcccttagaaggcatttactaaatgaatttgtagtcctttttatcttctttttaaaaatcatcatattttatcatcctttttatctcctaaaattgtagaagggtaaaaatgagacaaaagcagaacttgatgtgtatgtgcaacatttaaaaaatattttataacctctcatgtatatcttcatgtttggaaaacctactcactatatgtgtgtctaattactattatgaagtaataaaaatctatagttttattgtataatgatgcacatccagtggacactcagtaagtgttaatcacactattaaatatgctttgatctcattataactggagtggctgcctggctctacttaggctatttaacaactcattgtgttattagttgatccttatttttcaaggtttgtaggtcatgcttaatggagcgacttgctaaggttgttagcagttacataaatgactctgactttacaaattttatgataaccatttggaatgaattatatattttccaagcttttggttcccccagtggctgatacattaaagaataattggtaagttgcaaaatttgtgacagttttgtttttaaaaaatcagctaaatttggctttttacatattgctagtgatttctgtatcatagatgaaggagatagcatagacttgaggctgggaaacacgtttcttctttcacatagccaggcagaacagcccttggaagacgatccttggaaacacattatcatttcttgttcaaaccaaatatacttaacttctgtatctcttccactttaaaatcattatttttgtgaccgacgtctggaagtgccccagtttttccacatggcccttaacacatagtgttagtgttgcatttcgtagttctcattttgaattatgcctctgtgttcactagcagggttacctcctgttaggcccgactggaccatggagtcctgggctccttttggccttttgcctagagtagggaggcctcagtgactgcaaatgtggcaactcgggcagtcccttggccctttccccttaggtccacactcccatcttgggattctgtcttttccacttcaataaatggctccaaggaagagcttgaaaacgtatttggatctgattgccaaatttctcaccagaactattctttcagggtgggatttttgaggttgggtaggggcagggttaaaaacatgagctttctctagaggccaacattccctgattctaggcagttagtcagaccttgttcctatggtagacgtctctgttttccagcacttagagc

SEQ ID NO: 2859 - DNA, 1033 bp, Homo sapiens
gactcctctatctctttctctgtcatacctttttgacttctccctacccttgagatgatctcatctcttttttttttttttttttttttttttgggacagtatctggctctgttacccaagctggagtgcagtggtgcagtcacagcttactgcagcctcgaactcctggcctgtagggatcctcctccctcagctttttgagtagctgagactgttaagtgtgcactatcacacctggctatatatatatgtatatattttagaaatggggtcccactgtgttgcccaggttggttttgaactcctagactcaagtgatcctcctgcctcacccttccaaagtgctgggattataggtgtgaaccaccgtgcccagcctgcaatgagattcttacactgaaatgcatagatgggctgtgaaccttcataaaatttatataaaacttaatgtttacttatttcttttctgagaagcagatccaattattctgtgagggcttctgttgtgccaggcaaggttctaggtctgatcctttagcagcctctcaaaacgttgaagaactgagtgactcttcttactctgttgttttccttctctgaactgtgagtgccacgaggcaaggacttcatccgtcttgttcatcactgatttcctgctgcctagaacagtgcctggaacatagtaggcactcaaaaagtgtagtgttctgaatgattaggcattgtgaagtagaaaatacatttatcttatgactctccttttccggagttgatgagatatcatgatgttattggagggtgcaggaggtgatcaacagtattctaggactttgggaattcagactggggatcacaaaatttggagcaggtttcgcttggcactcaggtgggcatctgtctccatcccaccggctgtactctgcagtggctggtaaattacactcttcttggtgggcttgaggccccagcccaagactgcagggtcaatgcaacataaaagtccaggtctcctgactcggagtacagactatg

SEQ ID NO: 2860 - DNA, 1032 bp, Homo sapiens
agggtgcagtggtgctatgtcagctcactgcaacctccatctcctgggttcaagcaattctcctgcctcagcctcccaagtagctgggattacaggtgtcggctaccatgcccaactaatttttgtatttttaatagagttgggtttcaccatgttggccaggctggtctcgatctcctcaccccaagtgatctgcctgccttggcctcccaaagtgcagggattacaggcgagagccaccgcacctagcctatttccatctatcttgatcacacttgatcatgttgagagactagaggctctgaaatttaataaatgacctaattcaaaatatcttactccaaatccagcttgatagaaagccaaactgttgtcagtatatctcactttaagcaaacccaacatattaaatccatatttacaaaatggattagttaagtagtcattcttcacttagcaacataattcattatagtaagttccccttgtaatgcatataaacgtgatttactttattagaaccctctgtgtgtgccacatttcaagtgcaaagtacatttgataatgttactcaacaaattattttctcatttgtccaaatatttggttgggcatcgctgtggcccctaaggaaacaaacaagtgggtcagaatggcctctggaccgaagggatgcgtgttgcaggagcaaggactgttggcgtgggctgatcgctggtctacaggctgtgggagctcagagcatggacccagtcagttcagtctccatcatcctagttttctggatcttccaactccttattcatcgaatgaaccgggagcatgcagaatttatcttggtggaaagcctttctcctcagttttctctccctgttttggtttactgaacaggaaagcctgacataattaggtctgagaagagtcatcgggttctgctctcatccttgagcctgccctggttggtagggaaattcacttattaattctgtggctggctttgggtcatgcagatgacccagggtcactgggctt

SEQ ID NO: 2861 - DNA, 1035 bp, Homo sapiens
atcaaaccagtttgaattaagtcatcagcttgagtccctgagagtagctggtcagtacctggtgggcatttttgtttgtttgtctgtttctaagtccagggctggagaaagaggtcagtacctggtctgtgctgcacaccatgggggcagagtgcccttcctcctttctcacaggcaatgaccccaaaaacggaagcaagtaagaaatgcagcatccaggttaaaaatgaattcacttatggtcagctgtgtccaggctgaaaatgagtcacctatggtcaactgtgggaaataggaagctgtcatgcctactgcagcttccctcaaaggtacttcgagcaatgaaaatacattctaatttatttgctgtggaacaatgcaaaggcttcctcaaaaaaagaaatgaaacctggagaatgtgtgactgaactccagcaggagaacaggacacaagtctagaaatctcaagtgtcttcaaactgttattatttttatggatttgtgactccagcaaacaacttttactatcttaaacaaggtcatctgaaaatcacttgaagattgttaccaaattccttcataaatattttctacaaacataaatgtccaccagaaatttcagataaagtactatttctcctgtgtcaattctttgtatttaaaatttatctcatatacctaggttttaaaacacgtttttaaattttcagaactcatttcatgctgaacatgttaagtgctaggatattcttactttgtcttccgagtttaggatctctgcgggggtgtggggggtgtgtctgtagaaagcataattttgattgttatccaccaattggaagaaatccctactttaatctcttttaccttccaagtgtacatggtcccaaatttgtcagtcttagaatttcttgaaacaatgcaattaaactgcaacatatttcctaacattcttaattaagacagtgactgaaaaatgtagattaacagaagttactgtttttatcaacatattttctctctctttcccgccac

SEQ ID NO: 2862 - DNA, 1804 bp, Homo sapiens
tctggctcccctgagggaggactcggtcttgagggagctggaccgggaggacaaagccagtgatgatgagatgatgaccccagagagcgagcgtgtccaggtggagggaggcatggagagcagtctgctcccctacgtctccaacatcctgagccccgcgggccagatcttcatgtgccccctgtgcaacaaggtcttccccagcccccacatcctgcagatccacctgagcacgcacttccgcgagcaggacggcatccgcagcaagcccgccgccgatgtcaacgtgcccacgtgctcgctgtgtgggaagactttctcttgcatgtacaccctcaagcgccacgagaggactcactcgggggagaagccctacacatgcacccagtgcggcaagagcttccagtactcgcacaacctgagccgccatgccgtggtgcacacccgcgagaagccgcacgcctgcaagtggtgcgagcgcaggttcacgcagtccggggacctgtacagacacattcgcaagttccactgtgagttggtgaactccttgtcggtcaaaagcgaagcactgagcttgcctactgtcagagactggaccttagaagatagctctcaagaactttggaaataattttatatatatataaataatatatatatatatacatatatataaatagatctctatatagttgtggtacggtctaaaagcagtcttgtttcctggaaataaaaagttgggatattaacttgtttttgcactttagaatagcatgagaatctcactaatttagcattctgataaaagaaactttagagcaagtcagaatagagaggtgtttttcctttgaggggataggggaagtaagccaataagaaccttttaaacaaatcgtcctgtcacaaaatgctttcatatggcttaattttgtcaacactgcattgtcttttgagctcttttttcccccccaacaaagtttttttgttttttgtttttttttttaagtagaaattccctccagttttattagcctctttatatgtctcaaattgcatgaattttttctggctgttggaaacctgaatgcttttagacccaaatggaaaatttctgaaatgctggattatctatttttaaacaagcagttgacttaaaactttctgtggcaacttctggttttctgacagttcccagtgagagaaatgctgaaagtacactgggatcactgggacactgtcttatgaaggtttgcttgggatgaaaaaggatattgcagcttcagcagtgttgaactgtgtgtttaaaaatgtgaattactgttattgtatactgtaattgattacatgggctgggggggtgtcaaagaacttgacaggttgtgttgatgctcttagttgagtcttgaaaagtaaatattaacgctacagaaatgcatgagtttcaatatattttttgtctttgtttgcattgtataactttaacgagtgagtttaaaattatttaatttccttagaaaaataacaccatttggaaaaaaaaactggtgttatgaagaacgtaaatgcactgtttttatttttattttatataatttaaattgactttcccactgtctttaagttgaaactgttaagctgaataaaaacttaagctgcaaattgataacttcgctacataacaaggaaaatataaatgtttacaaacagcttaaagatttgcatgtgcagtgtgcatttataacaaacttctaattgcacaaaacccatgccagctcagagtttaggtgtacacatttacccagtt

SEQ ID NO: 2863 - DNA, 1040 bp, Homo sapiens
taatgctttcaaatctttacttttaaaattgggaattgtactcctcaaactaggactcattatttaccttatagcaggctgttcacttaaacactgtagtaaaactatagatgagagtactaatgtgtttgccatgcaactcttggaaactcaaccaggcctgcatgagttgctcagacagttgcaaagcaattccactcttctcaccttggggttcactcccattcccattacctcccctgtcagcaggaagaagccagagctatcaacggccttctcccatcttcatagcctacccaaagggaaggattgaaaccatctttgcaaaattatgattgagacagtgaaagagatctaactgaacggattgcatcttgcttctaacctcaaagctgtccttgttcattcctgggcataagctgaactaactttgggagaaacttagtttatagtttacacaaagacggtaacaaccctttcccaaagcagacctccttcttgcctggagactagattgcctttgtaggactaacattaaccacaagatttgaaatcaggtttaggagtcatgcagctggaggatacaagattctgacttgccctaaaccgctcctaagatcggtgctcgagagattttacagaccctgcacttgatggatcagctggcaccacccagatcagtaaactggctcatctgatcttgtggccccacccaggaagtgactcagcacaggaagacagcttctactccctatgatttcacccctgaccaatcagcactcctggctcactggcttccgccaacccaccaagttatccttaaaaactgtgctccccaattgcttggggagactgatttgagtaataataaaactccagtctcctgcaataaataaataaattaattaaataaaaatcatttatgctgtgcctggccaggtctggtggctcacgcctgtaatcccagcactttgggaggctgaggcgggtggatcacttgaggtcaggagttggagaccagcctgggcaagatggtgaaa

SEQ ID NO: 2864 - DNA, 1098 bp, Homo sapiens
tagtaaactttattggaccatgtctaataataaaaacagggaaatggaaactttttgtgaatttcttggttcacattttgctaacagaggaaaaactttgttataatgccgaattattctttaaggagcaaagtatgttctgtatctaaaggaatgtttatcctcgggggctcaaggcatgtacagaagagtttttgtttaggtttgccaactaaaacatggtatactcttctgtcatttgggacaagttaatagatttactttacttctgtctctttttttttttttttttttttttgagacggagtcttgctctgttgcccaggctggagtacagtggtgcgatctcggctcattacaacctccgcctcccaggttcaagtaattctcctgcctcagcctcccaagtagctggaactacaggcgtccgccaccacgcccagctaattttgttttgtaatttttgtagaaacggggtttcaccatattggtcaggctggtctcgaactcctcacctcaggtgatccacccgcctctgctcccaaagtggctacaggcgtgagctactgcacccggccgatttactttacttctattcataacggtcttttttttttttaacagcctttttgagatactgttcatatactagatgaactatataaaatgtacacccatttaaaatgtacaattcagtgaattttagtatattcacagttgtgaagccatcattaccacagtcaattttaggatattttcatcaccctagagagaagcccatacccattagcaatcacttcccatatcttcccaaacttccagtcatagaaccacgaatctactttccgtctgtgtagcctattctgggcatttcatataaatggaatcatgtaatatgtggtcttttgtgattggcttctttcacctggcataatgttttcaaggttcattcctgtggtagcatgcatcaaatacctcattcctttttactgagaaatcatattgcgtttcatggataataccacattttatttatccagtaatcagttgataaacatgtagttgtttctactttttggctattacaagtaatgctgc

SEQ ID NO: 2865 - DNA, 1034 bp, Homo sapiens
tcatgttatataatccttgagtctgttttcataatagatattagtctctgtttcttgtgatgtctttgttttggtatcaggtttatctggcctcatagaatgagttgggaagtgttcccctttcttctgtattttggaagagcttctgaagaattggtattgattcttgtttaatttagtagaatttgccagtgaagtcccctggtcctgggcttttctttgtgggtagtgtttaaattactagttcattcttttctcattagaggttatttagattttctgtatcttcttgagtcagttttggtagcttgtgaatttgtccatttcatctcagttatataatttgttggcatacagttgttcttagtcttccttggaatccttttcatttccattaggttggtagagatgtctcttcatagatttttaaccagtaaatagatcgctactttaactttacaaagaaattaactcttcaacttctgggggtcctttctgaggatagaaaatataaggaaatgtgaaaaacaaagaactactgagttcatcattattattgctaacaatgaataagcaacgtcaacattaatttttgccttgcacagaatattgaaacagagccttcaaaaaaataacagtaatgagtctgggcacagtactgggcatggctcacacctgtaatcccagcacttgtggaggccaaggtgggaggattgcttgaggccaggagttcaagacaagcttgggcaacatagcgagaccctgcatccacaaaaataaaagttaaaaaattagcctggcatggtggtgcatgcctctagtcccagtttctcaggcggctgagttaggaggattgcttcagcccaggggtttgaggaggcagtgagctatgatcgtaccactgcactccagcctaggcgacagagtgagaccctgtctctaaaaaaataacagtaataatgatgatgatgttaggagtgaggggtggacttacactgtttaatactgtccaaaggaatatatctctaggttta

SEQ ID NO: 2866 - DNA, 1050 bp, Homo sapiens
tgatctcctgaccttgtgatccgcccacctcagcctcccaaagtgctgggattacaggcgtgagccaccgcgcccagccttttgccatatattactttgcaacttgcttttgtttccctaacaaatatatcctggaaattacttcctcttcctcttagttccttaagagcatcacacctgccccaacactttttgaatttttttttagagacagggtctcactttgttgccctggctggagtgcagtggtgtgatcatagctcactgcaacctcaaactcccgggctcagttctcccacctcagcctcccaagtagctaggaccacgggtacctggctaatttttttttttttttaagagattgggtctccctgtgttgcctaggggggtcttgaactcctggcctcaagctgtcctcccgcctcaacctcccaaagtactggaattacaggtgtgagccaccacactgagcccttcccctctttttatggctaaagagtattccattatatagatatatcatagtttatgtaactaggaccctataaatgaacatttaggctgttgtcaacattttactaacataaataatactgcagttaatagtcttatgcttatggttttttatatgtgcaacctattcttttactatagtataaagattcaaataaataaaaacctgttaaactaagataatagcattttactttaaaataacatttttaactataaaagtaatactctttatcaaatttagaagaacaaacaatcctgaatgtatggagctaaaactgaaagtattgcattttagtcctccactcccaccctagccacgtgtactcctctcggccaaattgttaacagttgaacacaggtgcttcagacctttcttttgttgcaattggtggtagtttgattttgtcatcccatacttaacatgtaagtatatcctcaggctaacttatttttcaaaaatgtgatcatgctacacatattatgacttgatctttttattttatgtggtttttaaatatctatcgagttacctca

SEQ ID NO: 2867 - DNA, 1050 bp, Homo sapiens
tctaaatatactctctgaagattttgtactttaaaagagttgcaaaatcataactataggtctctctttttttaaccacttgcatatgttattacagaaagtagaagaaaatctccccatattcatttatactgcgttttggaaaaatgcccaaagtagaatgtatttggggagaaagtactcaaaatacaagaatatacatttgcttcattcactttatcttttattctaaatactatgttttaaaaaatattttccttttgtgattgtcataaaatgacagtttgttttgttctcatatatattggagctcctaagaaaccttgcatttcgaaaatagcatgataaaaacaataattttggtcggaaaggttggtgctagaaagtgtcagacttgaaataccaatttcctgagggaatttcagtaataaatttggtttgtagacctatacgtcttataaaatctataagtttttgaagtctaaaaacattgctgagcaaatcctgccatgattacatctaatcatgccctttgtcattaactcagcccttttcattctccttattaaaaccctttattaggataaacatgtcaggagtcactcaaaccaagcagctgtgttttcaacagtttttttccactgtgctaattcctactcttgatgcaagataatctacccctgatcaagttgtaactaatagtaatggtctgcgtaagacagatcacattgctgatttcattcaatgtatcattttgaattataaactaaccctatagcagaaatgcctttgttcgcttcagctaggcagtctttgtgacctcttaagaatatattattgcagtttactgagggttacccctgaacactatacaccagttttaaccaatacaaagaaaagactcatttacttaaatgtgtcagtatggtggttatactcttttttatattccattttacctgcttccaggtgaagtttagcatattaaatgttggctataaaaatctgccatttaagctctattttacttgaaagtctgcatctaccaaa

SEQ ID NO: 2868 - DNA, 1034 bp, Homo sapiens
gcctgcaggattggtcctgagctggcatctgcgagcttggacttctgtaaggttctcatcattcccagaactgagaagagtggctccctttgcctaacctgtttgtacaactaatttggtttatgctgaaaacctgctttccctctgggactctgggattttggcagaggacgcctgcatgaccagcccccaatagaagtctcgggttctgagtctgtaatgatcttccctggtagacatttcatatatgttgtcacagaccattgctggggggattaagcatgcacatcctacctgactctattaggagaggatccttaaagcttgtgcctgctttcctctggactttgccccaagtatattttccttttgctgattttgttttgtacctttttgttgtaataagtcatagtcatgagtatgctatgctgattcctgagtcctagcaaatcaccaaaacggggcggttgtggagacctttgactcacagaaatataacagaaggactggcaaggcacggtggctcatgcctgtaatcccagcattttgggaggttgaggcgggcagatcacttgaggtcaggagtttgagaccagcctggccaacttggtgaaaccccgtctctaccaaaaaatgtaaaaaattagcctggtgtgtggcacacacctgtaatcccagctactcaggaggtggaagttacaatgagctgagatcgtgccactgcactccaacctgggtgacagagggagcctctgtctcaaaaaaaaaaaaaaaaaggactgagaaaagaaaggatgaaatgggtagaggtatggaaaacctttgatgtctggatggctgtggagttatccatgatatgaaatagcagctgagctgttgcctgttatgaaaggtaaaagttacctgtcgaatttcaaatgatagatccaactccaggagaactgactcactagatcacctggctacttttggccatgctggttacagtgaggagaaaaaagaagtgtagcccaggtaataccttcagtttttgt

SEQ ID NO: 2869 - DNA, 1028 bp, Homo sapiens
cagggagccgagattgtgccactgcactccagcctagcaacagagtgagactgtctcaaaaaaaaaaaaaaaaaaaaaaaaaaaaaaaaaaaaaattctgtgaaaacttttgtcccgctttaatatatcccttccagacaaaaggtctggatgagagtagaggacaattttttaaatgcgaagctatgactgctaaatgggacatactgattttgtaacaacaacaaaaaacaaaccctggcacctagggaatctcaaaggaggcaaagactgatcatctttgtttttcaatactgcctttccgctcttccctaaaaacttccatgctacctttttaagatgctgcaagcactttgaattcaaacagcctgctgagcctgtgctcaaacctatgagagcagggagtggcctcagctcctgcacttcccacacggaacacctccagatgtcatccacagtcgtgaggctgataacctgatgtcatggaccaacatggaactgactgtcttcaggtagtccctctgaaacaaaaactcaaactaagttttcaggctggagtggaaacctgttttcctctacactttaccccatgcaccttttcgcttgccaattttgtttcataccctttcgctgtggtaagtcctacctgtgaatacagctatatgctatgtcctatgagtcctctaaaatcatcaaacctcgaggtggaaaaactgggtcttgggcatccctgacacagttccctagtattctctaagtggttttttctccccacaaaatagtttttgttttgaaaatttagcatcgtgaatatctcctccccagatttaaaagtattttcgtttcggatcagtgtaatgactgtttttgtcccatctttgatgcatgggagcctcttcaagttggctcataagtcttttgatttgtccctagtaatcttctacagcgttttgttatctggtatgacaagatattccaggctcatctacatattttctacctcagaactgtttccttctaatagcaaa

SEQ ID NO: 2870 - DNA, 1030 bp, Homo sapiens
tttgtaagaagctgccctctgttttttttatccactcgtaaatctggatttatttcttctgttttatacaagctctgttaagttatgtttacagtatcttgtatcgctgtttacaaatcttgcatggactcctgccacagtgaaagaagaaaatcttcatgtcttcaaaaattaggcaggtaatctttgtatacttctgacaattgccagatctatggcataaataggcacacaaaaaggtacttaaacagttatagtcaccatcacctgcttcagaatggtcttttagatttgtgtttgttttgttaaagttgttggcaccaggatgcagagaatcagactggcctgaggtgaaggagcacacagccctgagggcttggaaccctgggtccagttcctcttcacacccccttccactctgagtagcacatctccccaggtgcccatggaacacctgctttcatcccaaatatccgtccacctaggcggggtggtatgttcttacgtctctctgactttgatgccactcattctatagtttagctggttttcgttcaagatattcttggtagtaactgacaagtatgttgcacatgtattgggggaggcgcttcatttttattttaatacacatgtatttcctccttgcacaggattttgatggtgtgggaatatcctaagtggtagccttccaagtagcagtgagttgacattcagctgcttttaactattcaggctaccttttatactaaaccttgaaaactagaatctaatgtctaccccaaaaaagtagttctttgatattttatactttttatgtaccatgtcagaaagagtatgttggcgtttgtcatgggactcatttcacataatagaatgcctagtctcattgaccaatcgttaaaaaatcatatttgtgtgtcttaagattcatatttatatgttctctcaaatgtatgtctcttacgtaacatactctaagaatgaaactgtcaccacaggtaaatccttgttagcaaggaatctgtct

SEQ ID NO: 2871 - DNA, 1051 bp, Homo sapiens
ttccgctctcccgcccctgcaggctgtgtgccgagcttggaagaaagtgtgacccgttcgacggaacaaaggacatgacagcccggccccgtgcggccactgcggagcgttaggaacattccctaaaatggcggccggcgcgtcggaacagggcgggaggcggcggcgcgtgggggcgggacggggaggggcgcggccagccgggcttctgcttccgcgaccccggcggtgcagggcgggtggagtcgcggagtagtcctcatggccgccccgccggagcccggtgagcccgaggagaggaaggtaacctgggggtcggcggggcgcgcgccgcgggtgggcggtgggtaaggacgttctccgcggagctcctaggcccggagcacgtgtcactggcttctctgccacccatgggcttgaaactattttaactgttcctagtccttatcccaagcctccaacattttaatctaagtggccgggacaaaattgaccaaaactagggggaggaggggaccagtagtactaatgacttactacaggtcattatgaaataagctaacaatactgaatctttggcgagaaaattttgctgctaagggcactgcactgtaatttgttagtaaaggctaatagtagagattaaagctccgttgaggacaggtgccttgtctttaacacgttgtattcatcacatttaacataggagtaattgctgagggatgacttgattgtactacgatgagatgaagggttaagatttcttccccatcaccagtagcctccctagctggtgtccctgtctccatactctcctgaatccaccttccactattgtccgctggccctttccagcctgtaaactggacagttttcattcctctgcctaacatccagtcgtagcagcccatcctatctctttaaggataaaacccaaattcttggtatagtaaagctaaaccaagcgctctccctggaagggctcctgtgtttcaccaaagctgacttacgtactttccccatcttcccaggcatcttgtacgtcgttaca

SEQ ID NO: 2872 - DNA, 1032 bp, Homo sapiens
tgacacatgagactctctataggccacttgactgtacatgcaacattgcatctggtatcccatagagtgagtcattcaagagacagaaagagatgacacagaagccacaatatcttttataacataatctcagaagtaaccaaacattacttttgctctattctattggtgacataaactaaccctatataatatcagtggtgactgcgcagtggtataaatagcaagaggtgagggtcatcgggaaccatctcagaggctggctaccacagtctgccttctggcctccagtgattcacgtttctcgcacatgtagaatgcactcactctctccaaaggcccactagaatgggccttccgtcccattacagccattacagcatcagctcaaagtccagaatatcatatctaaatcaagcccaggtggtaatgaggttccttggctgtagctacttatgtatgacttcttgagtggtttctcttgatctatagacctgtgaactagagagatgttacttgccccttaccactcaacatacaatgggaaaaggtaacatccacagacacttctatcaaaaaagaggatgtcttcgtgtatttgtgctgctgtaacaggataccacagactaggtaacttatgaagaacataaatttatttctcacatttctggaggctggaaagtccgagattgagggtctgcatctggtgagggccttcttgctgcatcataacatggtagaaggcatcatatggggatggggaaggaggctgaactcattcttgttaaggaacccactcctgctataacatacgtgctcctaagataacagcattaatccattcatgagggcagagccctcgtggcctaatcacctcttaagcttccacctcccaaaacttgcatgggggtttcagtttccaacacacgaactttggggatacattttttttttggtatactttttggtattcctccatagtaaggaggaaatgggaggaacacaggagtcgtggttcataaaactgagcct

SEQ ID NO: 2873 - DNA, 1033 bp, Homo sapiens
ggctgtttccaccttctgtctattgtgaataatgctactgtgaacactggtgtgtaagtatctgttcgagttcccacttacaatacttttagttatttactcagaagtggaattgctagatcatatggtaatttgatgtgtaactttatgaggaactacgatactggtttccaaagaagatactattattatcaccatgtggcaagtggggagacttgggcacagagaggttaagtaacttgcccaaggtctcacagctagtacatggtaaagccaatggtggctggctccaggtcagtgctcttaaccagcaatatatacatacttactggcctcttttgtaatctctgttataattatgttttcctatttggggaagattgacatcatttggaggttttttttgagatggggttttgctctgttgagcaggctagggtgcagtggtggaattatggcttactgcagccttgacctcctgggctcaagtgatccttccacctcagcctcccaagtggctgggactacaggcatgtgccaccatgcccagctaaatttaaattttagaattttaacttttttgtagagacaggatctcactatgttgcccaggctagtcttgaactcctggcctcaagcaatcctcccccctcagcctcccaaaatgctgggattacaggtgtgaactaccgcctgttttgttttgtttttagaggcagggtctccctatgttgtcaggctagacttgaactcctgggcccaagctattagcttgctgagtagctgggacaataggcatgtgccaccttcgagttttgagaattggactaaatcaaacaatattttactcgtagagtatttccttcttggattgatttttttgtttgtttgtttctgagatggggtcttactgtgtggccctggctagtctcaaactcctgggcttaagtgatcctcctgccttagcctctggagcagctgggactataggtgtgagccatggtacccagctttggattgattttttttttac

SEQ ID NO: 2874 - DNA, 1040 bp, Homo sapiens
cattttaacattagaatggattgttgtttattttctacaataaaactcaggtcaccttcgaattaattaagctgacaaaatgaaaatgacttaattacccaaggtttggcatgtaaagatcttaagagggggcagaacgaaccactcgaaaacgagtagcagtgtaatgaaggcttcttttttaaacaataacaaatgcttcatcaatctgagtgtggaaggtgatttatcaaaataaatattactaatttatttttttatgagtgccaattacaaatatcatttgggataataataacttagtgtaaacatttatatttgctgatccagcatgtcaccatttatggagtagctaaaggagttgagatcattggaactagagaaaagaaggttgagtggaagttgatagtgtaaggtagtggcaattctccctttgtctttagaattctcacccactccgcatatctgtcatgggagcattgtcctgaatactgagtaagaatactgagaaatgttatggtgtgcaaatgtacagctcctgaaagagcagaatgaagcacaagcagtcacaatggaaaaatatatggcatggccactgcctcctccttgcaattctctccgatcttggcatcttatatggcaactatatggcaacttacaagcaaaggggaagataaagtaaagggaagtgaacaattttccaaacttagatattctgttataacaagacacacacacacacacacacacacacacacacacgggtctctatttgaagatggcttcaccactatatgtgtgtatctacatagatgtaaacatttagagttgctgtgagccttcctcaggcatgtagtcttgcccccaaaagaggcggctgctacccaagagactgtcgctgttcattcattcatgaaacactgaaggagtaccatgagatgatgtgctgggaaccggagtccctaacgaatccaggtcacagtttagtgagggaagcctgcaaggcagtcagcagccacatttcagataggggcatgttc

SEQ ID NO: 2875 - DNA, 1027 bp, Homo sapiens
ccgcctgcctcggcctcccaaagtgctgggattacaggcatgagccaccgcgcccggctgaaatgacttctcttagagctgcctcctttctgtggcacctcttccatatgattgggttagtaaaaatattctaaataagcaattgatttgaggctttttgaagccaaacagtttggtgccttgagagcataagccattgcttatgtgaaaaaaaacaagaaactgtatctttgcatatactggggcccaaataaatcccgtttgaatgaatgaacatttcctagtgaaaacatggggctggaacccttctgtgtccgtgggaaaataggaatctattgatggatatggctctttggcttaaagtgaaaaatcatgaactggtggtcaagaaatctaggcatagtccacgcttttaaccctctgggacctgtttttctgtaaactgaggtgacgctctgttctggaacagcccctaaggggccgtttcaggtcctgctacacgctctgagttgtgattagagactctctggccctgtcatcgaggaggacgcctcgagacaggcctcatatggtttgcatcacttcctcaaccagactcgctcaacctgaacctcccattgcttcccatcattgtgtctggctgtcttgagtgtctccctcctgagccaccccttgctgctgcagtgtaaagaggcctcttgatttattaatcaattaatcagtgcgtgctgaggagctgttcggggtagttaaacagggaaaacaaacagctggagcctgcaatcaagatggatcctaattaagaaccaccccccaaatgctgatcttcctgccccgtcactgcctcacaactcccccccaccagcctacagctcagcaaaccgccttcagctctgatggggcttctaccccatgcaagctgacagtgaatttccgaagggcagattttctccctaatgtcctagaggtaaataagccttgagatgagcgttatcaattacctgcaacgactgttgagcccccaaat

SEQ ID NO: 2876 - DNA, 1670 bp, Homo sapiens
gctaattttttgtatttttagtagagatggggtttcaccacattagccaagatggtcttgatctcctgacctcgtgatccacctgcctcagcctcccaaagtgctgggattacaggcgtgagccactgctcctggcttttttttgttgttgtttttttttttttggagtctcactctgtcgcctgggctggagtgcaatggtgcgatcttggctcactgcaacctccacctccctggttccagtgattctcctgcctcagcctcccgagtagctggaattacaggcatgcgccatcatgcctggcttattttttgcatttttagtagagatggggtttcaccatgttggccaggctggtcttgaactcctgacttcaggtgatccgcctgccttggcctcccaaagtgctgggattacagacgtgagccaccgcacgcagcctcaaacactgggtcttatttcttctagcacactgtatacttgtacccactaaacaacttctcttcgtctcccatccccgctgcccatcccagcctctggtaaccacccatctactctctgtcttcaccaactccacttgtttagttcccaaatatgagtgagaacgtgtgatatttgtctttctgtgcctggttcatttcacttcccataatgacctctagttccatgcatgttgtacagctcttctctcattggaatatattttgtaaaacaaacaaaaaaaaattgggggtatgaaaggttttcactgctcatataaatgacaacttgtaaactactgtgaatagcaatattttcattgagtagagtgctaccaatatgcccattcagaatgaaaaactctgacaaacagctctgtccgtatatccttatcactcactgacaatcttttgattggcactggagcacccatctgctgggttttgtggagactgtggccatctctgccttttagactgagctgctcagacagttgacccaacaccggctgcctccttgccactgaatcggaatgaggtcatacttgtacatgcttcttggaaggttttcaggcctcagctctactgagcgaagacttggttgagtaacaagtgaggaggaaactgtagggttccattgtttacaatggggacagcctgcggcaccactagacattctgaggcgggtcctggttgggggtcagaaggtcattggataggcgggaaaaaaaatcattgcaaggttatgattgcaccagtgcattccagcctgggcgacagagccagactccatctcttacaaataaatcagaggaatgggagaaaatatttacaaatcatgcatttgatatttctccaatcatataccggtggccaataagcacacgaaaagatgcttaacatcattagtcattaggaaaatgcaaataaaaaccacaatgagatgccacttcaaaccgtctgggatgactataatcaaaaagacagatcgtgcattgggggcattttgagcattggtgaggatgtggagaagctggaacagtctatacgttgtttgtgggaatgtaaaacagggcagccgctgtggcacagtctggctgttcctcaaaagcttaaacacagagttaccaaatgatctaacaattccattcttagggatatacccaagagaactgaaaacatacatccac

SEQ ID NO: 2877 - DNA, 1044 bp, Homo sapiens
actttctctttagacattgctaatgttattcttattcttctactattcacaataatagctaacatttactgagtgcttacagtgtgcttggaactttgctgagaactttataccaattatctgagttttacagaaacattttaaggtagatattgttaatatcccaatttgacagaaggaagaaacaggagttctgggcaggtaaggaacatgcccaagcattgctcactaataaatgactgagctgtgtgtaaacatagttctttccacgtccaaagcccatacttgtaaccactgcactgctgtttgtagatttgttcgactcctcagagcagtaagtcagtttcatcttacttgcctggcctctccattgagtattgaacttggcaggaaatagtgttgggagtgatttgtgatgtctgagataggtagatccagtacagaggaatgttgaaattagacttactagtcccatattagattcttctcagactatccacgagagacttctccatggacccaataccaaccaagcttctgtagaacattttttttttttttttttttttttgagacagagtcttgctctgtcaccaggctggagtgcagtggcgcgatctcggctcactgcaacctccgcctcccgggttcaagtgattctcctgcctcagcctcttgagtacctgggactacaggcgcacaccaccacgtccagctaattttttgtatttttactagagacagggtttcaccatgttggctgggatggtctcgatctcctgacctcgtgatccacccacctcagccacccaaagtgctggaattacaggcgtgagccaccgcacctggcctgtagaacacatttttattatgcagtccatgttcatatgtctagcctgtcagtgggttacttgttaataaaaagcagccgtttcatattagtgtctcattgaaagcagtgcctgttttccattcattctaccttggatttgttttcttcctcaatactgaattcttagaaaatgatatgtatgttgaaaaata

SEQ ID NO: 2878 - DNA, 1023 bp, Homo sapiens
ccattaccataagcttaagataaataagacataattaatccattaccataagcttaagtacttcgtgtgtaataaaacatgtgaatcctaggaaataagtgaatcttatgatgacttttcactatcaatatagaaattaactgtcaactaaattttatgtgagaactttttttcttttttaaaaatttattttagtttagttttatactgcaggacatatgtgagaagtttagaggtaagaatttagggttgggctgttgaaaggagcgttctggttttttttttcttttgagacagagtctctctttgttgcccaagttggtctcaaagtcctggccttaagtgatcctcctgcctcggcctcccaaagtgctgggattacaggcatgagccaccatgccctgccactgatttgcttattcagacatttaccagccaaagttgtaattgcaggaaatgcaaaatattcataggtctgtcttgcaggtggccaatttcttattgtcgggaactcaaaggttattccattccttttatgggatctgatgtgtctgttgtaaggaggactcaacgttacttgtatgaaaatttagaggaatcaccagtaagtatatatggtttatttatcaataaagtgtgtgttacagttcctctttctattcagtgtgggatatttttgtttataaggcagaaaaaggaagagctaagtaatacatgtttcagcctctggaaatacacagaatcattagggtagaacattttgtattttataaccttgtcttttgattcagatctggctgctgaatatctttttaatgtaacacaatagcagcaaattcaatacgggaaatcctgctgtcataagcaccccagaatccctgtttagggtttcagttgctagaaactcttttgcttgtggaaatgtctggaaccctttctgtcccctctctccttgccacgcctggagttccatcctgctgcttttggcgaggaaagtaattgctttcattgccgagacttcag

SEQ ID NO: 2879 - DNA, 1079 bp, Homo sapiens
ttataaacatttttttaacttatgtttagtcgttattctttaagaaaaaattgagaggatttttttgttgtttttaagtgaagtgtgtgaatacagatagggatcggctcagtgtacaatagagaaacaaaaaacctaggatcattggcttcaatgattgtcaagaagcagtgcagtgcagtgggtggagtgtggactctggaaccagctgcctgggtgtgattttggctcagtcactacctgttagtttggacaagtcacttaacctctctctctatgggataaaagtaatattgaccttaaataattgttatgaaaattaaatgagtttaatagacctaaagcacttagtacagttcctaacacttaataaatactttcgatatgttatttttgttaagtgaccagagtatctattgaaaaaaatctgcacacctagagtaagatataaaatctaccatttgatttttgatgttgttgaatgggtacttcatgattcctttctttttccctgatcaactgttttctgcagaggctggctatgtggctacccccatagctatggttcaggcagccatgactcttctaagtgatgcttctcatctgcctaaggcgtaagtttggttttcttccaattagaagatcttttttatctatgttatattttagcttattttgatttgattttcaggctttgggtttgcatgtaagcatttatagttcagttcctttgcttcaaaaatataggtaaattaaaactgtgagaaggacagcttcttaccagcccagagttggtctcagaggaacaactgtggaggtaaatgagaggagacagaaaagttggagagccatgagttaacttcagccctttataaagatacctcaagtccagagtcagccactcaaaaaagtccctgttgttaatagtattactaggagcttccaatcagtgcctaactatacccagctggcagtagtaaccctgactgacaccagcataaatggaaccatgggatcctggctagatgattttcagacgtactgtcttactggagcatttagctgtccccctaaaacta

SEQ ID NO: 2880 - DNA, 1034 bp, Homo sapiens
cataatttaaaaccagaagggacacatttgtaaagaaaagggacagatgagccaaagatttacagcgcatgtgtcagataaaagatgacctatgattgattgtcatgtttatcacctccaacatcttactcaacagggatatcatcactagataaataataatttttttaaaaagctcaggctgggcgcaatggctcatgcctgtaatctcagcattttgggaggctgaggcaggcagattgcttgagcccaggaatttgacaccagcctgggcaacatggcaaaacaccatctctgtaaaaaatacaaaaattaggtgggtgttatggtgcatgcctgtagttccagctactcaggaggctgagcccaggaggcaggggttgcagtaaggtgggatcgctccactccactgcactccagcctgggcgacagagcgagactctgtctcaaaaacaaaaaacaaacaaaatggatttcaataaatcccttctactcagataatcaaaaatggttaattttctatgtgaggcggtgatttggttttcgttcttcaaagtctctattgccttatctttatttatttatttatttatttattttgagacagagtctcgctctgtcacccaggctggagtgatctcggctcactgcaacctctccctttggggttcaagcaattctccttccttagcctcctgagtagctgggattacaggcgtatgccactaagcctggctaatttttctacttttagtagagctggggtttcaccatgttgacaggctggtctcaaactcctgacctcaagtgatgtgccagcctcagcctcccaaagtgctgggattacaggcgtgagccaccacacctggcctgccttatctttcaatatccttttagcctaatttgtttaagcatatctggtgcttctgccatatcataatacagtccttttgtttccaactaaaacctaaaaactgttttgcttagataacatggttttactggatattctttctgataattagaatttctgc

SEQ ID NO: 2881 - DNA, 1029 bp, Homo sapiens
taataataaccttaaatgtaaatgggctaaaagccccaattaaaagacttggactggcaaattggataacgagtcaagactcatcagtgtgctgtattcaggagacctatcttatgtgcaaagacacacataggttcaatataaagggatgaaggaatatttaccaagcaaatgtaaagcaaaaaaaaggcagggattgcaatcctagtctctgacaaaacagacttgaaaccaacaaagatcaaaaaagacaaaaaagggcactgcataatggtaaagggaactattcaacaggaagagctaactattctaaatatatatgcacccaatacaggagcacccagatgcataaaacaagttcttacagacctacaaagggaattacactcctgtgtaataatagtatgagattttaacaccccactgtcagtattagatcaatgagacagaaaattagcaaggatatccaggacttgaactcagctctggatcaagtgacctagtagatgtctaaagaactctctaccacaaatcaatagaatatacattcttctcagtgccacatggcacttattctcaaatcaaccacataattggaagtaagacacttcttagcaaatgcaaatgaactgaaatcataatagtctctcggaccacagtgcaatcaaattagaactcaggattaagaaactcactccaaaccacacgatttcatggaaatcaaaaaacctgctcctgaatgactgctaggtaaataataaaattaaagcagaaatcaagaagttctttgaaaccaatgagaacaaagagacaatgtaccagaatctctgggacacagctaaaacaatgttaagaggaaaaatcatagtactaaatgcctacatcagaaagctagaagcaagagcaaactattccaaaagctagcagaagacaagaaagaactaagataagaactgaagaagacagagacacaaaaaaccctccaaaaaaatcaacaaacccaggagctggttatttgaaataattaac

SEQ ID NO: 2882 - DNA, 1090 bp, Homo sapiens
ttgctttcttcccatccctttcagggatgccaataattcatagatttggccactttacaaaataccatattgctcagaagttttgttattttttattctttttaatttttctgactgtcttatttcagagagccagtcttcatgttctgagagtctttcctccacttggtctattctgctgttaatacttgtgactgcattatgaaattcttgtagtgtgtttttctgctctgtcagaaccatcaggctcttttttatatcagttatcttgtctttcagctccagtgattcttagtttttttggattgggttttgcattttcctgaatcttgatgatcttaattcctatccatattctaaattccatttgtcattccagccagctcagcctgagtaagaacccttgttgaaaaactggtgtggtcatctggaggacatacaacactctggccatttgagttactggagttctttcattggttctttctcatgtctgcaggtgggtgttcctgtaactgcagtgtagattgagtacagtcagtacacttttttttctggatgtcttcgcagagccaaggctttgtgcagggtcttcatttgtagctgacttgtctttggtctcacagaggggaatgctagcaaggtgtttttggtgttggaacttcgggatgtgatccagtaggtggtgcttaggcatactggttagttggtaggctcttgcttggtcatgtggctcccctatattttctgacagttgcagtcatgctccctctcaatgttctgaaagtgtgggcttctctcccacttgaatgctggctataaattgtggcttggcactcttgggctgcccaccacagctctggggcactctcagggcttatgttcctcccctggcttggaggcagcagaggaagggaccttaatagtggttgtggccaaaggtcttttgcttgtctcctgggggctccacccaagaggagccggttagcaattgctaagtgcaatcagcccagaacggagggtctgtgctgtgggaccaagcccagggtttcctatctggtgacaagcagggggagtgggtggaacctgt

SEQ ID NO: 2883 - DNA, 1027 bp, Homo sapiens
gaaaggcataatctttattaaattgtccaggtatttatttggcctttgacctgaagatacacatccttcaagtctgtttctttcatttaaaaaaatcctgaaaaagacagcccagaagaaacgcttatacaagatgtgggaaaatgaagtgagagatccatgaagaattgtcttccaaaagggagcaacattcccttacatgtatgagaatattgatacagccattataaaaaaccgtaaggtggctcatcacaatattaaactagaactaccatattatccagcaagcccacttctgggattatatccaaaggaaataaaatcagtatctcagagagacttctgcaatcccaggtttattgcagcattttccacaatagccaaagacacggaaacaacctaaatgctcattaatagatgaatggatacagaaattgtgatacacacacgcaatgaaatattattcagccataaaaaagaataaagtcatttgtgaaaatatgaagctggagaatattaagtaaaataagtcagacacagaaagacaaatgttatatgatcttacttatagatggagcttaaaaacattgaactcgtagaaacagactacatagtggtttccaggggccagaaggtaggggaaatggggagacattgctgaaaaggtacaaactttcagttataagatgaataagttctggcattctaatgtacagcacgggtggcaatagatgttgtctcagtcccttcctgctgctttaacaaaatacctgactaggtagtttatacatgacataaactcaattgcttacagttatataggctgggaagtgcaaaatcaagccattggcagactgtctctggtgaagaccttggtctctgctttcaagatgacatcctgaatgttatgttcacagacagcagaggggcagaaagggcagaactcactccctcaagtccttttatgaagtcattcatctcaatgatgagggcacagcctttatgacctcaccacctcctaaaggcc

SEQ ID NO: 2884 - DNA, 1107 bp, Homo sapiens
ccagactctgttgtgtgtcctgatttcaccttatagcacaggcctcatcctggatcccacaccctgatgtgtgtcctgattctagctcagagcatagacctcatcctggatcccacaccctgttatgtgtcctgattccagctcagagcacaggcctcatcctggatcccagaccctgttgtgtgtcctgattttaccttatagcacagacctcatcctggatcccacaccctgatatgtgtcctgattccagcccagagtacagacctcatcctggatctcacaccctgatatgtgtcctgattccagctcagagcacagacttcttcctgacctcagcatctctctccagcctgctcactaaggtgcagtttaagccatgctgtccctaccctgggtattttccctctgtcagacccacatacagggcaattctatttctgcccccttgctatctgtgttgcttaagtggtgggagatgatgggttaatttttccattcataaactgttgatacacctggcccaaatggatagaacaaaatctggcacttaaatacccagcgcagagttagagatacttagcaggtgcttgctcatcacaatccttcttcctcctctattagctgcatataaacttttaaactttatagtgtatgacatttctcattttagtgtatcttaatctgcccttctgccattgaacactgtaataattaattttcggtgtcaacttgactgggctaagggatgaccagatagctggtaaaagagtaactccaggtgtgtctgtgagggtgtttcccaaagagactggcatttgaatcagactgagtaatgaagatttgccctcactgatgtgggctggcattatccaatctgttgaatgcccagagagagtgaaaaggcagatgaaggaggaattcttttttcttcttgagctagagcacccaccttctcctggtcttagacactggggctccaggttcttgcagcttcatactctgacagtggccccccagtttcttaggccttcagcctcggaccgagagttacaccaatagcttccctgcttctccagcctgcagattgcatatatgaggcttctc

SEQ ID NO: 2885 - DNA, 1025 bp, Homo sapiens
gcatccccaagaaaggcacatgctctgataattcctgctgtattctgttagaagaaggcaggactaggccgggtgtcatggctcccacctgtaatcccagcactttgggaggcatgtggatcacctgaggtcaggagttggaaaccagcctggccaacatggtgaagcaccgtctctactaaaaatacagaaaattagttgggcgtggtgtcagaggtctgtaatcccagcgacttgggaggctgagacaggagaatcctttgaacctgggagacggaggttgcagtgagccgagatcgcaccactgtactccagcctgggcaacaagagggaaactttgtatcaaaaaaaaaagaaaaaaaaaaaagcaggactgctattgacaaagattttctcgaccaaactctactcatgctccctgaactcttctcaagccctgatttttgggcttctgtgtttatctctgcacattgtctaatcctgctaagtcagtttagccagaatcctgcaccgttgatactgatcacccttgatatctgattgagttcctcatcctccatcatgcctctggtgatgtggtatctgatcaccgtgatatctgatcaggttccttgtcctccatcatcccccgggtaaagtctgatcaccatggcctgccttcagcaagagtcctgttaggtccgttcagccagaatccccatgcccatggtgtttcttcttagtaattttctgctgacccccaccctgctccttggctataaatttccacctttacttgtgttcagagttgagcccaatctctcttccccactgtaaaacactgctgtggtggtccctatacttatctccattggccacctgaataaagtctgcctaactgttctttaatcagtagtatcatcattttttcatcaacactgtcacatgttataatgggtctttcaagcaacaaagtgggccaggcatggtggctcatgcctgtaatcccagcactttgggaggctaaggtgggcagatcatttgag

SEQ ID NO: 2886 - DNA, 1020 bp, Homo sapiens
accagcatctgagggactgtcgtggtggtgtagcagaggtccaggaaggacaggtgactgaggaagatgtacatggggctgtggagttgaggatccacccgggatgccaggatgatggcgacgttccccaacatggccagcacataggacagcaggaggaccacaaagagagggagttccagccacggcctgtcagacacacccagaaggatgaaggctttaggggagtcccctaagaagctatggttgtcacttttcatgttgcggcattttctggcacttgtggcaaattgagaaaattggaatgaataatacctgagaagaggaattgatcactttcctccctcttgcatccactcttcctttcccaggtgatagcctgtttgattctccttacctctgtggagacgctgggatgcggaagggtcagaaccaggagccccagtagcagcctctgtgtctttgctctccttcctactcagtggccgcaactaaaccatttaatattcctgaacttctgcatctgtaaaatggggagaaatacctccttcaattgccaagacttggggacgatagagacattaagtatgtgagaagaatacctcacgaatgacaattatgttccaggtagagcgaagcgtgctgcagctcccatcaccgtcagagtgtttgatttctctctacatccacatcgacaaggaattgtccaccttcttaggctttcccattttgggaggtagtggtaggagggaggcaggcggtgacataaagcaagcagaagggctttgtgagcagctgggggctgtattgataggaccaccccccgtcactggctcacgcttgcatccagctcccggattcatgctgatctccgctgtcatgaccacacacgcacaggcagccctgtcactcacactggcagtaaaagcagcacaattctaggtcctgtgagtctctggagtggaagagccaaggtatacgttacttcagcccctgaataggtcatggtagttaatgaga

SEQ ID NO: 2887 - DNA, 1030 bp, Homo sapiens
ggaataatttacctctcgtactcagcttaaagttagttttcgatatacttatcttgagagaagaaaatctagaaactaagcctgggacgaagtatgttccttaggtctattcagaaactgaagacgtgagattcaggtagaaattgggattaattctctgacgtgaactctgaaatcagtggcctgagcatcacttagttctttcttggctttgtagagaatgttaggcttatggttgtgttcactattaccatattatgaaacagcattcatattttctcatctctcagccttttcttattcaaacaaacatttcttcatcattcagttgtttctagtggttctagcgactgatctagtagtaaatagtaacttctgctgtgtgactgctctatgctaatcactgttcttgtagtttaatagatatttagctgtaatccacatactcctctttttccccacattttttaagagatggagtcttgctctgttacccaggctgaagtgcagtggtgcaatcacagcttactgcagcctcgagctcttagacaagtgatcctcccacctcagccttgtgggtagctgggactacagggcttaccaccatgcctggtcggttcattttaatttttttagagatggggtcgcattttgctttgttacccaggctggtcttgaactcctgacctcaagcactcctcttgcctcgacctccccaaaacctcacattttgtatatggtactgaaacttcagtataaaagtgccttgcccccaagcctgtggcaaaatgggaactccagtccaacagtattttttaaacttaatttgaaaactctcctgggctacttcttatatgaatggactccagtctgtgcatgttgttaggatgcaaccagtgagtccacagagttacggagcccggggaagtctggacattaccttctccagcactgtcctgtacatggctgctggaggccaagcactgacgatgtgatccacggtgtcacctcaggagaaagtggaaatgca

SEQ ID NO: 2888 - DNA, 1051 bp, Homo sapiens
ttcctcttcattttcttttaccagtgttttgtacaaatcattctagtgttctcttccatgtctacagttaacagtaaagtattacggtaaaaattatttcaatgcttttgaaatgtcatttctatttctaagcctgtggatatttgttttacaatgtcgtagcagttaaaacatacattttgaacttgttttatgaatcagagtaagtctttgttgtgctttgttgcaatgagcagcgtatatttttatttggtgatgatttactaacaaagtttactgcctaaacttcttgccatttcctgtcctgaactcagtcagatacgtcatattccatgaatacaacagagatgggctctggagcagagggaaaataggcctcccatcagcagtcacttgctactgccagggagagcacctcctctcttccccgttagggacaattgtacccaactgccacctgtgccactgcttctatcattactaccaatctgagcccagtcataccccagccactgcttggggtcctgtggtactgtgaaatattgcaagatatgtgtgtgtgtgtgtgtgtgtgtgtgtgtgtgtgtgtgtgtgtttgtgtgcataagaacgccaggccagttgtctcatgtgggtgttgcctgagcccacttgtgtagtcactgctactgaaccaaaactgcatgcattctgccaacctctccagttcctctgtcacaagcatgcttaaagatgaaatgattgaaacttccaatgataacagcagagcatgaaaccatgcatggagccctttgagtgtgggaccctgtgcataggtccatgaaaccaatcccgagaaggatgggaagagtgaacatgaagtgaatgagatcatgcagcctaggatagtggtgggaatgcgtgatggtctgagtgtttgtatactccccaaatccatatgcttaaatcttaaccctcaatgtgataatattaggagttggggccttttgggaaatgactaggtcatgagggtagcaccctcttgagtaagatttgtgcctttctaaagaag

SEQ ID NO: 2889 - DNA, 1047 bp, Homo sapiens
aggtagtctagacagggtggatctcctggaaaagcaggtagtatagacagggtggatctgctcgacagagggaggtgtcacaccccaggtggggctgagtgggacggcatgagacttcatcaagctactcagaatgaaacatgatttaacacgtgtgtattgtttatttctggaatttttcatttaatgtttttggaccatgactgactgagagtaactgaaaccttagaaggcaaaacagtggataagagtgacttgccgacctgaacagtttgctcttagaaactttgtgtggttggttgtctgatctgtgacttcctttaattcacttctctgagttccttaaaggtaggaatcatgttttattcctctcacagccatatttccttaaaaactagttggtgaaccgtggaaaatctagattgctcaggccgccttctgccaacagaaataacgttgcctttcagcggtggtttgcttttctgaaattttcggtcatcacaccctttagaaggaacaactttagagaataagactggccggtatgcaactcccagaattttctcaggaatgtttcaaaaatctattgttattctggatactggtgaacagatgcgcgaacggctcaggctctgccactggccttctccatgactgtgtttgtagggacaaagcatggtagcaaacaacttcaaaaaacctctgtggcttgaaaacacaaagtttaatcacttgtccatgcttctcttccactgcaggctgggggtagctcctgtatcctcaggcccaggtgagataattttcccatcctgagcactgccaggctcatggcagaggggagggtgcaggaacgttgtgcggcttttaaagtttctgccaataaggggcagagtcacttccattccgttccattggctgggcctgaccacgggacaagtagcagaacctttccatccaggagaaacagagagtgtctggaggaagaatacacactgtccccaactcccagagttaatgctgtgaattcatcaacaggatgatacactt

SEQ ID NO: 2890 - DNA, 1012 bp, Homo sapiens
ggttaacagataagccaatatggatagaataatggctgctaagcaaagagaaactggacgctttagagaaattagttactgaacaattagaaaatgggcacatagctccaacattttccccttggaattctccagttttcataattaagaaaaaatcaggtaaatggagaatgttaactgacttaagagccatcaattcagttatacaacctatggaaatataacagccaggattgccttctcctactataattccaaaaaattggcctttaatagtcacagatttaaaagactgtttctttactacccttttagctgagcaagactgtgaacgatttgcatttacaattcctgcagtaaacaacctgcagcctgctaagcgttttcattgtttcacagatgggtccagtaatggtaaagcttcttattctggatcaaaaggtaaagttttccagacgccctatatttcagctcaaaaagtggagcttgtagctgtaattgaggtattgactgcttttgatatgcctattaatgtgatttctgattcttcatacatggttcattccacacagttaattgaaaatgctcagttacgatttcatacagatgaacaactgataataaaaacaaaaaaggggggaaacagggattacgggacagcccagacacaattgaatcttgcattattaactttccatttttcgagccttcccaaaggccagatgttaccagcagctgaacagcatctacagaaaccagctgcaaagacacaagcagaacaactggtttggtggacagatccaataacaaaaagttgggaaataggtaaaataataacttggcgtagaggttatgcttgtgtttctccaggaccgaatcaacaactgatttagataccatcaagacacctgaaactttatcatgagccagatgccgagaaagagattaaaagcacaatcatcattgaaattacagagcttctggctgggcgcgtggctcacgcctgtaatcc

SEQ ID NO: 2891 - DNA, 1050 bp, Homo sapiens
ggccctccgccccaggcctcccatcctccactctgagtgcagcaggaacctcgtgagatgagcatgtggagggagctccccgggatgctgggctgggcacagggtctgcaggggccgacggcccctaggctgaccttccagagctccctctccagccacccgggctcggcctgctgggaacagagctgccccaaccttgtgcccgctgggcctctgtgcagggttcccaggactgccttctggacaccttccctgctggggttctgacagcggggtggacagccttgcccagcctcagggccgtgcagcgccaggggtaaatgtggctctccttgcaccgctgcgcctagggctgccctaaggaaacacagtcggtctccaaggctggggctgcctccatggatgcagacggctcactgggggacttgaacatctgtggattttggtatctgtggggatcctggaatcagtgccccacagatactgagagatgactgtaccacagactgggtaggttaaacagaaattaattttctcacagttctaggggctggaagtccagggtcaaggtgtgagctgggcctttcctggcgagggctcttacctggcttgcagatggccgcctgttctgtccccacacgtcggagacagggagtgggtgctctggtgcctcttttataaggacacgaattctatcagatcagggccccacccttagggcctcatttgacgttaattactttcttagagggcccgttgaacacttgttcaatgaaccagttgacgaaaaagatcacagtcacacaagctaaaccgcagcacacaccacgcagtggtggggaggtggtgcgaagtcagagtgtgtgtccccccgccccaaattcctgtgctgaggccctaacccccaggacctcagaatatggttgtttggagatggggtctttaacgaggcgattaaggtgaaatggggtcatggggcgggccctgatacaatgtataagaagaggagatgaggatttagggagaagacggtgtccacaagccaaggag

SEQ ID NO: 2892 - DNA, 1047 bp, Homo sapiens
gagaggaccagcgtcaggctcactgcgaggtgctgcacagaaaacccacagccagagcccctgggcccagcccaggcaagaccagaaaaggagggggcaggtgggagaccagcctggggctcccgggaagcccacgggatggaggcgggagagccaggaggcctggggcaaccctgggacggttcctggatcgaggagagcaggggggtgatgagggttccctcagggctggggagccttctcctggtctcagacccaccccccttcagctcccaagccctgggtgcccctggctctgaggacagttgggaatcttccctgaggcaggttcaaggacagagctctgaccctggcccagggctgctttgggtgcctatgaactcggcttctggctcagagcagttccctgcaccccttcctgagccctctgtcctctggaacccgtgggcagggtgagggacgggtgttccttctgggtgggggcctgggcgcccagccagcacgacgctggcttgctgagcttagggcagaccccgacttcagaatttatacaaataaatgcaatgaaaagtgctggcaacctgatctgattacagagtcattcattctctggtcgttaataatttgtgcaataaaggactgcagccgctcagtgcgggggaggctgtggcccaaccttccctcggcgccggccccgggagctggaagcataaattattagtttcttatcgctgggcctgccatcgctcatgctgccagggcctggcgggagctggtggctgttctgctgcccgccctggccggctcagggccggctctcagccgtcgcctggggccctttgtcacccccaccctggccccccaggtgtgggagccccagagcctgctcaggcctggaggctgctgctggagccggcaactctggaagccagaaaggtggggctttagtgcctgtcctcagaccctcaggtaaccaaagccaaattactccctgttggaaacacaacctcacataccgggccacagcacggacacccacgacagcag

SEQ ID NO: 2893 - DNA, 1044 bp, Homo sapiens
ccctagcaggtcgggcttgtgctggctgcacattggctggtgagcttggcgggtctgtgggcacggagagaccagaacgtgcgtaacaggcccgatgagggtgccaggctgtggcgacccccgagcttcagaggagaggggcaccagccgggggccctgcacaggcagcctcaggtgcgaggagctggagcccaggccagctggggaggggtggggtgccgtggctggaagttgctgttctcagacctggttctgagaccctctccaactgcatgggggggtccaggctggaccccagatgtgacggtgtatgtgctgggatgggagccccctgagagcagggcttttgttaattcaccggcaatcccacatgtctggcacgagataggtgctcagtcagtgaaaaccacacacggggtcctccattgtgtccaggggagggtgggccctgctcacagccagactcctagccctgggcagccctgctgcctgcctgctccttccactcctaccacctgcccaggtgggactctgcctgccttcctgtccccagtgctctgtaggagtttgaccacaggtatcctcttcatcagagagaggaaagctcacgatctgggagaactccaggcctggcccagtgaagacgtccttatcttcagcagacattgcccagtgcaaggggaggtcagtctcaggagacagtctcctggacagtggcgtggcatctgtcctaaggccttgcctgcagcacagggtgccacagaggtcccctgtgacagagcctcatggctggggcaggcgggggtcgcacctgctcctgcatgaagaggcagataaagacccacagcatggtctctggggtcccacatcccaggtagagaatgacccaggtcgctggcgtctgtgccatctctgctccactgaccactcatgggggtcctggagatcctgacaccggtggccggggagcagcagcccaggcacaggccccagtgcacatgcagatcccaccgtgtctgcacaaggccttgccccaacgaggcc

SEQ ID NO: 2894 - DNA, 1492 bp, Homo sapiens
ccctgtgggcatctcccagagcaggtccaggggtgagtgggccacaggcctgtttgcacaggtgccttcttcgagggagggaacagcccaccaccacctcctgccagaccagcttccttgagcataaacctgaccctgggtgaccacgctgggctccttcaccttatctcaccagaggcttctgctggtcccacagccaacccgcggagtgaggtctgggccaggagtgctctgctcaggcaaggaacatgcccagaagcctcccccgctatcctggccctgttctgtgggggctcgttggtctgttggggtctggggggccaggtaggagtgtgggtgtgagtgtcggtgacccttccttatgtggccacccttggccctatcaacctgtctgcatccaggacaccagcacatccctgaccccagctgtggctgccagtgagttcctgtgccttcctctcctgaagtctgtgtcttctcccaggtctgataccatgtggaaagtctgctcctggggccagctggaggccatgtggactggccctgagtgcccactgtctggatgcagccctgaccctactgcccgtgtgtgggctactaggttcacctgcacctgaccctccttctaggttcgcctgcacctgactccctgatgttcacacagtgatttggagagggaggctggggaggcgcaggtctgcatggcagtgcctctcagggtctgaggcccttgggccaggcctctcctctgacctgggccagcagaggggcctcctttcccttccaagagccctcccctgttcaccagcatctcatcatgctcaggcccacagtgtggttaaggaggggcatggggctggccctgggtttctggctgggtgtgggggcctacccggggcccatggtgtcttccagaaaagaccctgactgggtccaaagctggaggcacccctctatcctcactgtccactccctgatgttctggaggtccctccaggggctgggtgaggaggccttccccaccacctccttgtcttcctgggaagcaggcacccgttcagaggccacgttcccacaggaccaggctcctcacccccagcatcacccttttccacggggttgtgccccttccttggtcctgtccactcacacacacccgtgtccgtgtccatgttcacacctgttctgtgtccactcccacacacctgtgtccactcccacacctgtgtctcgtgtccactcgctcacacctgtactgtccgtgcccactcacacgtgtcccgtgtccactcgctcacacccgtgtctcatgcccgctggcttacaccagtcccgtgttcactggcgcacctgtgtcccatgtcttgtgtctgctcgcacatctgtgtgatgtgttcacttgctcacacgtgtcctccactaccacacctgtgtcccatgtccactcacacacctgtcttggtctgggacacctgggccccactctcccctg

SEQ ID NO: 2895 - DNA, 1034 bp, Homo sapiens
tatggggctctgtgcctccccccaacctctgccctatgtctgagggtgagggtgagggtgcctttctctggggctgccgtttccactctgccaagtgcagtctcagctcccctgacgcccctggtactcttgctccttcagcaacgcctcactccaaagctgttccatgaagtggtacaggcgttccgagcagctgtggccaccacccgaggggaccaggaaagtgctgaggccaacaaattccaggtcacggacagtgctggtgagcttggggggagcctggcatccaggctgtctgttgcgttctctgtcccgtgagtacatccaggccttttcgttgcagcattcaatgctctggttaccttctgcatcagagacctcattggctgtctccagaagctgctgtttggaaaggtggcaaaggatagcagcaggtaagaggggagggggtgaaggggggtagggtggaaggtgggtcgggaccacacacaggagaagccagaggccttgtggctaggacagagacatggcaacagagccagcgtcttcttggggaccctgagaaggcagcggggcacgagggaccgttgggagaggctgggcacttggggccagttggagcggccccaccttctttccttcctgaaaagggaagttgtctgctcagagtctcagaaggtgtggcgtgtgcagctgcctttgctctcagattttcccaggttagggttcttgctctatttccctttgtaagaacttgtaagtcctgtccatactccttgatctctgcactatgactggcctgtttcctggagctgtgtgtgtctgtagacaggggcctcatcaatgctgagaacctgagggcctcaacttcccctttagagaaagattgggcagagaaggccgtggaaggttttcagagaagagagacgcacggccaagcatttggtagagcatggagcacgttggggttccggggctgtgcagccatgtgaccttgaggcagtggaggcctagagttggaactgccccaggac

SEQ ID NO: 2896 - DNA, 1030 bp, Homo sapiens
tccgagggccgatttggcctcccggtgggtgtctgtatccaagggggcttttcttgctcctctcagcggggctggggcgagctgggcgtgcgggcagctgtgactcctgcgtgacccgcaggcgcctggcggagctgacggtggacgagttcctagcttcgggctttgactccgagtccgaatccgagtccgaaaattctccacaagcggagacacgggaagcacgcgaggctgcccggagtccggataagccgggcgggagcccctcggccaggttagtggggacatgcgtgagcagaacctcttgctcgtcctgtcccaccccggttgggttgctgacctcgcctggggtctcagggccaaggcctaaggatcgccgacctctgccccccagtcctttcagcttaacttactctttcatccgatgtttactgagctcctgttccgtgccaaactctgtcctaggcagggagcgtatgttggtgagttgtgcaaaaatctcttcccgatctaggagaactctcacgttcttgggtgaaatcaccgcctgcagttcggtagaagagagataagtgctggggagggaaaggaaggacagaggggctgaagagagagttgcaggggagccgagttgctctgttagaaggagcggaggctgtgctcggtggctcacgcctgtaatgccagcactttgggaggccgaggcgggcagattacctgaggtcaggaattcgagaccagcctgaccaacacggaaaaatcatgtctctactaaaaatataaaaattagccgggcgtggtgggcacctgtaatcccaactactcgggaggctgaggcaggagaatcgcttgaacttgggaggcggaggttgcagtgagccgagatggcaccattgcattccagcctgggtgagagagtgagactccatctcaaaaagaaaaagaaagaaatcaaaagatacaaaaattagcctggcgtggtgacacacacctgtcgtcccagctactcgggaggctgaggcaggagaat

SEQ ID NO: 2897 - DNA, 1806 bp, Homo sapiens
ggttcacacaccccgcggcggcgaggccttaaatagggaaacggcctgaggcgcgcgcgggcctggagccgggatccgccctaggggctcggatcgccgcgcgctcgccgctcgcccgccagcccgcccgtggtccgtggcggcgcgctccacccggcacggggaggcgcggggcgcaccatggccgcagacacgccggggaaaccgagcgcctcgccgatggcaggagcgccggccagcgccagccggaccccagacaagccccggagcgcggccgagcaccgcaaggtggggtcccggccgggcgtgaggggggcgaccggggggcgggagggacgcgggactcagccggtgcccgacccgcagtcctccaagccggtcatggagaagcggcgccgagcgcgtattaacgagagcctcgctcagctcaaaaccctcatcctggacgccctcagaaaagaggtaagtcgggggcgaaggcccgagacccggagtctgggtcgcagctgacctggacctcccgcctatccccgcccccagagctcccgccactcgaagctggagaaggcggacatcctggagatgaccgtgagacacctgcggagcctgcgtcgcgtgcaggtgacgggtgaggcgcgggcggcggcggcttggaggcggggggagggcgcgggacccccgggacccggcaccgacctctcctcctgtgtcgctcccgcagccgcgctcagcgccgaccccgccgttctgggcaagtaccgcgccggcttccacgagtgtctggcggaggtgaaccgcttcctggccggctgcgagggcgtcccggccgacgtgcgctcccgcctgctgggccacctggcagcctgcctgcgccagctgggaccctcccgccgcccggcctcgctgtccccggctgcccccgcagaggccccagcgcccgaggtctacgcgggccgcccgctgctgccatcgctcggcggccccttccctctgctcgcgccgccgctgctgccgggtctgacccgggcgctgcccgccgcccccagggcggggccgcagggcccgggtgggccctggaggccgtggctgcgctgaggctgtggccctgagactgcatcggaggcggcgccccgttctagggccgtggcctttgccgagactgtagcagagaaaacgtatttattattccagagtctgcgtcacgagttttctttctttgtcttggtgaagagttgactttgggagcgccccgcagccacgccgcgccggggtcccgccctcctcccagggccgcggtctgcaggtggctgggggcgtcgggcgggcccgggggggcgggctgggggcgggaccgaggactgagggcgacccctccgctccgcgccctccgctccgcgccctcccctccgcatccctgcagccccgcatgcgcacccgccctctgcccccgcgttgggtttgcctcgctctgcggtggcggttgtgaggggtccccccggaggctcaggtgggaagctcaacgtccctgagtgcccagaatcttcccggtgctggaaggcggtcgcgcagcatcgccgggcaagttacttttcggaggcccctttcccgactcccagtccccggaccgcggaaggcggaggctgcggtcctgagcggcgctgggatgagggcggccgcccttggccctgaagacccccgctgggttctcctgttaagtgcagagctgcccgtgcccaccgcagacccctcctccaggcgtctgtgcggggggcgcccggcgggagcgcgcgggtccgagctgggctg

SEQ ID NO: 2898 - DNA, 1248 bp, Homo sapiens
gaaatcaaccacaaataaaataggaaaaactcaaatgtttggaaattaacccactattgaataaaccatgggtcaaagaagaactcaaatgggaaattagaaaatatttccaggctggggccaggcgcagtggctcacacatgtaatccctgcactttgggaggtcgaggtgggtggatcagaaggacaggagttcaagactatcctggccagcatggtgaaaccccatctctactaaaagtttaaaaaattagctgggcgtggtggtgcacacctgtaatcccagctactcgggcggctggggcagagaattgcttaaaaaccctagaggtggagctggcagtgagccaagatcgcaccactgcactccagcctgggtgacagagcgagactgtttcaaaaaaaaaaaatttgtaactcaggtggggaaaaaataacagaagaagaaaaaatatttccaactgaataataatgaaaatataacatcaaaattgttggtgtagctaaagcaatacttagaactctgtaactaagtgcgtgtaaaggcatgaaagcagagacctaagattcactcccagaagccagggaaaaaagaacaaagccaaaaaagggaaataaagacaaatacagaaatcagtggcatagaaagcatgagaaaaatggagaaacttaacaatatcaaaagctgattttttccctaaaagattggaaagattgacaaacctctactaagaatggtcaattttaagaaagaagaaagagccaggtgaggtgggtggttcacgcctgtaatcccagcactttgggaggcataggtgggaggactgcttgaacccaggagtttaagaccagcctgggaatcagaaggagaccccatctctacaaaaaaaaaaaaaaaaaaatttaatgagctgggtgtggtggctcgagcctgtagtcctggctagtcagaaggctgaggtgggaggatcgcttgagcccaggaggttgaggctgcagtgaactgtgatcacaccactgcactccagcccaggcgacagagagagacctgtttgaaaagcaaacaaacaaatagaaagataggccaagcacggtggctcacacttgtaatcccagcactttgggatgccaaggtgggcggatcacttgaggtcagaagtgagaccaggctggccaacatggtgaaaccctgtctctactaaaaatacaaaaattagccaggcatggtggtgggtgcctgtaatccca

SEQ ID NO: 2899 - DNA, 1044 bp, Homo sapiens
caaataataaacggtaaaaacggtagacctgaaatccaacgatagtgtcattatacacttgccaaagctcagcaccaagaacgtgcagcaccaagagtgcgccctcgtgtcaaccatggactttgagtggtggtgatgtgtcactgtcggtgtgtcagctgcaacaagtgggatgctgagggtaaggctgtgcctgggtgggcacagcggggaggcacaactccttgtacttaactgctcaattttgctatgaacctaaaatcactgaaaaataaagggcagcgtgtgtatacaaagggacaatcagaaaacgattaacatacctacatctacccataacagtaattatattaaatattaacatacctacatctacccataatgataattatattaaatattaatgaattaaaccctccagttaaaaggcagagattgctaaaatggacaaattagcaagatttactacatgctgtctacaaaagatgcactgtggtgtgtgtgtctgtctgtccgtctatgtatttgttttttaagagatggggtcttgcctttttgcccaaggtaaagtctagtactgctcaaactcctgggctcaagtgatcctcctgcctcagtctccagaatagctgggattaggggcatgtgccatcacactgaactaaaagatgcactttaaatataaaaaacacaagtaggcagaaagtgactgcaaaaaccatacatatatagacaacccacaatcatagttggagattttaacctctctctctccaattcttagaacaatagaccaaaaacatcaatagacaacccagaatcatagtaggagattttaacctctctctccgattcttagaacaatagaccaaaaacagcaatagacaatccacaatcatagtcggagattttaacctctctctctctccaattcttagaacaatagaccaaaaacatcagcagacaatccacaatcatagtcagagattttaacctctctctctccaattcttagaacaatagaccaaaaacatcaatagacaa

SEQ ID NO: 2900 - DNA, 1035 bp, Homo sapiens
caatagaccgtgagccgacagactgtgagctgattgatagaccatgagccgacggaccctgagccaatagactgagctgattgatagatgtgagccaatggaccctgagccgatagaccatgagctgacagaccctgagctgatagaccatgagctgatagactgagtctgtgagatttaaaaaaaaatttttttttatacagtcttgctctgttaccaaggctggagtgcagtggtacagtctcagcttactgcaacctctgcctcctgggttcaagcgattcttgtgtctcagcctcccaagtagctgggactacaagcgtgtgctaccatgctgagctaatttttgtatttttagtagagatggggttttgctatgttggccagggtggcatcaaactcctggcctcaagtgacccacccacttggcctcccaaagtgctgggattacaggcgtgagctgccacgcccgaccaagtttgtgagtaattatggagaccagaagaaagtggaactgctgaaagaaaaaaaaagcatagaattctgtattctctaagaataaacattacatgaaaatattttcagaaaaaggaaaactgataaaatttgtcaccatcaaattgtgctaccggaaatgctgaagatagtatatactacagtgaaactcagatctttaagaatgaatgatgaacatcaaaattagtaaatatctggggaaaaattaaaacatctcttgggtttataatgtatgcagatatgacagccacaacgtgaagagtagtagaggggatccgtggactgtacagttgcaaggtgtctacatgtctacattttgcataaagtggtataatgctagttctaagtagactagaaaaagcaaggttgaaattgcaattcctagagcaacaactatgagaataatggaaagaagcacaactaaagggccaaaagataacttggaaaggaatttttaaaacttcaaatcacgcaaaagagggccagaaagagaatagaggaacaaaaaacacagggaca

SEQ ID NO: 2901 - DNA, 1007 bp, Homo sapiens
atttatttatttgtttgtttttgagacagagtctcgctctgtagcccaggctggagtgcagtggtgctatctcggctcaccgcaagctccaccttcccaggttcatgctattctcctgcctcagcctcccgagtagctgggactacaggcgcccgcccagctaatttttttgtgttttaagtagagacagggtttcaccatgttagccaggatggtctcactctcctgacctcgtgatccacccacctcggcctcccaaagtgctaggattacaggtgtgagccaccatgcgtggtccacacttattatttttactttagttaatagtctaatatttaagggtatattgttttttaaatccaatgcctttactttttatttatttttttttgagatggggtcttactctgtcatccaggctagggtgtggtggcgcgatctcggctcactgcagcctcaacctcctggactcaagcgatcctcccacctccctcccaagtagctgggatcacaggcatgtgccatcacgcctggctgatttctgtaaggggtttcggtgtattgcccaggccggtcttaaaactcctgccctcaagcgatcctccagcctcagccttccaaagtgctgggattacaggtgtgagccactgctcctggcctttacttcttaaattgaaaatttctataaacttttacggtagttggccagacatactgaacatatttgttgagtgttgcagttgaaaaccatcagactccagtttattctggagccagagggcctggcctgggcctaaccctgccgcctactcacagtgtggtcttatgcaagtcttttcctcatatttaaagtggggcgataaggggcattgttgaaattagtgaaatcagtttgtgtgtataaatcccttcgcgtggtgtctggcatgtggcaagtgctctggaagtgttgattgctgctgttgttggacagtgaacaggtttacatcccttggagacccaggatc

SEQ ID NO: 2902 - DNA, 1658 bp, Homo sapiens
attcctccctgccccccagcccctggcaaccaccgttgtcttttctgtctctatgaattcgacaaccctgggaacctcatgagtagaatcatacagtatttgtcctgttgtgatgagctgctttcacttagcatagtgttttcaaggttcattcctgttgtagcatgcgtccaaaatttcttttcaggactgtagaatattccacggtctgtatagaccaccttttgtttatccattcatctgtgggtggacacttgctcccaccttttggctgtggtgaacaatgctgctgcagacatggtggctgtggtgaacggtgccgagacatggtggctgtggtgaacggtgctgccgagacatggtggctgtggtggacggtgctgctgagacatggtggccgtggtggatggtgctgagacatggtggctgtggtgaacggtgctgccgagacatggtggctgtggtggacggtgctgccgagacatggtggctgtggtggacggtgctgctgagacatggtggccgtggtggatggtgccgagacatggtggctgtggtgaacaatgctgctgcagacatggtggctgtggtgaacggtgccgagacatggtggctgtggtgaacggtgctgccgagacatggtggctgtggtggacggtgctgctgagacatggtggccgtggtggatggtgctgagacatggtggctgtggtgaacggtgctgccgagacatggtggctgtggtggacggtgctgctgagacatggtggctgtggtgaacggtgccgagacatggtggctgtggtggacggtgccgagacatggtggctgtggtgaatggtgccgagacatggtggctgtggtggacggtgctgccgagacatggtggctgtggtggacggtgctgctgagacatggtggctgtggtgaacggtgtcgagacatggtggctgtggtggacggtgctgctgagacatggtggctgtggtgaacggtgccgagacatggtggctgtggtgaacagtgccaagacatggtggctgtggtggacggtgctgctgagacatggtggctgtggtgaacggtgccgagacatggtggctgtggtggacggtgctgctgagacatggtggctgtggtgaacggtgctgctgagacatggtggctgtggtgaacggtgctgctgagacatggtggctgtggtgaacggtgctgagacatggtggctgtggtggacggtgctgctgagacatggtggctgtggtgaacagtgctgagacatggggctgtggtgaatggtgctgccgagacatggtggctgtggtgaatggtgctgctaatgtgtctagaattggtggattcttggtctcactgacttcaagaatgaagccgcagaccctcgcagtgagtgttacagttcttaaagatggtgtgtccggagtttgttccttctgatgttcagatgtgtttggagtttcttccttctggtgggttcgtggtctcactggcttcaggagtgaagctgcagacctttgcagtgagtgttacagctcataaaggcagtgcagacccaaagagtgagcagcagcaagatttattgcaaagagcgaaagaacaaagcttccatagtgtggaaggggacccgagtgggttgctgc

SEQ ID NO: 2903 - DNA, 1099 bp, Homo sapiens
ccagcaggtgcaggtgggcggggcggcctgtgccacatggctggaatttaccaccttcctctgaagcgttttcactggtatcatgtgtaggcttgtttttctcccactgctgagtgagtcatcttgtttttatgtagaatcctgtgattcctggcgacagccagtgggcccggcccaggttagggatccttcagaactggggtccaggcctgtgtagcccctgtgccccgttacccctgctggccccgggcaggccttccggggcccccggcttctccctgccctgtgttttcatttgtgccgcctcccttcgggaaccttccagaacgtgcccacactcccgctgcagccaataggcaccttaaatagccacttcgtgcggctggccgcggagctcggagggggaaaggcgacgctgacctgtgccccgctcgcccgcagagctacatggaccccatgaacgagtacaacgcgctgaacgaggccaagcagatgatcgccgtcgccgacgagaaccagaaccaccacctggagcccgaggaggtgctcaagtacagcgagttcttcacgggcagcaagctggtggactacgcgcgcagcgtgcacgaggagttttgagcgcccggccgcgccccgcgccgccccccacgcaccaccggggcggcctcgcgggtgactccgggctccgtggctgtcccggaccccacctcttccctgccgcccgccaccggccgaccgaccgcggctgccccagttgatgagcggcgtgtcccctctgcagcgcgcaccccggcggggctttggctgtgacgcggtcggggcgcggggctgggctgtggccccgcggcgccgcctcctccctggtccctcgaaatcgtggcatctcacttctgagaacgaaatctcgcttcagtcactctgccgaaggcgctgacggcatcgcggccggaacctctgggcccggcccctcccagggccgccgctccgtgggaaaaaacagctcctccatttccttgaaaactgaacgattattaaaaatagattaaacttcgctggaaatgagtagccaggaagttcaggggagggtgccgggtccttc

SEQ ID NO: 2904 - DNA, 1032 bp, Homo sapiens
tcacgtgcagggggctgagtgtgggcctcaacactggacttggccactgactgcagtgagccccaagatggggcaggaggtggtgtttctgtcctggagacccagggtggcttgggtccttgggatgtgtggggacctcggggtgagggcccgttggggccgggtgggcacggcaggagagcgggggccacacacccagaggcagtgccgtgtcccggctgggagggttcctgggaagctctgctcagccccagtctcagtcatttctagaaactgtgttttcctccctgtgacgtcacacgtgaaggaaacggaaaagggcagtgagtccttcgccccgcggcgccgtgcgcacgtcagccttcagggtgattccgctcctccagaggggcaggcgcgggtgtggggggtggggcccaggcccatcctgaggggtcccaggcatgaggggctctgagctgtgtcctggggtggtctgggccatggggaggttctggatcatgtcttgagaggtctgggctgtgtggggggtccaggccatgtcctgggggtctgggctgtgtctgtggggagtcagggccatccatgtattgggggtctggggcaggggggggtccaggctgtcttggggagtccgggctgtgtggaggggtccaagctatgcctttggggatcaggcctgtgggaggctctgggttatgtcttggcgggggtccaggctgtgtcttaggggctgggccatgttctggggacgtgtgaatcctggagggtggggccccggtctcgcgggtggctgtgtccctcgagttcaggcagcacctctcggaactttctggatttgcgtgctggcgtctgtcggcctcgatacccacaggctgcgcccctctcagcacaggaagtcctggagaacctgaaggaccgctggtaccaggcggacagcccccctgcagacctgctgctgacggaggaggagttcctgtcgttcctccaccccgagcacagccggggaatgctcaggttcatggtgaagga

SEQ ID NO: 2905 - DNA, 1093 bp, Homo sapiens
tgacggggacggtactgtggctgggccggggtgggtggggcggtgggcggggcgggcagggccatgggccttgcctggtgcctggagggcagacaggccctgtctgagggacgggcggtggggaagtgtcagccggagaccccgaggtgtggtggggtgcacggaagctgggttcatgatgccagaatcctggtgacagaggtgtgtgtgccaagcactgggcgtggcccatggagggcgcctcttatgtcttcggggccttcatctggtggtgtctatgcctcttggtggccccgaggcacagacgttgccggctggcctcacaggtgaggaaacgggtgtggggtgctggccggggccctggggctccagacgctggcatcctgccgcttccagcctgggcagcagagcaagaccccatctcagttgagaaggaagttcagctcagtatcagaggccctgacaggtgtgatctgctcttccaggtcacgtgtcttgggacgagtataaggtgaagtttttggcgagtaaaggccatagcgagaaggaggttgccgacgccatcaggctcaacgaggaactcaaagtggatgaggaaagtgagtgctcagccaggctcccgccaccggtctcaggcatcctgtgtgtgcgcgcgtgtgttgtgtgtacatgagtgtgccgtgtgtgtcgtgtatgagtgtgccgtgcgtgtgctcgtgagtacgtgtgtgcgtgccgtgtgtacgagtgtgctgtgcgcgtgctcgtgagtacgtgtgtgcatgttgtgtgtacgtgtgctgtgtgtgtgctcgtgagtacatgtgtatgcgtgtcgtgtgtacgagtgcactgtgcatgtgcttgtacgtgtgtgcgtgtcgtgtgtacgagtgcgctgtgcgtgtgcttgtgagtacatccaggtagctgttcatgtaggctcgtgagtacatgcaggtgagtgcgccctcacacccgctgtgtgcacacgtgttcgtcttaacagcatggcccaacctggttggtggtggctgtcaggagggaagtgggtgaagccgttgctgacctaggcgccgcccaggagtccggt

SEQ ID NO: 2906 - DNA, 2143 bp, Homo sapiens
tgcctttcttctcagtaggcggggctgggtggagttcccaccttgtcccaggcactgtcgtggagactgctttgctctgtggcctcgtgttccccgctgcctctcggtcttgcttttatccacatccagcctcatccacacccgccaggggctcctccttgggatcttggggtgggccaaggcggtaccagttgcacagacggcccgggccttgtcagcggggagcccggtgctttggtggcttgtttttccctgtctttaataggaatcaagtgtgatatcatgaattgatggggggaagattaagaaggctttgtaagactataagttagtttgctgtgaagagtgtgcttattaaatgctttctgcaacacgaagactgcagcccttgactttgaaatcatctgtttttagaatcttgaaagaattgaaattagttttctggctgattcccttcccttccttcctagaaaagacaactggcagtgcagagtttagcatttaatttgaaagataaagtcttttgtgaattatttcctgaagtcgtggaggtaagaaagacggaagtgggtttcgccttcccctgcgttaaaacacttgagtttcacctctttccaaagagtaaaatctgtgtcctgaagctgcagacctccccaggggatggctcctctcccccaggagccccgaggcaggggaggcagaaagcctgggctctggggggtggcctgcggacagctgtgctggtgggccgggggctgggcctgtcccacaggggcgtggagctcgtggttctgagcagccagctgggtggtgtctggggatagctgggaggcacagcggctgccatgtgggactgggactggagtgctccctggtcttggcctctgtggctcagccttgctctggtctgcctgagtgcaggggccaaggggcacagggccagtgaggccggccacgctcgggccctcacctgtgagatggggtcggaatttgacacagcctagggcttggttcttggtggtggaccgtggactcctgagaacgggagtgctggtcctgaaaggcgctggttggagaccagctgcttttctcgctgtttttctcttaggagattaaacaaaaacagaaagcacaagacgaactcagtagcagaccccagactctccccttgccagacgtggttccagacggggagacgcacctcgtccagaacgggattcagctgctcaacgggcatgcgccgggggccgtcccaaacctcgcagggctccagcaggccaaccggcaccacggactcctgggtggcgccctggcgaacttgtttgtgatagttgggtttgcagcctttgcttacacggtcaagtacgtgctgaggagcatcgcgcaggagtgaggcccaggcgccgagacccaaggcgccactgagggcaccgcgcaccagagcgtgacctcggcaggctggacacactgcccagcacaggcagacccaccaggctcctaggtttagcttttaaaaacctgaaaggggaagcaaaaaccaaaatgtgtgactgggctttggaggagactggagcctcagccctgtcctggccacgggccgctggggctggtgtgggtgggccttgtgtgctggatttgtagcttatcttccgtgttgtctttggacctgttttagtaaacccgtttttcattttattagatgtggtcacttagaaatgcaaacttgctgccgaccgcgggctgctcctgcgttcttggagctcctggcgcgtttctcggagctcccggctcctcagcgggtgggaacctcggggcccaggggtggagctggcgtccgcgggtgctggtctggcctggccgtgtggtgatgaggcttagcggggccagtgacggccgtggctcaggatccataagtcggggtttggtctcagcatttacaaatgtgtttacagtcagaatgaaacacattccttctagaaagtgcttgggggtttttgctgccctggaagccaggagcctgctcactccaaccacaagtcgcccttgactgcggcggccgcgagcggggcgggggctgccggtgccctccgcaggccgggcctcctgggcgcccctcggtgctgcaggctggggggccttgggt

SEQ ID NO: 2907 - DNA, 1030 bp, Homo sapiens
agctgtcccttcccatcccatgtggcctggggagcaggtggccgcccctcccctctgcttccctggcctgccagatggcgggacacacagggccctcagtgactcccaggcctcctgaatggggctctgtccgcccagctggccacatgaatggggcactcaggatgcggagggtgggggcgcagcttccttcctgatcgcagcctgctggtccctgcagggctggggtggggccggcactctcgggcccccagctgtgaacgtgaggggtctgccccacgggttgcagggctgggggccttgctcaggtcaagaagtggctgtggtgaacagagggtctctcgtctgagcgtgtggtccgtgggccgtgtggcagcctcagacaaggacctcacccccacctgtgctccgggaaagcacggagggtagcagggcccctggggtgggcactgagggggcgggttccatccccccaggacttctcctacgatgagtccaaagtggagtttgacgtggacgcgcccagtggggtggtgatggagggctacctcttcaagagggccagcaacgctttcaagacatggaaccggtgagaggccttcctcaggtgggggcggggtccttaggcgggggtggggtcctcaggcgggggtggggtcctcaggtgggggcaggggtcacagcagccctgggatgggccccgcctgactccccacatccccccacccacctaggcgctggttctccattcagaacagccagctggtctaccagaagaagctcaaggtgtgccctgggcctggggctggggccctgatggctggacgccccacctgggccacagggcagactggtcagttggggttagcacagggccggggcactagtggacgccggagccggaacagtcagggagcagagagctggacacggggcttggggctcaggcagtcggcctccgggtctccaaggtgaagcaggaagtgggtggtcggggccgggtggtggctgagggcaggggccacagcgg

SEQ ID NO: 2908 - DNA, 1035 bp, Homo sapiens
tgtgtatgtgtgggtgtgcacgcgcgcgctgggtctcttgggatctgctggcaagtcagcatgtgtgtggaggcacggggagcctctgtatccctggagccctcaccaggaggctcaggagccttggagtgggaggctcagggccagccaggagagtggccgccagccctgggcagaggaactggggccatcctctgctctcccatcttctgttgctgacctgggaaaaggggttgaataacttgagcaccctaggatcctgcattgaggacccgggctgtggggaggtgtgggcatggcctccctgctgggggctggaccctggctgaagcacccaccttctccctggcccctccgtcagaagcctaatggacctcctcctccacgcagacggccctgtactgccctcttccagtcgtgtgggggtgctggaacccactcacctctgggccttctctctggtaaccggctctcatgggagcctgttacaggagccagttatgggggctgtggggctgcagtaggtgccgtagagtgactgccctgggaaagtgcctcacccctgtggggcatggactggagtggggagatgagaatggcctggcccagtgggttttggggttaggctgtgatttaactggggttcgaggggctccctgaggctgtcctgggggcaggccctaagggcgtaacttgagtttcctggcctaccgccaggttggggggccaggcagggtgggcgggaagatgtggtctgtaacgtggagcctggtcgccccagcccgggagagggggaccctgcccgcaccctcctggtctggggagggcctagtggcagcccaggtgcagtgggccggaggccaggggagcccgtgtaggggaaccgcctggcctctgttcagtgtgcccctcccctgggtggggcttcaggcgctgagtcatggctttggttggggggcagcctcaccctcctccccgtcctccaagctgctgaggaaatcctgggctgagcacagcagaggaggcctaggtccc

SEQ ID NO: 2909 - DNA, 1040 bp, Homo sapiens
gcgggaccaccctgggcacagcaggcatcggaggtgaggcggggttgcagtgactggtggccgcaagcccttccctggggagtacctgatggctgccctttgacccccggtggctgccctttgacccccgggtgtgctctcagcgcaagtggtcctagaacaggattctttttggaaatgtctgtcgactggaccttggtggatttggaaatggaactgagggaccggtgacacgtgcttcagaccggtctggggtgcggcgcacacctgggcccgtgcagggctcagctcggcagcagctctgagggcagctcaatgaaaaagtgaatgcacacgcccttgttggcgtggcctggcatggcctggtgctatcggcagccgctctccactccccgactgatactcaattacgtgaagccaagaaagatgatttttagaacctttgcctatattaggttgtacttatgtacatattttgcagtgtttcacaggagaaagtggccttaactgccccttattctctctccacgttgtaaataaacatgtgtttaatacaagttaaagctatgtatgaaaactcagaacttgaatcccgtcagcttaaaacttgtgtagggaatcctgacttttaaaatgtgagggtatttggatctgtgttgaaagtcgtatatttttatctgtgcggtgctgagtgcaggccaccagctcctaaatagaggttccctatatgcgcgtatgacatggtgaataaacacaactctctccactcaggacatccggagcgttatggacgtggtaggtggtcgttctgtgtgcttgtgaaagtgtccaggcgtgtgcacagccagtgcgcccacttccgggctccttgctccctgctgtactgaagttttggattttgcatccaatcctgtgtgcctgcccttctgccgaaggcttgtgaggggcctgagtcctctgcccatcaggatgacaggctccttcctgcagggccataggagggaagttttggaaacacagaatgattccaaggtgctctc

SEQ ID NO: 2910 - DNA, 1928 bp, Homo sapiens
gctagtgcagacttggtctgtttctccactgacattgcatcccatgggagaggggcagagaaggttctggggccgattttagcaatgcatgtgctagaaaggaaccctaaagtgcaatgtagtatttgggggattctggggattctggtgaattttttcccatggagttaagtctgtaagggtcatatttttgctgactgaattgtctggtgctatgacatgtttaatagagaacctattttgacttttcttttctgtactctttcaatcaaagggtagcctctgagggtaagtgactaagacttctcctctgctgtccaagcgctttggtgcagggacagcggcatcttcagccaatccagtgcaggctctccaccgaaggctggctctagactggtggtacgcacatagcatagccatggccgactcctgctgtggttctctgacgattgtgcttcttgttaatcctctgtcgtgctttggtaatcgtattgattagagttggtaactgtcttgacttgaattttgtccctttaaaactgctgtacctgtatgataaagatgcagtacctttctcttaaaaaaaaatgctatggaaagctgtgagaattgaagagacaaattggctgtgtcagtgtggggttatgtcatgatttctagaagccctgaagttgctcttttgagcagctttgcatgacacgctctggtaaaaggtgtgcatctttaaattatttcatggatactttgaaaaatattgtatcacttcaaatacagcaataagtttatatgttctcaagatttcatttgtttttaagaattttaagttcgtggattaatatcactacttgaatactgacagttgttgattagacaccgaaaggttactgattgttgaatgtatctgtgttagagctgtgcactggcacgcttgcatcaggggctggggccacacggccgccacacagattcccccgtgatgcctggagctgcttccagagccgggtgtctccaagaggcacctgtaggacttcccatttagaaatctcttgagtgggtttgtatgttaccttctccaaggtttatttaggacagagatattgctggaaggtcatgggtcagattccctcacaacccacctcgtctgcgggtgcagccccactccaaggctccccgttattggggtatgtgaggagcagtaaatataaaaccagttcaactgtcctcatggaatcaccctttctgtttttgcagtattcataaagctagtgtaaggtctggttttagtctattaaatcttagagatctaaaggaaatgctcaaaatgtagccaggttttaaatgctttaacttttaaaaaatgtaaatttttgtatgtttatagcttctaaatatgaaagttaaagaatgtactgtgatgaaatgttcagtattatgttgcttctcagtatcatgttgcttctcagtattgtgttgcttctgattctatgaatgttcattttaagaccccttgttgaaatgggacagttggcagcggctctgatgagcccgagaagaggcctgcccttgggtgcggagtctccctccgcacgatgctcccacgcgtccaacttgcacccaaggggcttttccctcttccaagtggactccttcaaggaagctgcagctcggtcagcagagaaggggcctgccgccagcgccctggaggaagaggaagaggaacccaagaggatggcttgtctcccagcagccacaccggctttgtgctcagccagttcatttgagtttgcatgtttctctgcactatggattttgagcatttagatttctttaatcaaaagcgttttagtgactccagtagacattttctttctgaggcatcgtgctttgcatgagagcaggccaaggttgaggggaaaagtaaagttaaa

SEQ ID NO: 2911 - DNA, 1960 bp, Homo sapiens
caggagaattgcttgaatttgggaggcggaggctgcagtgagccgagatcatgccactgcactccagcctgggcaacagagcaagactccatctctaaaagtaaataaatcaaaccctcccatcagacctggcgcagcctgttagcagtccatgtggcagaggcgaggagtgccactccagctgcaccgtagctgcactctgtcttggtgtggggttctggcaggtctgggagcttaccgcactggttggcagcagagcagaattggaaacagggcacgtctttctgggatgtaagtcctgatgtttccccattaagaaaaaaggccaggcatcccaacactttggaaggctgaggcggacagatcatgaggtcaggatattgagaccatcctggctaacaggtgaaacccggtctctactaaaaatacgaaaaattagctgggcatggtggccggcacctgtagtcccagctactcaggaggctgaggctggagaatcgcttgaacttgggaggcagaggctgcagtgagccgagttcacgccactgcactgcagcctgggcaacagagtgagactctgtctcaaaaaaaaaaaaaagtgtagaaaaacttgactttaacttcaaagtttaatttgaaagtttaaacaggccaggcgcggtggctcacacctgtaatcccagcactttgggaggctgaggcaggtggatcacaaggtcaggagatcgagaccatcctggctaacatggtgaaaccccgactctactaaaaatacaaaaaaattagccaggcgtggtggcgggcatctgtagtcccagctactcgggaggctgaggcaggagaatggcgtgaacccgggagacggagattgcagtgagctgagatcgcgccactgcactccaggctggtcgacagagcgagactccatctcaaaaaaaaaaaaaagttaaaacaatgaggctgggtgcggtggcttacacttgtaatcccagtatgttgagaggcagaggcagaggcgggctgatcacctgacatcaggagttcgacagcagcctgggcaatgtggtaaaactctgtctctattcaaaatacaaaatgagccaggcgtggtgctggcatgcgcctgtatgctactcgggaggctgaggcaggagattggcttgaatccagaaggcagaagttgcagtgggctgagatcacaccagtgtactccagcgtgggcgacagtgtgtgactgtgtctcaacaacaacaaaaagttttaataatgagtgatttctgatgacatagcaggtgaaataggaacttacagaaaggaaggggaatgttttggagcgaacggatggtttatgcaagtgtagcaaaatcttggtgattactgaatctggtcattatgctagtccctctgcttgtgtacattaagtttttcctaaaaggttgagggggtgggtattttgcagaaggcactctttggtgctttacaaagatcttcagggtaggcttaggaggtttgactttcccattttactcagggaactgtagttaagaaaggagacatacttggccgggcacggtggctcacgcctgtaatcccagcactttgtgaggctgaggcgggtggatcacgaggtcaggagatcgagaccatcctggctaacatggtgaaacaccatctctactaaaaatacaaaaagtagccaggtgcggtggcgggcacctgtagtcccagctacttgtgaggctgaggcaggagaatggcatgaacctgggaggtggagcttgcaatgagctgagatcgcaccactgcactccagcttgggcgacacagtgagactctgtttcaaaaaaaagaaagaaagaaaggagacagactttgcacaaagcatacaggtcacaggtagtacagttaggtcacaggtagtaggccactttgtcctcggtagccgaattttgtgtttttg

SEQ ID NO: 2912 - DNA, 1050 bp, Homo sapiens
aaaaccctgtctctactaaaagtacaaaacgctaggcatggtggcacatgcctgtaatcccagcactttgggaggccgaggtgggcggatcacccaaggtcgagagtttgggagcagcctgaccaaaatggagaaacccccgtctctactaaaaataaaaaattagccggccatcgtggtgcatgcctgatcctagctactcatgaggctgaggcaggagaatcacttgaacctgggagatggaggttgccgtgagccgaagttgcaccattgcactccagcctgggcaaccagaatgaaactgtctccaaaaataaaatacaaaaagtagctgggtgtggtggcgtgtgcctgtaatcccagctgctcaggtggctgaggcgggagggtcacttgaacccaggaggcagaggctgcagcgagctgagattgtgctgttggactccagccagggtagtaataatagtagtagtgtatatacctggaccagggacggggatctaagctcccctgacctttgtagacaaatgggaactctactgtgtaggttctttccttgggtggactgaccgttttatcaagaattgtttttattgagataaaatgtacaaatcatgcacttccctgagtcgcgtgtccagttctgtgggtttcaggacattcatggagttgcagccgtcaccacaattggttttgagacgcttttcgtctcccaaggccgtttgctgctgcccattctcctcccagtgcctgtagcagcttcccgtgctacaggtccgcccgttccacaccgtccagtttagctgcttcccgtgctacaggtctgctcattccacactgtccagttcatatgcagccttttgttctttcgctgagcatgcgtggaactatttctaagtcccaggtttctttgccatgacttttcctcgctcagcctcagtggcacgtggagtagagcagctttgcgctgggtgtcctgccgaggggcttgagcctggctcccagggtcacgtgcagaggcttctctattttttttcattttacactgaa

SEQ ID NO: 2913 - DNA, 1066 bp, Homo sapiens
cagagtctcactgtgtcaccccggctggagtgcagtggcgagatcttggctcactgcagactcactgcaacatccacctcccgggttccagtgattctcctgcttcagcctcctgggtagctgggattacaggcacgcgccaccacacctggctaatttttgtatttttagtagtcacagggtttcaccatgttggccaggctggtcttaaactcctgacttcaggtgatccaccctcctcgtcctcccaaagtgctgggattacaggcgtgagccaccatgctcagccctactcttgtatttttttttttttttttttttgagatggagtcagagtctcaccctgttgcccaaggtggagtgtagcggcttgatctcagctcactgcaacctccccctcccaagttcaagcgattctctgcctcagcctcccgaatagctgggattacaggcatccgctgtcatgcctggctaatttttgtatttttagtagagacgggggtttcaccatcttgaccaaactggtcttgaactcttgacctcgtgatccagctgcctcggcctctcagagtgttgggattacaggcgtgagccaccatgcctggcctcttggaatatttaataagctaaaaaattcttatacacaggtagattaattaggtagccaggagtggcccctgaaagtatgtctggcaaaacctagaactgcatcctagccatcactgtaccttctgccctccctgctgtctcctctgccagttacagttaaaaggttgtgggtgaggacgctgggcagagtcccaggcgtctgctgtcagctccccagcccggcctgcctgccgagccatctgggcgtcccacggtggagagtgtggtgcttgtgacgcggtggtgctgggagccatcctggtggcagatgtgggctctcactgcaagtcagtgtaagtccccagggactgtcagcagcacgtcctgctgcccctctctctgcagaagccctggtaacctgcgtttggaaaaatctctaaggatttctgaggagctgtcaggccatgtccttgtccac

SEQ ID NO: 2914 - DNA, 1068 bp, Homo sapiens
atcctcccacctcagcctcccatgtggctggaaccacaggcacgtgccaccatgcctggctatttttttgttgagctgggctctcgctttgttgcccaggctggtcttgaactcctcggctcaagcaatccttcctactcagcctcctgtagtgtcgagaatataggcgtgggctactacacctgcttcagccgcttctataaaaccgctgacctgtgtgtggaggacaggccaggtgtgtgctcactgcgctgcgaagatgttttgtcacgtgactttccccggatttccatttctttttttctgctttcctcaaaaactaatagaagactgggtgtggtggctcacgcctctaatcgcagcactttgggaggcagcagctggcggatcacaaggccaggagttcgagaccagcctggccaacatgatgaaaccctgtctctaccaaaaatacaaaaattagctgggtgcgatggtgggtgcctgtaatcccagatactcaggaggctgaggcaggagaattgtttgaaccccggagatggaggttgcagtgagccaagatcgtgccattgcactccagcctgggcaacagggcaagattccgtctcaaaaacaaacactattagaaaatgccctggaggtggcggggagttgttgatttgtgaggacagattgaaagcaactcccagggtggtaatgtggctgccggcctctttgaagattgtggtctggcataaggagaggtgcaggcgcctggttctgagcaccttggaatttccagccgcacagcatctggtgccctcccctccaccctcacaaggagctgccatcctgtttggattttctgtttgtggaccagaaacaaacgtttttccaaaggattagcaaatagggtaatttcctgtgtaacgctgctctggggcctcttcctcatcctggcagaaggagcctggagcccatgaggcagccagcactgtgcccttgctcagtcgtgctgtcccctccctctccctcagtctcctctccatgcccaagtcggtttccagccgctggtcttcatggcattcc

SEQ ID NO: 2915 - DNA, 1034 bp, Homo sapiens
gacagcaagcgatcctccctcctcggccttccaaagtactggggttctaggtgtgggccaccgccgctggccaaacatgaaggtttgacttacaactttgtggtctctggtctgaacaggcacctgcacctggaggactctgagaccctgtttccaaccatgatgttttgcacttgtgctctgatatgaaatgtgtttggtctttgttcctggttcctggcacagaagctcctcgaagccttggaatttcctgagtgacaggagtggttcagatcaccccggagcttatgctgatcacacctgagcttatgctgatgaggcagggggtggggccctggagagcgggggtaggggggactggtcgccagaacaccaggtgaccccaggattggaggctgggagctttgagccccacccgccaacctcagggacgcagcgagcgaaggtggagattaaacgctgtaaaaacccgtgaatgagagatgaaagagtgggatggtcttcggattgtggtgctgggggcagggggtggcgcccagagagggcctgaaacccagcacctgcccaggccttgcctgcgcgtctctgcggccggctgctcctctgttttcttttaacgtaagtgctttctgcagttctgtagggcagtcctgtcaaactcattgatcctcaggagggtgtcgtgggaaccccgatgtatagctgccggtcagaagcacggcccacaggctgaccagcatctgaggagggggcagtcttgtgggatccagccctcgccgcaggggacctggcactctccccagggggacggcttcgggagggaattgaaccagaggacacacagctagtgtctgtggagaattgctcaacgtggaaataacctgcatctcctgtgggaagtgttgtgtgggagtgcagagaaactgtgcattcctcacaggactttatttatttgcttgtttatttatttgtttgtttttggagacagagtctcgctctgtcccccaggctggagtgcaatgtctcgatgtcgg

SEQ ID NO: 2916 - DNA, 1023 bp, Homo sapiens
cagcctcccaaagtgctgggattaccggtgcaagccactgtgcctggcctggaaacatttgctctacagaagtcactggggtgtgaggggacatccctcttggctctgcttgttttgagaggcgaaggctggggggttctgcactgtgagcagggctggtggaggcagagttatgagcgtggccttgggcgggcccagccctctcacatgttgggcaagtggctccctcctgtgccaagagtgcccacagcgctcacccttgcacaatgctgcttgggcaacagcgccccgggctttgcatgacggtggccgcacaagcacagctgtgatggtgcctggggatggtgctctcggttctggtgatggtaaatgtggtgagttttaggtggaagcttgccagagccggcgctgcctaacaaggatcacgactatcaaatgcaaggggggctttttggtgaaaagtagtcttagaaagcatgttgtcttacccagtgagatgggagagcctgtagcgcctctgacgtggtggcagccgtggagaaacaggctactcccacgttttctgtctacagagtcgctgcctgagccaggaggctacgagcgctggtggctgccttcatcccgcaggcaccacgtcaccactcagcctttctcagatgcctcgttgcctcgttgtcagtgggggtcgttgtcctgtacctccaggccaccccagcgcagtgactgcgtgaacagaattgctttggggttttatttttttttcctgtgggttctttggcataatgcaccatttctgttgcattctgaacctgatgacagcagccctgggtcagaggtcgcctccatagtgagtgacaggcgccttcagggtgaggtgggggaggaggtagccaaatacgcccaagcatagcctgtccttgggaaggaaacattaaatcccaacacccacttcgagaaacattgttttccgcaataatcttttcagttcgtaagtaagtaaaattcttttgtaatgtacttcgt

SEQ ID NO: 2917 - DNA, 1049 bp, Homo sapiens
atctcttcctggttttattgtattgtggtcagaagatgaggttctaggctgggcgtggtggcttacgcctgtaatcccagcacttcgggatgctgaggcgggcagatcatttgaggtcaagagttggagaccagcctggccaacatggtgaaaccccatctctactaaaaattcaaaaaaattagctgagcgtggtggcgcacgcctgtagtcccagctgctagggaggctgaagcaggaaaatcacttgaacccgggaagcagacgttgcagtgagctgcgatcacaccactgcactccagcgtgggcgacagagtgagactctgtctcaaaaaaaaaaagatgaggttctaggccaggcatggtggctcatgcctataatcctagcactgtgttgggaggctgagttgggaggatcacttgaggccaggaattgaagaccagcctgggcaacagagcaagacaccctgtctctaccaaaggaaaaaaaattagctggacgtggtgctgtactcctgtagtcccagctacttggaaggctgaggtgggatcctgtctcaaaaaaaaaaaaagaaaaagaaaaaggggaaaaaagggtgaggttttctatcctcaccagttttctttgaggcttaatattggtcagtttggtaaatatttcattggcgctgaattcacgatgcaaggcatggagttcacaacatatctgctggttcaattttatttgacagcttttctggactagggtatttgaaattgcacactttctctctcattaatgtgttgtattgtttacgagaaaagagcctgtcttttttttttttttttttttttttttttttttttttttttgagacggagtttctttcgttcttgttgcccaggctggagtgcagtggcacaatctcagctcaccacaacctccgcttcccgggttcaagcgattctcctgcctcaacctcccaagtagctgggattacagacatgcgcaaccacgcccagctaattttgtaattttaatagagatgggggtttctccatgttggtca

SEQ ID NO: 2918 - DNA, 1030 bp, Homo sapiens
ggaattacaggcttgagccaccactcccagcctatattgtattttaattatcattcaatgtgaaatttttaatatccttgtgagtgcttatttgacttataggttatttagatgtataatttttacatatctgaagttttcttagttattgttgatttctaattagatgtcattgtgcttaaagacacacttggtatcatttcagtcctttgacatttgaggcttgtttttaatggagctgatggtctgtcatggtggccgcgctgtgtgcacatgggaatgatatgtgtttttgttgtatctcggcctgattttctacatacatgttaattagagcaagatttttggcatgttcaaatattctgtgtctttctatgaaatgctcatgcagggctgttaaaatgattatggattttctaactttcctgttaattctgtcaatctgtgcttcagatatcttgagctcttttagtagatgcctttacatttgttgtctctttgtgattaattgaccctgtgaccctgctctcatgatgaactgttctttctcactcataatgctctttgttgggaaccgctgctttttctgatactaatgtagtcagtcctgccttcatgggggtcctttcagcttaactgtgtctttgaaaatagtctgttacagacctcgcatcattgttgggtcttggttttttctgcccgcctttggaatatgcttttgcacatttatatttcttattgtaactctgctactttgccacctttttgtcccttcatttttgttttttggttgttcccttcctaccttcctttgagttacttgattacaggcatgagccaccacgcctggcctgggttacttgattttttaaagaaatctattttactttgtctgtgggctttgtaggtaaaccattttgcctgatgtcttagtggtgtctttagggattatagtgtacattcccaatgtctcgcggtcctctagttaacttggtcctagttgataggaaacgtaaggaactcacagcca

SEQ ID NO: 2919 - DNA, 1059 bp, Homo sapiens
tgccccagtcactcaagtagctgaaactacaggcatgcgccatcacgcccagctaattttggtatatttagtagagacatggggtttcaccatgttggctaagctggtcttgaactcctgacctcaggtgatctgcccgacttagcctcccaaagtgctgggattacaggcgtgagtgaccgcacccggcctaatgtggttttgatgagtgggcagcactactgttaagactccacctaatcataagttgtgacttcagtaaaactggactgtgtggattgaatttgaatcccatgtgcagcactggacttctcattaagtatgcttcacctgagtggccacatatgggaatcgctctctagataattttggctcttattttgttctgttacctcctttgcagtgaaagttggagatgagaaaatcctggtgtcagtgttgtttttgaacataaagttgtttgcatcatctgtctttctgtcattaggtccacgccatccctctgcgctcctcctgggtcatgacctgtgcatatgccccttctgggaactatgtggcctgcggtggcctggataacatttgctccatttacaatctgaaaactcgtgaggggaacgtgcgcgtgagtcgtgagctggcaggacacacaggtacctgtccttgttcataagcttcaagtgacacaagctgtttacctggggtacattatatgctttggatactcactttttatcaatcattttttaattaattaattaattattttttttgaggcggagtctcgctctgtcacccaggctggagtgcggtggcgtgatctcggctcactgcacgctccgcctcctgggtgttcacgccattcccctgcctcagcctcctgagtagctgggactacaggcgcccaccaccacgcccagctaatttcttttttgtatttttagtagagacagggtttcaccgtgttagccaggatggtctcgatctcctaacctcgtgatccacccacctcagcctcccaaagtgctgggattacaggtgtgagccaccacacccagcctt

SEQ ID NO: 2920 - DNA, 1214 bp, Homo sapiens
tggtcgtgcagaagcaggtgtcatgcaggcccacacatagcctgacataggaaccagctattaaattgtggtgtgggacatctgtgtggtgtcataagaagagttgcgagatctcaaagaactcagagacctaggaggagatggtcctggatggacagggagaggaggaaggaagcaggaagggaacagcaagtgcttcaaggctggccatgttcgtgtgcgtgcattggagggcagggcacacaggttcctgatgaccagccagactgagacttggtaagaggtacggaaggggttcagtgcagaatgccacagtggaagccactggagaactgtgggaagggctgggaagaggtaggcacagtgggcgagccaacagccttgacaaggatgggtgatgaggagaatcgtttaatcacagatgttgatttacagaaatgtttttattttcaagatcacaaacaacatcgacccagtgggaagaatccaaatgcgcacgaggaggacactgcgggggcacctggccaagatctacgccatgcactggggcacagactccaggtaggcgtgggcatgagcaggatgctgcttgttacattcaggggctgctctgttgtcctaggggaaaagtacctgaacccatttgctgtgctgtgcagtgaagaaattaggaagttgaatcagaactctgggcacgcaaggtgcagcgttcacaggtgcatattccctgtccagttttccacttacctgggctgaaagaacactgccatttcttcactgtctgaatcacattaatacaagttctgatttttctttctcccttctcctgtctctttcagtttctagacctctgtcttcccagttctactgcatcctacttatgtgaacttggggaagttacctctctgtgcctgtttctcagggctggttggccctcgccctcttgtgatgtcagtgccctggctcaggaaatcacagaacctgccccgaggatcctgagggattaagtgtattgagccttagaacagcattgtgctgtgtgtgctttgctgcggcagacacacgggaatgcgctgtgagctgctctcaccattctctcatctggcctgtctgccctgccttcctttggtttaccatcccaagagataattcccttcatgggctcctatttgttcttttcttttctctttttttttttttttttaaagacggag

SEQ ID NO: 2921 - DNA, 1032 bp, Homo sapiens
tgttcttcagagtgtcgctgtacaggaagctgatgacattcagtacatacctaaataacagtttataagctgggtatggtggtgcgcgcctgtagtctgagctacccaggaggatcacttgagcccaggaggttgaggctgtatagtaagctgtgattgcaccactgcactgcagcctaggtgacaaagtgacaccttctcaaaatacagtaaaataaaataaaaaacaacagtttatttttctgactccagtgcaaggatgaagtcaagtatttccttttaaacggccaattacatgtttagaaagcccaccaggatttggagagagaaacaccaacataattttaggcaacttgttcctgaacttgagaaaaaataatggaattctctgagatttacagccaaagagaaaacaaagtatcctctactgtaagaattttaaatcttaacatttaaaagatcttacataggtgaatagggaagacttagatttttttaatagtttgctctgatcagacttgtttaacatgtcccctccaccaaaattaatcaaatgtgttctgaaatatttagtttgatataaaattattctctgaaatatctatttaaataaaaccaaaaggtattcaaattttgcctgacttaatacttaagcttctgctgttcattttaagtcagcatggtttttggcaagtaaaaaagaaaagcaaagtgttgttatttaataataatctaactgggtttttgggggggttcagaacactctcagctctttaccacctgcttttgagactatatttcatcttatagaaatcagatttttttttttttttttttttttttctggagacagtctcgccctgttccccaggctggagtgcagtggcgcgatctcagctcactgcaagctcctcctcctgggttcacaccattctcctgcctcggcctcctgaggagctgggactataggcgcccgccaccacacccggctaattttttgtacttttagtagagatggggtttcaccgtgtt

SEQ ID NO: 2922 - DNA, 1023 bp, Homo sapiens
cccctgctccccttattcctcacagtattgttaggagcggtgcgtaagggaagcagggcctgaggactttttccgttgccctttgaattcccacagtcttagttttggagattgacctggacttgggaatgaaagaaaaatggaaaagtgagtgaaattggtttaaattcctcatgcaaactcctctctttcaaaatgctgcttcgtcttggaggtgagctgtgatccttgtgtgtttggtcaagttagcaaatttcctgccccggtgtaagacactggggccggtttggacttcggaagttgtccaaaccatccagagatgcagccatccagtgctgcacaggaggctcaggggtgtgcggctagctggtgaccaggtgactcaggactgccctgttgctgcttggtggtgggaccacatgtgtgcactttggtgagcatggtgcctgttgtccttgagattgttagtcaaaggtacacgtcatagtttaatcactgtgagactgacagagcactttcagattggttgtctgatttaattttcattttagctctgtgatatagataacaccattcccattttgaattaagcagattagagtaaaaaacaatttagtgaaagcattattctttgtatgttgcagaaccagaacttgaaattatttttcaatatctgtaccctattttgtcattggcaaacttgcagcctgaatgttgttattggtgactgtgtaatatggggtcctgagggcaccgctgaggtgcccctcctagactctcaggggtctggatgagaggcctgggctgctgcattgccatgaagggtagaggcactacacggagcacattgcattgcaaatatgaaatattctgactttaaaaatcttgctaacacttgactcacaaagatgttgttctaaagtaggggcagatcccttcacctgcttgcttttaagttattcaaatctctctcaaaaggatttccaaaactcagattctgaataaaagccaatggcagatatg

SEQ ID NO: 2923 - DNA, 1030 bp, Homo sapiens
agactacagcccacgcccccattagaatggctgtgacacccacccagcgttgttgggcgtgaggagccgggactctccacattgcttataggatgttgggaatgtgacccagcataaccattttgaaaagagttggttttttttgttttttgagtttgttttttgtttttttgaaatagggtctcactctgtctcttagactggagtacaatggtgtgatcatagctgactgcatccatgacctcctgggctcaagtgatcctctggcctcagcttcctaagtagttgggactataggcacgcactaccatgtctggctttttttttttttttttttttctttttttaattcttgtaagacggggtctcagtatgttgcccaggctggtcttcaattcctgggctcaagtgatcctcctgccttgcctcggaaagtgctcagattatagtcatgagtcactgcacctggcctggcattttcttggaatgttcaacacacacctgtagtatgatccagccattccaccgctaggaatctgcccaagagaagtgaaagcagatgttctcataaagacttgtacatgtaacaacatgcacagatttcaaagtatcacatctatctgattaactccactgttacactggttgccactgctacatatatttttgatttctgcaaaagggcctactgcactgactggatggaaagtgtggcaggtgaggcaggaggtagttttctggacattacttaaaactttcagggcaacagttttacacctgctttcatagcaagtcatatttagtaagcatttactgtgtcagtcatggttctaaggggcttgcatggattctaatggaattgtcatagcatgagctgtggggactattactgtccccactttcagacaaaaaaatgtaggcagagagaagttaggaaacctactggaggccacctggtgagaagagatagagtctgggttagaacctggggcttccaactttcctgccatgaagcgtcactctgcttcca

SEQ ID NO: 2924 - DNA, 1811 bp, Homo sapiens
tttgttttttgagatggagtctcactctgtcacccaggctggagttctgtggcgtgatctctgctcactgccacctctgcctcccgggttcatgccattctcctgcctcagcctcccgagttgctgggacttcaggtgcccgccaccacgcctggctaattttttgtatttttagtagagatgaggtttcaccatgttagccaggatggtctcgatctcctgaccttgtgatctgcccgcctcagcctcccaaagtgctgggattacaggcatgagccaccacgcctggcctggcctggtagtttttataacagatgttagatagcaatactcttcataactctgtacaaggcaatcaggcaaaaccaaaggccaagtaaaatgtaattggttaagctaattgtagctgatgaaacctttacgttttgtgaaagaggagatgtgcatcagcagctgtaagtgagcactctaagatgcagtgagtaaaaggtgttgggagatgagcaactaaaatataacctcttagttataaattgcagaacgaagaattttactcagagtacaaactagtggaaaaagtctttcgtatactgggtttttcagagttcttaggcaagattatatagtttgatttaaagacccaaaaatgtacttcctggggtgcaggaatgtcaggtttctgttaggtggaacatgctcctcatggcacagaattggctacatgaagttaacctacaggccaggtggtaatcggcaggatgggtcggccggagggaataacttgtgatgatagtgggagaaaccagtatcattgcggccgttttaactacctactgtgtactaggccctatgctatgagccagaagttgccacgctacagccatctctttctgtggcccagaagctaagaatagttttttcgtggggttttcttcttttttttttttttttttttttgagagagtcttgctcttgtcacccaggctggagtgcagtggcacgatcttggcacactgcaacctccgcctcccaagcaactctctgcctcagcctcctgaatagctgggattacaggtgcctgccaccacgcctggctaatttttttgtatatttagtagagacagggtttcatcatcttggccaggctgatcttgaactcctgacctcgtgatccacctgcctcagcctcccaaagtgctgggattacaggtgtgagccaccactcctggcaaattttttaaattttgtttttttgttttgtagagacagggtccaactatgttgcccaaactggatccacccgccttggccttccaaaattttaggattacaggcgtgagccagtgtgcctggcccagaccctcttgttttcagtcactgtgcaacaccacctcccacagaaacattgttctgtcctattctttaaaaaaatgttatcaattatgtgctgccatatactacactgagagtggggattcagtgcttaagcataggtaggttttctgaatttttccaacttaaatctcctttgaaatcttactgtgtgtgatatctgaaatttgggtgtttgctcactaaaagaaccttggaaggagaagatctcaaaatgagctatttgtggatgaagagtgagtcctgtgggtttttgttttttgtgttcttttatagttaacagagtagcagcatgtagaaggtggtggagcctgaacactaggtttagccatagaaaggcagttaggtctcctaagtagacgtttcagtaaagggctttgttgacgctttgcaatgtctggggtgtgtttgccccactc

SEQ ID NO: 2925 - DNA, 1017 bp, Homo sapiens
ggttacactgagttatgatatgccactgtactccagtctgggtgccagagtgagaccttgtctcaaaaaagcaaaaacaaaaccccacaaacaaaaacataagattgtctttgggcctggtgcggtggctcacgcctgtaatcctagcactttgggaggccatggcgggcagatcacttgaggtcaagagatcgagaccagcctggccaatatggtgaaaccccgtctctactaaaaacaaaaattagctgagcatggtggcgggtgcctataatcccagctactcaggaggctaaggcaggagaatctcttgaacccaggaggtggaggttgcagtgagcctagattgtaccactacactccagcctgggtgatggagtgagatgttgtctcaagaaaaaaaaagaaaagattgtttttgaatctgaagacataacaaagcagcattacaagttgtgttgtacaagtgtgttagcgtaggttgtccttgataaatggaatataaatagctctgaagtttttgtatatattgacctattacaaaatcagagactttctttcggggttgggagggcagtttgagggtagttgggtcatctggaagaagaggcagaaaagaggaaccagctacgtgatgaataactgtgataagacaaataggctcctctactgccacctccttgttttttcctgcttactatttctgtggctgtgattgttgggattcacgggaggaggaagcagggacagtaggaaaagctccagttcctgatggacctgtgttgctggtgctgcactgccttttctctgacttcatcccacccacctgagagacactaaggtgggggctgaggtccaccctgtaattaagctcttgggcatgaatggttagctgaaacaagactgtcaccttctagtgaaattctgttttttggattcttatagaagtcagtagtaagtgtctgagataatgaatggtcagataacaacataaaggagcagtggactgactagagc

SEQ ID NO: 2926 - DNA, 1043 bp, Homo sapiens
caaaagtttagtggggtgtggtggcgtgcacctgtagacccagctacttgggagactgaggcatgagaatcacttgaactggagaggttgaggttgcagtgagctgagatcacaccactacactccagactggtaggcagagcaagactttgtctccaaaaaaaaaaaaccagaaaaagataaaatgtcttctaagcatgggcccccaactcctgggctgtggtctcttaggagccgggctgcacagcaggtgagaggtgggcaagcgagcattcccacctgagctccacctcctgtcagatcagcggcagtgttagattctcataggagcgtgaaccccgtcatgaactgcacacgcgagggatgtaggctgtgcactccttatgagaatctaatgcctgatgatctgaggtggaacagtttcatcccaaaaccatcccctctgtctgtggaaaaattgtccttcacaaaaccggtccctggcatcaaaaaggttggtgaccgctgctgtaaggattctggatgcttcacagaacgaagctcaggaggcactttttttttgtcttttttttttgagacagggtgtcactctttgtcacccaggctggactgcagtggcaccatctcagctcactgcaactccgcctcacaggctcaagcaattctcctgtctcagtctcccaagtaggtgggactacaggcgtgtgccagcatgcccagctaatttttgtactttttttttttttttttttttttttttagatggagtcttgctctgcttcccaggctggagtgcagtggtgcagtctcgtctcactgcaacctctgcctccaaggttcaagcagttctcctgcctcagcctcccgagtagctgggactacaggtgcacaccgccacgcccggctttctctgtactttggtagagacggggtttcaccgtgttgcccaggctggtctccaactcctgagcttaggcagtccgcccgcctcagcctcccaaagtgctaggattacagacacgcgtgagccaccacgcccggcc

SEQ ID NO: 2927 - DNA, 1197 bp, Homo sapiens
gagtctcacttattgcccaggctggagtgcagaggcgcgatctcggctcattgaaacctccacctccccagctcaggcgattctcctgcctcagcctcctgagtagctgggattacaggcatacaccaccatgcctggctaattttgtatttttagtagagacggggtttcaccatgttggtcaggctggtctcgaactcctgacctcaagtgatccgcccaccttggcctcccaaagtgctgagattacaggcatgagccaccacgcctggcctgtatatatagatttttaaaattgtgatttttctactttgtaattgtttccaaatgtcattcatcttggaaaacatgagtagtaattatgtagatatcagtggtatttcttgtacctgaatccacgtgctggacatcctggttctgccaactcagatttgaggtctggagcaagttactgaacgtctctaccttagttttcttgtcttccaggattgttgtgaggactgaatgacatgctacaaataaaattcttagcttcaagccaagcaagacctcaaagtgttagcttccagtaccgctactactgatggtgtttgactctgccttcattcctgaaatgcttctccattgactgggtgtggtggcttatgcctatgacacttatcactttgggaggctgaggtgggaagattgagaccagcctaggcaacatagtgagaccccatttttgcatgtgtgtgcgcttgctcactggctcgtgcacgtggccatgcacgctcgctctctctctctctctctctctcgtgtgcacatgcatgtcctctctcttgctctctctttttcttagctgggcctgatggtgtacacctgtagtcccagctatccaggaggctaaggtgggaggattgcttgaacccaggagttcgaggctgcagtgacctgattgtacgactgcactccagccctgtctctattaaaaaaaaacaagtccttctccaagctgatctgggcacttgatttctacccttgtggttctggcttagtaaaggtcttcagaaatgacacaatgttagtttcctgtggctgctgtagcaaatcatcacaagttggatggctcagaatgaattgattccctcagttctggaggacagaagtctgaaatcaaggtgttggcagggccccagtgcttctgaaggctcc

SEQ ID NO: 2928 - DNA, 1073 bp, Homo sapiens
ggtaatcatgtctccatgcatgtctgtgtgcagtcctgtagcacttagaaaatatattccctatgttgattacagacactcaacttctgccgagtgttgtagttaataaagcttaaaaaattctgggctgggtgtggtggctcatgcctgtaaacccaacactttgggaggccaaggtgagcggatcacctgaggttgggagttcaagaccagcctgaccaacatggagaaaccctgtctctactgaaaatacaaaattagcccagacgcggtggctcacgcctgtaattccagcactttgggaggccgaggagggtggatcagcctggccaacatggagaaaccccatctctactaaaaatacaaaaaattacccaggcatggtgatgcatgcctgtaattccagctactcgggaggctgaggttgcagtgagccgagatcgtgccattgcactccagcctgggcaacaagaaggaaactccatctcaaaaaaaaaaaaaaaattagtcgggcatggtggcacatgcctgtaatctcagctactcgggaggcagaggcaagagaatcgcttgaacctgggaggcggaggttgcggtgagccgagattgtgccattgtactgcagcctgggcaacaagagtgaaactcggtcaaaaaaaaaaaaaaaaagtccggacactttataattagatgagcatgtcaaaagagtctacaataggtttcagaaaatttctcataggaattttaaaataattcctaaaatctagggagtgagagaaattcagtagttttcaaaaggattggcactgtctgagttagagcccagctcagctctgttgcctcactggctgatttgcagtgttaggacttttattcgcactgaaaatcaagatcagttcaacttctacccttccactccacaggagctttctgtcctccctgagcctgccttaatttaggccacctgcagtgttaggacttctgtgtctgtccttatctgtgaaacaggctcctagagcctccttcatggggtcattgtgaggattaaatgagtcctgatgtgggcactgata

SEQ ID NO: 2929 - DNA, 1027 bp, Homo sapiens
ccgggaggcaggggttgcggtgagccgagattgtgccactgggcgacagagtgagactgtgtctcaaaagagtaaaaacctctgtaaatccttttgatgcccaatgactttgatttcaaagctagtatcatctaggtagatttatgttgatcacttgagaaacagaatttgaaaagttaatttatttctcaaaggagatgttgtactatcctgcaaaagtaccagagctttgttctcttccctttgctttgctaaaaatttctgggtcttttggtttattttatgtgtgtgttggtccactggaaaagttgtagctttgtagctaaaaacagctttgataaaaggatgaaaaaggtcttcagggcatctctagacttcatctaccatcagttgactttttgtagctaatactttaatgaataacattggtattattttagaagtgcagtgttggcatttattatagttttgtcgttgtttttctctgcccgaaagatttggctcatgttggtctctaaattggattacattcttactgtctgtgactttggctttagcattagtggattggtaatagatattctcaatttttaaatctggcttgaccatatggcaggccatgttattttgaaacccctatttagtgtaagtctcacaagacatggaacaaaaatttttataaaattttaaactggtttgaccgggcgtggtggctcacacctgtaatcccagcactttgggaggccgagtcaggcggatcatgaggtcaggagatcgagaccaccctggctaacacggtgaaaccccttctctactaaaattacttctctacaaaaaattagctgggcgtggtgctgggcacctgtaatcccagctactcaggaggctgaggcaggagaatggcaggaacccgggagggggagcttgcagtgagccaagatcggccactgcactccagcctgggcgacacagcgagactccgtctcaaaaaataaaaataaaaaaaattttaaactggtttacattc

SEQ ID NO: 2930 - DNA, 1050 bp, Homo sapiens
caggatccccagccacccatgcgaggccacccccttccttgggggggtccttgttcagaggggcaccgacaactaactggctgaacaagccgtctcatgacgtcttggaaccctgaccataaaggtgtaggacctggccacagcaccctgcctgcgctggcactgcacagacccgtctgtcaggagcctcctgccggcccatttctgcctatccaggcatcgacttcagaatctcaggtgctgcttggcaggaaaatgcccagcaggcgggcctgggactcggtgatgcgcctgtgccggggagggcagaacgctggtgcctggcacaggtgccacaacacatacgggtgaggacactgaaaacccctcagttcccccgactcatggccacttgtcccagtgacacagccatgctctcccactcacccacaatagggtctgaatgtgccccccagattcacagtgagaaactcattccccagagcaacagtgtagagaggtggaacctgatgggagccccgccctcacagacaaactcctgtagctgtcaagacagcttgggcatggattcctctctgccttctgccatgtggacacgtggccttcctcccctctctcctccggggaatgcagtgtttgggcgccatcttggaagcagagatcaggcctcaccagacaccaagcctgctggcaccatgaccctggactcccaacctccacagctgggaaagaactctgctccctagaaattacccaggctcgctcaggtattctgttacagcagcaccaagagacattcactcgcttactccctcactctctaacccactcccattcaccctctcactccctctctaacccactcccattcaccctctcactccctcgctaacccactcccattcactcattcactcactcactctctagcccactttttttttgagatggagtcttgctctgttgcccaggctggagtgcagtggcgcgatctcggctcactgcaacctctgactccgattcaagctattctcctgcctcagtctcctg

SEQ ID NO: 2931 - DNA, 1033 bp, Homo sapiens
aaaacaggagtgtattcatatgtgtgccttgtgtatactcaggaggtacgcggagaggcagggaagctcacaggcggctctcacttttgacttaaatcccatcttcagccaaaccaaaggaagaagggtgctgggggccagtcacggggataagactggtggcgcagctgaggcggggccttctccaccgatgggagcctctgcgcctcggcgatctggggcctttctcttcctggtacggagaggagatgcccttaccgtggaacttcctttacggatgcaaattttttcttacaaaagggagcttctcctgtgtctgcagtttctcaaaataatctgctcaaaatagtgctgatgccaaagaggcagatttgggggtggtacattctggtctgtgacaggccctacaaggcagggactaggattgttctcgggcgaatggggcagcggccccgtgagtgcagagagcaaatttcaggatgtttggaggagaggacaccagacttgttgacaggttggatgtgcgggcaaaggcaagagaagagtcaaggttggtgcctgagctttcggtctgagcattggatggacagtggggcctggttcaggacacagtcaggaggcagaagcaacaccgatcactccaatggggaaaaatgtaatgaaaaaatcactaacaaggacgactcaggagacagaaaccacacccatcactccaatgggaaaaacgtaatgaaagagtcaccaacaaggacgaggcagctagctaccaaaaagggcaggagaaggaagagcaacgtctcagtgtcaggagggggcccggagacagaccctctgcggtggagtctgggagtggtgtggttgctgcttgggctgggctgcaggcctgagctcctggctggtgggaaggggaggctgctggtccacagtgtgggggtgcttcacggttaaccaagccatcccccatgctgggcgtgaggcactagcggaattgagagcctcagaaacccaggtgctgctgtgtgaggctgtcgca

SEQ ID NO: 2932 - DNA, 1199 bp, Homo sapiens
gtttgcggaggcaccgggtgttgtgtggggccaacagcagcacgtgtgctttggccacggcagggggaagtgcaggcgctgtttctgaggcacgaaggctacctgggagccatcggagcgttcctgaaaggagctgagcaggacagtgagtcgcggtgctggcgcccctgagcagcgtggggcctcagctgtggcctgggcctgtgctccaggccagggcggcccagggtggaggtggggtggggagcgtgagtcctcagaaagtgacagcagcaggcatgtctaacattttaacaatttagttaataagcgattttataccctttcctcctccactctcctgcttttgaatcaagggcaaggttaacacaagtgacctggcttcttgctttccagatcctaaccagtacagctggggagagaactatgcaggcagctccgggctgatgagtgcatcacccgagctcggcccggcgcagcgggcgcggagtggcactgtgagtagtgggctctggccgccccgggccccaggggagcagcctatgccgcactcacctcgcctgtccctgagcgaagcctcttgtggctgtcccggctgaaaggcgcctctgcccatggcgaatcctcccatggacctggggtataactaggggcaagagaaggacactgtggcttgctttcccatctccctcattgggtgctttcgtattttggaaacattcagcaggaattacggagtctgtgtgatccggccttcttgtttgcagagagattgctaaagttcaggggtgacggggacctctccccacgccagaaggcccgtccactttggagttgaaacccgaaaccgcaggagccacccagggccctgcctaggactgcgcgctctgccgcacactgccgcgcactgtggctgatggtctgtcggttacagtctgctctcctcggggtgtcccggctcattccttggatccccagtgggtttgccctggcctgagctgggtggcactggcgggctaggagacgcaccccatgtctgccgagttggagctgctccggaagggtcccccgccaggacctgcgtcagccacgggatgcccccagcacagccccacatggcaggaaccgccccgtgtcacaggctgtcagggtcctcgaccgtgcccccccgcggggctcattccttctgtagctgtgag

SEQ ID NO: 2933 - DNA, 1043 bp, Homo sapiens
ggccaggagaacagggctcaccgtggatgttctgtgtggccccgagaggccagtgaagccgcagagctggggctgtccaggaagggctgtcgcagccctagagggccctggagtaccagcctgttctccaggctgagcccagggggtttcttggtagaaggatactctaagaggtctgtttagtgctggtatttatttcccctcttcaaagtttctccctgcgtctgggtcctgtgtctctggttcttaagaggacctgttgactgatactgagagaccttttgtttgttactcctgaccgagctgctgggaggccacgctcagggtggggtgtcttcaacccaggaaccctcaaagccaaagtgcttgtcaacagtgttgtttaaaagcaggcttctcccatttcctcttcccttgcctgtgtctggatctaggaaagctcacctgccctgtgttctggcaagctgttttcctctcgatgggacgctgatgtctgctgagcagattcacctctttgaaagcagcagggacgttgtatttctcaaaacatactgcagcttcgatctgattttaggtttctgcgggctgtggggagggttcctcagaggcaggtgagacaggaaggggccacggggcggtggtgtctgcttggctgtcctgccctccattggtgcccaaagaggaaacacaggaccagagagaatggcagaggggatggggcctgtgggacagggagaactagaaggccatggctcagatgtgaagagcacaggtgaccaaacctctgggaagcccccttcccccaccagctgttggcctcagggccgagcgcgggcagcccggagagccgccaggaggcactcctgtcactgccttgccaggcgcggtttgctgtgattccgaggggtccctgagctcagcccggaagggtccccgcccgcaggcggttccctctgctctaacagatctccctgctgtgcgtgcccctcgcgcctcaggtcccgttttgtccccccgggtgtggggagtaggcagacggaaca

SEQ ID NO: 2934 - DNA, 1025 bp, Homo sapiens
cggcctgcacttctgccctggcctctccagggtccgctgcagaccctcctgcctgatggctgtgctctcagtaatgacggcgggccaggctctgttctagacctttttcccacgctcctgactcccggacacctcccagccacctctaggggaggaacgcgaattactcccttttcgcagatgaggataccaagccccagaaaggtgaactaatttgcccagggtcatcgggctagaaagtggcagaaccaggatttgaaccagccactccctgctctcctactctgcccatgtttcaggcatgagggcttcctgggggcagcttcacctggagaaaccccccttgaatagccgctgcggcttcacatacctctccctcttagcactcatctcggtcgtaggctgagtctgcttgtgtgtgaatcccacaagagcagcggtgtgtcttgtagccccagcccccgaaaaggatgcccaacctgtctttgccgcccagtaaatactgggatgaatgggcctgccgctgactgcttcccacctccctggaaaagctgggactcagagagacccaggccattccctctgagctgtgtgctcctggtgcatctgacatgtttgctgctgtggtgtcctcggggttgttggtgtcatcatctctctgagatgtccagccagggaagggtgtcctctagggaagtggggggcgatgagaatggaagtagctataggtcctggctcccacctttcagtgagcttatgggaggcaatgcttcttagggggtgtggcctggtgccaggtatgagaacgtgtgagtagcatctttagggaccgctgataggacttgggactgactggttattgggctgcaggtgctgagcttgcagccctagcctaggggattgtctaccgcaggcctcaccagaggctccccagccatgcttcccagccttctgagaccttgaggcccggtagagcgtgtgctctgcaaggttctgctgcccttacactgggggattctgttact

SEQ ID NO: 2935 - DNA, 1050 bp, Homo sapiens
tgcaaatatgtgctcaagtccctgttttcagtcctttgggatctatacccagaagcggagtggctggatcacatggtcattgtagttttaattgttagaggaactgccctaatggtttccacaacatctgcaccatgtcccattcccgccagcagtgcacgggaattctaatttctccccttcctcagcaacaattattcctctccaggccgggcacggtggctcatgcctgtaatctcagcactttgggaggccaaagtgcgtggatcacctgaggtcaggagttcaagaccagcctggccaacatggtgaaaccccgtctctactaaaaatacaaaattagcggggcatggtggcaggtgcctgtagtcccagctactcgggaggctgaggcaagagaatgccttgaacccgggaggcagaggttgcaatgagccaagatctcgccactgcactccagcctgggcgacagagcaggactctgtctcaaaaaaaaaaaaaaaaaaaaaaaatcttattctctgtattgggggctttaaaagaagccgtccatcccgctgggcctgaggtggtctccccgttgttctgatttgcgtttcccatttcccaaatgcttggtggcaccgagccttgtttcaggggcatggtggccatttgtgtgtcttctctattctagtccttttccattttttcacccagtggtttgtttttgatgttgttggggtgtgagggttctttacaaattctagacggaatgccttatctgatacatttcctcccagtccatgtgttgcctttcattctattcattcttgtttgtaaagccccatgtatctattttacacgtttctgcctgtccttttcctgtcatacccaagaaatcaagaaatcactaccaagtctaacatcaagaggcttgtgttttcctttgagggttttagagtgttttgtttgtttgtttgtttgttttgagacggagtctggctctgtcgcccaggctggagtgcagtgttagccaggatggtctctatctcctgacctcgtgatcca

SEQ ID NO: 2936 - DNA, 1041 bp, Homo sapiens
gaagggaggggaggaagactcagaggagggcacgggaaggggaggaagactcagaggagggtacgggaaggggaggaagactcagaggagggcgtggcacctgtacttgttggggaacatccgctcgcagtccttgcactcgtgggcttggccgctgccaccgccaaggccctcgggcttgagctcctcagccaggccctcgtagagcgcagcccccactgagccacacgtgtacttcttatggcgccgcaggtccagcttggactggaagagttcgtcacactcgtcacagcggaacgtgggctcctctgcaagagagagaacgaggtggtggtgagtgagctggagacccagcccagggctatcaggggactctggagacctggccccctcaccacggtgcctcagggcctgcacccaggctggccagtcctgcactgcttccttccagccttcaacttggggcccaccagcctgccctggaaacaggcatgtggagtccccagggcccagccctgggcaggaccaaaggaccccccaatctgtgcctcagagggagccccgggcgacacccggccctgcctgtgcctcaggcagccactgtgggctggagaaggccccgctcgggagtggaggaggaagccgggccaagtgctttgtttatgaatcaggagaaaaacgatgacagagctccagtgcatataataaattattgtcgtcaaggtcaaacaaattaaaaggggggcagctattattaagtttacgaggcagcatcctgactgccttgccaagccaaacaatcagcctggagctgtcatcccggtggggggctctgggcccgtccctgcctcccctgcctgtagcagctgggcagcagccttccacctaagacgggagacccccccaacaagatgcctcatccccccggctctggaaagaacgctggcactgagctctttcccaaatgaattgaacaatggtgtgtgcaccagtgtgtgagtgcacgggggcgtcttgggcatgagcaggcagctgtgtatg

SEQ ID NO: 2937 - DNA, 1012 bp, Homo sapiens
tgggggagggaggaaggggctgttaggactgaggaccgtgcctttcacctgtgcccctctccaggcagggatggggagtgaggctgggctggcaggtcatcctaggggcagccccctgcaaggtgcctgaccccaaagtccaacatggggctggaaagccagacagaccctgtggggccagctggctgggggatgcaggttgctccctcttccctggccccagcctgccctgccggcctgtacggcgacaactgtcggcattcctgcctctgccagaacggagggacctgtgaccctgtctcaggccactgtgcgtgcccagagggctgggccggcctggcctgtgagaagggtgagcgctgggcggcagaggagggacataccccagcatgcttggtgcagccccgcctgcaggcctaggagggctcccaggtcagggggcagcgccctggggtgtaggcttcagctctgcgtgcaggaagcatgggtcagggtctcctgggcccaggaggcaggaccctcaccctcgtgcctgcctctgctcctgtagagtgcctcccccgggacgtcagagctggctgccggcacagcggcggttgcctcaacgggggcctgtgtgacccgcacacgggccgctgcctctgcccagccggctggactggggacaagtgtcagagccgtgagtggggcggggcagcaggggggtctgcaggccctgctgggaaggggtggcatcagccttactgcagggctgaggactgtgcccggtttggggcctcaccaggggacctgttgtcctgtgaatgcaagagctgccgtcggagcactaagaccctgttgggagggtctcagcctaggaagctggcctgtggggacagagtgctgctgctttgccttggcaggggtagccccagccagccctgtggtgggtggaacggaggatgctttggggctcagggggccgttcctgtttcctgcatgcagagaggggccccttcaccccttgtcctgg

SEQ ID NO: 2938 - DNA, 1031 bp, Homo sapiens
gccggctccttccagtgctcctgcgaggccggctaccggctgcacgaggaccgtaggggctgcagccgtgagtctcccgccctccgcggagcaccggcctctgccttctcgagtttgccccagctgaccctgcgtcccgcaggcctggcccaccccacccccacctgcctggggtcctttgccccctggcctctctgggccaacacacctcagaggctcttgggcccttggggacccactgaggtcctgcctcttctgagggccgtgtgggggttggggacagtggggtgggggaagctggtgagacaggcatcctcccggagcccagcacctgtcctgaccacgtgagagaagggaccaagacctaaggtgatgttgtccctgggactgatggcagctgctcccacccctacccctctaggccccagagtccctagagttgggatgaggctgggggcagaggggccgggttcaggtcctcagggcccagagccttctctttcctgagaaggagggtcgggtgcagctgggatgacccctgggaccaggctgaggaggtgggggtagtggaggcagtaggagggtggtggggttccctggggtggggcttaggcccagccctacccgccggggggtcgctggagcaggcaggtgggtggcaggggctaaggcgcctctgtgcccctggcagccctggaggagccgatggtggacctggacggcgagctgcctttcgtgcggcccctgccccacattgccgtgctccaggacgagctgccgcaactcttccaggatgacgacgtcggggccgatgaggaagaggcagagttgcggggcgaacacacgctcacagagaagtttggtgagcgcgggcccagcccccgggggctcctgctcgcagggccagcagccagcgacccctcgggctaggctgccatccaatcagaggctggggacgtgaggaaggacccctgcaatgccatgttagaccaaggcccagagagggtgagccactggctcagtttgcgcag

SEQ ID NO: 2939 - DNA, 1035 bp, Homo sapiens
gaggccaacaacggcggctgctcccatggctgcagccacaccagtgctgggcccctgtgcacatgtccccgcggctacgagctggacacagatcagaggacctgcatcggtgcgcactggctcctcccagatgcctgcaccccactccagggacccgctgctgccctgggtctgggatcagttccatgccatgacttggaggtcctcgtcagtctccctgagtcctggtctggctgcctgggccctggcggggtggtagggcaggtctgacagaggcagcatcctggccgggaaagaccttggtgcccacatcggcccgccaggcccatacccatgttcacggcacccccttagccccatcagcacctcctcagtaccaccccttcacctgggaaggacccagtgtcctggaagtcacaccccagaccctgactcccagatggagtccccaccctctagccccagtcccaacaccttgtccacagcagacaggcgggtggccctggggctgtgacatgtgtcctgtgtgtgcacatatgcgggaccaggaacgtgcatgtgcgtgggcgtgattgtgtggtgggtgcgattgtctgcaggtgccatgaatgtcggtgtgcacacgtgaggctgtgggcagctgcaggtgcagtcgggcgcgtgggttgtgtgtggtcgtatgcagttgtgtgtgggtgggggcgtgtgcacgtgcaggtgcctggtaccagggggcccgtggcgtgtgctccacagatgtcgacgactgtgcagacagcccgtgctgccagcaggtgtgcaccaacaaccctggcgggtacgagtgcggctgctacgccggctaccggctcagtgccgatggctgcggctgtgagggtgagcactgccctgccactgcacagctggggtggcctgggagcagggctgccctaaggaaggacacggggctggctctggtacccccatggtgggcatggggtcggcctgctctgtgctttgctttggggctgtgggtgttggttgagcgcctgctgt

SEQ ID NO: 2940 - DNA, 1034 bp, Homo sapiens
tgctgcagtgagccccgacaaaccaggtggcttcaaaacagcagggctttattctctcccagcttcagaggccggaagtccgagatcaaggtgtgggcaggctgggcccctgcaggggctctgagggggcgtctgtcacagcccccagcttctgctgccggctgtctgggagtgccttggcttgtggccgccacttccgtctctgccttcctgttcacacagccatcccctgtgcctgcgtccaaatttccctcttcttataagggcgcccgtcactggattagggtcccccatccactgtgaatgacctcatgttaacttgactgcaggtgaagcagagaccctatttccaagaagtaaggtcacagccgggtggacctgagtttgtggggacattagtcactgcagaacaagcagcgggagacagggcgtcagggtgggcaggtggcacaggtggccgtctgtcttgctagtagtccttgctagagtgagggtggaggctgtttgggcagtggaggggtgaggacccaggcgtcagggcggcttcccgaggaaggacggcagggtgggcaggcggatcctggggctcatgtgacccatgctctggggaagcaggaaaggagcttcctcgagaggcagcgaaccttccagaaggcagaggagtaggcatccgtgtggccaaggcctcattcccctgatgaccccagccctgcgtgaaccagctccctggtggcagtggagctgtgtgagctgctggtggctgcagggcaatgagtgggcggtcctcacaggggctgcggggtccgcgggccgaccagccctctccaagggtctttcactttagggggcatggagcgggtggttggcggcctgttgggggcagctcgagttggaagaggcccagacaaggaggaactgagacttacgagccccgggatggggctgtgatggtgggaggcttgctggggctgtgggctggggtgcccccacctcccaccttccctctgctctaggtttgtagctgtcccactcag

SEQ ID NO: 2941 - DNA, 1033 bp, Homo sapiens
cgcacaccacggggcaacccgcccgtcccgctgcgccgcgcacaccacggggcaacccgcccgtcccgctgcgccacgcacaccacggggcaacccgcccatcccgctgcgccgctcacaccacactgcagccctcccgtcccgctgcgccgcgcacaccacgtagatgatggcacctgggaggatttctcccagcgtgtggctgcagatgctctgtagggtttcattcggcttttttcaagctggcatcggctgggataaagttttatccagccatgagggttgctgaatcaactgcttcagatggctggatggctttacatatttttcagtttcgattttaaaaaatactccaaatctaatgtctgctattatgggctgtcagagaataagacaggaaacaaaggcccaccaatgtctccgcactatgtattgacattggaaggcactttcggcctgagtgtttcagagaggataatttgagcttttcacgcagccgtgtctaacagtcttcaggcctgtaatgctttgggcccaaatctgcccttgagaagggctcatgtcatggggtcagccttgttgtattatcttattaaatggcccagaaggaaaactaccatctatagagtttagaaaccttaaaagatggataaaagcctggttttgttgagcatcccatgtcacacacaccaatattgaaaacacctttgctacagaacaaactgatttttcatagagtacatttagatgacattgttcaacctaagactaaggtcatgaccactttgctggtggccttagaggaaacgttaagaccaggtggtggatgaggaccggtaacctcaaggcatggggcatcttgaccaagatgtcaaaatgtgtctccagctttgcatgcgaactttaatggttgcaagtgaggaaacaaaaccggaattccagacgtgctggccaggaagtgagctgcgggcaccgtccatcagtctcattcacaagagcaaggaccagacccgttcgaggattagcggggcca

SEQ ID NO: 2942 - DNA, 1015 bp, Homo sapiens
ttgttttgagatggagtcttgccctgtcacccaggctggagtgcaatggtgcgatctcggctcactgcaacctccgtctcccaggttcaagcgattcttctgcctcagccttctgagtagctgggattacacgcgtgtgccaccacgctcggctaatttttgtatttttagtagagatgggatttcaccatgttggccaggctggtctcgaactactgacctcgtgatccacctgccatggcctcccaaagtgctgggattacaggcgtgagccaccatgctcggcctaaaaaacaattttcttgaagaatccgattttgtgcatagtaatgacacagcaccattcctgagaaataggaaatatatgtgtgtggtatgaaaagcccatattctgttcttgtcacctgaatctaggcttcctctttggatgtgaacgcgggaatgaacagtggctgttttccacccaaaggggcgtggagaccttttggaaacgggctttctcctttccattttgcagccgggggcgggtggaaaccttccttcgaagggtagtgccttggggagcagcagacctgctctgagtccagcttagctttccaaaattctgtgtggaacttactggagatgtttttatatatttgaaaataatggcctgtatttctcacgctatacttaaaaaaaataactaaccttttaaacaaagatattcaaactcacccttgtgctgaaagcactcacatttctgtgttcattcctgaaagggcgttttagagtccccgtttctacgttctatgtggcaccctcttgccgagggaacatccagaatccctccacttcctgtctagtttgaggcctcaacaccttcatgatccagagtcctgcggctatgagggggtgggcccaccaccgcccagccctccttggtggacgtggggacaggtaggagcctagggaaaggggtgggcgggctctggtgtgacggcgtgagcgctagccaggaagatggggccagggc

SEQ ID NO: 2943 - DNA, 1037 bp, Homo sapiens
aagtgctgggattacaggcgtaagccaccgcacccggcctgaacattttctttagagtaggatccgatgctgttcttgcaaagacatgaaataatgaaacagaccgcgtttgcggttactcgaagcggtgcacagctgtgagaggactcggcggatgagcagtcgttgggaaaatggtttccttcactcgctcactaccttttaatcagaaattttggtctctgtcccgatagtaaaaccgtttgcgtggggttggcagtagggtgagttgctgtgtcgtgctgtcctgggctgttgaatctgtggagtgcacgaggtcccggctgctcagcctttctctcctcttttggccttctgaggatggcagacctctggaaacagttgtgcatgagctggctttaaggttaagccctgcctcagtaggatcggtgtgtttgggcgtcaggtctccccgggacgctgcagtggcagcccacatgcagcttcttgctgcgtggtcccgtgggatgctccctgcctgctgtagagatgaatgagggcgggagtcgggagggctcattgaggcttaaggccgtaatcgacacgatgggcgagttctgtggctgtgaccctagtggagtttgtgggtttctgcccgatagattgtccccttggggcggaaagaagccaaggccaaggagctggtgcggcagctgcagctggaggccgaggagcagaggaagcagaagaagcggcagagtgtgtcgggcctgcacaggtgggcagcgtgcctggtggggtggggccgggcccgggggagtgccgcatgctggcctcagctgagttagtctgtgctcctcaggaaccgcctaatgctaccagaacccagaagcttcttaacagggtacaaagaaagcattctctttccaaaggagacgttgtggaaccagtctgtcatctagatggccctgacgtgagggaagtggaaggtgttaggagcggaggtattggccattccacagggggcgggtggccctcaggatgggacaggacaggat

SEQ ID NO: 2944 - DNA, 1099 bp, Homo sapiens
cctttctccttccatctccagtcctctgttaagtgaattcattttcaatctggtactttccaattctagtatttgtgtttggctgggatttctttacaggtttcatttctctgctgagattcacctctgttcactcattaagatcacctgtttttaacagcttcatggagatctagtctgcacagcctctccccgtggacagatagtgggttttcatgtattcagggttctgcaaccatctgcacacgtgtggaacttttccatcacccaaaagacaacactgcctacatgccgccccttttctccccagccccctctccagcccctggcgaccatatgtctagttttggtctccatggatttgcctactgtggacatttcctgtaaatggaatcagacactatgcggcctttgtgtctttgacttaacgtgttttcaaggttcgcccgggttctaatagatcagtagcacttcattgcacgttcaagtccttgaacatactaggtatctgctttaaagtccttttgtgctaattctaacatctggaatttttctgaatgtgaagggggataaacagtgaagtttgacaccctccacactgctcagaagaaagctccgagtggatctgagattcaaatgtgaaaggcccaattatgaatctctcaggagatgctagagataagagaatagccttcagaataggaagggatttctcaaacaggacacagaaagcttaagccttgatggaagaggcagatcaattcaattagattaaaatgaagaaccttggggcagagtttgggttttgtaaaatgaaaagagttctggagttaagcatcgtgaacatgcttaacactactgaactgtacactcattttataataaaactattaaattgtaaaaggtgagaacctcctcttcatcaaagaacataaatagactgaaagacaatgctggggatgaaaaatcattgaccattattcttcaaagtgagtggaaggcaatgtccctgcagggtttgagcggaagagtgggcatggcctggcgggccctatgccagccagttttgctgctctgttgagagcagcctgtgggacag

SEQ ID NO: 2945 - DNA, 1044 bp, Homo sapiens
agacccgggccctgatcctagcacccgcccacccgtgtgtgtgtctagacccgggccctgatcctagcacccgcccacccgtgtgtgtgtctagacccgggccctgatcctagcacccgcccacccgtgtgtgtgtctagacccgggccctgatcctagcacccgcccacccgtgtgtgtgtctagacccgggccctgatcctagcacccgcccacccgtgtgtgtgtctagacccgggccctgatcctagcacccgcccacccgtgtgtgtgtctagacccgggccctgatcctagcacccgcccacccgtgtgtgtgtctagacccgggccctgatcctagcacccgcccacccgtgtgtgtgtctagacccgggccctgatcctagcacccgcccacccgtgtgtgtgtctagacccgggctctgatcctagcacccgcccacccgtgtgtgtgtctagacccgggccctgatcctagcaccctcccacccgtgtgtgtgtctagacccgggctctgatcctagcacctgcccacccgtgtgtgtgtctaaaccaggctctgaggccacttgtgctcatcgctctgctcttagcgtgctatggagtcatgctggcccattgccgtgcagcctcaccgccagaggcttgaagagaaaggcagagtgggtggggaaaggaatctcatgccgtctgccgttcaccctagcccagccatcgattccgaggagcgagttcctgaacttaccggtgaagtagagccgcttcacggagcctacagttgaggggttaggacttggccatatgccagcgtgtagcacagagctttgctcatgatgaggtgcttggtaaaattttgtcgaagtcaatttcacaaatatttcttgagcacctactgtgtgccaggcactaattggtgaataaagcaaagacccctgccttcacagagcttatgccctagcagaaatgaatgaaagctggattcttttactgtaattgtataatatataaatatatgcttcagaattcacctgaggagctgta

SEQ ID NO: 2946 - DNA, 1051 bp, Homo sapiens
cgcaggtccagctgggcagagccgggatgcccacgtggaagctgggccctgcagcgcttgcctatggggacggggtacctgggactcccccgatgagggcaccacgctgagctgctgctctctccgtgcaaagccgcatgcctttcaaaggggccgttatcattcccatcacgggcatttctcagctgtgatttcatttctcccgcctgctcctccctcctcctgcccctgttgaaagctacttttcactaaatggagtcaaatgcaagccagatgagctgctttgtatttctcatgtttgataatgatttaatgctatgtttgtctgtatttagaaataagacactttttaaaattgttgcctcaggttctaagagggtggggaaacagccattattgcttccctgatgaccgctttttctcctgtggacggaggcgctgccgctctcaccccagcaacctcgggtagcacttaccgggaggtgcgctgaggccttgacagagaaagagacagagggctcaggagcagctggtggcgtgcccacgggaggtattcaggtgggtcgctgtctcgcacggcccaagcacagtgggtctctctggccctgtgcaggatgccaccctacagacgggaaatgaagaatgtagacccttcctgcctggaggacgctggcgctccacctgccgcactccgctggtgatgccacgtgggccccactggctctcctgaccccaagccaaaaccacgcctgagcgggtccacaggaggctgtgcagcgcccgggagcttctctgcaggttgggcagatccacctcgggccaggcccctgggtttcaacactacccctcacctctccgagggggtcctgggaaaccccttgctggtgggagaatggatgactgaggaacagtcaccccaacttcaggggttgaatactgtccctgcaaaactcacatacactcagaacctcagaatccggctgtttgggaagagggtctttgcagatgaaacgagggcttgagatgaagtcatgttgattggggtgaccct

SEQ ID NO: 2947 - DNA, 1065 bp, Homo sapiens
acaggtgggttgggtggctcaggagggtcccacctgggacgttccaggggcttcgactgaggcctatgctgggataggggctgctgatggggtgtcaagggacacaaggctgggtgcctgcctgtgcgcacctcagggcagaggaccgacatgggaccctgtagggccagtgacaagctcactgaacctcccgagggtcctctggaacgtttgggatttttcagggcagaattgaaaacacaataaaactaagccgtgtgatgtttctgaagctgtgtctgtctgcatgagattcagacttgtctgctattttattagggaattttccactccttagaacccagcctgattgtaaaccccagagccccatgggccacatccacccgacgctggcagcgcagaggttggtggggggcctggcggaggggctcaagtgcacagctcgttaagtcgacttggaggctctgcctgcctgtttacgaatgtacatccgaggcggcctggtaaatagacaatatggacacagcaaaactcaattaggttctggagaaataaatgagccacatgtgaggagcaggcattattcaaaggctcatgcaactaagggagttgcaagaagcgttctgctctgagaccgagttggttgtttttatatttaattctccagccaccaaatgtgcagtgactccaggttttaaaatcttatcttcagaagaaagattgcctccattatatgttatctccaattgtcattttcatactttgcctgcaagagagagataagctcataggaaggggaggctgagatagccagcctgggagactccggcgctgacgggagagggagaggttttcacaaaggtcgaatccacccgcagcactctgcgcatcagtgcagcgagcctggctctcctccgtcagttctgcgttttttggaaaaaaaggtgttatggcttttctttcttcataaaactggctattctgtggtacagtaggcgtctctctgctagcagcgtgggtgctggccatggaagcctgcagggttaccgcacgggacagaacctg

SEQ ID NO: 2948 - DNA, 1046 bp, Homo sapiens
ttctctggcttccctgggccctccaggatctggaagtttctactcactgcagatgtagctcctcagtctggctgtcctggtgggaacccatctttcctcccttgatgacttcctgtgcgtgggacttgcatcttcagctctctgtgcagaccagggtcacaactattggaatggcttttgctcctgggggtgcgtgtgcaccctggtcatgaggtggccacacagaacctctttccttcccagcctgggccacttccaggagcactgacttctgccccctcccagatgcctggtgaccctgatccctccactgagttgctgcctcttgagatggggcacccatggcacacaagtgatctttcctaaaggaagtcggtctgggaaatggcctttgtcctccgttattttagtttatgtcatccctccctgcaccccccccccccagctttttgaaacattctgttaaaatgtttcttggcttactgtaattgtatatatttatggggaacagtgtgatgtttcagtacacgtatgtgttgtagagtagatcaaatgagagtactagcgtgactgtaatctcccacactcatcatttctgtgtggtcaggacattcagaagccgctcttctagctgctcttctagctcttttgtattttacgggaacttactggtaaccgtcattaccctgctgtgcaggaacagcagaatttagactgtaacttgtaccatgaccccttgacaacctctccctcccctcctcagtctctgataaccactgttctgtgctccgcttctatggtaccaactcttctttttgagatcccacatatgagtaagatcatgtggtatttgtctttctgtgcttggcttattccacttaaccttgatgtctgctaggtccattcatgttgtgttgtcgcaagcgacaggacttcattctttgatcgtggttgcgtaagtactccattgtgtagatacactacttttctttatgcattcatccattgatgaacacctaggttgattctgtgtctccactgttgtg

SEQ ID NO: 2949 - DNA, 1063 bp, Homo sapiens
ttgggtcgaccccagcagccatgggagtgttgggggtgtgctctgctgtaggaatcttctgggtggtcctcatggcctgggctgcatgcttcttccaggcacttctggagacttttgtgtggctttcttgaggactccaggagaagggacacaccagcctccttctacctgtcatgtgatggagatgtcctggcaccaccagaacctcgggtgtcttgggtgactgactccctgctgggttccaggaagagcaggatttgaccttgtgtgtgaggggcggggaccgagagcagtgctgtgctgagagtttggctcattctggaccctgaagaaaaggatgcagctcggctccggcgcaggtccctggttgttggcaatgacagccctgtgcatcgtacaggcattctggttggtgctggggtgtagatgttattatctgagttaattaatttcttggataggtctatggtggacatcatcattgtgaagtcactgtttttccagcattccagggaggagagggtgagaaatgagaagggaggaatgaactctgaacaagagcaagcgtggggtcgcagtctgggtctgtcctgctcactgagctataagtgctctccacgcccacttcggggtgtcttaccctgtaatctgcctgcaatcctctgaaaggaagaaggagacagagggaaggcctcattgtcactgctgttgagttgagcaaagagaacatgaaaacctgtgtctggctctgagacctggtccgtggcttgtccttctggcccctgttctgctggccagggagggccctgtaggcgccgctgtgagatgtcgcctgcttgatactgatcatcaggactaactgtgagttgccgcctggttgatattgatcttggaactagctgtgtgctgctgcctagttgatactgatcttcagaactagctttcagatgtcacccggttgatactaatcttgggactagctgtgagatgttgcctgttagatactgatcttcaggactagctgtgagatgtcacctggtggatactgatcttgggactagct

SEQ ID NO: 2950 - DNA, 1031 bp, Homo sapiens
acagtcaacatggaaaagccagggggttgctctggggagagatgaggcaggctcagagggcaggtctggatgcgggaggagctgaggaggaagagagactgaggggaagagggaggaggacagggaggtagcgtggtaatgggagctgggggccaggccccggtgcgtggtgatgggagctgggcttggagtcttcagacctgctctgcccaccttccctgtcctcatggataacaccacctccctccacgttgcttcacttgagatgcgagattcagtactgggcctgggagggctgggccgacctaggcagctggcccttcccacttttctcccttcatgaccacgcagccactcctgcaaagcagcagagcccagcggtgcctgcttcctgtcaccctccctgcccctccctgtctcgcctcctcctaattggcccctgcttccactcccgcccccacatggcagctgcgggaattttcttaaatcccgaaccagattgtgtcatttctgcttagaatctctccctggcctccctgcatgattggagtgagaacccagcttctcctcgcgccgtgaggcctgcctgaacgctcttgcgcctggcgctcattccttctctcctccctggcccagcctgctgcagtccggtgggctttctgcttagaatgtacctgggactggtttccatttaggggtggtgaggccagcggatcaggagacaactcagctgagaccctgtctgttactcagggctcccaagacgaggggtaggccatgtcccacaggccacctggggaagcgcagggttggtcaggaggcaggagggtggaagggaggcatgggcagagacttgattatggttttgtgggaggactgggccagggagggtgggcagctggacgggcttgcgttggccaaggagagtcatgtcgtggtctctgaggtgcagggatggcccgaggtgtctggtcactgaccctgagagaccatggcagagggtgggactcctggggtgtgtgagccagaca

SEQ ID NO: 2951 - DNA, 1034 bp, Homo sapiens
ccatcatccatccatccattgtccatccgttatccattcatttgtccatccattatccattcattggttcatccatccatctaccactctgtccatccatcatccatttgtccatccatcatccatttgtccacccatccatccatttgttcattcatctatccatccttttgtccatctatccatccatttgtccatctatgcatccatccttccatttgtccatccattactcatccatttgcccatccatccatccatccatccatccatccatttgtccatccatccatcatccattcatttgcccatccattcatccatccatttggtttatccatatatccatccattcttttgtccattcatccatctatacatccatctatccatccacttgtccatccatccatccatccatcatccgtccatttgtccattcatcatccatccatccttccatccacctatccatccatccatttgtccatccatccatccatccatcagtccacccatttccatttgtccatccatttgtccattcatcatccatccatccatccatttgtccatccattcatctatccatccatttgtctatccatccatcatccatttatccattcatctttctacccatccacccactctcctacccttccttccttccttctttccttttatccatcttctatctcctcacccttttaccacctcaaccatcagtctattcacccacccacctttccatccaccctctattagacatctactctgtgcctgtctggcctggggcgatgcagttggttgtgtgctgggagtgtggatgaggacttccatgactgcctctcccctaccctagttgatgatggtgacggctatgagacagaccaccaggattactgtgaggtgtgccagcagggtggggagatcatcctgtgcgacacctgcccgagggcctaccatctcgtatgcctggacccagagctggagaaggctcccgagggcaagtggagctgcccccactgtgt

SEQ ID NO: 2952 - DNA, 1049 bp, Homo sapiens
actccatctcaaaaaaaaaaaaaaaaaattgtaaagtcagctggggccaggtgggatggctcatgcccgtaatcctagcactttgagaggctgaggtgggaggatcacttgagtctgggaggtcgagacttgagcttgggaggttgagactgcagtgagctgtgattgcgctggtgagactctgtctccaaaaccaaaacaaaaaatgatattagttcagtgttgggagacagataaaatattctgttgagacagatgaacttgtcacttcattggtcaatttaatgatttctacaggagcagtttttgcaagaaaggatcaaagtgaacggaaaagctgggaaccttggtggaggggtggtgaccatcgaaaggagcaagagcaagatcaccgtgacatccgaggtgcctttctccaaaaggtacaggagggaagtgtgtgtgtggcctgcgtgcacccagtgcccagcccgccttttccctgcatgggagtgggggcacccgcagagtgattggtttgcatctgttaatttctggaactatgctcagtgcaggaggcagtggatgaatgctattatggttgttaacaatagtcaacttttggtggttttaaaattttgtctttcacaggctaaagtgttttatttttttttgagctggagtctcactccatcgcccaggctgttgtgcaatggcgcgatctcggctcactgcagcctccgcctcctgggttcaagcagttgtcctgcctcagcctcctgagtagctgagactacaggcacctgccaccatgcccggataatttttgtatttttagtagaaacgggggtttcaccatgttggccaggctgctctcaaattcctcccctcaagtgatccacccgccttggcttcccaaagtgctgggattataggcctgagccaccatgcccggccaggctaaagtattttaaacagtaaggtactcagacttgctttcaagactgttttctcaaaaatattcttggctgggcacagtggcttatgcttgtaatcccagcactttggga

SEQ ID NO: 2953 - DNA, 1033 bp, Homo sapiens
caccacaatctccgtttccctggttcaagccattctggtgtctcagcctcccgagtagctgggattataggcgcctgccaccacgcctggctaatttttgtattattagtagagatggggttcctccatgttggtcaggctggtctcgaacccctgactttaggtgatccacccacctcggcctcccaaagtgctgggattacaggcatgagccactgcgcctggccattttattttatttttatttatttatttttgaggtggaatctcactctgtcacccaggctggagtgcaatggtgtgatcttggctcactgcaacctccaccttccaggtttaagtgattctctttctcagcctcccgagtagctgagattacaggcgtgtgccaccatgcccacctaatttgtgtatttttgtggtagagacggcgcttcaccatgttggccaggttggtcttgaactcctgacctcaggtgatttgccagcctcggcctcccaaagtatcgggattacaagcatgaaccgctgtgcccagccaaattttttttttttttttttgagacggagtcttgctctttgtcacccaggctggagtgcagtggtgtgatctcggctcactgcaagctccgcctcccatgttcatgccattctcctgcctcagcctcccgaatagctgggactacaggtgtctgtcactatgcccggctaattttttgtatttttagtagagacagagtttcaccgtgttagccaggatggtctcaatctcctgcctttgtgatccgcctgcctcgggctcccaaagtgttgggattacaggcgtgagccaccgcgcctggccccaaatttttatttatttatttattttgagacggagtcttgctctgttgcccaggctggaatgcagtggcacgatcttggctcactgtaagctccgcctaccgtgttcatgccattctcctgcctcagcctcccaagtagctgggaaacaggcgcccgccaccacgcctggctaattttctgtattttt

SEQ ID NO: 2954 - DNA, 1063 bp, Homo sapiens
ttcggaatagatcttaaagtacccctcttagattattactgcgaagagacgttgtaaaaaataaatcagtgatttttgtagtggccaaatgtttgaaaagttgatccagttaacacaagttttagatgaagttcttttaaacatgaagggaggtaagatgtgtttttggaaaagtctatttagttctgcagagcttttaaacgtgaaagtacaggttggtacgatgcacaagtgcattaatggtgtcaagtttgtagagagataagattaacacaagcttcttcgtaagagtgaagaaactggaaccttgtaggatgtgctttgccgggtggtttggaagtactaatgcatagatgaagcgaatcaaaatgtcagaagttcttgacggtagtgttgtaataagattctaggttttagccttaaccttgtccaagctggagtggacaggcacctagaatactttgcaactcccttcatgagaaggtggatgagacaggattaagggagatgagctaagacggatcaggaccctactctgaacatgtaggacaaggattgatttcatatgaaaattgtgggtatgcaaggcattttgtatgcctgcactctaattttggaaaaatagtatttttttgaaattgggaatgttagggcaaacaaaaggaagtgttcattttattgtggttcataaactaagagaccttcatgcctgtagagattggggagactggaaagtttgagtgagtcaagagtgctagaatgatttccccatcaaaagggcatgaccccaggccccaagcttgtacagcagcatctgccccattatacctctggcactcaggcagtgatgcctcttggccctctggcaaagggagcacacttccgttagttttgtatttgtatggacttttatacctatgacgtttctggttctgttaatcttgtttttccgactgactgaaacttcatctctgttatcatttgtgtattttcttagaaaaagcttgtggtgaaggggggcaaaaaaaagaagcaagttctgaagttcactcttgattgcacc

SEQ ID NO: 2955 - DNA, 1452 bp, Homo sapiens
tgtgatttacagatctctctcatgtaagaggagcaacaggaaagcacgtgagaaaggcctgcagcactgagtgctcagggctaaggtgacagtactgctcccagagaccctgacggtctcagcagggcatgggcacagaaatcctctgggtattagagacagacgcctaccaaagcacagggcgtcatcccacggtcaccctgatgagcctggtgtctccctctgttaggtgatgctgtgtaaccccatctgcggcgtcagctatgccctgacagtgtggcgattcttccgcgatcgaacagaagaagaagaaatctcactaattcacttttttggagaggagtacctggagtataagaagagggtgcccacgggcctgcctttcataaagggggtcaaggtggacctgtgacgggcagtggccccggtgaccttggggcctccgaccctgtgcagcctgggacaaaactgtttccggttggccgctgccacatggattttcttaatcgttttatgtcattagtcactcttctggaatgtcactcaagaccaagcggtcagaaggcctgaggacccaaggccccactggagcagtctgtccttatgccgaatcaaggcggaacatgggtgaaagacgagtaaggggcaaatcacagcaatattccacagcgccctccagagttacctggggaggaccgaggccacacgccactgcccccgaggccagagtgtaagtaaaggataaccaggactcgctgggagagatggactctgtcctcagcaacactccacagcagaaaggggtagcaggtaccccttcttatcagcggtaaaaatgcatttacaacctttcatttaaccgaaaaacacagaccgctttaacctctttatttctgtcccccactgcatgaacatctatacaattttaaaaatacttcctcataggatgctttggcccttcatctatttaatcatagctacatacctattttttataagtagcagtacacattcaaaggggtattcctagctcaatgcttggtgttctagttcaacttttatcctgcagcaagtaagcctagataactctacacgatttggctgagtggctttgtgtgaccgtggccccaggccaaggggatcatggccctggctggctttcccgggggtctcagctcctgttgtcagtgataggcggctcaaaggagcatcagtttcttttgatccaagaagtgcttactgaatgcctgccctgtgcgtggccttaaacattgagaagtgctgctctccgtttatttgggatttgattctcattttaccatagcttatattctcaatttcaatgccagtctcagaactcttgttttctgtgttctgttctcaaaattacattgtccctcatgtcatttcaaactgttttccaaagggatttgagcatatacaactacaaat

SEQ ID NO: 2956 - DNA, 1077 bp, Homo sapiens
tgcctgctgcccagcatcctatgtccctgactcacatggaaaggccatcggcacttcctctgacttcagagtcaagctctggtctggtctactggccgtctccaggcccttgctgcccaagccaaccagagcatgagactggccactaccccagagcacccagtgtgtgccagacctgggcccagggctatagagatgtggctcctgtccacctcagcctccccgcggaagaagcatggcagtctcttagaggagaaggtgcagggaccttgccccagccacaccgctgctgtgtgggggctttaacctcagcgcggggtcctggctctggaagaccagctgggggctgacatagcagactgcctgccccctctcagggtggtcaggaaggtggtgaccatctccgttccccaacaggtcacttggggaacaggagagggaaatggaggttcagggggtgtggtcttccgggacatgtccttacgtggcctgatgaagtaaaataaattaaggcaagtacgtcagagatgtccactgtggggggctctggcatgggctgtgtgaggattctggaacatttgatggcaagaggacttgttctgggatggtgccaggtcatgcacggggcaagagtgcccatctgggcccaccttggatggttccctgaggatgcaggtaacctggaagggagcccagatattgagctttgaccaggagtggacggaagtgagggaatacgcacttattgggcaccccgtatacagcccctgggtgtcagggacatgggcaggagggtcctcccggggcgtggagaggagagtgcagcctgatgtaagccagggccagataggtcatggtgcgccagggccttccccgccttagggcatttgtgctgttgtaacacagtacttaagacgcagtaactcatgaagaacagatttatgtctcgccgggtgtgggagcacttgccctgtaatcccagctactcaggaggtttagatgggaggatcacttgagctcaggagttcgagaccagcccaggcaacatagtgagactctgtctctaaaatataaaaa

SEQ ID NO: 2957 - DNA, 1071 bp, Homo sapiens
tcccagagaatttcactagcaaaagagtgggcggaagcactgtgtggtggccgcgcgcagcctctgcactcgccctgggatgggcaccgctgcgcccgtgtgcgggctcttacactggcttcctttgtttgtttggccaagattggacttttggaataattttttaattgttgactaatttaggaaattcagctgttactggagtgcagaaggttgacggtgtgttcctggaagggcttggtgaaccgcctgccgcgtttggccattagtgagggaagccctgcccccctcctgcccccaccttgctgccagcccacaggcgtgagtcatggactggaatattcatgaggctcagaatccagtgtcgtgctctctgttccttttgcctgcatttagcgggagtcagtcttgtgatgggaaaatacctgcatcctgaagctgcccctgtcgcctcattggttagcgcttaggaacatccggtggccagtgagtcccatgtgcctagaacccgagcatgggtgctgagaaggaggttggcgcagatgagagcatgtagccctcccctccagcctggctctcgccttccctctgcctgagcccagactctttctccagccacctttcatgtttctgctctgcatatatctctgaaagatccactgtgtccagacagccacacactggcccttctgagcggcactggtaggtagctcttctgatgccactgtggcctaaccggctgcggggggttaaaaacccacctgggcacagtgagctgctcatgttctccccctggaggtttacagaaggctctgctcagagccaggcctggggggcatacaacagagtgtgggatggagccttggggcctctctgtccccactgctgtcagatttgtgacacggacagagtgagcactgccaggaggggggctgtaccaggagaggcccgtgggtgggatttccagaggattcagtgaaccgagggagcatcccggctagacccagggtgctgcggaaggtgagcgagagatctgtcagggaggcctggaaaggttgttgggcccatgtg

SEQ ID NO: 2958 - DNA, 1040 bp, Homo sapiens
acggggggacttaattttcagaagccacaatttctggcaggacattcacttggattggcttccttcacgcagtgagggcaggttgggtgggctcgcctgattcccgctgtcccaagccacacccagggcctgacagtgggccgcccaggcccccacctcgtctcggctgtggccggggcctcctgggtaaaacactgggccccttaccagaaacagaaagactgttgttttcttagatgacatcttgttttgtgtatagaggaatttggaccaaactgaaatagcagccatggagtctggcctgtttctatgccagtatcctccagggcccactagactctgtcacatccaggggccgttgaatgctgtcacactcgtgtgttgttttccagaggattgtcacacctgccaggtcctttgcagggaggcgagggctgtgctggccgagtggggccagggttgtcagagcagggtcatcatgcttgctcctaggatactgcaccttagatcagctcgctgcctcccacgcttgccccttggtagggaaacagagcgaggctgtgcggggaggcacggcccctgctggctctgggttctgggtgacactgggtgggtgtgtgagaaaccgcggggggctggcctcacagttccagcgtgactttctcatggactctgctggggccgctgtacaccctcgagccccacacctgcctctcacttcgaccataccatgaaggaggtctcgagggccagaccctgctgccctgccgggtgggggcacacattattgtggactatcccagtcggtgtcaagagcccagggagctactggcaggcacagaaacctcacctcgggttgcacgtggtgcctggcagagctttgtactgtagagaatgggcattgctttctggtgggctcagaacaacagacatctgttcgcccccagttctagaggccagaattctgaaatcaaggcgtcagcagggccaaggtccctctgaagtcaggggaggatccgtccctgccccttccagcttct

SEQ ID NO: 2959 - DNA, 1052 bp, Homo sapiens
ggtttcactctgttggccacgctggcctcgaactcctgaccttgtgatccacctgcctcggcctcctaaagtgctgggattacaggcgtgagccactgcgcccggccctacttttttctttagtatgttaagctgggagagaaccaagctcaagggtcatcagtggccttctgccctatgaaggacaggcttgaagccatcaccaggtgtccccgtggcactgtggggaaggctactggatggttctgtgtgaggggtgtcccgagggacagcacagagaggtgcgctctgccttcctcctgcctcaagtcactctttgagtgaacctgcttttgtgcctcctctgagcgacccttggacctgcccctcacatcctggcctgcaaggcctggcagcctgcctctttggacctttgtccatgtctcccactgcgtccctgtgttctggtggctccccaccacctccccactcctgctgctctttcctctccctgtggtaccaacgctccccctacctcctcctgcctaacacctggtcttttaggcctcagctcagatgcctctcatctgaagtcacaccctgccttaacatcgttgggctgtccccatcgtggcgtggccccatttacttctcgtccgtccccccagctagaacccaggcttctctgacccacacccctctgtacacccagcactgagaggccccacagatgctgccagaaaccagctgcagagcagggaggtggaaggcctctgccccggaaaagcatgcgcccataggtctgtttgatctgtgtcagcatagcataccgtaatgtacttaatcaccctcaaacaacacacacttggcttcattccacttttaggtcttgcagacagtgcttggctccttccaagatgggcattgccctgcccagaggcggtgcctaattcttgcctggctctgtgcagccctgccctaacagcctttggccaatgggtggcgccatagccacatacattgacttgggggtgaaagagacagttccaggcatcgctttactgtgacctgtt

SEQ ID NO: 2960 - DNA, 1029 bp, Homo sapiens
aggatttcactatgttggccaggctggtctcgaactcctgacctcaaatgatctgcctgtctcagcctcccaaaatgctgagattacaggcgtgagcccctatgccctgcctaggttttcagtgtgggtgaaacagctttctgttgaaagaagataacatctaggactttcatagctagggaggaaaagtcaatgcctggcttccaaggacaggctaggtctggtgactcacgctgtaatcccagcactttgggaggctgaggcgggtggatcacttgaggtcaggagtttgagaccagcctggccaacatggcaaaaccctgtctctactaaaaatacaaaaattagctgagtgtggtggcacttgcctgtagtcccagctactcaggaggctgaggcaggagaatcgcttgagcccaggaagtagaggttgcagtgagccaagattgcacctgccacagcactccagcctgggtgacagagtgagattctgtctcaaaaaaaaaaaaaaggacaggctgactctcttgttaggggcttatacagctggtgactttaagttgaagccaatgctcatttactattctgaaaatcctagggcccttatgaattatgctaaatttactctgcctgtgttctataaatggaacaacaaatcctggatgtcagcacatctgtttatagcatagttttctgaatatttttaagcctgccgttgagacctactgctcagaaaaaagatttctttcaaaataatactgatcaggccgggtgcggtggctcacgcctgtaatcccagcactttgggaggctgaggcaagtggatcacgaggtcaggagttcaagaccagcctggccaagatggcgaaaccctgtctctactaaaaatataaaaattagccaggcgcagtggcaggcgcctataatcccagctactcaggaggctgaggtaggagaatcacttgaactcaggtggcagaggttgcagtgagccgagatcgcaccactgcactccagcctgggcaatag

SEQ ID NO: 2961 - DNA, 1047 bp, Homo sapiens
ttcttctaagagttttatagttttaggttttacttttcggcttatgatccattttgagtttttttttttttttgtatatgctattaggtaaaggtgcaactcattcttttgtgtgtaaatatccagttccttagcaccatttgttgaaaagattgtctttccccattgagaggtcgtcttcttgttttttttttttttttgagacggtcttgctctgttgcccaggctggagtgcagtggcgtgatctcagctcattacaaccttcgcctcctgggttcaagcctcagcctcctgagtagctgggattacaggcacatgccaccatgcctggctaatttttgtatttttagtagagacggggggtttcaccatgtcggtcaggctggtcttgaactcctgacctcgtgatcctcccacctcagcctcccaacatgctgggattacaggggcgagccaccacacccggccgaaaggtgtttatacccttgtcacatagatcatttgaccatatatatcatttgagtttatttctgggctctctgttctattgattcttatatctgtctttatgctaatgccatactgttttgattattgtagctttgtggtaagttttgaaatcagaaagtgtgaatcttccagctttgttctttttcatgattgtttggctatttccgatgtgatttgcaaatatttttttccactcactgggttgtctttttactttttctttgctgtgatgcccaggctagagtgcagtggcatgatctcagttcactgcaacctccgcctcctgggttcaagtgattcccctgcctcaacttcccaaggagctaggactacaggtgtgcaccaccacacctggctaatttttgtattttttttccagcagagacagagtttcaacacgttggccaggctagtcttgaactcctgacctcaagtgatatgcccacctcagtctctcaaattgctgggattataggccaccacacctggcctattttctttaaagagttttataggatagatgctgtggctcacat

SEQ ID NO: 2962 - DNA, 1023 bp, Homo sapiens
ccttgtgtgtccccaagacaccttcttggcctgggagaaccaccataattctgaatgtgcccgctgccaggcctgtgatgagcagggtgaggggcttctcagtgcttggcagggagttcctaaggacaggcctttctgaaggaagtggctggctcgggcccaaacttggggtgtgagggtcctgcacccacccttgccagaaccctccaccctgatcctccttcagggtgcccttgccccttctctcttcctggtgaccttcccatctctccatgtgccttggcctctggtcggccttaatctctgagcttctctcttttttagggtagccctgtacctgtctgtctttcgcctatttctgtctccattatcttgggataatgcctctgcctctccatgggagcctttggccctgactaactctccactccccatctccctgcacccccaccagcctcccaggtggcgctggagaactgttcagcagtggccgacacccgctgtggctgtaagccaggctggtttgtggagtgccaggtcagccaatgtgtcagcagttcacccttctactgccaaccatgcctagactgcggggccctgcaccgccacacacggctactctgtgagtacccccacccagggctctctactcccagacccccttctccctgcctgacccactcctgtcccatggtgacgcatgcctctcctggattgcaggttcccgcagagatactgactgtgggacctgcctgcctggcttctatgaacatggcgatggctgcgtgtcctgccccacgtaattcctagctgtcgtgggatggagggaagggcggctgggagcagagcaggggcctggggtggggcaggtgctgctggttcaggaataggaagaggggatagggaggagggagccttggccctgtgatgggtgggccccacttcaggcaaacttagatggcaaaagagcaatctggatccgccttagccagatacataagggtatttgccttcactttcagc

SEQ ID NO: 2963 - DNA, 1051 bp, Homo sapiens
agcaggggtgctactgggcctcagagagtgaacgtgtggattcagggagcgttcacagtggaacctggcacccagagaacactcttaaagtacttcacattagccgggcgtggtggctcacacctgtaatcccagcactttgggaggccaaggcgggcagatcacgaggtcaggagatcgagaccatcctggctaacacagtgaaaccccctctctattaaaaatacaaaaaattagccaggcatggtggcacgtgcctatagtcccagctactcaggaggctgaggcaggagaatcgcttgaacccaggaggcggaggttgcagtgatctgagatcatgacactgcactccagcctgggtgacagagcgagatgccgacttaaaagaaaaaaaaaagaagtacttcacattactgtcatcaaaagtagattccaccaccagagtatttgcaacttggaatccaggctgctaataattgttttgggaggaaagcatgatagtgttaggattcgggatgatgaaaaaacaaaactagcggcaggtagcacttctgaaatgcttactctgtgcagtactctgttctaagcctgtgtaactccactacttaccgtggtcctgttattatccccattttacagatggtaaaagcaaggccagggactgggagtcagcttgcccaaaatggtgtagtcaaagttgaggctaggactgaagccgcaggacgcccgactctgagcccaggtctgtgctctgccgcacagcatgtccggttttgagcgcttgctctgtgccaggcactctgcgaagcatggaggggctcagtgacttcatggccaccctgtgagagaaaggctaagacgtgcttcatttacagctttgagcattgggcattgtcaggtggaagcatttgccttaggtcacataggctgaagcggcagacctgggcagcaaggatatgtttcttgggcccgatggtggtgtgggctccaggcctctgagttatctcccctggagagtctaagtcactttgctaatggggttttagtttat

SEQ ID NO: 2964 - DNA, 1018 bp, Homo sapiens
ttttttttttttgagatggagtcttgctttgtcgcccaggctggagtgcagacggggtttcaccgtgttagccaggatggtctcaatctcctgacctcatgatccacctgcctcggcctctccaaagtgctgggattacaggtgtgagccaccgcacccagcccagtttttactcttaagtttaggtttttgatccattttgaattaatattttcatatagtgtaaggaattggtccagcttctttcttttgaatatagatattgagattttccaccaccatttgttgaaaagactatcttgaagattgtttgatcttatatgtatgggcttatttcctggttccgtttctgtttcatcagtgtacatgtctgtccttgacccagtatcatattgttttaattactatagcttttcggtaagttttgaagtcagtacaagtgccttacccatttttcagttgggttatttgttttcttgctgttgagtttcttgtgttccttacatattttggatattaactctttatcagatggatgatttacagatgttttctcccattctgagggttgtctctttggaattttttcctttgttatgcagaagctttttagtttgatgccatctcatttgtctgttgttaacctttgttttcggggtcatatccaaaaaattgttacctagaccagtgtcatgaagcttttcctctagtaggtttacagtttcaggtcttaatacttaagtctttattccattttgagttgatttttgtatatggtgtttgataaggatatctagtatccttcttctccccgtggataaccagatttcccggccttatttattgaagactgtccttcccccttgttttgttattagcacctttgtcagaagtcaattggctgtaaatgcagtgtttatttccaggctttctatgctgttccattgggtgatatgtctttttttatgccattaccgtgcttggtttttgagagagacagtgtctcactctgtcaccc

SEQ ID NO: 2965 - DNA, 1002 bp, Homo sapiens
ttgggaggctgaggcaggagaatcgcttgaacccgggagggagaggttgcggtgagccgagatctcaccactgcactccagtctgggcagcaagagcaaaactctgtctcaaaaaaaagagtaactcccttaactccctcttgtcctcctcttgtcctctttcctagcccctagagacttcacctctgttctactttttgtccctatgaatttggctattctcatgtaagtggagtcacacaatacttatcctttgtctggcttatttcactcagcatagtattgtcaaaatccatccatgttgtagcatgtatcaaaatttaattcctggccaggtgccatggctcacacctgtaatcccagcactttgggaggccaaggccggcagattgcttgagcctgggagtttgagaccagggtagcatggtgaaacccagtccctattaaaaaaaatacaaaagttagctgggcttggtggtccatgcctatagtcccagatatttgggagtctgaggcaggaggatcacttgaacctgggaggtagaggctgcagtgagctgaaattgcaccattacactccagcctgggtgacaaacagtgagattctgcctcaataaataataataataataattctttttgatggctggatgttattcaattgtatgtgtatatcacatttagtttatccattcagctgttaagggacacttggcttctttccacattttggctttcgtgaataatcctgctatgaacatgggtattcaaatatctcctccatatcctgctttcagttctttcaggtgtataccgaggagtggaattgctgggtcttatggtagttctgtgtttaatgttttgagaactgccaaactgtttttcacagtagctgcattttacattcccagcagcaatgcacaagagttctgatttctccgtatcctcaccaatgcttattttgattatagctgtctgagtttgtgtgaagtaatgtctcat

SEQ ID NO: 2966 - DNA, 1051 bp, Homo sapiens
tctctggctcacaactgtgtgaggcttgattaatttagtactgaagaaaaaaatatgcattttttcaccttaaagtttaaattgttgatttcagagtccaactccccagattaaacctgaatatttagccttgaggtctgttggcatcagaagagagaaaaaaaggaaaggccttcagttaactgagagtaccctttcagccctggaagagttagtcaatgtttcctgtggtgagtaatacacattgatcaccctgaatgtctgtccaccagacccccagaggaagattagtcataattcgagtccaaggaagacggctaattctagcgatcaatgtttgtttcccattcagaagaagtagatggctgccctgtcattctagtttgtggatcccaggatgttggaaagtcaacatttaatagatacctgattaaccatttgttaaataggtaagagtgcttttcttatggctttgacacattgctaggtttttgtcatgaagtgggatttttgatttggagggaatgcttcttggcttctagctagagattacatacaggtctaaagctgcccagctgaagcatctggtcctcactgccgtctgctttgcagtatgtgacaatgctctagcgtaggctgactttgccttacctgcaggcagacttccaagaggagacacttggtctcagagtctgtatttataagttctggggtggggggcggggggggggtgcgtgtgtgcgtgcgtgtgtgtgtgtgtgttttcagacagggtttccctcaggctggagtgcagtggcacagtcatacctcatagtcttgaactcctgggctcaagtgatcctcctgcctcagcctcctgagcagctgagactacagccatgggccaccatgcctggctaatttttttatttttgtagagatgaggtcttgctatgttgcccagtctggtctcaaactcctgggaattttcgcttaatttttttttttttgagaccgggtctgactgtgttgcccagcaaaaagtgtagtggcacaaacagggcttgct

SEQ ID NO: 2967 - DNA, 1035 bp, Homo sapiens
tttaaacgagagttaactgaacagcggtggcgaaagctgctggtggtcaggtgagacctgagaaagcgctggctgtagaggccgggaagtagcctgattggaatggggtcaagagcctgggcggagagggactcacaggcttagtagtaaagtattttgctttggtagaagttagctgtaaagggaagaaaagaaatgaagcactagttgcagggataagtatgatcaggagagttttgtaattttgttaagatggatgaaaaaaacatgctggaacatggcagatgggaatgatccagaggaagggggaggtaaccatgcagcagagagaggagaggctgctggaactatgtaagttggctaccagggatgggtccggttctggcatcatgtggccttaggagcatagccaggtcattcatagtggctagaggaagtcccttggagagggccagaggaagtagaagttgtcctctgattatttcctgctgcactgggaaatgaaatcaaggtcgtcactgtgtgggaagcagatagatacgaggtgggtgtggggaatttgaagtgaaaggagagaagaaatgagagtgggacagcgaacggactgttgtgattgccttttagtcttttgcagagtccagtagctggaccaggactgcagaggaggagatggaattgcctgttctcaagccttggttactgaaagtgaatgttccagatgctatggggcagccacattcttttttcatttattttcagctttatctgtttttctgggacttcaccaccactgttcatatttcttatgctctttcttggatacttccctccctatcccaccctctggatgtgtcagtagattctggagttgttttttcacataagggagatagtaaacttgattatctaattttgttagatattcttgatttgccctcagtgattgataattgcacacagtgtagaatggttggttcaacagacttttttctcaaattgttgaaggccttgttctgttgttttctaagatccagc

SEQ ID NO: 2968 - DNA, 1047 bp, Homo sapiens
gtgatccacccacctcggcttcccaaagtgctgggattacaggcgtgagccaccgcgcccggcctactagcccagtttcttaatatatagtggccaggttagttatggatgtctgctaaccacggtcctctaatccttggatcaagttgcagatgttccttgatttacgatggagttacggccgaataagccatcttaaatcaaaaatatcgacctgttggctgggcacagtggctcgtgcctataatcccagcactttgggaggctgaggcaggtggatcacctgggggcaggaattcgagaccagtctggccaacatggtgaaaccccatctctactaaaaatacaaaatattaaccggacatggtggtgggcgcctgtagtcccagctacccaggaagctgaggcaggagaatcacttgaatccaggaggcggaggttgcagtgagctgagaagatcacgctactgcactccagcctggacgagcgaaactccgtcaaaaaaaaaaaaaaaaaaaaaagacctgtccaggctcaagtgctccttcctcctcagtcgctgagactacagggcgtgccgctacacctggctaattttgtgtcttttttgtagagatgggggttttgtcatgttgtccaggctgtccttgaactcctggggtgaagcaatttgcctcctcagcctcccaaagtgctggggttacaggtgtgagccaatgagcctgcctactgttattttaatggcataaacatcacctccagagcttagaaaggagagaaagaaacttaggcaattgatgtggagctctttattaaagaaaccagctgttagtttacccttcagcaccttgaatgaagtgtgaatttctgttagtaaaatgaaatacctcttttcaaccagaagatggggctggactcccttggaaagaaactgcagaggctcttttcgggaaccggtttcctgtgctcgctttgcctgtagtttctgtcactagtacccagctgtggtcactagtacatcagaaatcacacagcagctccaaaaat

SEQ ID NO: 2969 - DNA, 1031 bp, Homo sapiens
gcatgcgggggtggggggcacaccggaccgcagtcggtgctctgcaggtggcggggggctgcgccgggaggggtagggggagccagctggtctcctgacctcagcctgggaggcaaggaacagaggggagcagttttttctttggagggacaccaatgaaacatgtgcctttgaagcctgggtctcctttggatctgtggcagcagacagctccatttggcaaaggttaagatgagacattaacaatcttccacccccttcttttagagccctggcaagaccagtgaattgaatgaaggaattatacctagaggtacatacctgagcctgggttgctgctatgagataaaacaccattaatgccttctctttttccttttcaaacagttggaatttggagctggagacctacaggggcctttgttcggtctcaagctgttccgtaatctcacaccaagatggtaaatatgagagacagcagctcctctttggtggtctttgttggcttaggagactagaactgtgtgttctttttatcacagtggttggcactatcttgtctgtcctacaaggtcactgcgtacatcaagggcaggtatagcactggcgtgaagcccaggcagtgtgcaggtgggaagaggcaggattgagggggccggacccttgtcccagccctggccaggctgcaccatccaggtctcgcacctcccttacctatgccacaaggccacggagaaagagtgccttcagggagagttggtcagtggaccgaaacacttacagacttatggatcgttccattgtcccagagaatgacagactgcctcatcatcgggttgattgacatatgccagagatgtagtccccagccagcctctgcttcctgtcgtctctgctgctgccatgtcacactcctagaactgtatatccctgtcccttctagaacgacagcagtgtcttcatttcctatatggtgggtgcagtgatgtctgtgtgagctcagataaaagaattggtggagggtaaataat

SEQ ID NO: 2970 - DNA, 1074 bp, Homo sapiens
ccatttgagataaagtgattctgtgggaagcgtcatgagtgccatgctgggttcaccagttataaaacaggtgaatttcacattgcctcgtatcacctcttttggtggaattttcagttagtaaagagttccttttgagattgcagttgacagaaatttcttatgttaccctcatggccagataaatataaacatgaaaatcattccacctgggtggtggtgaatgtgttaacgtgattgtgaccatcactacacagtgtctgcgtggatcaaatcagcacactgtacacctggcacgtgtgcagtctctatttgtcagttaaatgttttacatgtttttaagaagatttgaaaccaaaaaataaagaatttagaatggtacattcctggctgaataaacaactgattctactcaacgagtacaaatacatcatttcctacctggtaagaagtttctcattgtgggagaaaggctgtaactcaggctcagaatttctgagtgatgtcagtgaagacgtgtttatcacattcacagttgacccaaggcagaaggttctaaaagagcccagtgaacaagaatgaagggattaaactgcaaaataacatttaacagggagaaatgtgctagctacgaaaggggggaatcagggaaaatggtcatctttcgttgacttggtttaatattagcaattttgtgggttggaggtgggtaaaaatggttgatttattcgcaaagtaatttaatttgggtgcctgtaatgtgccagacactttaggaatgtgaacattccgcagagaataaaacagacaacctaatcctgccatgaagctgaataatctagttgagggacagagaagctgcagtaaatgcaatatataaattatatattaagactgggcgtggtggctcatgcctgtaatcccagcacttgggcaggccgaggcaggcagatcatctaggtcaggagttcaagaccagcctggccaacatggcaaaaccgcgtctctactaaaaatacaaaaattagccgggcttggtgacgtgctcctgtagtcacagctatttgggaggct

SEQ ID NO: 2971 - DNA, 1053 bp, Homo sapiens
cttctcatctgcatgtcctcctggctccagtgggcagttggtatttggcctctggcttgatgggaatagcagtgcttcctgtcacattggttcattgcagctaggtattaagccaaataacttagcattttctcatccaaaaaggaaagtagaattctgttgtatttattcaatttccccgtcactctttatacactccttaaagcttctttgtttttttaagatgtgggttggctacaatttttcaagtcagcaattggagtcactgaaaagctgtaggaccccattacatattccctcttcaaagactaggtttttagtccccagcagcattatcccaatcagtggagcactggggtctgctggtagaatattgtatggcttcctctcatcagaccagattatcttcccattagaaacaaagcaaatccacacgcaaaatggtggttatacaaatatatagggctgggtgcagtggctcacacctgtaattccagcagtttcaaaggctgacacaggagaatcacttgagctcaggagttcgagaccagctggagcaacacagtgagatcgcatctctacaagcgataaaaaatgaaaaaattaaccaggcatggtggtgagtgcctgtaatcctacttcttgggaggctgaggtgggaggatcgcttgagcctaaggaggtcgaggtttcagtgagccatgatcacaccactgcactccagcctgagtgacagtgagactgtgtctcaaaaaataaaaaatgaaataaataaatgaaaataaaaataagtgcacagtcgtgggtggcaagtggttaaacattattttcgtatttttttagtaaactaaggaagtcaggttctcatagatcagaattggcttttttttttttttcatgtggatactaagcttttgctgcaagataaaaatgctttcaaagaaaactaaatgaagacacctccccagatatttactcggatatgtattagtgcttaacatccaataggaaaattgagcccattattcataatacacagaaagtctcattgaa

SEQ ID NO: 2972 - DNA, 1071 bp, Homo sapiens
tagctatttgggaggctgaggcgagaggattgcttgaacccaggaggttgaggctgcagtaagccatgatcacaccactgcattccagcctgggcaacagagcaagaccctgtctcaaaaagggggagaaaaaaagcagatacagggagttgatatatcagccctaaccctgctgagggtctcaggatgaacccagggggtggatcctgttgcagaggaggaagaagggaatttcagtctgttggatgcctgttatctgcctgctgttgtgccaggcactcacgctgctgctaagtctcctgcaagcaggatattccatagagggtaagacgaaagcttcaaaaagtcagataacttgctcaaagccacacagctggaaagcagtggatctgggtttcacttcagagcctgtgttcattctgccctattccaagcacctaaaaactcttaccattaagtagatatcatttgtttaacagaacagtctggaaatttctacaaaggatttttttgttttttgagacaggatctcactctgttgcccaggctggagagtaatgccatgatcttggctcgatgcagccttgatctctacaaaggaattttaccacagtgattaaagttcgagatgcacaacagaaagtccacatcaactgatttcattacacctgttacatttcaatacactccagggaaatggtagtcattaatattatataccaaatatctctggttgctatccctgggggtgctttgcactggcctgtaccctttgaagttagatgtgaccatgtgactttcttgagccaatgaaacatgaataaatctgatgtgtattattacagatagaagctttaagagccagtgacctgcccaacacattctttcccccggccctggcaattgtgcaagcttgtttataggaaaaggtagcctctgccagccggggcccctgtgtgaccatgatgagtagggccctccctagcaattgtagttggacttgtagcatgaatgagaaatccagtcctgagattgaattggttgttactgcagtataatctaacctctcct

SEQ ID NO: 2973 - DNA, 1029 bp, Homo sapiens
atggaaaagtattctaggtgccagtgttaggatgtcagttttacaaaataatgaagcaattagctatgtgattgagagttattgtttggggatgtgtgttgtggttttgctttttttttttagactgtattaataaacatacaacacaagctggccttgtgttgctggttcctattcagtatttcctggggattgtttgctttttaagtaaaacacttctgacccatagctcagtatgtctgaattccagaggtcacatcagcatctttctgctttgaaaactctcacagctgtggctgcttcacttagatgcagtgagacacatagttggtgttccgattttcacatccttccatgtatttatcttgaagagataagcacagaagagaaggtgctcactaacagaggtacattactgcaatgttctcttaacagttaaacaagctgtttacagtttaaactgctgaatattatttgagctatttaaagcttattatattttagtatgaactaaatgaaggttaaaacatgcttaagaaaaatgcactgatttctgcattatgtgtacagtattggacaaaggattttattcattttgttgcattattttgaatattgtcttttcattttaataaagttataatacttatttatgataccattagtaatgtttcttgcctaaagtcttataaagtgtatgaagcaatttgacagcattatttttaagcacaagcgaagattctttgaagtttaatgtattcttgaaactcttattctttagaatgaaacataatttgtgcaatctttttcacatattatgaaagtatacagtggaaatgagctgtttgtttttacctttaacaactgaaagagaactggattctggggttactatcagaaacaacgttgggggtgggagtccacatcaaggagaacgtgacagaagaaaccagttctgatgtgtagacttggtttgactcattctgatttttaggacgaggtcccggttactctgggccctttggcagg

SEQ ID NO: 2974 - DNA, 1032 bp, Homo sapiens
gctgctttacttgacagcttcatctctttgggtcacttcctgtcctgtcagattaaatccacaagtgtttgatttcatttggtttggttgggagaatggacggttatgaggaataaacagaaagggtgtagggtgctttaaagatggccccaggcgactttctgccgctcagaaagtgtggttcatttccagcacacgttgttcaggacagtcccttgggatgagtgctttaggtttgagaaccgccctctggcgtgagcccactgatttccccacctcttccctgagctccacaccgaccttcatgcagccagggacaggcagggcggcctgttgtttgccaaggtctgggatttgctgagaggctgatagggtgtgccttcaggcttctgcctgtgggttgggctcaggtgggtccacatggggactgggaatctggtgtcaccagtcttcggtttgggtgggcagatgtcgacactacgcagtggtcggaagaagcagccagccagccctgatggtcgcacctcacccatcaatgaagacatccgctccagcggccggaactcccccagcgctgccagtacctccagcaatgacagtaaagcagagacagtgaagaagtcggccaaggtcaggtgctggggggatagtagggcctactctgtccctccctcacattaaaactggtttgctggtattcgtgatcagctccctcagacacgaggatgcagctcattcatggagcctgtctggacaccagcattgtcctggcctaggggctgcagaccgaaggctgggggcctagagaagggggctcgagcaccaactcttgggggccacctctgcctcaagcttcccaagttctcagaaagtgtggggagtggttagaacggctccctccagagccaagtacagtcctcccttggtatccattagagattggctccagagcctccaccgcccaggataccaaaatccacaggtgctcaaatctcatatacatcgacacatggtttgcatgtgaccagtcac

SEQ ID NO: 2975 - DNA, 1071 bp, Homo sapiens
ctgcctgctttcatgcagcatggtgttgctgcatgtgtcggtggtctgtgccttttaattgccaagttgtagtccagtgaatgtggggataccattatttgtttatccattctcctgcttgtgggcatttaggttgtttccagtttggactgttaagaatagtttctggctgggcacggtggctcacacctgtaatcccagcactttgggaggccgaggcaggcaaataacgaggtcaggagatcgagaccatcctggcaaacacagtgaaaccccgtctctactaaaaatacaaaaaaaattagccgggctggtggcgggctcctgtagtcccagctactcgggaggccgaggcaggagaatggcgtgaacccgggaggcggagcttgcagtgagccgagatcgtgccactgcactccagcctgggagacagagcaagactccgtctcaaaaaaatatatatatatagaatagtttctatgaatgtatccgtgaaagtctgtgtgtgagaattttttttttcttttgggtaaataagagaagaattgctgggttgtttggtagatatcgtggtttgagcattctgtatttccaccagcagtggatgacagttctggtcaccctgtcaccttcctgaattgtaagtttaccgttcttaccacctgtgacttcactgctgtggaggacagtccttcctgcctggtcattttcttttcttctttttttttttttttttttttttttttttagtaaaaggcgaaagatttattcgatttgaagagaaaccagttgcctggtcattttcatccttggcactcagatggtgaaatctgttctggactacttcttctttaagtgtcaacaaaaagttgatgttgatttcaatgttagatttctttcttttgggtcttgatttttttcacttgttggcagagatcagtgaagccaggagcaaaggtttgaaagttaagccttttttctgtctggcatggggcagtttcttacctcactgaactctggcttcttgtttttaagtgttcttttattttttttaaagagatggcctctcgc

SEQ ID NO: 2976 - DNA, 1063 bp, Homo sapiens
gaggaagcattttcagtggctgctgagcgaggaagcattttcagtggctgctgagtgaggaagcattttcagtggcttcctaagccaccattccatgatactcaccttcagagcagccacttccaaacatcggcatgtggattgcgttttcactggcccataagaaataaatgtagccatttttcctaacagtaaatgtaatcaaagaactttttctgtttacttttttggagataaaatgtcatttcttttacaaaataatgatgagatcaggaggcagttacttctaatgaccttacatggcaaaataagaaagtggcaattcggtatccatttctcaaaagttttatccttttaatttcaggtgaattttaattctccagaaataatcatttcatcagatgtttactgaatacttattcaagatgttgtcttagacctgtggggtactcacagatgagatagcacgtactttggcaagttgggtgggcccatgtatggttacagcacagggaagcctgtctgtgccagcacagaggcgggaatgaaaagatgtaggagtgaaacctgtatgatgccatccagtggtgggggagtgaagtgaagggaaggcttcatggagaagaaggcagcaaatgtgatgaattgagtcctgagtgatgaggaggactacagggcctggacagaggaggaggtgggggtggtatggggctcaggggctcacccagcaggcaggagagtgctgaggaacagaaaactggccattgtgtttgacataagccaaaggccgtgaggcgggggaatatggtagaaaggaatatggtagaaaagtcttccggtaacacagagaaagtctcagaagaagtagtcaagcagctgggcctttgttccttaggccctgaggaacctttgaccgtttggagaagaagtggcaaggtactagcggggctttgggaagactcacctggtctgtgtgcagcatgggagggccggcccagggaagagctgtggcaggacctcaggtccagacgtctgagtggaggtgtggggccagggtgggatt

SEQ ID NO: 2977 - DNA, 1050 bp, Homo sapiens
aaatagaacctccctcagagtcgtagtgaaagtcgaataaggcagcagtgattgagctcttattatgcactaggcactgttctaagcacttgaacttacttaaccttcatagcatctccatgaggcaagtggtggtgttgccatcacaatacgtgtgaagagaaaggaggcagagagattatgatgacttgcccaaagaacacagagttcacactgaattggaactggaacttgggcagtgtggttgcagagcacccagtcttagctgctgtgctgtttctgactcagtatctgtcacatagtaaacattccattagaatcagctcctgtttctcctcccagggaagacacacagtacattttgcctgagataactgtctcaccagatgtgtatacagtcacgtggtagactggaaagcacatttgtgagtgttagttctcatggtcctttgagttttcccttacctttaaaatgcaaagatgctgttgaaagtgaataaactgatactgtggagaaagcatgatatatcacaaagaatgccattgtggaaaaagttcactttgactgcttaatgagggggaggggtctcctttgggggatgatgaaagcgttttggaattagatctgagggctgcacgcattgtagatgtattaactgcctctgaattgtaaactttaaaatgattaattttatgttatgtgaattttacctcaataacaatttttttaagttaattcgagttgggttttacctttggaagtataattacaaagcgggcaatacttcatgctgttaaaattaaacttgatttattagacggctgactgcttccgttgttatccacagctgaaaaggagatgaagatcctgcttgtagctgagcagtctttagaagtctgctgcattcttcccaaattccatcactctagtcaagagtaagaggatttgataataggggactggtttcctctcggctctgtgataactggggactggttccaggagggcaggtactttgtatgtgagttttcatgtacttcacattatgt

SEQ ID NO: 2978 - DNA, 1050 bp, Homo sapiens
acatcgtgagaccctgtctctacaaaaaaataaaaataaaaaaattagccaggtgtagtgccacacacctgtagtcatttgaacccaggaggttgaggccgtagtgatccgggatcacaccactgcgctccagcctgggaaacagagtgagaccctgtctcgatttaaaaaaatattaatctggtggattgactcactcagaatcctactgctgcagttaaaaatcatagtacatttaagtttggctttgtagttgttagggggaaagggaaggggtctgtttttagtaatttttttcccccttgaaaacacagaaaaatttacagtagaaaattaaaatcaggccggctgcggtggctcacacctgtaatcccagcactttgggaggctgaggcgggtagatcatgaggtcaggagatcaagaccatcctggccaacatggtgaaactctctctactaaaaatacaaaaattagctgggcgtggtggcgtgtgcatgtagtcccagctactcaggaaaatgaggcaggagaatcgcttgaaccaggaagttggaggttgcagtgagccgagatcgcaccactgcactccagcctggcaacagagtgagactccgtctcgaaaataaaaagaaaaatcagtaattccatcactaagagatggccactaattaacgttttggcccatattcttccgactgtttctaggcatatatcaataaatattttaaacagaaatggcctcattcagttctataacctaatttttaattttatttttattttatgactatttaaaacttatctgtattgatcttttgcttaacgcatgtatctatggagtcatttttgatggttgcatttttaaaagatatcatgttattaaccaacttctagttttgatcatttattttcagtttctggggtatttttcgggggtggttactgctgcaaaaaaatttcttaatgagtgactttgtcttatctgggggcagttatttccttaagattcattcctagaaatatttatttcaagtagtgtgtgcattttt

SEQ ID NO: 2979 - DNA, 1028 bp, Homo sapiens
gctgtcttttgcattgcactggaggagtttggtagtagggtaaatctgtaagtattataatgagctgggagaggcactcatcttgtgttttcttattttctctagttatcaacatagccaagctaatcattcacagcccacagggaggggagggcagaggtcattttttactttttgctgcagaagatgagatttgcatgtaccagtgttgttgattcagaacttgctgggtagaattcttatagtcatgccccttttgatagcaaatccctctaatatagatacttttcacattctctctctctttctctctctctcttttttaatgagacaagatctaactctgttgccctggctggtctcaaactcctgggctcaagtgatcctcccctgaatagctgggattacaggtgcacgctaccatgcctggcttacattttcttctgtctaccagaattattaactcatttctttgttattcgcaagtgacttggaacttgagaagggtgtcagcatccaaaagaacatgcctgattgggcattggtgcaagggtcagcagacctgtgttctattcttggccttactggtaactatagtacttgatgatctctttttaattgtgcagtctgccttgagctgttcattggaaagctcaggtcaaatcttgacaacactgggaagttattttctgtaaaatggtgtttctctgcatgagaattgtgtaggtgctgtggtcgttataaaatgcctgtacgtcgttacttgctgcagtgcctgagaacgaagtgatgattcttgccttctctgctacttacttgctctggaaccttaggcagattattcatcccctctgtcctttaatttctgcgtttgtaaaatggggtgataattcctacccttttgattattttgagaatttaaatgagataatgtttgtaaagagtgcatagaaatacttggaaatgattgttcttcctgtctaccttaaatactacataaggtggtagctaaatgctttgaaaagtac

SEQ ID NO: 2980 - DNA, 1025 bp, Homo sapiens
ctggtggaagagggggacagattgcttcttagcctcagacgcaggacgtccttctcttaaacgcgctgccctgcgtggtgggtgggattggggttctgatgaaggtagctggggcctgccctggccagtgggtcccagctgagctgctgacatactctccgagcctcggcagtattccctagccgagactttttttgtggttgttattctgctgattgtagatatctttgctttgctgacatcctgttttgtttttggtttttacatcccatttgtttctttttatcacagaaacgcttcgttaagggactcaggcagtacgggaagaacttcttcagaattagaaaggagctgcttcccaataaggaaacagtgagtacaattggactttatgtaacttgattttttcctctttgctcctgctgcctctccacatttgatcttatgaaatggtttcctttaaccctgcgctgtgctcagactcgggctggcctccagaattctctccgttttactcccttgacttttaatttgagttcataatttttagatagtaaagtgacagattatgcttatccgcctggagaacatagacttctgttgtaactctgagaacagaaaggtctttgggaacagagggttagttgtgggggaaggattgttggagagttaacatcaaattttaaacatagtggctggaataggaaatagcattttatcactagtttgaatttggtaattggcagaaatcatcaaccaaaccagaggtttgtggcttattatactttgagttctgggggattttttccatttttcaatgttgctctgttttgaagaggagttttaactctttaatattctatccctgagagtttgcactttccactggacagatgtacaaggggatcttataaattgcttaaatggagctttacaaaaaactacttagtatttcacaaagctgggggtcagagctgacaaatgtgcccgataaacgtgaggtagaaggatttgctgaggaaaat

SEQ ID NO: 2981 - DNA, 1740 bp, Homo sapiens
caatttggtggaagatctatagaccttttaatggcagaagtgcttattaattctagtcataaacaggaattgttgtttttcagagaagggagagagagcagagcggactctgtgtagggatagagttgaaactggaacatgcttcgcacagtgcctcgtgctgtgctccttgttcactcagtgcctcgtgctgtgctccttgttcactcagtgcctcgtgctgtgctctttgcacagtgtgttcactagaatgagggctcaatgaatgttagttgagttgatgtgtttgaataagcagaagtgaagaggggacattctagattgggtaagagagaaaggcattggtaaaaacccagggaaaggaatcaggatggggtactgcagtaactaacttcactacatggtggtgtaggtgattgggaacccaattgtggaggctgttaactaactagcagaccgatagtttggacgtactaggaattgtcacaggtcttcaaataagagaacacattaatatacagaatgcccagaactggaatgttggggggaggggtgtggagacacactgaggccagggaggagaccagtgcagtcactggcatgacgtggccctgtagttggcagagcccttgcaaaaaccgaggagcatgccgaacaggaaactccatgaagtgaagaatgaatctagagggcatggtgactgatggaaggagtgggaatggacagagagcacgccaggcacttcttctagaactctgctgcagctgacagaaatagggccacagggagctaagagagggcaagctggcttggggagagagaagcgggggagatttgaggtgctaggcccatgaggttaattttaaactttataaagtgaaaaaagttacagtaagctaaggttaatttattattgaagaaaggaaacattttaaatgtttaggttaattaagtaaacagtgtttataagactacagtggtatacagcagaggtccccaacctttttggaaccagggaccagctttgtggaagacagcttttccatgggctgaggggaaggatggtttcaggatgattcaagcgcattacatttattgtgcactttatttctattattattacattgtaatatgtaatgaattaattatacaactccctataatgtagaatcagtaggagccctgagcttgttttcctgcaactggacagtcccacctgagggtgatggaaaacagtgacagatcatcagacattagattctcaaaagaagcacgcaacccagatccctcacatgcgcagttcacaataggattcgtggtcctatgaaaatctaatgccgctgctgatgtgacaggaggtagagctcaggcggtaatgcaagccagggggagcatctgtaaatacagatgaagctttgctcacttgcctgccgctcacttcctgctttgtggcccagttcctaacaggctggtagtggtttgtaccctggggactggagacccccgtcttaaggtatatgcaggaagaagttttacttgtgccagtagtaacgtaagggtaataagcctgcacctcagttggtatttggaagacaaaggaatgcctggaggggcctacccagtgtggctctgggtcaccctatggcatctacggactttaatggcatgagttaatacacagaagtacttagcagctcacacgcactctgttaccattggcatggcttttgttgttagaac

SEQ ID NO: 2982 - DNA, 1030 bp, Homo sapiens
ggcagcaacctttgctgttctgcagcctctgctggtgatacccaggcaaacaggttctgaagtggacctccagaaaactccagcagacctgcagcagaggggcctgactgttagaaggaaaactaataaacagaaaggaataccatcaacatcaacacaaaggatgtccacacagaaaccccatctgaaggtcaccaacatcaaagaccaaaggtagacacatccacgaagatgaggaaaaaacaaggcaaaaagtctgaaaattccaaaaaccagaacgcctcttctccttcaaaggagtacagctccttgccagcaagggaacaaaactggatggagaatgagtttgacaaattgacagaagtaggcttcagaaagtgggtaataacaaactcctccgagctaaaggagcatgttctaacccaatgcgaggaagctaagaaccttgaaaaaaggttagaggaactgctaactagaataaccagtttagagaagaacataaatgatctgatggagctgaaaaaaaaaacagcaggagaactttgtgaagcatacacaagtatcaatagccgaattgatcaagcagaagaaagggtatcagagattgaagatcagcttaatgaagtaaagcgtgaagacaagattagagaaaaaagaacgaaaagaaatgaacaggcccggcacagtggctcacgcctataatcccagcactttgggaggccgaggcgggcggatcacgaggtcaggagattgagaccatcctgcctaacatggtgaaaccccgtctctactaaaaatacaaaaaaaaaaaattagcccggtgtggcagtgggcgcctgtagtcccagctactcgggaggctgaggcaggagaatggcgtgaacccggaggcggagcttgcagtgagccgagatggcgccacagcactccagcctgggtgacagagcgagactctaaaaaaaagaaaagaaaagaaatgaacaaagcctccaagaaatatgggactatgaaaagaccaaacctacgtttg

SEQ ID NO: 2983 - DNA, 1027 bp, Homo sapiens
tgcctgagtgtgttccaggaagagcaaagatgccccggagtggatggagaagatgaagtcggaaggccaccaggatcttagaccagagatgttcactcctattttgtacctcacagttaaattacattatcaaattaatgaggaattcttgagggctgttctgttttctcctaacattgtatctctcataacagtgtttttacggcttcagttatgtaggactctgagtcatgcattcctctgacttctgcagctgctcattgtgtcaagattgaagcgtttttgttttgtaactggtttagacaatatttactacataagtttactataaattcagcatttgtgagaggagctgtttttcctgagtaggagcaagaaaatacctggaaagaaaagtgtacctgctctacctctatcttggagcagtcattactcttgttatcagcctgtcctgacaaattttaattcaggaagtgaacactgtggaaaacttaaaactgtagatgtcatgctctgaattataacacctaatgaaaagagtcatctcaaaaatcttcctttcttgagtcaaataccctggctttgagactcagctcaggggagagtccctctaatactgctgtttgacagaagaggccagcttcccttgtcggccggcatttgcttgctctaggcctgtggtgattattcttaatgtctggaggatggatgctacgtgcactgactaactagaatgctgggccaagcttaatgttccctagtagtgttctgatattcttctttccccaacactcgttcttctgagaggttagggtgctcacgaggcactttagaatgaggagtggcccatgactgatgaaggccgggacgtcactgcattttgcaggccctgctgcaccaggttggtttgacaagttcatttaggtgcctccacacaaaactaggaagtcttgagggcagggttgtagtttaattctttttgtattcacagaacctggcccagcacctggagcaggattgataataa

SEQ ID NO: 2984 - DNA, 1041 bp, Homo sapiens
aggctgaggcaggagaatcacttgaacccgggaggcggaggttacagtcagccgaaaccgtgccattgcattctagcctgggcaacaagagtgaaactctgtctcaaaaaaataataataataaaaaataaaaagtctgatggaattttaattgggattctattgaatttatggatcagtttgggaaatactgacatcctaacaatattggatcttctaatccataaatacgatatttctctatttttaaagaagttgtctttgattttttttttttttttgattaaaaaaaatttaaagaggtcttgctatgttgttcagtctgggcttgaagtccttggctcacgtgatctcctgcttcagcctcctgagtagctgggactacaagtgcatgccaccatgccccgctttcttttacttcttacaataagattttttgggaatacagatcttacaacattttgttaaatttactcctaagtatttcctgtttgaggattctgttgtaactaaaattttaatttctaaatggtcttcgatagcatagaaacacaatcagtttttatatgttggctttttttggtcctgctaaacatgtcgtgtgcaaatatagttttacctcttcctttatgatctatgtgttttatttcttttttgtgctttattgcacttccttgaacctctgctataatactgaatagaagtgatgagagtggacattatctttctaatcttagaaagttttcagtcatttactattaagtacaatgcagtttttgttgtatttgtttgttttgagaaagggtctattgcccaggctggagtgcagtgtagcaatcttgaatcactgcagccttgacctcccagactcaagtaatcctcctgtctgagcctcccaagtagctaagactacagggtacaccatcatgcccagctaattgtaaaattttttgtagtgacggggtctcactatgttgcccagcctggtctcgaactcctgggcccaagtgatcctcctcagcttccccaaatgctgagatt

SEQ ID NO: 2985 - DNA, 1035 bp, Homo sapiens
tgagtctttggagtttgcgcatgcctggggatacgggaagaccttcccagttattggtaattttaagagagtgaatttctaggccacagttttcatttgtattgtctccttacttaagaggggctctcttgtctcttcttcatccttttcatatagccacctcctcttggtagccagaagacccttcggatgatgccccaggtgtaaaactctctggggcccgccccactcggaaggattactgaaatgagtcatttccgggacgccttttttactgttgaatgaaaggatgctaacacatggggcttccctgtctttagtcatatttctgttaacagtgaagcattgctttagatacagagtatacaagactttaggaggctctggaactggttatttcagcaaggtggatgtgatggcaattttctcttaacggtccctcctcatctattctgtaaacaatgtcaaataatgtcctacttttgacagagatcatggtgagaagagtgctctgataaaaaacactgaatacttaaaatcatacccatacttctgcacacatatacacacatttttaaaggtaaacactgttcatcacgagttgatttgtaaaatacttcaaatgggtgccacccagtcagagccaatcctggtggccttacctggttatggaaaccctttcttcagctctgctcaatactcagtgtttgagggctggctaactggcaagattatgaatcattaccatatggctacagctatatggtaatgattctcattgttttactttcctctagtagttttttaatatacagtacaatgtagattttaagtgtacattttcagaaatgtgtttgaccctaaacaagacctggcatattcccctcatctcaggaagttccctcaagatccttccctctaaaaacttcccacccaaaatcaccaactgttcaggtttctctcactataaattattttttcctcttctaaagctcatataagtggaatcatgcagtgtatactgtttttgtgtct

SEQ ID NO: 2986 - DNA, 1025 bp, Homo sapiens
cgtgaggtgggtctgtccctctctagttccagatgaggaaactgaggttgagagatgctaaggacgttgctggggccatgcattgtctaagtggcagtgctggcgctggcatcaaactttgcctggccctgatcctgctccacttttctcacagtcaacaaaccaatgaaaaacagcttggaagaatgatgttctttttttatctttctgttttttttttttccttctttgaaactataaaaaaacctctgttaaagcgtgtaaattatagttccttgttaaaaatattcttatcaatggaaactgtgtaagttcactccattttgtaatatttagcaagaaaaataagacaggatcactaagtattttggtagttgaaggaggtgctaggataagatagttgtttttcttctttttccatttgtgcttaatccattttggcaaaatatagggtcttactaaggggtataaaacatagccaagaagatactttgttgacaaaaactgtacattctgttattgttattcttgcaatttatgattcctcttctctattttgcatacttaacgatgctaaccaggcccggttatttagtgggtggtaaacgtgaaagaaaagttttacaaattttttttacttgttttgggaaactcagttttaatgtcgtcttaattaattttttgacagactctggaagagaacttgtcattacagacccagttatcaagaaccgagagctcttcatttctgattacgttgacacttaccatgctgctgcccttaggtaagtactggagacgtgctcttccatgtgaaggaggagtcactgagtgcaggaggtggagagtaatttctcctgatcttttagtagtcactgtattaatcagactcctcttttggcctcagtgaacatgccagtgtccgctctggattgttgagattgcagaggttctccgtgtcttcactaatctagctttacttctctctctcttttttttttttgataatttactttttaatgctg

SEQ ID NO: 2987 - DNA, 1047 bp, Homo sapiens
atgagaggggatttattaagggaataataaatctcactccatcatagaagctaagtcccatgatagccatgtcttagtctttttttctgaatacctgagactgggtaatttataaagaaaataaatttattatagttctggaggctgtgaagtcccaggtcaaggggctgcatctggttggcctctggggagggctttgtgctgtgccataatgtggtagaaggcatccaggacagtagggctcacaagagagagccaacctggtttttataagagactcactcttgtgataagtcgttaacccatgaatgcatcaatgaattaatgagttatcaggctccttgtgatctaatcacctcttaaaggcctcacttgttaatactgttacattggggattaagtttcagaatgagtttctgagggtgacaaacatttagaccatcgcaggccatctgcaagctggagatgcggggaagctgatagtatggctcagttcaagttcaaaagcctcagaaccaaaggaacctatagtacaactctgtctgaggctgaaggccagagagcctggggggccgctggtgtgagtcctcagtccaaaggctggaggacctagagttctgatgtccaaaggtaggagaagaaaggtgtcttagctcttggagagagagcaaagtctccttttccctgcttttttttgttctgttctggaccccagccgattagatgctgtcccacctacattgagggcagatcttcccacacaggctaccatctgacacaccagtctcctctaggaacacctgtacagacacacccagaaataatgctttaccaactatctagatgtcccttaatccagttcagacacctgatattaaccccacagtcaggttgaagtacattgtgggatacttttggggagctacagaagtgctctttagtttgctatgtctgtccctatctgctaagtccccttgacgtacagtttatctctgtgtgtgtgtgatattaaggacaacagaggtcatctagttacccagccttgta

SEQ ID NO: 2988 - DNA, 1035 bp, Homo sapiens
caacatggtgaaaccccatctctataaaaagtacaaaaattagctgggcgtggtggcatttgcttggagtcccagctactcaggaggctgaggtaggaggagagcttgagcccaggaggtcaaggctgcagtgacctgtgattgggccactgcactgcagcctgggtgagagtgagactgtctccagaaataaaaggcaacacatcacagttaatggctttatctaaaaccatgcttagacataaacttttttagcctttaatatatatttaaattacttagtaagacactgtgaacaacattttaccaataccaaaatttgaacacttagctgtgataccaaacattcagagtaatcgaaataatttgaatagaaaagttttatgtgtgaaaacatatataggaatacttattacaaccaaggttgtaatggtggaaaactggaaatgacccaaatgtctactatcaggaaaatgtatgaacacattgtgatgtgctgtatatgaaggtaatacatgtcacttaaaataagtgaactagggcgtggatggatcatgtaagtgtaatgctgaaagaacaaagcatattatagaagaactcaaagagtctagtgtcatttatgtacagtataaaaacatgcaaaataataccttatgtatttttagttatatatatatattaagtaaaagcatgaagtactggatgggaatgatcagtgaattcaaggtggtggttacctctgggctgtaggcaggttccacaggcagcttctttaggttcgataatgtttttgttgctttaggtatgtttggtacagatggttctgttatttttatacctttctgcctgtcaaatatttcataataaaactttaaaaagaaaaataagaaagataaagcaagaaagtagagccacctttgggagttttcatgaacacgctcaggatagcaagcaagcaagacatttaggtttcctcctaggtcctgtaggtagagaaactggtgtatggaatcattagggttatttaaacctgtc

SEQ ID NO: 2989 - DNA, 1023 bp, Homo sapiens
tcttgctctctctctcccaggctggatcccagacgcgatctcagttcactgcaacctccacctcccagggtcaagcagttctcctgtctcagcctcccatgtagctgggattacaggcatgcgccaccacgcccaactaatttttgtatttttagtagagacggggttttaccatgttggccaggccggtctcgaactcctgacctccggtgagccacctgccttggcctcccagagtgttgggattacaggcgtgagccactgtgccccgccttaggcagtagtttgcatggcatgcagatttcagatggggtagttgtagcaaaagttaagaaccattgttctagagcctgatttgagttatagttaccagataatgatttctttattaatgcagaggcagtagtctctataaattccctaggcctggttccactatcttttcttctgtgtggtcagattgaattttcttgggcgttgtttcattttatgttccaataattatttactgccatttagaactctaacagtttttcttgttagcctatctgacataacattgatggtagagctagaaaatgatttcctacaattccctctatagctaatttttaccctccaattatagaatacggtaatattgttaataggttagtggtggctctattatgtgttaattaccaagagtcagctattaaagttttcttttgacagtaaaagcttttctgaacacagaggattaggaacgttttcttgattcttgttttaaagatcatcatgtgatggtagtaggcagagagctggaatgtgcatttctacgtagccatgaaatttaacttgtgctaatcgtggtggttctgcgtgagtaacagacatggacacagacagcggaacacagtggggcatagctttgtgcttgatggctgctttaactttggggctccaagcaaggatttcaagaaacatttctttggtcttaaaaactgggaaattaatagatcttctggacaggagggctcccta

SEQ ID NO: 2990 - DNA, 1031 bp, Homo sapiens
gtacatttttctggaaagaggatctttactttttgactatggatgctaatcagtagattgcttaggtgttgaaaataatttaaaagttaagattaaaaacagcgaaggttctgctgtttgtcatttaaaacctcaaatcagcccgggcatgatggctcacgcctgtaatccccagcagtttgggaggctggggcggttcggtcacttgagctcaggagttcaagactggcctggacaacatggtgaaatcccatctctgcgaaaaaatgaaaaattatctgggtgtggtggcatgtgtctgcagttgcagctactcaggaggctgaggtgggaggctcgattgaactcagtcaaaccggtgttaatagagttatttttgctgaagtaaggcacttaccattagtaagtatcacttctaacattagtgctttccatgcttgataccatagtaccatttaagaattaaaaaagaaaatttattataaaatgctcttttggaaatgctgattgtattacgtttgttacctacttgttgcttagaaagaactccaatctggttgcttttttagtggtgcagaagtttagagaggctatattgctttttcattatttactgtggcttccctgctttggcatactccccattaagtatgccaaaaataaccatcgataaagatcatgagagattgctttttatatttgattttagtgaaagatattaagatggctggattttcagaagaattgctaatacaaatgttgggattaatccagctaccctaaatgaaagatgattactagctgtcgacttataatgtaacaaattaagaaagttctgaaagcacccagctgacctataatgccaaggctgactgctactggcatcagagaacccggctgggcctgctttcagctctgttcctttcacctggagcagttgtccccataaaagctaattgtcagttaatttattcctttttttttttttttgggagacagggtcttgctcttttgcccaggctggagagcag

SEQ ID NO: 2991 - DNA, 1013 bp, Homo sapiens
aattgttgcaacagcataacacgtttacatatttgctgatgtaattactcaagggtcataccaaaaaaagggatgggggtttcacattatggaaaccttggaattctctgtcttacagtggaagacagaacccagtgtagtatagataaaagtctaattttaattcccagagaaagactgacatcttacgggacaaattagtagattcccaatgtgactacctacttctaaagcttcagcctttagcaattaccaatatgtcttatttaccgatatgtcttatttccacatatatctaaaaagtaggttttactttcaggctgatattttcttaatcaatgtggatgctattattaatacttttatttactgtaatactcaacaggaattgctgaatggattttaagtcttccccataataacattaatttttttgtaaactttttatattagaattaatgattagtatttattttttagcaataaaaatatttgtgtctactgatgatttaaataagttcatgactggtggagcacttgggtacattatatgtaggtgtaagagattctgtagtgaaaggataaatcttctttcagtcaagatgatgctacataaagctaactgtattgattgttctttaatgatgctttgtgctgccaaagtcatttgagctggatctgaatcagatccagttggcaaagcttccccatatgtggagttctcataaatcctgcaaggcacacagatctaatacagtgtaatgagagagctgctgggagaaaaaattgattacagggttgcagacaatatcattaacatttcttgccatgatacaccagatgtcttccctaatagactatttttgttaatttagtttttataggatagcattgattgcatcataatttaactttctttgcatattcaggtatatgtgatctgtgtttctacactaatgatggaataaacatcagatttaattttgtaagttttaacttatctgttcattttt

SEQ ID NO: 2992 - DNA, 1041 bp, Homo sapiens
ctgatccctgtctgttgtcctgccagactattaaacagcctcccctttcactctcaaaaatgtcttgagtgtggatgataggttgtgtggttatcttgcctatggggataagatccatggcttctgctttattaatattcaaccatcaaaacacatagggacaccaccgtcctacactggtaggtgtatttcgagcccacacttccacagggtaggtggaggctatgatagtatcaagcaattaagttcctaactgagctgaggttttaaaggtaggaattatgtattctattaggaagctttcattctcttaggaagtattcatttgattgggcttatttacaaatggagaggtctgattttgtttgaatgcgctgaccaaagtatttatggaagaagtagtcaaaagcaggagctcaggcaagcagaagaggcagggtagaattagggacagcacgtacttagaagcaggagaaagaagtattgttgattaaaaaggtcgcttcgcactgtagatttctgaactaaatagtaaaatagctggcaaagtctttatttagctttttgaaggactagtaatacggaatgacagtctgtgatccttgtggcctggcatgaaaagattaattgagccaaatttcatttttagaatttagagttgagaaactgagagactgaggcagttagtagaggggaaaggtgaatagataattcaagaattacccctaatatatctgtaaaaattaaaaataaaagaattacctgaatgacaagagcaaggttagggctggcataggcaagctcacttgctagggtaggaaactgggaaaagcagaggacaggcaagctgtgggaagagcagcagactgccaagggaagtgtgtgcacagccgtctcttccttgactctcctgggtcccactgcactgatgttcttcccacaggattcttagattatcctgttcgctctgagtaaagagctctcacctggctagcttgagtggctcttcatgaattgcaatggaaagagcctagattaata

SEQ ID NO: 2993 - DNA, 1036 bp, Homo sapiens
ctggctgattttggtcaggagcactgtctattacagaccaagagtattacttaaggatttagggcaggagagcttatcacaggcttggaatgtttctgtgtggaggagaagtttattgtggggttggaatgttttggggctgacatctctccagccagaggggacgttatctctgggctggcatgtctgtggtcagagaggggtttatcttaggattggaatgtttgtggttggagatgtcatttgtggtttatggtcatgatgtcattagccattaggctgatgccctttgggttggatttaggcagtttttgatcaaggggaacttgaaaatggtggtgcttgtccaagatggtgatgctcctgctctgtcagtagctaggctatgatggtgttaatgtcatgaaatgtggtatgtaggaagcaacagaaaggagagggcatgttgagttgagtaaggtgagtaaataattgataactagagatctgaaatgctggcagtgggtataacagggactgaaacacaggaaactaagaactttgggttgttccaaaattgtgtaatttggagctacagtttttatctagggaattgagtttcttctgtttttacttgaataccaaggtaggagtatgaaagaatgatctactgtggtgggaagaattctcttgcttgtcccttaagatgattagcatgttaagttgatgttgcctgaatgctgaagcacagttatttagcatctgggaccttggaacaagatagggaaagcttagtcaacagttcattcctgagctactgttttacgtggattcagggattaaatctctgttgagtccatctttgagtagagaaatcagttggggaattctgaatgcctaaatagttggcattgagatttcttctttttctagagtgccttttgggtaggtacaaagatcctgatgttctgcagaaagtttcttggaatgtactcatttgtgaggactttcttcctgatcatcttagttggtctgttggggtttgtgatgactccca

SEQ ID NO: 2994 - DNA, 1047 bp, Homo sapiens
tgagagtcactaatcactcattagtgcttcccagtctttttcaagctaacgcagatataaaatgagtccattgcatgaggtgagaggattagtacccagcatgcttgtcacttacctgtggcagactacaaattaggcagatcaaaaattagagaaaaaatatgtgatttcatggcttgagattttgacgttaaaatatgatgcatgcagttcaagaagaacagaggtggctgcagaattacattctggccaaattattgggaataatttgcatcttctaaagtgcctgattgcaaagggcactgtgaacttggctgtaaatagtaagggagctacaacatgggtgacaaccagttttaaagcaccttctatctactggatttgctttgagtgtgtaatttctagtccttagaaaattcctatacaacctagacattgtttccctgctgtacagatgaggaaacaaagacatggaggccaaagtcacacagctggtttgtaaaatggtatgggcctgtgagaactggttaaagccaagaatgaacggacatttgcataaaaccctgaagagaatacaaaaaacaaataacctgtgtggaagaaaaaagaagagatagactgatttcttcgaaaatgcaagtgatataattactttgctctttttctcttttctccttttactcctaaaattatttatagctctcctgttgccaaaaattgtatgtctagtcaggcacagtggtgagcatctgtagtcccagctcctcaggagactgagttggcaggatcacttgagcccagaagtttgaggctagcctgggcaacatagtccataaggaaactatgggaagtaagctgagaaggtgagtagtaaattgttcaagaatacataggctaatggtgattactggattttgaaccctaagtaactgaaagagaaatacacatttttctatgatctaataaaaagcaagcatgttgtatgcatgaaaagttttttgatgcaaggtggtgtacattgatcacataacacaaagggcaatgtgt

SEQ ID NO: 2995 - DNA, 1033 bp, Homo sapiens
cctggaattggagagcagaaacactggagactctgagggtcagtagaaggtacacagacaaaggggcggggaacagtattcccagcagttgggttctagggactgaaggagtgtcttgaggcagcaggaggagcatgcaggaggggtggaggtggaagcagtaggggagaggtgaggctggagaggtgaaggggcagccccataatctttgaaaaggaatagtgggcattgtatgctttaaatgaattgtatgctttaaatggtgattcatatggaacgtgaattatatctgaattgagctattatgaaaaaaagtggtgggacgtcagatatgctggctggctggctgcactggaggacagatgggaggaaggctaaggcaaacaatgttttgtagtcacaaagatctgttagaaagcagttgtattcatctgcatgagggatgatgatggcttgaagtaggtaagctaagattcagttggagcagtgggtccattacagaggtgttcaggatgtgtctggtagactaagtgctaagcaaaaatgcctagagtatggtcaggcatttgaaaaatataagtatgtcttactgtggttgagtgaggaagaattaactggaggacttcgctcactgtatttagtcaaaagtcaaacatcctaacaaatagcctggcttgagcaatggagatgagtagagcttgaggattgggaactcaggagggaggggcagatttccatggataagtgaattttacatgacccaagaggaaatatttttaatttttttcttcatttgtagttaattctccatgatttgtttcttaatcatggaactggatagattttacccccgcccaaatagttaagtttcttgaggataggggtgttttggctacctttatatcttccatagcttattatctaccatagtagatgtaaatcatgactgaaataaatacatattattgatattttacatttgtaaagcactttgcaatctataagtacaatttacatatagtatacttgtgta

SEQ ID NO: 2996 - DNA, 1052 bp, Homo sapiens
tttaaaagcctaggaaatttgtttcccgggacctcgatggttttacatgctttctgactcccattctccggctctccactcaggtggttgagccattggaaattttgacctgtatttagcattcgtagagggcacttggtaatttttatttttgcaagtattcctgcgagattgacccatattagtggtaagcagttgtctcagtcctttgtatgtttacctgtctctttctcccgggctatagtgtttttcaatttccgactcccagtctgagctgaatgtgaactgtgaaagggtgtgtagcttctaaattggtaaggtttattatactctgaaacggagttgaggaggtacaattcttttcctttaatcctagctgagtgctttcttttctctaaaggacccatttaaacatagatgttacttttcagtctctctttcctttttaccctgaagcccacagttctgattctcatgcttaagaactaagattttctcagactcctcctctgtcttccttcttttcctttctttcccccatccatatggcattacgtccttgttcttgaattgcttctttctgttgtcagagtccttctggaaacattttctatggaatcctctccattcaagctagaattccgggcgagaatttgctttatacaccacactacgtttgcttgctttctcagattcagaagtgctttggttagaaaggaatagttgcccacattttggcctcttctcatggcagatggctgacctttcccctcagagatcattggtacctggactcagagggcagaaggaagtactccagagaaatgcaacttatgcatatactcagatgtatttttttttcttttagtgaagtaataaccaaaaaatcagaatgataatcactgaacaggtttttctggctttctccattttccaccaggtgtataggaaaaggacattggtgtcacgtgactgcctttcttatgtgtacagaatctcttgcacccctacccgctaccaccttccccatacatcactaagaaaacagctat

SEQ ID NO: 2997 - DNA, 1056 bp, Homo sapiens
ggggttcccaaggctgctgttgaccgtattaaactgctttctttatgaggacatagagataaacttttcttagctcttagtaccaaaaaaaaccagaccttctgagcatgtggtttgttttctaacttacagatttagaatcctgtaactcatcaagtttcctttgagccatttgcttgtaaaattttggccggccgggcacggtggctcatgcctgtaatcccagcactttgggaggtggaggcgggcagatcacaaggtcaagagatcgagaccatcctggccaacatggtaaaaccccgtctgtactaaaaatacaaagattagctgggcgtggtggtgcgcgcctatagtcccagctactcaggaggctgaggcaggagaactgcttgaacctgggaggcagaggttgcaataagccgagattgcaccactgcattccagcctggtgacagagcgagacaccgtctcaaaaataaataaataaataaataaaaataaaaaataaactaaaattttggccacatctaacaaaaggtacaaaatgaacatgaatacatacttttatgtagcagctcattcatggtttcatcttttagattctcctcctcttctattttttcctttgttccaaggaaaagagaagcaaatattgtataattaaaagtaaaggctttgtagcctgtgtgacccgtgaaactaggtgtgtgacctaaggaaactatccacaaaggtaaatacttaatacttcttagctattattctccaccaaataccctcatctgttcttaaattttattttacattgtctaaatctcagtaagctaccttcagccccctttaaagccatcctttcaaactatctttctctctcgatacaaagatttaatttctgcctagagacaatcagtaaagaaattgtgtaggcgagtgccgtggactgaattgtattgcctcaaaattcctatgttcaagccttagctttccgttccccaagtgctatagtatttggaggtggagcctttggaaggcagttaggtttagatgagatcctga

SEQ ID NO: 2998 - DNA, 1247 bp, Homo sapiens
cagttcatttattcattcaacagatttgtgtacctgacataaatctacatgatgagcaaacatatagaaccttctctatagaactctatggaactgtttagaaggggctatgagtgttaaaaaaaatcacacccatgacttacaaacggagatcaatgctgtgaaggaggaacacagttctatgagaacttataacaaaggaacttgacctagaatgggatctcaggggaagcttctctgaaaaagtgatgtttgacctgagatctgaaggaggctttaaacggtctgtgagtggctgtttggggctgcaaggagattattcctgctctggtgggaagaagcctgctggcctgtggtagaaatccctatacctgggggaagtggaaaaactggtgtaactgcaaagtggggggctgggtgcaggttggattagcagcaggtgcaagatgagcacaaaagaatttgagtggcataaaatgctgtcaaagcatttagaatccctgagagactaggtacagtatgaattcagaatagagcggtttgcttcttctcaccagccttttccaactcactataaactggcacttttaaaatggtctgtagaaaagaaaaaagaaattcttttcagcctgtgccatgtgtctggatatagctggttagaaaattggaagtgtgtccaagtacaggagtagctttgtagcaaggctttaggatcaatttcatctctgacatatatggagtaatctcatagccacttggatatgaagcagattttcaagtcacaggtccccctcaggatggtttcactgaggaatggtgtttagtggagcttatagcagagctagatttgcactacagaccatctctgatttgtattgatcacagccacctttcaggggggcaaagacattatgcctcatcagctcttgctctcagtacatgtgctgtgttaggagtttgagacagatatttctatgtcctgtagaataacttgatttgtctttaaagagagaccagcagagttatctttaaatagcaaacatgcatgtgcatgtctgtttggctgtctgtggcaacaaagcaggacccctgggttctattcagcctggccccacccccatcttgttgagagactataggcaaatcactttaatctgtctaaatttctctgtttattggaaagagagtacctgataatgcagccactttatagggccttggaaagtctaattaacatttatgaagct

SEQ ID NO: 2999 - DNA, 1021 bp, Homo sapiens
tggaatgccattatggtggaacccatagggcatttgcatatgtgggcctcttgctaagaagcaagctcagctggaaaaatcaaattttggaatcacaaacacagaaacagcttgagagtggatcttttcactgatgtgagatggccgaatgtgataaaaggaggcttgacagggactacttgtatttaggaggagtcatggaaagaaagagagaatcgccagaaaggtaggagatccaagagagtgcctaatccaaaaccaaaccaacaaaaaccagaataagagtatgggaacaggaccaggacccactgctggtaagagtataagttgtacagcttttggatggctgtttgactctctctgaaagagtgtatattcattgaactagggattccttcagtgtagaaatacatgtatgcacaaagaagtttgttgtagcactgtttataagagtaaaaaatgtgaaaaagactcaataaggggcttgttatataataattatgggactcccacactgttcagttctttgcagtaataaacaagaatgggatgttaatggtcttctgtaaagtgagagaagtgacttgctgtataacataaatagtgggatttcatctttgtgacaaaaaatcaacaagtgaaccctcagacaaatgaatacatatgtttttatgtatatgtgcatgcttttgtacctatgttctagagaagagcctggtaaaccttcagcctgttaagtggaattgcttggattttccgtaggaccatatactctaaaaaaaatctacaagggagctgggtgccgtggctcacccgtaatcttagcactttgggaggccgaggtgggtggattgcttgagctcaggagttcatgaccaacgtgggcaacatactgagaccctgtctcaatataagaaaaaaaaaaattaaaaaatctaaaagagcttcaagaattttatatttttcttttttcttttaaaaactctagagttgccgggcacggtggctcacgcctgtaatc

SEQ ID NO: 3000 - DNA, 1034 bp, Homo sapiens
ccaggaggcggaggttgcagtgagccaggatcgctccactgcattccggcttggcgacagagtgagactccgtcttaaaaaaaaaaattgtggtatgattgaattacatttcttgtacaacttctttcctggaattaataattgtctctcttttgattctttgttttgttttgtatgccccgtctctaaatcacccttaaattttccaacagaactattggaaaatcagtgtaatggaaaatattaatctatagatcagccttggtgctatcctcctggaacccattgcctcattttggtgtctagatctgccactgagttgttggaagaagacttccctttcatatgactctcagatcatttttcatggcttcttggttggggttccctctgttgtttgtgaagtattttcctgagaagggtacatgggaagtaaatgttttgaggctgtgtgtgtctgaaaatgtctttattttatgctcatccttgattatctcacagtttggccgggtatagaactgtaggttggagactattttcctcaaaaatttgaaggcgttactctattgtcttccaattttcaggaaagacgccagagcataatacagaatacactcaactgaaagccagtatgggccttttaggatgagttgttacttgaatgatgccccttggaaagataaagttattagagtgatgtcttctgaaccataagggaaaagataaagttgagagaatttcattttactcccatctgttaaatggcagtagttcaatcctctctagagatattgtagaaataaatatttaaaaatttaaagatagctataactatcaaatagaaaattacttcttggggtgaatggcaaactttgtggtattagccatttatgtttgtattttaaagcactttatcatgataggatttttccaatcactaccctttaaaagccaaatgaattttaaattcatgtgctatgtgtattttaatattaatatttggatatttttggcttaaagttttcataatataa

SEQ ID NO: 3001 - DNA, 1027 bp, Homo sapiens
ctcgagatggggccttactttgttgcccaggaaggagtgcagtggcttgatcactgttcactgcagcttcgccctccatggctgaagggatcctcccgcctcagtctcccaagtagctgagaccacaggtgtgagccactgtgcctgacctgtttttattttctattttagacatcacttgctgagtttacccaatgagtaatttaaatttagccatttaaatctcttccccgcccgtcccgccccagacagggtcttgctctgtcatccaggctggaatccagtggcatgatcatggctcactgcaacttctactttctgggctcaacaatcctcctgccttagtctcctgagtagctgggattataggcacgcaccactacacctggctaatttttgtattttttgtagagacaaggttttgtcatgttttccagactggtcctgaactcttgagctcaagcaatctgcctgctgtggcctcccaaagtgctaggattacagatgtgagcctccttgccagcccgtcaccttttatatatcttctactttctcctcttcctcttccttctcattgtggtaatatcaccatttgtggttaaatcagtattgaatgtttatattattattattattaagacggagtttcgctcttgttgcccaggctggaatgcaatggtgcaatctcggcttaccaaaacctccgcctcctgggttcaagcgattctcctgcctcagcctccccagtagcacggattacaggcgcctgccaccacgcctggctaattttgtgtttttagtagagacggggtttcaccatgttggtcaggctggtctcgaactcctgacctcaggtgatctgcccgcctcggcctcccaaagtgctgggattacaggtgtgagccaccgcacccagccgaatgtttatattattataggcatgtatatattgttatagcttaaaacaaatattgtgggctgggcgtggtggctcacgactgtaatcccggcactttgggaggccagg

SEQ ID NO: 3002 - DNA, 1090 bp, Homo sapiens
attcccatggacattaaatacacacagtatagacagcacaatggcatcttctatgtgaattattggactcttttgatcacttttaatgctgaaaatgggatctatcctggttaccttccagtcctctgatgaaatttagggaatgtatgtctatctcctttcgaagtttatcctgatagctattggtggtcattgtaaaattatctgtctgaaacttaacagattgcaaatgaaataggaatcttagtatttattttgctactgcctaatgatgcctctgtttgagtcattgaatactttcaaagcataacctttaaggtatgtttctacatcttaatttgccacttggtgcatttagttctaacaaaccagaactaaagcaaattttgtttcatgagaaactgcttgccaagctttaatttaggtcttcttagaggattattaatgaactcgtgaagtgtacataagcactttttattgacaaaacaatggcattaaaattcagtattctcaatcgatgacaaggcgttattgtgtttgagaaatactgaaaactaccactgttgacctaatgattaacttgcaatttagaacatgcttgattttcctttcccttatccatcttattcttactctctttttcaaaaaccattagctgactatggaacataattgtgaataaacaaatgggtaaaatgctaaaaatgattttaaaaattcattaagttttttgaagctggatgatctatttgtactttcacctactgcttcttttaaaagctgttactttagttagtgatgtatttctcatttatacatactaaaattatagtgattgagttgttatatcatttattttttaaaattgtgattgtgtctttttcctttctttttggtataagattattattatcgaggggccaaatttcaggagtcttactagcaggttgcaaaatgtagtacagcctgccctctgaagaaaaataaatttcagtccgatgcctacgtcttaaaaagattgattgcttctttggctaggtttttttttattccttttctttttttccattctgaaattttattactttct

SEQ ID NO: 3003 - DNA, 1024 bp, Homo sapiens
cttggtttgctcacttataaaagaggaggtaataatagtgcctatcctgtaggaatattgtcatatatgtataatacttacagcagtacctggtgtacagttagcactcaataaatattagtatcgctgtcattatagtttggatgaaaaagctaatgggagttttaagtagaaaagggatgttaccagaattgagtttcagaaacattggtttgatagccaaggggaaggtagatgggtgctaggttagcaaaggttgaggcaggaagacctgtgcgtggattgagttgtgtttctgtcagaagacacaattacaacaaatatcgtttaaagatttcagttggctttatttgtggttctagaattgggcaataccttatgaagtagaataaatgtaagcattccaatgagtgcagtagaggaggttggcttcatagacagaaaaagggctgaagaaagcagaaacaaagaacaaaaagcaccagtagacttccctgatgtagggttgccaaagccttcagtttgctaggtgagaaaaagtagtatctgcaaagcgcagcaaagcaaatgcaatgaaatgagatatgctggtagctgactgttcagctccgtgttactgctgtcaagacagagataagggtttatgttattaagatgatttagttttgagttttgaggttagctagcactgagggacccatcttacatatttaagcagtcagaaaggagaacatatttttgccagatagtaattaaaatttctaatagaggccagcaacccttccaacagagagaaagcaggtgtgagaccaagtcaccaaatcccattggtcctggtcaggtgcctcacttctcaccagaagaggttttaagaatctcttgccaggcacggtggctcacatctgtaatcccggcattttgggaggctgaggcaggcagatcccctgaggtcaggagtttgagaatggcctggccaacatggtgaaaccctctctctattaaaaatagaaaaaaattagctggg

SEQ ID NO: 3004 - DNA, 1035 bp, Homo sapiens
acctgaggtcaggagtttgagaccagcctggccaacatggtgaaaacccgtctctactaagagtacaaaaatgagctgggtgtggtggtgcatggctgtgatcccagctactctggaggctgaggtaggggaattgcttgaactcaggaggtggaggttgcagtgagctgaggtcgtgccactgcactccagcctaggcaatagagggagacttcttctcaataaataaataaataaacgtcagtttacaatattagaatactgaaagcttgagtaattagaagagtcttatgattagaattaattatttcaggctaaaaaatattagaaggagactctagagggcagtataagtcaacatgttcatgcttctcctggcaatggaaagttaaattttgctttggaaaaatataccaggtgttctgaactctttccccaccacacggtgtcccggtttggtagaaatgtgagttttggaaagaagtgctctgatttggcttacaaagattagctaatgtatcagaattatatggccctagggaatatctctgcttggtttacaatactgtcttagaaaaactggaattgcctggccgggcgcgttggctcacgcctgtaaccccagcactttgggaggccgaggcgggtggatcacgaggtcaggagttcgagaccagcctgaccaacatggtgatgaaaccccatctctactaaaaatataaaaattaaccgagcgtggtggcgtgtgcttgtaatcccagctactcaggaggctgaggcagaactgcttgaactcgggaggtggagcttgcagtgagccgaaattacgctgctgcactccagcctgggcgatagagcaagactccgtctcaaaaaaaaaaaaaaaaaaaaaaaaagaaaagaaaaaaggaaaactggaattcccttattgactcaactaaattgagttgagtttgcttttcagacatttgtggagcattaagtgaaaggaatatatctttatagctaatatgtcttttgttttcaaatcttgtt

SEQ ID NO: 3005 - DNA, 1113 bp, Homo sapiens
gggataccccatcacgcctggctaatttttaaccatcatgcctggctaattttagccttcatgcctggctaatttttgtaagttttgtagagacagggttttgccatgttgcctaggctggtcttgaactcctgggcttgagtgatctgcctgcctcggcctcccaaagcgctgggatcgcaggtgtgagccagcactgctggtggttgtactttgtgtattttagtgctttggcttgtgtgagttctagtcctgaatatatttcccttggccattgagtggatgagattgctactcactattacggatttggctaaatttcctcccagagtgtcagagtaactttatataccgattcagctctacaatctttgctccatatatccctgagcaaattcctggagttagccagagagatattccctttgggagtgtcagagaggacctagtttttatttcatatgggtcagagtgctttagaagactgtttgcattgcataatgactctagaactgtggttgggtaaacaagttactgaaaacaaataggatgtattgattttctaccatagaagcatggtgtgcaatggaatgtcatgttgtaatatttgattttcattattgggtgtaaataaacagaatcctttgatatatacatactacactgggatggcactgttcaccttgaaaactaacagtctttttcctcatctgcatacaatatactgaaatcatataaattcatattgccagctggttgaattagttctttttcttttgaggaatagactttatattttactgtatcttaattgttaggcatgagacaaaggcattgtctccttatccttagagttatatatgtgtaataattttattgcatgtacactgatcaacatatcagatataatctcaaagccaaaattttctccttttaagttgttatttgcttcataaaatgcttccccttatattagtctgttcttgctgctataaagaactgtctaagactgggtaatttataaaggaaataggtttaattgactcacagttccacaatgctggggaggccccaggaaacttacaatcatggtggaaggtgaagggaaagcaa

SEQ ID NO: 3006 - DNA, 1035 bp, Homo sapiens
ccccttataaatccctcagatctcctgagcactcaccatctctagaacatcatgggggaaactgccctgtgatccaatcacctcctgccaggcctctccctagacacgtggggattatgaggattacaattcaagatgagatttgggtgaggatacagccaaaccaaatcaccatggaagtcactagaatgccctggggtgaagtggtagaggagtggtttatacctgagagtttctattcatggacccacttgactggaggtaggataaactgcatctacagcgccacgtatgtcatgggaaaatcaaattgtcctaatatgtgatttttgttttcttgggtctaggtgattttgaagttttccattttagactatgggcatttgtctccattatcctgtacatactatttattccatcttaatagatttaagaagtctttttgtatggggaacatatattttatttgtctcttaccacaaaatgcagtgtagaactttgtacgttttagcttactgacttctgttaactgattaacacctctatttctgtgttttcttattttatcgctaaagtttgaaggtcatctcttttagaccatattatgagctatttagatcagttctgtctttcctattgttttaatggccaaatggcacactggttggtatactttttctatcaaaattacctgattgagaatgtacccatcagttacattgctgtgtatgttttagatagtaggcgtgtttaagaatgcagctaatacagtgtttgtgaagagttgtattattagagggcatgtatgtggaaaaacaaaggtgaaacggaattctccctgtggttagtgtgaccctcataatgttataagtggtgtggtgtaaatcgttactacccacatatggaacttaagcagtttacattttctacatcagggttttccattgctttagcaggacatagaattccttgctttttgttaaaacgtacgtgagcacccaggggcagccttaatgatttttgggtgtagttgga

SEQ ID NO: 3007 - DNA, 1048 bp, Homo sapiens
gtgatacccaactacttacagtttctggtgtagaaaatgaatagtcaatttattgttaaaaagtttaaagtccaattttccttgagccttgagttcagtttataaatcatattagtctattcattaattcagtacattttatataaaggtaaaagaaaaataatgcagtttttgatacatgttgattaattcaagttgaattctgtttaaatatccagttctacttataaacataactaacattaaattgcattttaaaattagataaatgcccaagaaagcttccaacaaaaccttaaaacaaaaccttcttaaaaccttctctaagtccttatataacttttgtaaatataattaaatttcacaatattgtgaattttcctgctcccaaacatgtctttctgtgttttcctgttttgataaatgctactcaattttctaagtaagtaaccctgggctgtgttgattccttctcttctccccactatatagaatcaagtattgtttctttttcctgtatctcttatctcttcctaatccattacgctagttcaggccactgtctctctctctctcttttttttcttttctttttttttttttttttgcaatggagtcttgctgtgttgcctaggctggagggcagtggtgtaatcttggctcttggctgactgcaacctccacctcctgggttcaagtgattctcccacgtcagcctcctgagtagctgggattataggtgcgtgccactacatccagctaattttttgatttttagtagagatggggtttcaccatgttggccaggctggtcttgaactcccgacctcaagtggtctgccagccttggcctcccaagtgcggggattataggcgtgagccactgcacctggccactgtctcttgcttgaattactttatagattccaaaccagttggcatgttcaaatcctctaatttctaacaaaattagaaattttgttcttcactgctgtagtccttttgatcttttgtttgttttttctttttgttgttgttgttttgagat

SEQ ID NO: 3008 - DNA, 1490 bp, Homo sapiens
tgcactccagcctgggcaacagagcgagacttcatctcaaaaaataaaaaataaaaaaaaatcgtgtggcctgggtgtggtgactcatgtctgtaatcccagcatttcgggaggctgaggcaggagtatcgcttgagtccaggagttcgagaccagcctgggcagagaccccatctctacaaaaataaaataataaagttagctgggcatgatagcatgagcctgtagtcccaggtacttgggaggctgacatgggaggatcgcttgagccttggaggttgaagctggagtgagccatgactgtgccactgcacctcaccctgggtgagcgattgagaccctgtctccaaacaaaccaaaatgatgtgttttacatcctttatagtggtttggagttttacaactttaaaaatggttcggaattcagtgtcttaaggttgtcattctgaattaggcatctgcctatcactttgtacttggacagtcatttattgggtcagtgattttttgatggaatactgtggattgggattggaagtgcagtattttaaatcttctatatatgattgtttttgttttttgttttttccttgaaattgcttttttcctaataataaaatacagcagcagtttacccctcaaaacaaagtcttttactccttttactcaaatcattgggtaaaaaacatttactcaaatcaatgatttactatgtgaggtagtaaacattttaggctgcgtgggccagatggtcacaactactcacctctacccttatagccccaaagcatggatacatgcttttacagcaaatgagtatgtctgtgttcctataaaatttatttgtaaaaacaggttgcagtccagatgtggcctgtgggccaccgtttgccgacctctggcctctagaagttgtctgatgaacatttttcccctaaggatgatgaactccttctctaagtacacggtttctcttggaacttggggtgtgaaatggatttcctttgtcctcctagtccacacccacatttttgagactttagagctcttgtattatgagaatagaaccaaaggctcttcagggacaagcgtcggtgttgttacatgtattcataagtgagtgaattcacatcttttgtgttgtaaacaggactcttggacacctaactggcctgtaaatttcttcattttctttaacagaaaagtttactgtgctgttctttatggtaggcactaccctcatatgactatttaaattaacttaaataaaatttaaagttaagttcttcagtcacactagctgcatttcaagtgttcagtggctacatgtgaccagtgggtgctgtgttggccagcacagatacagtatatttccatcattcccaacagttctgttggacaatactcgtctagaattctgacttaaggattagagaaaaaggacatagaaatgatattaaagtataatgaatgaatgatactttcattat

SEQ ID NO: 3009 - DNA, 1045 bp, Homo sapiens
aggccgaggcgggtcgatcagctgaggttgggagttcaagaccagcctgacacaacatggagaaaccctgcctctactaaaaatacaaaattagccgggcgtggtggcacatgcctgtaatcccagctactagggaggctgaggcaggagaatcgcttgaacccaggaggcggaggttggggtgagccgagatcgcgccattgcactccagcctgggcaacaagagcgaaactctgtagcaaaaaaaaaaaaaaaaaaaaaaatagtttgccaaaatgaaggagataatattaaattcctacaagcagtgagtataaaccagagaaagtagaagtgaaatctgaaagatgctgaaatgaagaaaactgaggaccaaagaaagacaggtacagttgaggctggagaacaaatgcatctcgaatattcaggattgctagtgattatggctagagaatgggatgcctcgaatgaatggctttagaggtagagcaagtttggctgcgtgtgtggattcgtggagagaggacacctaggaacaaggtacctggttagatgagtacatttttgttgccatcaccctggattatgataggatcctgttgagaaggaaggctatgagctgatgtcaaagacttgagtaaatgagtgggaaagatcattagagatcattctgttaaaattctatggcagttcttttgtgacatttccccttctcattgtctttgactgtcattgatgtcaaatgtatgtacagcattgtaacttactttagatgtaacttttttctgagatggagtctcgctctgtcgcccaggctggagtgcagtggcgcgatctcagctccctgcagtctctgcctcccaggttcaagcgattctcctgcctcagcctcccaagtagctggtattatagatgcgcaccaccacgcccggctaatttttgtgtttttagtagagacagggtttcaccgtgttggtcaggctggtctcgaactcctcaccttgtgattcgcccaccctggcctcccaaagtgctgggattacag

SEQ ID NO: 3010 - DNA, 1047 bp, Homo sapiens
aaattagctgggcgtggtggttggcacctgtaatctcagctactcaggaggctgaggcaggagaattgcttgaacccgggaggcggaggttgcagtgagccaagactgcgccatcacactccagcctggggacaagagtgagacttcgtctcaaaaaaaagcagctcaaggcaaattatgagttaattagagtttaaaatgcctttgtcttcaaagtatgtcatagattctgtatccttgaaattcctctgttggagaatggaaccaggaaaggtaaggactaggacttggttgcattgtgaatccacttgctgatggaacaagaaagatggaacagcagatgtgcatattttcctctgtaatggtcattgatttaatataaaagatatgtctgaagaatgtatgcttggataagtaatatgctgaattctggtgtttggtgtgattgtattagcctagacctgtttagtagtaactttgaaatatgttgcagcaataataaggaatgtagtgggtgcctttctgctgttatcaaaatccattaacaggttttcctatgcttgactgcctttcattgttacgctttatggttcatactgagggggcatgtaaatgacatctcttctatggtttctcaaggtctttaaaacagtgttgtattttgagtaaatatctgtttattccatagtaaggatagatgctagacaggttatgatttgctttggttctactcccctactttggataggattttacctaggtggagcattggatcatgttcttgagctgtgtggaactttgatttgcttatgtgaatgcttcacactgctggccaccctttgttgcttaagcagtagagacataagctcatcctgggtacaccttttagtgtgcaaggttctgtgaaaagtgggtgaaggtgcttctcaagccattaaattgtagtggactgtctttttttctttagcaaaatttggttttgggagtatgaaatttaaacttgtgtctgccatttgtaagatacgaagtcatagtatgagtgttttt

SEQ ID NO: 3011 - DNA, 1092 bp, Homo sapiens
ttgcaagaatacaacatttagagatttctagaacaaaagcggaatttaaccaagtacttactgtttagcataacaaatttagttcagtttcaggttagagattggtgtggattaaataagttgaccaaagatccattgaaaagctgagtgggccatcgaagaatgggtgctgtttgaatagcagactgggagagcaggttaggacagtccaggcaggggtcggcctgaggcaggaatgcatatggtatgcgcagcgttcagtaaagagaacctggttgaagtacagaatttgtggggaggaatagtgccagataagttaggtagaccaaagaagacaggcttggaatgctaggcacggagtgtctgttggcacctgaagggaattggggcgaggtaataaggtagcacgtcagccagagactggagagtacatctctgtctgagtaattttggccccaaatttgtaatgtggggatgggaagtgtattggtcagtcctgataaagagttatgtgtgcatctgtgtgacgtgttaaaattgcttcctgccactgctcgtgtttggtcagatagtaggttaggctgaaggaaagagaggtagtagccacaggacagataagctttgagaagccagagtggttggtaaagtatttggctttcatttagtatctctcatatatatatatatatatatatattttttttttttttttttttggtagagaggaggtcttgctgtgttgcccaggctggtttcgaactcctgggatcaagcaaccctcccccatcggcttccccaaatgctgggattacaggtgtgagccactgtgcccagcctagtatcatattttatacaagataaattttaccaaaaattctaccatcaaatatagaagttactttagttttttaaaaaataatagttcacatattctgtttcatgtcttctcttgcctctcaccctgagcacccactgattcatacctgtttatctccccctcctttgcttcttagctcctgtttattcttcaggtctgagttttgggatcatttcatttggaaagcctcagggctgtgcccagggtgctctgcc

SEQ ID NO: 3012 - DNA, 1031 bp, Homo sapiens
atatatacttaaacattcagtttcctgttcttcatagtaaaatattcctaaaattgtggttctctgtattttaacccttcgtatttcattatttttctatagttttatgcctcttctgtttggaaagtcatatttttcattggcttgcttttagtcatttaaattacagtatcaggctgaagttagtgatttaatcttaattgatggttacagatcaaactccttattctactctttccctcttctcactgctgtatttgactattctaaaaaaaaaatcgcagtatctcctctttttccctcttgacatccctttttgtaattcctaattttttcatgtcttaagtttttttcctaccttaaagttcctttgccttttagttgcagttttgattaaagtggattttttcttgggcttttaattagattttcttttccttcagcttttcatagggagattgaagatgatgctgactgacacttgggtcagtggcctgattacttagaataagactgtgaacattgagtggcttgaatatagcatttaacttagcctgtggatgtttccacttctacttgaaggctatttcctggcttagaggcactgtcctgaaaaataacaaaatgaatataaattaaacaccccatgtattcttgtgtagtgcccatttgaatcaagatgagatctgagatctgggtggcctatggcagaatactatttataactctagaaacaatattttactaagggatatgttgattacattggagagaactactaggttatatgatagtagtttaaaacataatttatatatgctacataattcctgttttgttttgttttttttttttttttgagacggagtttcgttcttgttgcccaggctggagtgtaatggtgcaatcgcggctcaccacaacctctgtctcctaggttcaagcgattctcctgcctcagcctcctgagtagttgggattacaggcatgtgccaccacgcccagctaattttgtatttttggtagagacg

SEQ ID NO: 3013 - DNA, 1050 bp, Homo sapiens
tgtgcccatgatgattttctcattaatgggaaagatgagacatgtacacaactgagtactaggtagaagaaagtgcctcaaaaggtgttgatactgtggtttaagaaagagaatcagctctggatgggggcattagggaagatttggtgtaggagttggtgtgtcacctgtgttttgaaggattggcaggatttggacatgtgataagtagctaagaggatttgaggcaggaaattgcatgaagcaaaggcacagagcctggaaaacttgggaaatggtgagtacttttgctgcttctatgatggggattattaaattgtgtttcaattttctttttaaaaaagatctcttttaaaatgttttatagcagatgcaggcaggcgtagttttttcaactcaggtaatttgtatttgaagctgtagcgggtagctgttcagaccacatagtaagagcattttggagagggagtccttgggactggtttctcaaagaaggaacagactggtttggccagaaccatagagcactggaaagataggttgggatcatagcataggctgatttaacaccagggttaaatgactttatttgatagcttcatgtgttcaaatgaaatacaaattataattataaaattaatatatactcattgtaatcactttcacacaattcagtattcctccagacattttctctgcatatataagcatactatagatagtatcttgaatttaaaaaaattccaaacatatttttcaattcaatacttataactcaggtttgtttttgaaaacaactgcataatcggacgctgtatggatgtaaacttcacttttcccattgatggacagttaaattgtctcagactctttggttcgcatcctcatatctgtactgttgtactattgtacaagtatgtgtataggataagctcttaagtagagttgctgaatcagtgggttatgtttactttttattttgaaagctgtaaataaattgcccccaaagatatgcctgtgtatgcacagaatattttagggttttcattt

SEQ ID NO: 3014 - DNA, 1031 bp, Homo sapiens
tcactgtcttactactctttggttgatggctttgcagaagaccccaacaattagtcttttagagtgtgtaagagtgaaatgaccaagaacaagaacacaaactcttacatgtatgtgacttttttttctatcttgcacttgaatcaagatttgtgtaacttttaatcttcattgatcttcatagttgtacacagggttcaatcagtactgtggactcttgacccaatccgattagtgttccatcctcttagagagattcaagaagaaaggcaattgagggaaagagcaagacctcttgttggtctggcttcaaatctctaatgaggttgatgtaatggcctgtgaggagtaactaaaaatatttggctatctgcctaagcagccctacattctgacatttttcagtatagtccctgggactgggtggggggcggcggaactgcaaagtatttttcaaatttaaggataaagctggatgtggtggctcacaactgtaatcctagtgctttgggaggtcgaggcaggaggctcccttgagaccaggagtttgagaccagcctgggcaacgtaacaagacccccgtctctgcaaaaaaaattaaaaattagccaggcgtggtagcacgtgcctgtagcccaagctactcagaaggctgaggcgggaggattgtttgagcctaggaggtcaaggctgcagtgagccaatattgtgccattgctttccagcctgggagacagagtgagaccctgtctcaacaacaacaaaatgtaaggataagagaaccccataaggtacagttagggaaagatatcttgtgataaataagatttgccatgtggaaaactgacccaccatcagtgataactgctatggcattttggtaagatgctgatgctaattttggtaacaggagtgtcatctttgaggaatatgattatgtgtgattatattagcagagcaaagctgaagtctagtcacattgtactctcatattgtagcctgaagcaagaatatgatgacagcaggggagt

SEQ ID NO: 3015 - DNA, 1036 bp, Homo sapiens
cgggatttctttttttactaccaggaattcctcttgaatgatatttaagtgattgttgaatcatatttgtgtgattggtatcctgataattattctgaagttgaagctctccttgtcctatttaagtgtgattttgccgagccttttggcttatgtttggtttcttgtctaacagagttatagtttgtgtgtgtgtgtgttttttttttaaataatggaggagaaatgagcattttaaatatgtgttagaacattgttaagattgcataggccaatttaatgaacatttgaacacaactcaagttcaaatactaaatatatttactagcttcaagtttgggttggaattgtgatttgtatagctaacttgttggtgtgccaagtaatataagatgtactgtgtgtctgtacattaggtaactaggtcagagagtacagttaatataagatgctttttttggtaaagtggtctgtgccagtgtaaaattattattattattatttttcgagatggagtcttgctctgtcacccaggctggagtgcgatggcacgatctcggctcactgcaactttgcttcccaggttcaagcgattttcctgcctcagtctcccgagtagctgggattacagacatgtgccaccacacctggctaatttttgtatttttagaagagacagggttttaccatgttggccaggctggtcttgaactcctaacctcaagtgatccacctgccttggcttcctaaagggccgggattacaggcgtgagccactgcacacggcatatttttaactggtaaaatttgccagtatgtcagcaagtgtgagcaatatatttaactgtgaaaattttccttatatggttagttataaaatgatgtggcctctaattcataaaccactcggtatttgaggaatcctcataccctatttgtcttgggtatttgcatcagaagtcgaagccatgggttttatcttaattttaaagtagttatatacatgacttttaaggactttggttaggctgttttt

SEQ ID NO: 3016 - DNA, 1268 bp, Homo sapiens
cttccccgagctgctaatacagatgtcctttgacaggcacggttgcattgaggcattattatgttactggttgtgcttcgacattaatttgttctgttaccagaagtatttacactttgtgacttcccaggactcctttgaatgataccttctcatcttttatgagataatttctcttgaaatattaaaccagagggtttatttctgttcccagtattggaaactatatacaccagcagtcttttaaaaaagtttttagtatcattaataaaaaatcaaataaacctactctatggaaagtaaaattgtagcactggacagaggtttttcttgggatttaaaccaggtagaggggtagaggaggagttgaaggagggaaatctcactaaaatcggcaattttgcaaatgtagtggccttgcattgcagtagtgttgttttcagtagtcttataaagtctgatagggtgacttattgtatggattagataaagaatttaaaattggaagccagagaaaatgtgaaatgagtgtgtacacaaattatcatagaagagggtcaaattgttgcccaaaggcttgtaaactaaggtgcagtttcagagataatctgcttaataaatgtctcaaaggatttttattttcacaaatcctggcccatctcagttgttctaatgtaatgaactattagagaggtttgcagtggtaaaggggactgggtgtgtaggataaacatctgttccagactgactgcttctaggaatgtgacttctgattcactttactttcaaaacttcaagagtaatctctaaagttgtgtatcttttacaatgaaatgtgaacagttcaaatgtattattttctcagtgggaatggattcaggggatttcagttcaatatattctccatcagtgttttgtcacaaggaaactagaactgagaaccaattcacaacaaaaaggtaatccaaatcaagaaataaaatgtaccagttaccttttcaactttgatttactggtcagtcgaaaaagcttttaaaaaataggacagtaaggcctagtgcggtggctcacgcctgtaatcccagcactttgggaggccaaggcgagtggaccacttgaggtcaggagttcgagaccagcctggccaacatggtgaaacctcgtctctactaaaaatacaaaaattagcctggcactttggcgcgtggctgtaatcccagctacttggggggctgaggcacgataattgcttgaactcagaggcagag

SEQ ID NO: 3017 - DNA, 1046 bp, Homo sapiens
tgggattacaggtgcccaccaccatgcctggctaattgttttgtatttttaatagagacggggtttcaccatattggtcaagctgacctcgggtgatcctcccactgtgcctggccccaaaatgtgttggcctttttttttttttttttttttaacatcaagatccaaacagctcacacattttgtcttttaataaggtcactctccttttctccccatgccatttatttgttgtcccttcaatattttttaaaaaacaaaagcattagaatttttatattccaagaaatggcaatgctgacattttactttgctcctctgcaacactgacggggagaggagaggaagagaaggggcggtgggtggagggcacctagcatggtgagttgggatgaggagaactaaatacttttctatatctggcttctcagagaagcacaagtttagagggtttaaagaaggtggacaaactggagagttctgtgttctcaacttcccaggagtggggctgtgtctttgaccacatctaggatgggaaaacttaaaacttgaggtctgacttttcttttttcctccccatctctttacctttctccttcccaagaattgaagaggagctgggcagcaaggctaagtttgccggcaggaacttcagaaaccccttggccaagtaagctgtgggcaggcaagcccttcggtcacctgttggctacacagacccctcccctcgtgtcagctcaggcagctcgaggcccccgaccaacacttgcaggggtccctgctagttagcgccccaccgccgtggagttcgtaccgcttccttagaacttctacagaagccaagctccctggagccctgttggcagctctagctttgcagtcgtgtaattggcccaagtcattgtttttctcgcctcactttccaccaagtgtctagagtcatgtgagcctcgtgtcatctccggggtggccacaggctagatccccggtggttttgtgctcaaaataaaaagcctcagtgacccatgagaatactccgtgtgcct

SEQ ID NO: 3018 - DNA, 1117 bp, Homo sapiens
gaggctgaaacggcatcacttgagcccaggagtttgagatcagcctagggaacatagcaagactccattgctacaaaaaaataaaataaaataagtagctgggtaggttggcatacccctatagtcccagcgactcaggaagctgaggtgggaggatcatttgatcccaggatttcacagctgcacttagctatgattgcacccctgcactcaagcctgggtgacagagtgagattttttttgttttagatctatagatacccaggattgtgggtgacttttgtcccctgctgcaggagtaggctggggcacattgtttcaaggatcagttggggagctgtccccatcctatgcttttgggcattgtgaggccaggcgagcagcaagtcaagggggaagcaaggctgggcattgcggtggagcacactgggaggatcacactgatgaagcgtgtccctcctttccttagtggtgtctatcgaagatccctttgaccaggatgactggggagcttggcagaagttcacagccagtgcaggaatccaggtagtgggggatgatctcacagtgaccaacccaaagaggatcgccaaggccgtgaacgagaagtcctgcaactgcctcctgctcaaagtcaaccagattggctccgtgaccgagtctcttcaggcgtaagtgtcttcccaggcgagcagctttcccgcagctacggcttgtgaatcagaaaagggcccttttgttctggtgatggggaatcctgctggccagaatgtaggactcgctggaattttaacaggttttgtgtttgaactcaggagccttttaaattaaacaattggggcctgtaatcccaacattttgggaggccaaggcaggaggatcacttgagctcgggagctcaagaccagcctgggcaacatagcaagtagttgtattctgtgaagagctctgtcagagaacactaatctttctcccatcaagggaggctgaacccagtgtttcaactatgacaggagggctaagaaggtcctgggggtggaagagttcaggggagggtgagggttctcctctgtgctcttgacaaagcccaggcatggagggctttagccattaacag

SEQ ID NO: 3019 - DNA, 1018 bp, Homo sapiens
ggggaggaaatgacagcagtactttccttgctaggctgtgagcattacctgacatagtcacaagtgtttctcctggtgatgatgaatttgcagttatcaaaatagacctggcgtgaactggttgcagtagcgcacacctgtagtcccagctaatcaagaggctgaggcaggaggatcacttaaacccaagagtttgagaccagcctctaggcaagaccagtatagtgaaaccctgtctctaaaaacatgagtcagagacctggtgagcatttcacagcaccctggcccctctggtgctcctcaagaagcaagtcttgggctcatctgtgagctagattgggatggtaggaccagaggggcttactgccctgtggggctctctggacccagtgccatgcttctctgctctgctctccccaggcgttcaatgtcatcaatggcggttctcatgctggcaacaagctggccatgcaggagttcatgatcctcccagtcggtgcagcaaacttcagggaagccatgcgcattggagcagaggtttaccacaacctgaagaatgtcatcaaggagaaatatgggaaagatgccaccaatgtgggggatgaaggcgggtttgctcccaacatcctggagaataaagaaggtaaaggcgctagggaaccgcccccccacccagccctgcagcgccagctccctctgttggggggtcgtccacacctgccactgtggaaatctattctttccacctgtagtttgtaaagatcaagacccttcaaacggttttaaggaggaaaaggggagcttcattttattttacttatttttttctttttttttttttttttgagatggagtctctgtcgcccaggctggagtgcagtggcgcaatctcggctcactacaacttccgcctcctgggctcaagtgatacctactagtttggggagccaagtgtctgtccgtctgtcctgctggcagggcagcttagccatggacagcagaccctgagcctgagctc

SEQ ID NO: 3020 - DNA, 1022 bp, Homo sapiens
ctgggggatagagcgagattctgtctcaaaagaaaaaaaaagtaccagaacgtcttcaatgccctgtgtggctcgcattggatttctcttgggcagtgctgctggagtaatccacagggcaccaatgcgagcttgtgagggatgcatatttgcctgggtcagaatctacattttaacaagacctccaggtggcatgtaggctctgctgtagaacactttctttctgctagaggaattagtcatctttgcagtaagttctgcagtacaggatcataaacatgtgaaaggcatgaagaacagcccagagcgtttaattcacacagctggtaggaggaagaaacagctccctaatgacaaatgcatctgtgggcgggaggggacttgggattgtgctggaactggatttctgaattgctactacatcttttttcctctcatccaggtctcttcagagctgctgtgcccagtggtgcttcaactggtatctatgaggccctagagctccgggacaatgataagactcgctatatggggaagggtaagccttagaacccacagcccatggcctccctgcttccagccccattcctggccttgcccagtcctgtcctctctgggtggcacttgcacttgcaggtttatggcaggtaaacctgctgtgacccatgatgttgatggaagcagtgcaccaccttgtggacaggaaagttggtgtgtggattccggggttcccgagcctgcatgctctgggtcgagagttccaatgcttgcttctattgcagtttgttcccaatctgcgaaatactccttcacggttaggacaggaacccaagcatgagaacagggcctgttaactaaagaaaagtttccccatctcccaggagggttctgtgggccctccagagatcatcagcctcttcacgggctagaaaggatccagggaaggtctaaccaatgacctgccctgaatggtgagctgcaggtgtgtcatttagtgtgattttcctgttgactgactcata

SEQ ID NO: 3021 - DNA, 1028 bp, Homo sapiens
ttggctgacagcttgctgtgaccaaatgcaggatacagtgtgataggatggtatctcttgataaggggagggatagcaggtgtgaatatagcacctttatctctgtgactagaaatcagtcttcagcaaggatcaaggacagtttttacctgtaggctttggaatagtctggaggctctcatttttacctggctgtcaatccctataggaggagttttcttatgaaaaattagagaattgtgaaactccttcctttaagaagaaaatccagtgcctttgtagctctgtgttacctccagcacatggcgcgatggacagagtgggtgaggttggcaaaggagcttcaggcagaatcactcagcggtgctaaactcacagagaactgccagtcggagctgagtcaccatctgtgagtcacaggcctagcagtggaaccccagcccttcccttccccttgcacctcccctccccctcaggaagaaaggatccttgaggcctgacttcgttgggcaaaagaatgcctgagttggctgcttgctgtgtgggctctcaagcactgtggggtttctcactggctttatggggaaccctgagggttctcacaggatgccaagaattcccttcatccagtaagagtggtttgcttagtcaatgggtggaactttctacttggatattaatgaactttaagcaacaaaagaccccagatgctagaagattgttgggagttggacattttgaaattgaaatgaatggaactttctcttgtgtgtcttaatccttttcaaaaaacatgaaatgatggacttgctcagaacctttcatctctctctctccctgtctcatcaacttttttagagcagttttaggttcacagcagaagcaggcggaaggtgcagaggtacataaacccatgagtacccactgcctctgcacatgcgcagcccccccattgtcagcatccccactagagtggtcaacatgcgtgaacacgttatcatcaccaaaagtctgtagactccaagcct

SEQ ID NO: 3022 - DNA, 1045 bp, Homo sapiens
ccacgaggctgcggccccctcccccaccggtagcccccgcctctcgcccgcgctcgcggcccgcgcttctgcctagtaagcggtgactcatttaactccgagaaggcacctcttgaggaacctacagcagagccgttagatcattggcaagtcctccaggcgacctcgcccaagttgggcaagagcggctccccggctggccaccaaaaatcgggcctgatctgatttggtttttttttttttttgagttttgctattgttgcccaggctggagtgcaattgcgcgatctcggatctcggttcaccgcaacctcggcctcctgggttcaagcgattctcctacctcagcctcccgagtagctgggattacaggcatgcgccaccacgcccggctaattttgttttttttttgttgttgttgttgttttagtagaggcggtgtttcaccatgttggccaggctggtcttgagctcccgacctcaggtgatccgcccgcctcggcctcccaaagtgctgggattacaggcgtgagccaccgcgctaggccaagaaggatgtattttaagaaagcttcctgttcaatgttcccctgctctgtgcgcttctctgggcggtagggtccattgcttcacttgcctttcaggcccacccgggccctgactgctccattcatttaccgtgtccctaattcggggttccatccaggcagctaaaaaagctgtgaatggtccgggcgcggtggctcacgcctgtaatccgagcactttgggatgccgaggtgggcctcctcaggatcacctgaggtcgggagttagagaccagcctgaccaacgtggtgaaaccccgtctctactgaaaatacaaaaatcgaccaggcgcggtggctcacgcctgtaatcctagcactttgggaggccgaggtgggtggctcacgaggtcaggagatcgagaccatcctactctactaaaccccatctctactaaaaatacaaaaaattagccgggtgtggtggtgggcgcctgtagtcccagctactctggagg

SEQ ID NO: 3023 - DNA, 1496 bp, Homo sapiens
tgagacagagtcttcctctgttacccagtctggagtgcagtgacaccatctcggctcactgtaacctccgccttatgggttcaaacaatcctcccgcctcagcctcccaagtagttgggattacaggcacctgccaccatgcccggctagtttttgtgtttttagtagagacaggagtttcaccatgttgcccaggttggtctcaaactcctgacctgaagtggtccacccacctcagcttcccaaagcagtgggatataccggtgtgagccaccgcacccggccagaatcaacgttttcttttgtgctgaaggagctcacagcccctctggagttctatttcctgctaaagatggcttctgattttctcgaattcctcctggtttgctggaccagcagggctggctgggcagcaagacacatcaggcctggggccttatacatcttatgtttaatgcagcagaagctgggcctgatacttagagtgaaggcctttctgtagaaaggaacatcatttaaatctctgtcctcaggttgtgactccagggaagtctgacatggttaaagattgctgacttggtacgttttgtattttgtggaacacaatcaattttcatgtattgattaattattccccattgcctaaaatcctggcctcctctctcttgatggagaaggctgtccccaaagtccaggcctagaatctttgactggaaagactgtcctgagagtccaggcctcctctctctgactggaaagactgtcctgagagtccaggcctcctctctctgactggaaagcctgtcctcagagtccagacctcctctctctgactggaaagactgtcctgagagtccaggcctcctctctctgactggaaagcctgtcctcagagtccagacctcctctctctgactggaaagattgtcctgagagtccaggcctcctctctctgactggaaagactgtcctcagagtccaggcctcctctctctgactggaaagactgtcctcagagtccaggcctcttccctctgactggaaagattgccctcagagtccaggcctcttctctctgactggaaagattgtcctcagagtccaggcctcctctctctgactggaaagactgtcctcagagtccaggcctcttctctctgactggaaagactgccctcagagtccaggcctcttctctctgactgaaaagattgtcctcagagtccaggactcctccctctgactggaaagattgccctcagagtccaggcctcttctctctgactgaaaagactgtcctcagagtccaggcctcttctttctgactggaaagactgtcctgagagtccaggcctcctctctctgactggaaagcctgtcctcagagtccagacctcctctctctgactggaaagattgtcctgagagtccaggcctcctctctctgactggaaagactgtcctcagggtccaggcctcctctctgtgactggaaa

SEQ ID NO: 3024 - DNA, 1092 bp, Homo sapiens
tggagattgtttggagttttgaaatcacctctcctggtaagaagactcggtctcctgtgttcttgccccctctgtatcttggccagtgatggttcccttagacaaattgatgggggatttctggcctgaggacaggaagaaaaggagcccaggtctgtttcagtgaagaacaagcccaggacaccccacctgaaactaggactagttttgcccagtttggcatcgttgaaaacgcatttgccctcttccttgaaccaggctgtgccttcttctatctgtttccctgccatggaacatcacccaaacattttactgggaaggggaggggtaagagcagatacaatgcttgtctgaaacccccgttgcatggcattctttgcagggacaggacaggggagcagtttttgctgttaccgaaccctttgtgacagagatgctgtttgttaagtgatttgcttttttacaaaaaaaattccaaggtaattgatgatgacacagttgcttagactatggaatataccagttaggattccttcagctgcaagtaagagaaaaccttacttaaaatgacttaatcagaacagtaaacattttttaaggctaggtgcagtggatcacgcccataatcctaacactttgggaggctgaagcaggaggatcccttgagcccaggagttcgagaccagcctgggcaaacaggcagatgtggggtatctctacaaacaaaccaaaccaaaccaaaacaaaaaaactagccaggtgtggtggcatgcacctgtggtcccagctactcaggaggctgaggtgggagaatcgcttgaccccaggaggtggaggctgcagtgagctgggattgtgccactgcactccaacctaggcaaaagagcaatgcactgtctcaaaaataaaaaaagtaataaaccaagtagtccagaggtagggcagcttcaggacaggtgacatccaggcgctcagtaatgtcaaggactttggttccctccgtatctctgctctgctgccctcaccccactggcttcattgcctgccagttcctctcccattgggctcctcccggggtctcctcatgagtga

SEQ ID NO: 3025 - DNA, 1471 bp, Homo sapiens
atttggaaacaaagcattgctttgattcatcactttcctttagcttagctttagttgtgctatttacttgatattgaatttcagctgtgaagttgggagtggagtgagtgtttatccaaggagagtattgattaacagaatatgagatattaacaaaacaccatgttgagggtaacagtatgttctgaggagggacaggaacttgagcgcaggagtttgagctgctcagagactttcttttttttaagacagtgtcttgctttgttgctcaggctggagtgcagtggggtgatcatggcttactgtagccttgacttcccagactcaagccgtcctcccactttagcctcccaagtagctgggactataggcatgtgccaccatgcctggctaatttttttttttttttgtagagatgggtttcgccatgttgcccaggctggtcttgaactcctgggctcaagcgatccactcacctcagcctctcaacgtgctgtgattacaggcatgagccaccaaagtgctgtgattacaggcataagccaccgtgcccagcccagaggctgctttcctaccctgtctctctgtaacaaccccattgcagttgtgaatgagcttattcgtgactccaggagtataataatttcctgtggctgctggatggcttaaattattctctcacagttctggaggccagaaatctgaaatccagcagggccatactcccactggaggctctagggaagaagcctcccttgtctctctttagctttggtgactgtcccagcattcctgggctggtggctgcatcactccagtctctgcctctttcagtggccttctctgtgtgtctgtgtcttctcctcttctgactgtcttaaatttccttctgcctctgtttctaaggacacctgtcttcgggctcacccagatcatccaagatggtctcatctcataatcttaatcagctccgcaaagacccacatgctctggttgcagggatttgatgtggctatctctccagggtgtttttcagtccactgcaatgagtgacgcagtaaaagaatgaagaacagtgcctgacgcgtagtggggccgctgttgatattgctattgctgctgtttttggattacttctcatcctttcattcattcactggttatccaggtattggccctggctccccatcatgctaggtgccaagggggaataagtgaagtgaggcaccctgacccacgaggggatgatgccccatgttgctggatatctgaggtcccacagtacaatggactgtcctggctgagcctacaaacctgccacacttatggtattgtgactttggggcgtggcattcctagttgcaagcagccaacttgccaaataaccttgtgaaaagtccaaatcattgtcaacttatgaattaggtgtacttggccgggcacggtagctcacgcctgtaatctcagcact

SEQ ID NO: 3026 - DNA, 1877 bp, Homo sapiens
aagtcagtggagaaatagaaaaaacattgggagtgacagtgttcctgatggtttcttgtcgtgtcaacaacttacaagaacatttaggatgccagcagcgtgtctgacatgttttttattccctcctggattccatggacctgccctctggggagttaatacagtcagggttgcttctatggttaaatcatccccaggagtttacagaagaggaactgagccacgggatcttgagacagagcaacaagggaagagagagcccagtgttgaatttaggcatttggtaaaaactttaaaattcatccacttatttattgattcctcagttcatctgtgcatgtgttcatatatccagcacgttccagtgacttccttctgtatggtgtgttcagtactgtgctggtgttgacacaaacgtggctgtgtccctaccgtgtccagggcagagttaacagataggagaggtgggacacctctgcctgggacactgtgggtggcttcattccctttgggcgtggggaccatcctggagtccactgcaggcacaagcaggcaaagggaacagcaggtaggagtgcagaggttctgagggcaggtgtggggcaaccccatggggctcagtcatgcctcagggcaggtagggggccagaagcagtggccactgcaccctgcctcctcacttcactaggaaaatgggagggagcgggatgtcaccccttgaggtggtttgtctttggggcacaagatacctctgaacaggagcctcaacaccaggcagacaggttcctgggaaaccttgagtgttttatttttattttattttattttattttgagacagagtctcattgcgactcccaggctggagtgcaatggcatgatctcagctcactgcaacctccgcttcccaggttcaagcgattctcctgcctcagccttgcaagtggctgggattacaggtgcatgccaccacgcctggctaatttttgtatttttagtagaaacgaggtttgaccatgttggccaggctggtcttgaactcgtgacctcaagtgacccacctgccttagtctcccaaaatgttgggattacaggcgtgagccaccgcacccagcaagtgttttagacagctaaagattcatcctggctgggtgcggtgcctcatgcctgtaatcccagcactttgggaggctgaggagggaggattgcttgagcccaggagttcgagaccagcctgggcaacacggcgaaacactgtctctacaaaaaaatcaaaaaagatgaagcaggaggattatttgagccctggaggttgaggctgcagtgagccatgactgtgccactgcactccctcctgggtgacagagcgggaccctgcctcaaaaaaaaaaaaaaaaaaaaaattcctccctgtaccggcacttttcaattgtttcgtttttggttggaagtctttccagaatataattcatgcttccctcttcttaaaacagaataaacacaattttacctggcctcaggtggcagggcttttttaagtgtcacgaatgtggtttatagaatttccatttcttctcttgttctctttctctcacttgtctttccttgttcttgccggtgaatctgatttcagcaaacctttccctcccttccaagttgctgcttctaaattactgtggggtcaggaaccctcattcctatttaggttaagattttgaaataagaccatcttggatgatctgggtgagccctaagacaggtgtccttagaaacagaggcagaaggaaatttaagacagtcagaagaggagaaaacacagacacacagagaaggccactgaaagacagaggcagagactggagtgatgcagccagccca

SEQ ID NO: 3027 - DNA, 1035 bp, Homo sapiens
aacagcaaacacttccctgcctctcattctctccccttcataaagaatcacaccttctccaaatgctgccagattcgcacgctttgatggcacacacagcacacattatgttcatttaagtgaattatttccagttaagcccaattaccatacgaaaggctcacacttgtgcttgtccttaaatgtgtgtcaaattaactttgttagaggttgtttttaaggcagtggagaaatataaagaacagtttctgggagttagttggcacttgtttttttttttttttttttttttttttttgagacagggtctccctctgttgcccaggctggagtgccgtggtgcgatctcggctcactgcagccttgacctccccaggctcaagtgatcctcccacctcagccttccaagtagctgggactttacatgtgcaccacacccaactaattttttaaatttttcgtaggggcagtgtctcattatgttgcccaggctggtcttcattttaccccttcattatctcagtagtgcatgaccagaatataacacctctcaatccattttcttttgttttttaataagaaaaaaaataataattttaggccgggcgctgtggcttacatctgtaatcccagaactttgggaggccaaggcgggtggatcacttgaggtcaggaattccagaccagcctgggcaacatggtgaaaccctgtctctattaaaaatataaaaattagccaggcacggtggtgtgcatctgtgatcccagctactcagtgggctgaggtaggagaatcacttgaacccaggaggcagaggttgcagtgaaccgagaccacaccattgcactccagcctgggtgaaagagtgagacttcatctcaaaaaaaaaaaaaaaaaattttaaaggtggtatctcactctgtcacccaggctagtctcaaattcctggcctcaagcagtcctcccgcctcagctcaacctgttttcttatcctaaaataaatcattcctgtcctgcctacctcccagagtctc

SEQ ID NO: 3028 - DNA, 1047 bp, Homo sapiens
tatatcgggagcagcattgcagcccaggctcagcctctgtggagtgtcctacttcatagcacggattggggaggggaacgaattccatgtgtgtgctttcattcatcttattttgaatctaacatatgttttggcaaggaggatgtgggaaggtggaacaaaagaagcctggggttgggggtggtaaagtcacttctgggaaaaggtgattaaatacaagcttgcgtccagatgggtacatcccagagcgggatcacgagggaattttctcttcatgttttatagttggttgcttcaaacctggttttcaaggtccggtttgaagaccctaacctctcagtccttttctattgtctttgtcttgcttttccacagagttttcaggagttgaaaatgacaatgaaactgagcctgtgactgtggcctctgcaggttgctggattttttccctacattcactattgtgtttcatttaaagatgagactgattcattccacgtgtcgcatgaaacgccccagttgcattttggtcctggacaccatctgagctgcttccctgcattgcgcttccccattgcttcatggagttcccttattctgcccattctgaccccagctggagtgaggacaaatgacatctcaggcagtgcatgcatgggacttccccccccatccagtttgaccctgaccccactgcatgaggctccctgctttttcagtcttacaggcagggtttgggaggccgcctcgtgactgtcatgtggatgaaccacgagacaggaaaagacttgtttctagatattctgtcctgattgacagtaaattttaaatagacgtctctcttttttttttgttttgagatggagtcccgctctgttgtctgggctggagtgcagtggcgcggtcttggctcactgcaacctccacctcctgggtgcaagcaattctcctgcttcagcctcccaagtagctgggactacaggcatgcaccaccatgcccagctaatatttatatttttagtagagacggggtttcgccatgttcgc

SEQ ID NO: 3029 - DNA, 1065 bp, Homo sapiens
gccttaccctcgtgtcctggatcttttccttccatttcctgtgtacagcctttttggggacactgccgttaccccactctagctagcatagctctgtctgtaggtgctccataaaggtgataggactgaccacaccgtcacctttcccggaaacccaagagggagcgttccacagagggagcgtgtagtggggggaactgttttataaattaatccgtttattgaaaggttcacaaggacaaagaggcaacagcaagagtcaggcacagaaataaaggacgcagaagtagaagtgcgccttggacctggaggactcttccagagtgtttatcacttggtgacctggtaggagggctgcgagggctctgttcaccctcagcaagggccacgtgtggggaggattccatggaagtctctgctgagaggggatatgataaccaccagagcaccagtgcttcttacctgtacttaccaagtggcaggctgtgtgccaactcctttatacacgttgtctcacctaaaccttagaatcccttttttatagctgaagaaactcaggcccacagaagcagcaagccaggtgtcacccagctgatgaatcaggagccagggttttgaatttttttactttgagaagcctgtgggccaggcgcggtgtctcacacctataatcccagcactttgggaggctgaggcgggcagatcacttgaggtcaggagttcgagaccagcctggccaacgtggtgaaaccccatctctactaaatatacaaaaattagccatgcatgttggcatgtgcctgtgatcccagctactcgagaggctcaggcaggagaatcggttgaacccaggaggcagaggctgcatgagccaagaatgccctattggccgggcgcggtggctcacgcctgtaatcccagcactttgggaggctgaggtgggtggatcatgaggtcaggagatcaagaccatcctggctaacacagtgaaatcccatctctactaaaaatacaaaaaattagccaggcatggtggcgggtgcctgtggtcccagctactcggga

SEQ ID NO: 3030 - DNA, 1048 bp, Homo sapiens
ttgtggagtttcacatcgacatcaaaacatttatactgttctcccatggacaagaatggaaacatagatttttaactcctaattaagttgtgagccaatttagatgtagagaagttcccaggctggtgtctttttcaggtttgataggataaagtccgaaacaaaggcaagtctagccagtccctcccataatagaaactgtgtctgaatcgtagatgataaaatagctgttgaaatggatgcctgacgagtcggtatttctacctttctcattgagtagtttgttttgattccctaattttagccaggctcattgcacaggaagacttgtttcctttgatttttttttttgacagaatttctgtaattacggtgctgatcctatatctcacgcttcctcctctctcaacacataactgcgttttagcttctctctggtccaaatcaaactggctgccagccctcccaggagctggggcagcgctggtgttctcaggcctggctgtgtgctaatgagactccttttaccctcgagctatctaagtgctcctgtggaatgcctgtctatattttcttctctctctcttttgtattcctgcatgaatggatgcaaagtaaacaagttgcttggaaagccagaatctgcttcatcttactaaagcccgagaacttccccatgtttaaaacacagtgcccctgctttgtccacggaccctccaaacccctggctgccaaattgttgtcatttattttctttgggggtggagatggggggaggagggcaaggtgcagaagatctatgtggtaggaattcttacctgttctgctttgactccctaggtgagatttgtggatttaaaattcacgggcagaatgtcccctttgatgcagtggtagtggataaatccactggtgagggagtcattcgctccaaagagaaactggactgtgagctgcagaaagactattcattcaccatccaggcctatgattgtgggaagggacctgatggcaccaacgtgaaaaagtctcataagtaagtaagctg

SEQ ID NO: 3031 - DNA, 1022 bp, Homo sapiens
tgtctggcccagagtgtccagctgttgagaaaccctgatctaaataatgtctaagctatgtatttggtgtttcaatcagccctttaaaatttagtttgtttgggattctgatgaagaaatccttaaacctgtgcatacagagattctttggcagtgttcagtctttggaaaaaaaaaaataagagtaattaaaaaatctgttttacagctgggtgcagtgggtcacgcctgtaatcccagcactttgggagactgaggcaggcggatcacttgaggccaggagtttgagaccagactggccaacatggtgaaaccctgtctccgctaaaaatacaaaaattagccaggcacggtggatcacctgaggtcaagagttcaagaccaccctggccaacatggtgaaaacccctctcctctaaaaataacaaaaattagctgggagtggtggcacacattgtagttttatttcacttcagcctgggtgacagagcaagactctcaaaaaaaaaaaaaaaaagaatttatgactagggacaatacttagagacccagagataatgcctttttatattttgattttaaaactgtgaatattttacctgttccaaatgcttttttgaggaaaaaaagaatcagctggagattttaaacttagagtttaagatacttttctacccatgtcatctttaacaagggcctactagctcgcctttggaaattaactagcaggattttaaaatcaaagcctgagaacttggagcatgcaagggcacctgtcaccacctgctggcagtgttccttaattgcaggttcttatgatagaccaaggtttaaaagttgaatctgcaaatgaaacctgtaacatcatctaggatttataggtgagacgccaacagtctcttgcaatatttagctgttgttttttaagggcagacatgaccaacctacgtgtcatgataagaggcacacatcacactcttgtttgaaacagtgggtttcttttttctttagagatagtcttg

SEQ ID NO: 3032 - DNA, 1050 bp, Homo sapiens
cgtgcattaaaaaacaaccaaggcctggcgcggtggctcatgcctgtaatcccagcactttgggaggccaaggtgggtggatcatgaggtcaagagatggagaccatcctggccaacatgatgaaaccctgtctctactaaaaatacaaaaattagctgggcatggtggcatgcatctgtagtcccagctacttgggaggctgaggcaagagaattgcttgaactcgggaggcggaggttgtagtgagccgagatcacaccgccgcactccagcctggcgacagagtgagactcagtctcaggaaaaaacaaaaacaaaaacaaaaaaaaacccaaacggccaggcatggtagctgacacctgtaatcccagtgctttgggaggccaagatgggtgaactgcttgagtccaggagttcgagaccagcctgtgcaacatggtgaaaccccatctctactaaaaatacaaaacaattagctgggcatggtggcatatgcctgtagtcccagctactcaggaggctgaggctggagaactgattgagcctggcaggttgaggctgcagtgagccaaggtcacaccacttgcattccagcctgagcgacagagcaagactctgtctctaaaaaaaaaaaaaaaaaaaagccaaactaacagaccctcaaaagtgacattttgaggctatgcaaaggccatatataggaacccttaaatggcgacagcctccccactgtgtcagcctgacatacaatacccgtcttttccctaagagctgccaccacccgggaactagaatgctgctttcagttgtccctgatttgataggttctttctctcctatgttttaggtatatttttgctcattttttgatttagctttaggatattattattagattaaaaattttcacaagatctgttactaaagtttttatttttaaagattcttggcagagattcacgtacttcaaagtagcagagtttaaagcagcttaaatgcctataaaacatctgaaagttggctgggtgcagtggctcacaactgtaatc

SEQ ID NO: 3033 - DNA, 1093 bp, Homo sapiens
ccagactggtctcgaactcctgacctcaggtgatcccccatctcggcctctcaaaatgctggaattacaggcgtgagccactgcacccagcctattactgagttttaagagttctttatggactaggcatggtagctcatgcctttaatcccaacactttgggaggctgaggcaggtggatcacccaaggtcaggagtttgagacccgcctggccaacatggtgaaaccccgtctctactaaaaatacaaaaattagccgggcatggtggctggcgactgtaatcccaggtactctggaggctgaggcaggagaatcgcttgaatgcgggaggcggagattgtggtgagattgagatcacgccactgcactccagcctgggcaacagagcgagactccctctcaaaaaaaaaaaaaaaaagaattttttacgtattttgcgtaatagtcccttaccagatatatgatttgtcaacattttctttcattctgtgtgttgtcttttcacattctcgatggtgtcttttgaaacagaaaagtttttaatcttgataaagttctctttatttatttatttttttctgttgcttgtgctttagatatcataactaagaaaccatttcctgccaggcgtggaggctcattcctgtaatcccagtactttacatggcagaggcaagaggatggcttgagcccaggagttcaagaccagcctgggcaacataggaagataccccatctgtcaaaacaatttttcttttatttatttatttcttattttttttttgagacagagtctcactctgtcgcccagactagaatgcagtggtgcgatctcagctcactgcaacctccagctcctgggttcaaacaattctcgtgcctcagcttcccgagtagctgggactacaggcatgtgccaccacgcccagctaactttttgatatttttagtagagatggggtttcaccatgttgatcaggctggtctcaaactcctgacttcaagtgatctgcccaccttggccaaaaaaaaattaattagccgagtgtagcagtgtgggcctgtggtcccagctcctcaggaggctgagg

SEQ ID NO: 3034 - DNA, 1050 bp, Homo sapiens
ttagctgttgaccttgccctgaaactgctgagcagtaggagcaagctggcagctgtgaccaactgtgtgggccgtggagtccaggcccttctgggtgggtggtgtctgtccacagctacttctttctccggggaggggtcttctggagctgaagctggagccagggaagaccccagggaatcgttgcggaataggtggtgggagtcactccctgctgctggggcgccctgtggactgcccctacctccataaagatacctctaacctggctgccggggcctgagccacacagacctgagctgcaggaggttctgagaattctgtggactgggagtggagaggggaggggtcagccatgtctggaagagtttcataagcatatttattttctttgcgagcctaacgacaccacaaacaaacacaacaacaataacagcagaactgcaatcagcccagtcccatactgggcttacccatgtgagggcaggaccctgcatctgcctgtgccatgtgggcaaatggatctctgttaaaatctcacctgcccaccttctccatcgcagagccaatctcagctgatgctgcaggatcctgctgtcagaggctcagacactgcttaggtggaagaagccctggattgttgtctccagggactggggcaggatgcgggggccagagcagggtgcagagactgccataatgaaccccaaaggcctggagcctgtgggtaatggcctggcgtgcacctcctgcccactaggtggcgctgtctctcagcaaatgctccaggctgctttaggtgttccctgagccagaggaggctccatctaccccgggactcctctagcagggggtctgaggcagaccctccaacggacagcacccgaccttggtcctgagggtctggccgccacctttagccctgcacatgcttcccctccagggctggatgggtctggtacctggggcactgctcccttacttgaggcccagggagggggccgtgggcacccctttaccccctacccttcgattccttcctcggtcaca

SEQ ID NO: 3035 - DNA, 1114 bp, Homo sapiens
tcagtgtggttcagagtgaagggaccttatgtaccttgtggagaaacgtgagtgccccccacccccgccaaaaatagcactgtgtcagttttccccctttcttcttgaagtacttttaaatttcctaatgtaattaaaattttaagctgtgaccctgcaaagagctggcatagcttttgacagcgggattgatggagcttccataggtcaaaatttccagtctgatcgcactctctggaggtgacccgcactctctggaggtgacccatgctctccagaacctctgggccaggctccatccctggaattactaggtctggaagtggtcccttcctgacagaaatgcaaattaatttgccttttggggacttagtcagcttgctggggatctctctggtgtcccaggagagaaaaagcgttcctctacctccagttgacacagaggatcttttgatgcctttgctcaggaagcttcctgccaggtgcacagcccatggggaaggtcggtcaggcctgggaggcctcatacccaggagtgagggggcgcttgtacccatgcaagagctaggattccagcccttccattggcttataaatagaagaaggctctggattctgcattagtaacccctctggaacctgccagaggctgaaggtaatgagtcagactgaattaaaggaagatccgtggctggattttgtaggcgtgctggttcctgacttcaggtctcaggctctgacttggccaggttccagggctccagctgttctctgggaagaaaaaagaacctcttttaaaattaagccgaaagatgcctttcttttcttctgtccttgtccccccactgtgcagagagaaaacctccaccagcacgtccccttggttagaacagtagagcctgaagacatagcccaggatcttcagtgttctggggcagccaaggaaacttcctcaggctccacatgccttcctgtttgcattgttttcagctgaatttcaagaggctgtcagagcaggcctgccaggtactcttgcctctgtaaaaaggtgggtttcactcaattcaggactggagagacaacgagatctgggccagaatcacaaggataaata

SEQ ID NO: 3036 - DNA, 1877 bp, Homo sapiens
catacatgtatatcactgtttctttgttgagagtataccaagattgactggacagctttcctacccccaccctatccctacttctctgccagtccctgccatcaccaggcccctctatagagggttgggccacactggcaactctgaccatctcctgtttgattacttgatcaggaacacagtggtatctagaaagcattggttgtctttcatctgggctgagcggagttgggtaactcagcagagcgctgagagaaatggcatttcaaacccaggggctccactcaccaggaatccagagtgggactctttagactgggtgccattggccagcttttcagatccctttttggtcctcccatcagttgtccacgatgccacttgctctgctaacctggagagaccaacacaagttagtgggaatcaaataggacgcttgtgttgcaggtcactttcagagtcctggggcattttattggcagaatctgaaatgcctgctagtcatatgtcatctgtagatttgtaaaaactaaacgcagagtgggtgcaagctttttctcatgtagctggttttcttactatgagaatgatacgtgctcatttagaaaatgagaaagtgaatgatagtggcattttacatacactgtctcatttcatcctcacggtttctgagatacgtaccattattaccattttgtatgttaagaagctgaggcctagaaaagttaagtaaagtgtttgaggtcgagctagttgggaacagaatcagattcaaaccaggcagtatgactcccaggcagagctctgagcaccatgtcatatactgattctcagcagaaaccatagagaagaaagaaaagcctcccttaagcccaatgtaggtgatactcttagggtagtcagagttaacttgctggctgctccaaagggtttgaatcctaggccctttccctgtcttgtctgaccctgggcaagctaagtagcctccctttgctttactttccctgactgtaaatggggataatgatacttgtaccttcgtagttcccaggggcatggtggtgtttgagccaaagtgcttttgaacttcttttatgaaagggaactgagcaccaactactgttatactcagttattaaagacctattatgctctggtcttccatgaagccttgttaaaaagggaaagacaacagtccccagagggaagggtgtccttctgtgggggaatagctggacaaaaacattgttctccccttttgaagtttcttaaggattgagggtcatacctgtggctccatttttcatggttgtgttgtagtgtagaaacttctgtaaacaggtatgtgttctgtgcatcataacatgattgaggacccccaatggcagggccaagagggagttaaagggcttggtttctaatcttggttctgatgttttttataagccaggatcacagagacaccaagaagtggtggttgtcttccattactcctccctccctcccctccttccttctaatgactcattgattcaattaacaaatatttattaaggctttattacaatctggacaccatcataggtactaggaatatcgtggcaagcaggacaaaaatagttattccccagccgggcgtggtggctcacgcctgtaatcccagcactttgggaggccaaggcaggcggatcacgaggtcaggagattgagaccatcttggctaacatggtgaaaccccgtctttactaaaaatacaaaaaattagcctggcgtggtggtacgcacctgtagtcccagctactcgggaggctgaggcaggagaattgcttgaacgctggaggcggaggttgcagtgagctgagattgcaccattgcac

SEQ ID NO: 3037 - DNA, 1094 bp, Homo sapiens
gcggagagcgcccccgaccccgctcggacccctgactgccccagcggcgcggcgccctggtctgggcctggccgcctctcgccgcagaccacctcccgcctccctgactcttcgcccgggggtcgcctccacaggtgtccgcgccgcccaccttgttgctcacctcaccgcgtccgggtgcctgtcatcgcccgtccgccctcccgacctctgggcccctgcctcttccctcacctgcgcccactctgagactcttactctccatatttccccaaactaaacgctgggccgcccttcctccctctgtagtttgattgaactgtcgtctcccgattccacccctccccggtgagccttcctggaaggtacctggtgggggcacatatctcacctggatggcgggcgtgtatgcacgaacctgcaaaattaaccacctggagccccaaactgcacctctcacctccttttcatcaccccaccccaaccaccttcctttttttggaacctggtaaccgagacactcaggtctggacacccagcctctgctaggccctccatccctccctctgccttgtgagctgaacttgtctgagcagtgcctgttgtcaggttagcccctgggaaggcggcgggggccgtgttggccgcaaatcaagagttttatgaataatgagacgtgtggcttgcaccacctcctgtctgaggatctcagtatgctccagctgtgaattattttgtctcctgtcactcacagaactgagaggaacatgtctggccaactgctgggtaaattgaggtacagggtgtgtgggtaagggacctggaggcaagtcatggtttgtcttgaagttctgttcgcaggagccttggctcttagctccctgctacaaccactgggctccagttcctggagtgtgtccccaagtgataactgatctcttgtgccattaaaatgtccagagataccagcagcttcctcagatttaaagtaggactttggatcataaataaaggtgcgggctgttaaatgccaatgtgtcattcacggtttgctgggggagttcgtggtcctcccttgtaaatacaaatcacct

SEQ ID NO: 3038 - DNA, 1048 bp, Homo sapiens
tttaaaaaaaataattaacactatttgtgcaagtcagtgtttttgaaaattcagtgtcccaataaaaagtggactgcacactaagggaccatcccccagcctgtaagctgtctgtattaatggggcccgttgtatctcggaattttgaggttggaacaatgggagccctgttgagcgtttcctaaagtgacttagccgcctgcgttgtttgaccagggaagcaacaggaaatggcagctagaggccctccctgtgcgtgacctcttgtcacactcagaggggggtaactgtcagctgttatctactcttcaggttttggagaaacacaaaataagttatgaggaaaagcaaatttctctcctgagtatttacatgtctctgtatgctcaaatatgcagatgtgtccctatgcgtgtatattagcttattttttaggctctagccattttatattctttcatgtgcttctcaatattctttttctttgcactttatacaaattaaaagcatttttaaagcttcttctgtactgtaaactactaggtgctttgccaaccagacagattagaggacctccgctacactgatgccttatttggaacttaaaagaggtgaaattcatatatcataaaattcaccattttaaagtgtaccattcgttggcagaacatttacagtggtgtgcaaccatcactactctctagttgcagaacattcttatcacccccaaaggaggccctatacctattaagcagttagtccccattcccttctcctccgactgctaacaatagccactaatctgcaccctgtctctgtggatttacctattctggatatttcatataaatggaatcatatgatatgtgacctttttatgtatctggcttctttcacttagcataatattttcttttctttttttttttttttttgagacagagttttactcttattgcccaggctggagtgcaatggcgcaatctcaacctccgcctcccaggttcaagagattctcctgcctcagcttcccaagtagctgggatta

SEQ ID NO: 3039 - DNA, 1049 bp, Homo sapiens
gctaggcacgatagcttacacctgtaatcccagcattttgggaggctgaggcaggcggatcacctgaggtcaggagtttgagaccagcctggccaacatggtgaaacctcatctctactaaaagtacaaaaatcagctgagcgtggtggcgggcacctacattcccagctactcgggagaccgaggcaggagagtcacttgaacccaggaggcagaggttgcagtgaaccaagatcatgccactgcactccacctgggtgaccgtgagacgccatcaaaaaaaaaagaaagaggaaagaaagaacgaacgaacgaaagaaagaaaaggtaaaatccctacttaaataattcacaacctagtgattgggaggaaatcaaggaagaccttgtagagaaggtgacacttgaactagactttgaagaatgaactgggcttcataggtagaaaaaaaaatgcaggctcaaaaaagtgcatgacatttttggaacagcaagtcatccagtgtggttagactgtaggaaactaactctgaaaagacattgtcagttacatcttgggtttgccttgacttttactggaaaattccacagacttaagagaaaaattaaaatggacaatttccaggaaaaatccactaaactattatacataagatgtagctacaataaattacacttctgggtataatacttgtttatgtttgcatatcattaatgatcatagatgacttatgccaattttaatagattaggtagtaattttttgtcattatatttaattttgaatatactgtaagaatcctctccaatgaagtacacatgtcaaatcatctggtaatgatttcattatgtgtaggaaaataaaacatgctttaatgctgtgtgcggtggctcacgcctgtaaccccagcactttgggaggccgaggcgggcggatcacgaggtcaggagattgagaccatcctggctaacatggtgaaaccctgtctctactaaaaaaaatatacaaaaactaggccgggtgcagtggctcacgcctgtaatcccag

SEQ ID NO: 3040 - DNA, 1050 bp, Homo sapiens
agaatattttatttctgttagacacacagagcgttcgttgactcgtctgggcgttagtgttaatattctgtacttgaagcaagcccaccaagcggctgaactgggtggataatggaaaatgtcctgtggatttgggagtgagacaaaccggcttgagtctaacctctcagttagtctaaggctccaagcttgaaagggttaaatgaagtactatatttgttttgtttcgttttcgttttgtttgaggctttgctctgttgcccaggctggagtgtagtggcacaatctctgctcactgcaacctccatctcccaggttcaggcgattctcttgcctcagcctccagagtagctgggattacaggtgcccgccaccacacccggctaagttttttttggtatttttagtagacacagggtttcaccatgttggctagactggtctcaaactcctgacctcaagtgatccacctgccttggcctcccaaagtgctgggagtataggtggtgagccaccacgcctggcctaaatgaagtaccacatgaccgacagaccgacctggggaacatagcaagaccccatctctacaaaaatgtaaaaaataaaaattagccgggtgtagtggtacatgcctgtaatcctagatactcgggaggctaaggcagaaggatcacttgagcccaggagttcgaggctacaatgagctgtgatcgtgccactgcactccatcctgggtggcagagtgaggccctgtctcaaaataaataatccagtcccccccaagaaaggaatgaagtgctataatgagaaaaatcctagtacctaacatatagtagacagtggagagtggttctctttcgtttctcaggggcagacagatggggtgctggagtcctctatcaaagagtcagagctctatcccagatgtgtaatgaacgtggtcacagacatattgtcccattaccatttaccttccctataaccactgtgcctccagccttgtagaatagacacataggagcgcagcaatacgtctaaaaataggagtga

SEQ ID NO: 3041 - DNA, 1031 bp, Homo sapiens
agccagccccaggcatgtagtcacagtgtgtgtcagagggcacagttgcttcctctcagtcaccaacagaaatcatatggaaattttcagagacccatgaacagccaaagcattataaatgctttggtaacatggattttgcatataagcatttatgtattttttttcctgacattagattactttacttctaattccccttcagtgccgtggctggatgtgcgtggcacagaggctggtgttctctgcagtccagcgcatacatgccttgctgttctattgggtggtagacaacaccgctgaaggatatttgtagtctcttggctatttctgatcactccagtcccgttagtatttgaagcattgctatcactaaatggaatagtacagacctgtcctggagaaagcctctccgccaatgataatgatatgaaaagctactgatagaagcttccacttcttttatactttcccataggttagaaaagaagctgctaaggaagatactgtaaagaacaaaaagcattttctttttttttttttttttttgagacggagtgtcactctgtcacccaggctggagtgcagtggcgctatctcggctcactgcaagctccgcctcccgggttcactccattctcctgcttcagcctcccgagtagctgggactacaggcgcccaccaccacgcccatctaattttttgtattttttagcagagacggtttttcaccatgttagccaggatggtctcgattgcctgctttgtgatccacccgcctcggcctcccaaagtgctgggattacagacgtgagccaccgtgcctggcctttttggtgtattttttgacatttttacacataggagaatttaagaggacacctgagggccgggtccggtggctcacacctgtaatcccagcactttgggaggccgaggtgggcggatcacgaggtcaggagatcgagaccatcctggctaacacggtgaaaccccgtctctactaaaaatacaaaaaaattagccgggcg

SEQ ID NO: 3042 - DNA, 1049 bp, Homo sapiens
ggagggagcgggaaggggggaggggagatgggaggaagctttcagacacaggtacatccatcctgcagttgggaagctcccagggttaggtcccaccaggctgattcccaggccctgaacacagctagaagccagggtgaaaatggcggtgaagcacgggtggagctctgagcaggcgttcgcccttgactcgtggggatctgatgatagttgccccttctcttcttgagacaaaggggtggggctgtccaaggcgcggaggagccaagataggctctacaaggtcaagggccaaagaggcaagagggcaactttaaagggatggccacggactgcagggggtgccggtgagggacagtgctgcccatgtgtcgctgtggctgcagccttgtcgtcgaggcgggtcaatgggaggaagcccggccggtttctttctccttctggggctccaggccaggacccccttgcattgccagcagatcccccatcgcagacagcccaggcctcaactgtggggaggccaggaagcgtgggatcagaagctgggccaggctggctcattttcctgattctcagtagccccatgctttgagagcatactgtcttgaggtaggccgcagacttcttctagacggtgtctaagctgagagagcaaagagcttggcatccccaacccagccccagtgtgtgctgctcaggcccctgccctgagtgtcaaccaccttcagatcagaccttccatgagctgccaggtcaaggccagagccttgccaagtgtggaggcttctaggaacctcactagctctggttacaccttcgacctgccaggcaccggggactgagaaggttcctgtgctgtactggaggaagagattccacgccgggtttagggcagagcagattgctctcaatttccttcctccagcctttacttggccagatacacccactcaaccagtctaagctggggccagcccctgtagccaggttgggcaccggttttgccagtctgctgcagggggtaggtgctctggggccatcttggcaga

SEQ ID NO: 3043 - DNA, 1026 bp, Homo sapiens
ggtgaggccaggccagggactggggagagaatggactcaggcctggctggaatctctgcctgttcactttacacagcctggaccagctacacaccaagccccgcgtccgagccgagaattcactgtctctttaaaaccatttagaggaaaaacaaaataactttagtgcattaattctagatgaagatgggtctccagatgacagcctgatccacattattccctgcaagacaacttcccctctcctccgccccctcccgccttcctgcccctctgcccagctctttgtcctcctccgtggttcttgctttctgaaaagcggacaccggggtggcatgaagcctaatcgtgtgcttgatgtttgagaagtcaatgcttctgtctgtttgggacatcacgttcatgtcatgggtgaggtattgacttgcagccgtggaccctgtggttgcaaagtgctgggagccagtgtgtctcggaaccaccgagcagccgtggtggggttgcggctgggggcacgtgagaagcggtgaggggtccgtgtctcggcgcttgctgggttaggcacattaggtctcagaatagcaccaaaatgttctagatctctcctggctttgggggaaaaaacacacagatacgcacaaactgcccagtaagcaaaaaataattcagatgagattcgaatcaggtttgttaatatataactatatatatatataaatatgtataaaagtcgtttgtaaagactcctacacatgttataaaagctgcaaaatgtctggcattccagggcctagtaggaataattagatatttatatccaataaaactggtttgatggggaaattgtttccctccttgtggattctcagttgagggtgagtttcggtggttgggtttgtttttctcccggataataaaaccaggggtttggcaccaacaaatgtatttcccgtaaatatctaaatctcttttttccaccgtgagctctgctagaccagcctcatcacgccagccctgcccatgctc

SEQ ID NO: 3044 - DNA, 1161 bp, Homo sapiens
attcggggctgtctgggccacacctggctgaagggggaaatggggctgtcttgaagtttgcagcataaaaggaaagataggccgggcgtggtggctcacacctgtaatcccagcactttgggaggccgaggtgggtggatcacaagatcaggagatcgagaccatcctggccaacatggtgaaaccccatctctactaaaaacacaaaaaattagctgtgcatggtggcacacgcctgtagtcctagctactcaggaggctgaggcaggagaattgcttgaaccagggaagtggaggctgcagtgagctgaggttgcaccactgcactccagcctgggcgacagagtgagactctgtctcaaaaaaaaaaaataggggggaaagatggagggagggtggaatgtgaagccgccatgtggttgcaagatggggacagggtggagggcatgtcgtggagaccatctggctgtgtctatgagcactcagggaagacggagagctcattaattagcagggctcctgctgtctgtgcagggccccggactgcttctcccaacccattcccaagctgggaaggaagctgggacgcagcagccgcagggctcctcatcaaagaggaatcccacgtctcatcctgatgcctgcaacctgacccccaaagacagaagcgagttgggggacctggcagggaggcctcaccagactgacgtggcgatgttagggctgcctcaggaggtctgattcgcatctgctgcttctgccgagaagacctccatgcttgctctggccacgtgggccttggccatcatggcagggcatggtgggtggctgggaattggagacactgtggagtttatgactgtcacctacattacagttcaggtgactctacaggcataaaaccagtggtcagagaccccagacgaggagcaagcagtggtgaaggggcaaccaggcctgcccctgcctggaactagtggtcaggtcggggagctgactgcgagaaagaggtaccatggagagagatgggctctggaaccaggctgacctgagttgcagttcagacccactgttttatagacatggccgtcactctgcaagcttagcctcattgtactcctctgtaaaatgggcacaatagcatcgtctttgcagggatgc

SEQ ID NO: 3045 - DNA, 1050 bp, Homo sapiens
ctgttgtgctagatgctggagacgcgcagatcattaggacccgctctctgcccttgaggagttaaaagtccaatggtggagacagacttgtgaacaaattactttagtccagtatggatgtaaatgctgtggtggaggatataggaggagcagagtcaggggtgtgtggggccacccggggtagatttcagaaggctaccttgaagaggcttggaagaagagggtggtggtgattctgggcatttctagagtgcttgttaacaccctttcacgcctcttgtccatcctccgcgcagcctgcaaggtaggagggaagtcttaggcatcgtctccgtctggctggtgaggggacggaacctagggagattagcaggcttgtctaagggcccatggaggtttcggggacagaagtgggactcggacccacgtctcctggttctcagcccgttgtgatttctgtaagcacgctcactcagcttctcacttcttcaccatggagccgctggtcacagagacccggcctctgcgctctgcactttctgaccgggatccatggcccccggggcctgggctgtgggaaagcctcagtttatggaaggccccgcggcctgtgccctggtttggtaagtgggtcaggccacttggttggggacaatcctggagcaaggccacgccctggcaggcttggaggatggcaggaatggggaagaccgtgggggaaaaggaggaggaggcctggccacaccctttattcagttgttcttgctgccaaagctgaaaagcatcctctgccctgggcaggccccactttccgctggaagaagcccaacgagcgtcccaccagggcctggagccccctttccttccatagctggaacctcctctgagccaaggacatgaaacaccgagagtgttcaccgttggcctgtggtcagcccctggtcttgccagcgccttgcctggagttggggaggtagatgtgtttcccttaaccttttttctggggaatgtacatgtctgttttacaaagctggaagaggggcatgtcag

SEQ ID NO: 3046 - DNA, 2078 bp, Homo sapiens
ctgagcatttaggttcacagaagaggagcaggcagggctggggaggatcagctcacgtgtagctgaaggtgggcagagcacctgagcctgagctctgaggcagcctgtcctgcagagatgggggaccggggacctgagagggaggaggaatcagccgtgacaacccctgtggctaggccaagtcggagggggatggagatggaggggagggtggttgctggattcaccaactccagagacaagttctctcccttgcagctgcccgggaacaggcaaaggaggcgtgcaaagctgcagcagaacaggccatctccgtccgacagcaggtcgtggtatgtgccagcttttctcctttttcctttgaaaaacgatgcccctgcttgtggtcaggatcttccttggatatcttagggggcttgccctgtgctttatattaagtcctgacttctttccggttcaccttagcttggctattagtgtctacctcatttccgaaacctccacaagattgatattgtaattcctcttaaccttcttccactgtgtttatggtaaatatgccagaccactcaactgtagtagtagaaaaggtattgaggttacagtgctgaagcttgttgtgtgtcctgctgtgtcctacaaaaatgttgcattctagagaatgaaaccccagagcactctggaactcttttttttttttttttttttttgaagtagtgtctacctctgttgcacaggctggagtgcagtggcacagttgcagctcactacagcctcaaactcttgggctcaaacgatcctccctcctcaaccacccaagtagctagaccacaggcacacaccaccattcccagctattttttgttattgtttttggtggagacggggtctcactatattgcccaggctatcactcgaattcttaacccctgccccctgcctttccttttttttttttttttttttaatttccttttaaaaaaaaaatagtgacatggtcttactcttaccctgatgcccaggctggagtacagtggtgcaattatagctcattgcagccttgtactcctgggttcaagtgatcctcccacctcagcctcccaagtagctaggactacaagcacgcaccaccatgcccagctacatttgtttctttttttttgtagagataggggtcttgctatgttgcccaggctggtctcagactgcctaaagcagtcctcccacctaggccgcccaaagcactggaattataggcatgagccactgcacctggcctgcttgcctttcttaaatgacctcatgtcattgtccagtgaggaatttgtttcagctgaccctgagtgttggtcccgaagttccagccacagctcctctccccaccactgactgttcttcttaccacttaggcagctgggtcccagctattgctgaggccggtggagttccctgttcccatgtgcctccctgttcctcccccacatctgttcctgatctacagctagaaaatgctgcaaagaagagagagcgagcaacaagcgacccaaggaccacagaacagaaacaagagaagaaacgactcaaaatttccaagaagccaaaggacccagagccaccagaaaaagagtttacgccttacgactacagccagtcagacttcaaggcttttgctggtgaggaagtaatggggccccatacagggacatctgtgcgcgtcagaggggaggaagccataaagagaccacaatataggggccaagtgagtcctgcacaaggcatggtgctagccaggaattgttggagtagtccagagaggccgtggcaatgtggacagtcgcctgcagcctcattaccacctcctccatgggagctcaactcatggtggcctccatggtgggttagcaagatcacctgtcacttccactgtgaccagggcgccatccttcctcactataacttgtgcccataaaccctctctctctctctcacacacacacacacacagaattttgtttgttgaaaaatctcaaagcctatgacatgaacccctatggctgcttgggctgtgagagtccgtc

SEQ ID NO: 3047 - DNA, 1025 bp, Homo sapiens
tggtaccaaaacagagatatagatcaatagaacagaacagagccctcagaaataacgccatatatctacaactatctgatctttgacaaacctgacaaaaaacaagcaatggggaaaggattccctatttaataaatggtgctgggaaaactggctagccatatgtagaaagctgaaactggatcccttccttacaccttatacaaaaatcaattcaagatggattaaagacttaacaacgttagacctaaaaccataaaaaccctagaaggaaacctaggcaataccattcaggacataggcatgggcaaggacttcatgtctaagacaccaaaagcaatggcaacaaaagccagaattgaccaatgggatctaattaaactaaagagcttctgcacagcaaaagaaactaccatcagagtgaacaggcaacccacaaaatgggagaaaatcttcgcaacctactcatctgacaaagggctaatttgcagaatctacaatgaactcaaacaaatttacaagaaaaaaataaccccatcaaaaagtgggtgaaggacatgaacagacacttctcaaaagaagacatttatgcagccaaaaaacacatgaagaaatgctcaccatcactggccatcagagaaatgcaaatcgaaaccacagtgagatatcatctcacaccagttagaatggcaatcattaaaaagtcaggaaacaacaggtgctggagaagatgtggagaaataggaacacttttacactgttggtgggactgtaaactagttcaaccattgtggaagtcagtgtggcaattcctcagggatctagaactagaaataccatttgacccagctatcccattacttggtatatacccaaagggctataaatcatgctgctataaagacacatgcacacatatgtttattgcggcactattcacaatagtaaagacttggaaccaacccaaatgtccaacaatgatagactggattaagaaaatgtgtcacatatacaccatggaatac

SEQ ID NO: 3048 - DNA, 1049 bp, Homo sapiens
acatccggtaaacactattaactggaagcttattaatcagagttgtattctaaccagagttactttcattcattaagcttttaggaagtaagcaaatcacaagaaaaaagttggtttcaggaactttagttttagtttttaaaagcttttcctaatgtgggtcccttttgttttatgatgtattctaccatcaacgtcatggccctgtatgcatgccaggactgtttgtcttgttcaccttgaccccaggtcattgccaggcacatagcagatacacaagagatattcagtgaataaatgaaggtatgggaaaactgaaacctgggtcattgtagaattcttactcatcaagtaaaggttagttgtgatcaatctattctccttagttgagaaaacggatacacctgtgttcaaggtttttggcaaggcatacaaacgaatttcccaattattcagaaagttcagctattaatgggtcacgtagtgtcctactatcactgcaaagttaccatgcctggaagcaaactctgcctcacactcgctaaaccaagtggtggtacgctgtagagtcattgccgctcagaaccccagagagagtagtattcctttatccaaataagcaccagcggttcttccttcaagcattgagcactggttctctgtcaggccgtgggctaggtgttgggaccaggcagatgggtgagattctttctctgtcaggctcctatgctcttcatgtcttcctttgtccactatctggtgacctgtcaaaactttgctcccttgaaatattgtgatgactgctgcttgcccccacttctgcttgccatttctgctctcccctaaatgtacactttatacccagtgcagctctgctttctgggtgaaagtgccagccctgtgcctgctccaggcgtgctttgctggcctcgctctcactcctcgcctgcatgtatcccctgcacggtcacattcatgggcttgtttcccgtgaaccaatctgcacatctctggccttattcttcccccttgccaagtagtccccaccg

SEQ ID NO: 3049 - DNA, 1049 bp, Homo sapiens
atgaaaaacatgtggaagagtgcccgcaaggtctgtatcccaatgcatccagaacagaccaccttctccagaatgctcgcctaatctgcttcgctctgcctctttaaggccagaaaagaaacagtgtttaaaccacctactcacaatgtcagggagtctcttcctgttacaaagctatttggcctgatttcatagagtgaatcatagttgaggagatggtgtgtataccattgatcaaaccaatgaatgtgatcacagttatatgtatttgtatctagaaagtgctgggacatagaaagggcacactttctacccctaagagaagatggactgtttggtacaaaaaagagcagatttgtaaatacacagactagaactttcacaagaccaatttgggtttttcagacctctgtctcctctcctgacatcagtttggattcaaaaggaataacatgcagggtataatgctgaaaccaggagggaaagttatcttgaagccaatgtagaattcttctgactttatgtacagacaagcccttgggaaatagatgtggctcctggtttgggggtttttttctttaaacaatctgcctggatgatgctgaggactaataaacagtaggccctggaggcaaagtcatcacctgctttggcttccccttcctccttcttaaaaggaagagggagtctcactagccttctctccccattgtgacccccacagtgaagtacctgagatgagagaggaataaaacccagccactggagcctctgctgtgggaagatctcataaaatagaagttgtgtttctgcagaaggcacacttaggagatctggggactgggtctagaaattgactaattttatacatgactgaatcagagtggctgtgaataccacccagagtgggatcagccagcctgtacccaggcacctggtctttgggatttactgcagtaccaatgacctaagtttccttcttcaaatatgcagcttggagattttatttgtttttttgttgttttgttttatttttcagtctctgtgag

SEQ ID NO: 3050 - DNA, 1051 bp, Homo sapiens
atcttcagggaccatgctatcttctctgtatcgttccaattttagtatatgtgctgccaaagcaagcactttctgcgttttttgccagaacgctaggtgagaaaatcaaagtctcagagggtgcaccttttacccagtcctccctatgtgtagtgaaaggtatcagaaaaacatatcctagttgttgccccataaacaatctcatgttttttatttatttggttttgcccctcacccaaccgcccttgagaggtaggactcggtatattctgcattattttttgtaacaaatgtttgtggaagagcaatgctcttgtctgtgtactgaccaagctctgacagctgttcccacacagctgcatggtgaaggccgtgcgaagttcactgctagggcttgcccttctgagttgctgttcctacattgctccctgctttgtctcttggggtaacaatttgtgggatttcagcactgaacttgcttcctgctctagatgaaaagaaaaactacatccttggtcctgtggcacagaatcagctgatcctgaaaaaataatagagggaggctgagttaggagggacagcttgcatgaaggatgcattcatccaagttgcttgtgttcaccagctgtaaattttgaactatagggttggaaggaccatttggagatcatgcagctttctcttctacctctagtcaggatccctacaaaaatatgctgtgcagatgagctgtgcctctgctttaagccagtggttctcaaactgtgacccctggtccagcagttttggcgtcacatagaaacttgttacaaatgcacattctcagcccctatcccagcactactgagtcagaaactcagagggtggagcccagccatctgaaggagccttccaggggattctgatgcacttagtagtttgagaactactgctctaagggaacccctagcagggcccaggagtgaagatttctaagtctcggtggcagaaaaccaacacagaggtttatcctgttcccttaatggagcttcagtaaatgcatagggcatca

SEQ ID NO: 3051 - DNA, 1047 bp, Homo sapiens
tagtctctgctcttaaaggaagggccacagagcagcaagatgagtgttcccattactgacccccagaatcatgggaggagagcacaaacctctttcagatgaaacgatttaaactgagctttctggatggtaatagataattgatactctttcagcatctgcaagacattgtcctcaaagtgctggtgaaccatctgcccacaaatgacccccacatctcctaccctcagacctgttgagtgtaactaccttttccctttgttttctcagcattaataataagctacagcagccggaggcagcggccggagtgttagaatatgccatgaaacactttggagagctggtaagcacctcattctttttggaaaagcaggaggtagagacttggctagggagttattggccctgaccttcagaaagttactttccttttctgttttttctccaattcataacagtctgatgctgacttaccagtcttcaggatgaaagagataaactgtgtctgtagggactctatttctttcttttttttttttaattatactttaagttctagggtacatgtgcacaacgtgcaggtttgttacatatgtacacatgtgccatgttggtgtgctgcacccattaactcgtcatttacattaggaatatctcctaatgctatccctccccgctccccacactccacgacaggccccggtgtgtcatgttccccatcctgtgtccaggtgttctcattgttcagttcccacctatgagtgagaacatgcagtgtttggttttctgtctttgcgatagttcactgagaatgatggtttccagcttcatccatgtccctacaatggacatgaactcatccttttttatggctgcatagtattccatggtgtatatgtgccacattttcttaatccagtctatcattgatggacatttgggttggttccaagtctttgctattgtgaatagtgccgcaataaacctcatgtgtgcatgtgtctttatagcagcatgatttataatcctttgggtatatatcca

SEQ ID NO: 3052 - DNA, 1076 bp, Homo sapiens
gctgaatgggagccatcagcagcactcctggtggcctggtatctaacaagtgctgctgctaaccagccatgggatctatcagtgggaggaaacgggtatgcagccagtaaaagcaattatgaagactgaatggagtggaaaatacctgtgttagtgaaaaggcagcatacaaaattgtatctatactttcatcaccagtatgtataaaatatgcatttatgcagaatatgcgcaggtaaaagtatcttggaaaggtgattatattacaatcaacttccctcctccatttttttctttttaaaaagtggtacttccactcaccaatcttgaaaagatgagtttttttgcacacgcgcccccattcccccacgcacttcctaatctcaaaaactgttaacattctaccctctttattctaagggctcacactttctcacatacagatttagcgtgtcctctaggcattgtgacagacaaaccatttaaactgtgaccagacagaaacaaggatgaagacatagtaagaattctttttatttttaggccactctgagcctgagacatcaggaatcttttgttttgtttttggagacagagtctcactctgtcacccagtctggagtgcagtggtgcgattgtagcccactgcagcctcacactcgtgggctcaagtgttcctcccgccttagtctcccaaatagctgggactgcagacacagatcacctcacccagctaatttttaaattttttgtagattcgaagtcttgctatgttgctcaggctggtcttgaattcctgtcctcaagcagtcatcctgtctcggcctcccaaggtggtgggattacaggcatgagccaccgcgcctagccaaagaaacctattttgactgtctaaagctggccacctctcttgcaccaaacttttttttatcttggtgccttaggtccccaagagctccaagtacaccaaatgccccagctttgaaaccttgtaatggggccagccttctcttaatatataaagttctttttcctaagttccagccctgccagacccagaggtactgtcttcatca

SEQ ID NO: 3053 - DNA, 1034 bp, Homo sapiens
tctgttagcctccactcaagttgcacaatccagcgattattctggcccagtgtctggcagtctagttagacagctgaactcttggacagtgtgacatgctaggatgggagacacagaggacaaggagggccttctagagaagtgatacctaggttttaaagaaaaaggaggaaatagccaggaatgggagaggatgttgtaagcaaaggtgcagctatgtgaaagacttggactagtgggagaatgtaagtagtcgagtgtggcctaagagtcaaagggaagaagaatggcagcagaagctaaagctggagaggtggaggggggccgtgcccggggagcccaggtgaggagcgggactgatcctctgtagacatgggaaggaatcctagaggtttttccctcttgttccattgttttcctgagttccaccaggaaagtggccttggtaattgccaaacaatttttttttattttttattttttttagagacatagtctcattctgttacccaccctggagtgctgtagtgcaatcatatagcttactgaaacctggaactcgtgagctgaagcagtcctcctgcctgagcctccaaagtagctgggaatacaagcgcacaccaacacgcctgcctgtttttaaatttttttgtagagacggagtctcactatgttgaggctggtgtggaactcctagcctcaagagatcttcccatctcaacctcccgaagtgctaggattataggcctgagccaccacacacagcccaaacaagattttttcaccgcaaatgaatgatttagaacgtgagaatttcttaaaattgtaatgcattcatattaaataccctgacggggtcatttggcattaggattaaggaggtagtacatatagcacttgagttcttaggcctagaagcagacaaatctggattctaatccctccctagcacttggttgctgtgtggccatggacatattacttctctgagtttgccaacctgtgaaatggagataaaaatcaaaactatctca

SEQ ID NO: 3054 - DNA, 1051 bp, Homo sapiens
ggactcacttgtctggaaaatggcctgagaatacctttctaatcccaaactgagggcccggaagtccatgcttagaaagtgattgatacatgttggttcaggtaacagaattttcaagcttggtttcatgttaaaactttttcttaatttgagctgaggttaaccattgacttagtcagtagaagctgatcatgtctttgttcttcatgtagtttataatgggaccaatggtttttatatcagcaagaaatgacatgtctataggatatgctccttacaactaatattttcctgataatttcagaaaaccaaatttttatctctaaaccgtaaattcatgttggcccacctgagctgagctaaccagaaataaaagttattttgcaaaagaaagattaaatttatcttatttttggcctattaagtctatatttcagcattgcatttaaaaaatcctgtattcggagaaattcatttaagaccatggaaaaaaatagacgtatcacaattgaggaaccttaaggagccgcatccttcctgaacacaaagggactcttcacatggttatgtgtctctacacttaactctgagccaatgagaagagttacgtttacagagagaggacacaaaattccattaatgctcattcctggtaaatcttaggaacaccagagaactgtttctggcaaaactttgcttccagaggaacagctgttacagtttggtgcttccttggaatttcttgagatatagcctgtcagctcttggtgaggaagtagcagagctacaccaatcaggaagacttgaaccctgcttctaagacttgctgggtgactttgggcaaaccatgtagtatctcagcactccaagatggtaggctgaaacactgtgtggataaaagagacccgtgaaggtgttaggtaaacttacatagcattagaagtcaaaggaaatactgcataagcctttactaaagggaaagtgtacccacaaaagaggccccagtagtggttctgatgaccaggatatgtagaagcagtgctgtagatgg

SEQ ID NO: 3055 - DNA, 1072 bp, Homo sapiens
gaacaaaccacagggtgagcatttagacccagtggctccatctgagttgagtgtttagagactgagcctttatttctaccctgggattctcagtggtgttaattacccatcagtgtctgcatttgggagaggtggatatggggagatccagagggggtgtattttggctttactagcggtggagcagaggggtagggaagcccttcacctggatagcattagtgggacgttccaacaggtggtttcaggttaactctgaaataaattattctgctatagctgggccatgaattctagaaatgttacagtgtatgagggccacgtaacagatactcctgtcagatagattcagacttcttagacagccgccactataacaaatcagtcgtgaatatctcatagagtctggttttgttgatgtttcctggttggttgtttttgttgttgttcagagatggtggctactgccacctgagaccataattaagggagatagattttattatcacatattttccccttccatccagctagcacctcaaaacactcagaagaacctttgaggccttcctcccagaagttttgttaaaacaatgaaatgagagcatcagactggccagtttttttactctagggccatggagctgctactttatgcaggatttaagctctgtattctaaatatcaaagagcatagtggaagagacagccttttctgataggattcagagactgcggcccttactatccaagagaagcttcctgcctgctatgtctcggggtgcttttcttggtgaccactgcactgggaccttagagaggagcaccaagatggcagatgggagttgtctgaggcacataggttctcttgcagagcaccttgggaaagggaggtagagtacgtgtgccttcgccatcactattcttcatttcgtcttagtggtgaaagcaccaacttactgcttcctctaagggactacctacttatagaatataagggtaactgagcacttggtcatagagaagaaaaataaggaatgatgtcctgggcaagaagagcaagagacctggt

SEQ ID NO: 3056 - DNA, 1061 bp, Homo sapiens
gttccccaggaagaggcgatagctgttgagttcattgcccaaaacaaagtggctatactcagcgtagcgcaggttgccctcccagtcctgtcaggaggagcagagccttaaagaaagtgcagcaggctccatttcatgctgtctctataccccttctctcctgacagtcccatagccaaacatctttttataggtgtgaatctaataagactttattacttgtttacctccagtttactgtgttaacctgggaatcagaaaacaaggctcgaacttctttcctgattcaccatatggccttgattagtctctctttctatattcctcactttcctgcttataaggtgcagctatgtttttgctgaatcccacacagagctgctgtaagagaaacatgaggatatagtgagtgctttcagaccttcagcaagggtccccaaacagtatcagtaagatttgcacctaaaggacctcatgctcggccagagcagagactagtgttcggcacagctgactgttgaatttgctctactctggcctgggtctggcctcttcctgtcccacctgcagccccacttttgtcggggggttgggggggttgcagaaaggaaaaatacctatttttcctcaactccattacaacttgcaggaaaaccatcacaatgaatatacagatttgtcttgaatcagaataggaatggcacccccggagttgtacgcggtcatgtgtggtggcactggtccagtcatggggcccctggccttgtgcttacctccatctctacacgcagccgggttggctgtctggagagccggtggatgtgttcgttccccagccagaagtccccacggatgctgccaaagccctgcttgtactgcttccagtcccggtagaaggagacaaggccactttttcgtctctggatgatggtccagcctccgcctgaagtctccatgtcacagaacacctgaagcagaggggatactctggtgagggacttgcaggggcagaaggcaggagcaagagggcaggcttcccaacctgttcctgtccctgcaga

SEQ ID NO: 3057 - DNA, 1052 bp, Homo sapiens
aaatctatccattgtaggtatatcctgttttttcccatttccttccccgcacagtcaccagaacagtggggaggacagaattaatgttagatgtaagggatggcaaatgtgtccatcatgtggtactgtggtaatgtaaagtggtcatagtaatctttgaaatggaacctctggttccatgtctttgtgaggccccaactgttggcttagaaaatcttttagaacttaaggatttggatcctatttgctaatgcttctagtcctgttgtcattttttatgaccatccaactaaggattctggttatattttgaaagcaattgcagatgctgcctttgacatttctgaccttaagaatttagacattgtcccagaaacatcccaagaatcatttaatgattattattttctgcatttgttaatgccaacttctatgttagaagtccctatactgttcatttcccatttcctccagtgaagagaaataatgcaaaaactgccaagaaatattcctttggagaaaagtcactttgctctgctcttctccccgccctgccactcgccccccaagtccctgaatatcacaatgtctgtacctgcagtgtaaaattcagtagacactagccatatgtggttaattaaaaataaataaaatgtaaaattcagttccttggccacacttgccacagttcaagtgctttagtgatcactggctaccatattggacaggaaaattctcttggacagcactggtctgtatagcactggtttgtataaccaaaatcagtgatgccaaaagcgaattgataggtgtgactttgaggcagcaggcagaggcacgggaggtctctccattttccaccttctctgccttcagggatctcttcaatgctgcatttgtgtcctgctggtctgaactgaatgaagatcaacaggatgagctcatcagaagcatcgagttggccctcacctcacaagacatcgctgaagtcacacagaccctcttaaacttggctgaattcatggaacacagtgacaaggtgagacttttcc

SEQ ID NO: 3058 - DNA, 1063 bp, Homo sapiens
caagatatgctgatttgctggtgtcctaaggatgtcagctagaaccaatgtgttatctccagtcagtaaggcttcgggggatcctgccagtgtgatccccacctattgaggtttatctagatatgccccaaacagctacagagtatcagcacttctcttggcatcatagctgttctaactgttctttgattcctttgccattatttgtagtcttcagtaatttgctgtctggacaaagatttttctcccaaggggccctaccttctttcctcatttttatagaaccctactcacagctctccctgttggttttctcagtcttctctggctgtgctacatggttaaaagctctgctttagagagggccatgggacattggagtgctgtgataaaaggaaagggagcaggttttcgaatagtttttcttcctgtcacagctgtatctaaggctgttctgcctgttgcagaaaagtctgttgctcattgagtatctagcagctacttcatctgtcgtggaggtctgggtttttcccccagttccctgccactttttctgttggacacagtctctctctagaatgtcttctgccatagagaacatatgagcctttcttccctacagattttgacagagttggagcacagtgggattggaagaatcaaagagcagagtgcccgcatgctggggcacctggtctccaatgccccccgactcatccgcccctacatggagcctattctgaaggtaacacaaaccgagaggctggtgctttctctgtgcgttgtcatcagctcatatggggagatgggagtgtttcagtgttcactagtacactgaacaaagtaggtgatttctttgctctcacgcttggagaccaaagggccatatcaagcactttcagttaaagaataccaagaatcttatcagttgcaggaaagtgctgtccttacaagaggtaagagttaatgcttcaggcacatcatcgcagatgtttggaaaggagaagtaggtagatagtagcataaaatagctcgcccaaaatgaggaaaaaatgagcttgaa

SEQ ID NO: 3059 - DNA, 1025 bp, Homo sapiens
tctagcctactctgcagggccaccgcggggtcctcaagccaaagttggctgtcagagaggtctgtgtctcccaagagcaggatagccttagcatccctactgtgttctgtcattggctgggagcaatgggtgacgttggcacaaacttagtgatgggtttcagagcagcagctggggcccttggttatgcgccttgtagttggaggttgcattctcacggctgccagacgaagctattacggtagtctgggtgagtgacagtggtggctttgactaggagtggtggcacagatactgagaagtagttgattcaggatatatttgggaggtaaagctccatctgtgagactggctgtagaaaatgagctgtgaaattttaccccggggattcctgcttataatagacacagtgcttgttagataatagccatgcccagatgtgggagcagcgcatgcagcagtgtgcagaagcaggaggagtctggcttcagatccccaccgctctgatgactgtgcgactcaggcaagttacctgtttagcctcatttttctccctttggacaggggctcttacctacctcattgggctcttgtgcggtttctatatgatgttggctctctatatccatgagttctacatctggattcaactagtcatggttcacaaatacccagggctgggtgcagtggcccacacctgcaatttcagcactttgggaggctgaagtgggaagatcacttgatcccaggagttcgtgaccagcctgggcaaaagacggtgagaccgtgtctctacaaaaaaatttttttaactttttaaaaagaaaaaaaaaatcaaggaaaaaacaaacaatttaaagataatacaaatttttaaaaatacagtgcaacaaatatttacatagcatttactttgtataaggtgttataactaacatagagatgatttaaagtatgtgggaagctatacataggttatatgcaaatactatgctactttatcggagggacttgagcatctgcag

SEQ ID NO: 3060 - DNA, 1032 bp, Homo sapiens
atgccctggctgtcttgctgactgtggctgtttgcttgtgtccgtcagatgcagctttacgtggaagagcgcgctcataaaggcagctgagggggcacctgccaccccactgatgcccaaactgtcagactttgggggatccccgcctagggcagtgctgcatggctgccctgattccaagtgctcttatcgcctctgtgtgtggatcgcccgccccagcccggggccgctcaggtctgcttggaggatgcctcccccaggagggcagtgagggatgccgcaacctcgacttctcagcctcctggggttccgccggccaacactgtctgtctcaaatactgtgctgtgagttgtttcaataaaggggccccaagggctgggctgagctgagccatcattaactggagtgggagggacaggtatggccagggtaacctgggagaggggctgcttctccaccaaaatgccagggaccccctctccccactcctaaaaccaaccccaggctggttttactgaaaacatttattttttatttatttattattattattattttatgagccagagtctcgctctgtcacccaggctggagtgcagtggcgtgatctcggctcactgcaagctctgccttccgggttcacgccattcttctgcatcagcctcccgagtagctgggactacaggcgcccgccaccacgcccggctaattttttgtatttttagtagagacagggtttcaccgtgttggccaggatggtctctatctcctgacctcgtgatccacctgcctcggtctcccaaagtgctgggattacaggcgtgagccacagtgcccggcctgaaaacatttattacaacaaaacgtcagagctatgtgacagtaagttaccacaagctggtagggttgaaccggggcaggagtcgctggtacagggacctcactgcccaccccatgctcagctcctgcctggaggaacctctggctgacccagacacaggatggacagctgtcagaaaatctggacaaca

SEQ ID NO: 3061 - DNA, 1049 bp, Homo sapiens
gcctcattgagtcaaggctgtccaggcagtgggactccagttgttcttggcccaggtcttacccccaccccacatcccctcagggtgaaaacatcaccaatgcccctgaactgcagccgaatgctgtcacttggggcatcttccctgggcgagagatcatccagcccaccgtagtggatcccgtcagcttcatgttctggaaggtaaaggagccgggggcaagcttgccccgcccacctggaaaaccgtggggagggattgggaccaagtcccaagcgtgtgctgaaggccacactggacccagccttcagggcacacccagctctgactcacccatgtcactgctgatgcagggtgtttatttctgggcaggggtgggaagtgatactggcagtgggccttgttctattccgggaaatgtcctgttgagcagagcccttggagagccctgttaatcttgcctctgtgtgtgtgtgcatgtgtgcgtgtgtgcgggggtatgtgtgtgtaggacgaggcctttgccctgtggattgagcggtggggaaagctgtatgaggaggagtccccgtcccgcaccatcatccagtacatccacgacaactacttcctggtcaacctggtggacaatgacttcccactggacaactgcctctggcaggtggtggaagacacattggagcttctcaacaggcccacccagaatgcgagagaaacggaggctccatgaccctgcgtcctgacgccctgcgttggagccactcctgtcccgccttcctcctccacagtgctgcttctcttgggaactccactctccttcgtgtctctcccaccccggcctccactcccccacctgacaatggcagctagactggagtgaggcttccaggctcttcctggacctgagtcggccccacatgggaacctagtactctctgctctagccaggagtctgtgctcttttggtggggagcacttgcgtcctgcagaggaccacagtgggtggcacctcctgagaaggcgaggagagtggttgttgccaactaagc

SEQ ID NO: 3062 - DNA, 1169 bp, Homo sapiens
ttgaacccaggaggcggaggttgcagtgagctgagatcgcaccacagcactccagcctgggtgacaagagcaagactccatctcaaacaaacaaaacctttctcttgtcatgtaacccatacatacacatgctatgtacccacaaacattaaaaatcagaaatttaagacaaaacaaaagcaacagaaaacctttttttgaggagtccctaaggcttcaccagtttgtcaaaattggagcttgattgctgagactttatttgcatacccacaatgcattgtgcaccaaataattttcgtctttaaaattactagtcccctttttccttcaatctatctttcctgaaactgagattgctgttccagaattgtctgaagaaaaaggcagaagtcaatagctcttttgggcagaaagaaatttaccattagcctgttgggagtagccattacctgagaactgagtgccactcatcgaagttcttactctagtttctcttcatatcgcataaatctttcgccttttactaaagatttccgtggagaggaataattctgagttttaaaccaattttttagaggtcttgcattttttagcaaggcttatttgagcgttttaaaagtagatgcccttagccattacgacggttcgtatttactctgaaacaagaaacacactcaaaactcagagaaaacattgttccctagtatttgagtctgaaggaccagagctggcttctggaggagcagctggccttgggggaaaaggacaatttaccctcctacgtagcttgaatggggctttgagtcgcatggcggggcacggcggggcacggcggggcacggcggggcacggcggggctgggctgtgggcggctgcttcagggcctgagcccggggtagatttttttttttttttttttttttttttgagacagagtctcgctctgtcgctcaggatcgagtgcagtggcgcgatctcggttcactgcaacctccgccttccaggttcaagcgattctcctgcctcagcctcccgagtggctgtgattacaggcatgcgccctcctgcccggctaatttttgtatttttagtagagacggggtttctccatgttggccaggccagtctcgaactcctgacctcaggtgatccgcaggtgatccgcccgc

SEQ ID NO: 3063 - DNA, 1040 bp, Homo sapiens
atcacagggggagacatgcctgtctcagcaactgggaaggaggaaatcaaagaagggtagatttgtaaatcaaatcagagctggtgtttgtggggttggggcattttacatgaagacctcttgggtaaagagacacttgagcagaacctgtgagaaggtggccaggtgtggtacctcactcctgtaatcccagcactttgggagactgaggcaggaggatcacttgaagccaggagttcaagaccagcctgggcaacaatgtgatacccccgtctctacaaataataataatcataataattttttaaaaagaaaagagggtgccctacaaggagagggatacttgggaaaagagaacagagagcagccagtacaaaggccctaaggtagagggggccagtgcttctgcagggccgagacctaggagggagtagctgagacgagggatggggcagaccaggaagggcctgcgatcctagtaaacactagattccagtctgtgagatgggcagccatcagtagtcataagcagggtgatgtggtctgacacattctagaaggatctctggctgttgtgttgagaacagactgaggcaggggccctggggcaaaggtagcagccaagtgaccttttgggaccaggtgaggggtccacttgtgctccaggtgaagggcgctgaggcagggccccaaggcgccgtggaggtggcgagaagtggtgagaagcctctggatttcagaggtcaggctgacagggtgcgtggtggagtgggcatacagtgagagaaaacacttaatgtgggacagtgaagaggcttcggaggttaaaaagagcttggcatctgaaaacagggagtggtgtggaggggaagcagcctccgtcacctcccagcctcgggagcctggggctgggcctcgcttggcctcctctattgaatgaggataatggagcccatttgtgttagtttcctgtcaatggcacaacaaatgaccaccagctgtgtggcccaaaacaccaaagctgctctcacatttctggg

SEQ ID NO: 3064 - DNA, 1035 bp, Homo sapiens
acagaattccctctaccaggcctagtcagtgccctccctggtccccttctgacattgcaggtattccacacgtgggtctctgtcctcctgtcccaggcctagaggtctgctgctagcctgagtttagccaggagaagggaggcccgggcctttctgtggggacatgggggtgccgaggtacctgagctgttcaacgtccttttcatatcctctcaacagctcctctttcctccccagctggttcttgagttgggtgatcttatcaaacaccaggtcgaggtccctttgtcgaagctggttgaccttctccctctcctggcgggagaggtatttcatggacacgtggcctgacatattcttgatgttcatgagacttccgagggttttgctcatatccaggtactacaaggaaaacgttcgcgcataagaggcattacccgcggccgctggtggccgctttaaggaggccaatgtctaattctgtttcattcactttctgcaattgcagagaacacgcacatgctttgaaaggatgtgcaactggggctttcagcatgactttcctttctcccacatccatttacgctatgccttttttgagaaccgggggtgaaaaatgacaacagatataaacacttcattctaaccacccagtttttcaaggaatttggctatgtgattcctgacccatgctgggatagtaggtaggtcctgcagagttattagagtaactaaataggcatgtgaggttgatatttaaactatcctgcgttcaacactgactgcaggggccccaggctttggataggagcagggtggatgctggatgtacataccagcttttcactgagctctaaagcctcagccacatccatcttccctgacttctccatggctgagccgaaccttgcgttgcaaaggccattctgaggctgaaatcagaaagaaatgaaaggcctctcttgacattccattatgactttctatgactggaagctaaagcactgtgtgattaccgaagattaactcaagaga

SEQ ID NO: 3065 - DNA, 1028 bp, Homo sapiens
agcctcccaaatagctgggactacaggggcccaccaccacacctgactaatttttgtatttttggtagagatgcggtttcaccatgttgcccagcctgatcttgaacttctggattcaagtgatccgccctcctcggcctcccaaagtgctgggactacaggcttgagccacctcgcccagctgaaagtgacactttaatactttcaggaaattataggagatgattgttaagagctcaggataaagagaagtttctggccgggaacggtggctcacacctgtaatcccagcactttcagtggcggagcacctgtggccaagagtttgagaccagcctggccaacatggtgaaaccccatctctactaaaaatacaaaaattgaggtgccgctgttgctgctcgtgttaaatctagaaccgtagccagacatgggactggaggacgagcaaaagatgcttaccgaatccggagatcctgaggaggaggaagaggaagaggaggaattagtggatcccctaacaacagtgagagagcaatgcgagcagttggagaaatgtgtaaaggcccgggagcggctagagctctatgatgagcatgtatcctctcgatcacatacagaagaggattgcacggaggagctctttgacttcttgcatgcaaaggaccattgcgtggcccacaaactctttaacaacttgaaataaatgtgtggacttaattcaccccagccttcatcatctgggcatcagaatatttccttatggtttcggatgtaccatttgtttcttatttgtgtaactgtaagttcacatgaacctcgtgggttttggcttaggctggtagcttctatgtaattcgcagtgattccatctaaataaaagttctgtgatctgcaaaaaaaaaaaaaaattagccgggtgtggtggtacatgcctgtaatcacagctacgtgggaggctgaggcaggagaatcccttgacgccaggaggtggaggttgcagtgagctgagattatgccactgcact

SEQ ID NO: 3066 - DNA, 1034 bp, Homo sapiens
aaaaaaaaaaaaaaaagtaaatggtgtggactaggccccttttgcccatgcctttggatttgttctttttttttttttttttaatccattgttcaaggaaagaacagcttctcaaggcaaattctggaatagaagagaatttaaaacagcaataactttttcctagtaaagataaatgaggttctttagagactttagtaatatgggaagtccttcaaaatatttttggctgcagttagcactcccacacggtgtaataattttttctcctttgaggcaaaacgttcagagagttggttataaaatgcttccctgtacttcagaagtattggagttcaaggaacaaatccttgcagcaacagtatacttagaaaaatagaaacatggccaggcacgctggcacatgcctgtaatcccggcactttgggaggccgaggcgggcagatcacgaagtcaggaaatccagaccagtctgaccaacatggtgaaaccccgtctctactaaaaaacataaaaattagtcaggcgtgctggcacgcgcctatagtcccggaggctgaggcaggagaatcgcttgaaccagggagggcggagattgcagtgaaccaagatgatgccactgcactccagcctgggcgacagagcgagacgccgtctcaaaagaagaagaaaaatagaaacacatctataaaagtaaacaaagcccctgagacatccaacatttgtttgtcctgccagagtacaaaatggtcatccccaaagcaaaattctatcctgacaagtgtgcagattatatgaaacctgtagatttatcatgttggcatcatggtatagtggcctagttagacaatatatcaaaaagactctgaaaactcaggattttaatttacttgtttaacaatttttgagcatcaaacaatgtgccagagcctgtcaccggtgtttaggtacatcactgaataaaaacaaagcaaagatccctgttctcatggagcttacccctggtggaggagaagggagacagacaataagga

SEQ ID NO: 3067 - DNA, 1029 bp, Homo sapiens
tttttttacgtttagtagaggcggggtttcaccatgctatccaggatggtttcgatctcttgacctggtgatctgcccacctcagccttccaaagtgctggtattacaggcatgaaccaccagcccagccaattttaaatacttggcctcatcgattatctccttaaatacaaactaacttacaaacgacactatttgaattcgaaaatattgtcaccaaaaccaatggcactaatatctcaggtcacctatgcataactaaattgtttctttgtagtctcagctactggagaggctaaggcagaagcatcatctgagtccaggagttccaagctgtagtgcactatgattgtgccttgaaaagccccagcactccagcctcagcaacataggagaaacccctctcttaaaaaaagaaaaaaaaaagtaaaattggctatttacatctggccatttctctgtcacaattatcacataaggaaagtcaagctaacaccctactaacgaaactcatgaactattcagtactgtgaacgtggctgcagttagtcaactgttgaactgatatgcatttttctatgaagcatgaatttgaatacaagcacccaagtttgaagcaaattttaaaatctgatgtaaaatctgatagactgaattagctgaaacctcttgggaaagaccagtgtcaccatgaagaacagtgtcacctcaattgtattaaaaggtgcaactgacaagaggattcagaaaagtgtctcgcaattagagaaataaaaggcatgtctcgccttgaatggaggcttctgttaaaatcatgattttaaaaaaaaaaaaaaaagagccgggtgcggtggctcacgcctataatcccagcactttgggaggctgagatggacggatcacctaaggccaggggatcaagaccagcctggccaacgtggtgaaacctggcctctactaaaaatacaaaaattagcctggcgtggtggtgctcacctgtaatcccagctactcgagaggctgaggcag

SEQ ID NO: 3068 - DNA, 1045 bp, Homo sapiens
cagcaattctgtgaggtagggggtcttgctcccattgtacagatgaggaaattgcggcttagagagcataacccacctgaggtcacatggagtcccggactccacctgcaggctcacaacctaatagagaggtttggcttccagacatgtgccagaaagaccaggggccagattccagctcagccacttatggatgcagcccccacccgcctcaggcctcagtttccttcaccgtagaacccggagagcacgaactggaaagcatcttcctagtgccctactctgccacctgggcctcagtttccccaggcacctgcccacactaacctgtatcttccccccacagtgggacctgatgcagaacatcatgaatgacatgccgatctacatgtactccgtgtgcaacgtgatgtctggcgaccaggacaactggctccgcaccaactgggtgtaccgaggagaggctgagcgtatcttcattgagctcaagtttactgtacgtgactgcaacagcttccctggtggcgccagctcctgcaaggagactttcaacctctactatgccgagtcggacctggactacggcaccaacttccagaagcgcctgttcaccaagattgacaccattgcgcccgatgagatcaccgtcagcagcgacttcgaggcacgccacgtgaagctgaacgtggaggagcgctccgtggggccgctcacccgcaaaggcttctacctggccttccaggatatcggtgcctgtgtggcgctgctctccgtccgtgtctactacaagaagtgccccgagctgctgcagggcctggcccacttccctgagaccatcgccggctctgatgcaccttccctggccactgtggccggcacctgtgtggaccatgccgtggtgccaccggggggtgaagagccccgtatgcactgtgcagtggatggcgagtggctggtgcccattgggcagtgcctgtgccaggcaggctacgagaaggtggaggatgcctgccagggtgagtgacggttctgggttgcagggaag

SEQ ID NO: 3069 - DNA, 1050 bp, Homo sapiens
tgctacatgacctgagtggggttggtgtgtttcctgctggggggaatgtggcagaagcagacaccagtgtccctaaggcccacatgcacgtgaagtgctgccaaagggccttgttcaaggaagcagagggggcggtgtggtgtcacttaataccctgctcagcccagctctctgcccagctgctgttctcctgccgggctgagctccctggcctgctctgcccagctggggactaacggagggggacaggatggctggaatcctggcctgggagactggaggcccagtcctgaccccagcctgctgtgtgccttcagctgggttccatcctttttctgggcctgtttccctcatgagtcgagggatgattttcttggatatggtgaccctgtgtggtggggtccctctcgctctgtctgagagttggggttcctggagggatcctcacctttcctgccatggtctgactcctgaagacacccccaggctcaccccctctcccttctccctttcagtggtactgctggactttgctgcagctggaggggagctcggctggctcacacacccgtatggcaaaggggtatgtaagccttcggggtggggagaggtgtgagaatggggctgctggtcccctgtagagatggagaaactgaggcccagggagcgtggggcctggcttcaattcagcagctcagccaggtctcaggctcagggtccagcttctcacaccaggctcagagtcagccggcccaggccagggctggatgggcgtgggaaggtacgagggtgtgggtgtaagcctgagaggtggggggaactggggagacagagaaggccctagcggagctgggccttccatgttccagaagggctgacagtcagagggatctctggcaccacccatccacctcttgggagggaaggggttaaagatgccccctgtcttgaggtctcagcccaggaggtgaggggtgaagaagagacagggaacaggaaaacctgatcaagttccttcctgcccgcccctttcccacctctagctgttgc

SEQ ID NO: 3070 - DNA, 1097 bp, Homo sapiens
cctgacctcaggtgatccacccgccgcggcctcccaaagtgctgcgattacaggcatgagccaccacccccggcctgtttccttctttttctgcctcccaaactgggtttggaggttttgctgttctgtgttgggaggaaaagaggccggatctggagccgttgggcagtggcaggtgttgggggtggcatcctgtctcagtctctggagtgacagggcccgggttggggtctcaaccgggacttctggttgcaggagctcatggcaaggatttctgccaccctcaatatccgccccaccaacgtttggtcctcccccttcctgggggactgtggttggagagaaggggagagacagctggaatcactataggcctttctcctcggctgcccatgggggggtgggggattaggcgggtgctttgctgctgcagtccccaagctggcctggaagcctggagctgccttgtccttgtcccctgtgtccacctctccccagcctgtgtgattaaaccccacccccacaccccatgggatgcagggggaaaggcttgtgtattgcactggggtgggggtacatttttgcttcgactctgagtccccgtgaaagagtccctagagaagtgtgcctaggtgggggtgggcatgatggcctagctggcagctgctggtttcagttcctgggaatcaggctgtatgtggtgggtctgcctgggggtggcttagggggcaggcaggaggacacaggtgcctttttcacctacccccaggctgcttcagacttctttcttgccccctcacccctaggctatacttggttgcccacgtggctcctgttaggtcatcaacagccactgaatctgccctcatttttacaaatggggaaactgagggaggcccgagcccttgccaaccagggccttctggacagaggaccagacctgagcatcccgcttcttggctgccagagccaaggccctgcctgctttgtggttggtgtcatggtagattttcctgggaagcaggcatagctgggcaggggcctgggcgggtggcagggggtgctgagctggggtgctgctgatgggaagagggctg

SEQ ID NO: 3071 - DNA, 1009 bp, Homo sapiens
ctcaaccatggcctgggcataggagatgtcaaaataagtttatttcaaatggcaccatttaaatagggatttttggtgatttctcatcagtggaaagaggatttttgttttgcctttgttttgttttgaaatttaaatcctaatttcaaaacatcaccttgccaccctgacactcctctttttattattagcgtttctcaggcacaaagcctgctgcagctggccctgggtcctggctttcagccagcatctggcagcctaagtgtactgataagtgtgttttctcctgttacatcatgctgaatcctttcccttagccattagcttttatgatgtggtcttcgtaggaaagccaccctggtgccaagcctagcttgtggggaggggtatgtgttccagaaactgctctttgtgttcccttcaatgaggaaacaacatgtgtctacttatgtggcatccaactgcttggagctccacacttccctttcgcgactcaggctctggtgctgttgccaatccttgcttggcaaagactgttcgatcatgtggggtccttatttacaagggaaagctgggccagaaggctagcaattcaggtgttaccgctattgctgtaccttgtgttaggacattgtgtttgtgcatggactgtgcctccaaactcagtagttcctatctaaatataaagtatattagaaacctgaaagtacagaatctcaaccttacagtctttcccttagtcctgtggccttcctaagccagctgttaacgtgttgattccttccacttcccccaagtaggcaggcaacagatatgttgattgtcttagaaagtaatctggttcctctgaactccattgaattccagtttgacgcatactgcctggaaccagactgtttgcttacagctttttaagaaaaatctgccttgtctgcccccattatggttggtcttggtagctcctgggcactgtgggcgtgtaccatgggaaagtgattcaacacagtga

SEQ ID NO: 3072 - DNA, 1032 bp, Homo sapiens
agcctgggtgacaaagctagaccctgtctcaagattaataaataaataaagactcatttctacagtcagttcctgtggtctggattagtgttggttttatttatgaaagtattcaaaatagttgacacggacaggcacagtggcttacacctgtaatcctaacacttcgaaaggccaaggcggcaggattgcttgaacccatgagttcgagaccagtctgggcaatgcagggagtccccatcactacaaaaaatttaaaaattagtcgggcatggtggtgcttgcctgtattcctagctatttgggaggttaaagtgggaggatcccttgagcccaggaggttgaggctgcagtgagccgtaattgtgccactgcactccagcctgggcaacagcaagaccctgtctcaaaaaaaaaaaaaggaagaagaaatgaaaaatagctgatgccacatggtgttcttagatgctcaccctgtactcttcaggactgatgccttctcagtaaatcgtattgttcccctaagtgagatcacaagaaagacagtcctctgctctaccttctcaaccttgagactttgtaagtgacaccattaaagcagtctgagcagggcttttcaaacagtgttctgtaatgtgctactgaaagaggaagcaaagctctccacctagattggagcatctcgactgctgtcaggttaatgtagtgttgggatttcttctgcttaagatatcctttgaaaaatgagtcctgcagctttaaccaaaaagaaaaaaaaaagattttaaaaaaaaaagtattctcagcgaggcatggtggctcacgcctgtaatcccagcactttgggaggccaaagcgggtagatcacctgaggtcaggagtttgagaccagcctggccaacatggtgaaaccccatctcaactaaaaatgcaacaattagctgggcatgatggcagatgcctgtaatcccagctactcaggaggctaaggcaggaaaatcacttgaacccaggaggtggaggttgcagtga

SEQ ID NO: 3073 - DNA, 1075 bp, Homo sapiens
ctgggacttcaggtgctaacatagtgttttattttagaatagaacagagagagtttccatatatctgacacccagtttccctaatgttagcatcttgtattagtatagcacactgtgacaattattaggttggtgcaaaagtaattgcggtttttgccattgaataatgataaaccaatattggtacgttattattaactaaaatgcatacactattcagattttctgatttctttctttaacataacatcctttttctgttctaagatcccatccttgatacattacatttaggctttttgtctccttaggctccttttggctgtgacagtttctaagagttaacttgtttttgattatcttgacagttttgaggaatactggtcaggtatcttatagaccactcttcaacttggatgtttatcttatggttagactggagttatggcttttgggaagaagaccgtggagatataatgccattctcatcacatcagatcaagagtacatattgttggctggtgtggtggctcacgcctataatcccagcactttgggaggtcaaggcaggtggatcattcgaggccaggagttcaagaccagcctggccaacatagagaaaccctgtctttactaaaaaatacaaaaattagctaggtgtggtgacacaggcctgtaatcccagctacccaggaggctgaggcacaagaatcagttgagccagggaggcagaggttgcagtgagccaagattgcaccactgccctccagcctgggcaacaaagcaagactctgtctcaaaaaaaaaagaaaaaaaaaaccattgtcaacatgatttttcactgtttctattaaccaggatcacctggttgaaatagtatacatttgattttccactgtagagttactcttttctctgccttgtaattcttttttatagtctattgctttcttttcctgttattctcttttacccatttgtaattgcccttggttctcgatgttccattgaattttaggggaataactaagctatttgactattatgtttatcattagagtcaggaaaggataat

SEQ ID NO: 3074 - DNA, 1538 bp, Homo sapiens
acccagagttgggagtgtgcttgatatagtcaagggatactgaggaatccattgtgactggagcagagtgaacaaaggagaggaggttggacagaaaatgaaagggatgtatcacatatgtgtggctttctggctgttgtaaggacattgtcatattcactgaatagaatggctagttgtgtaggtttctgagaagagggcaagtatggaagcaaggagaccagttaaaaggtggtagcataatctaggctgaaaatgataggcacttggagtaaagtattcacaaaaggtaagaactgggtggatttgatagagccaaagggatttgctcatattttggatgtagagtaggaaagagaaagaaagcaatcaagatgactcttcaggtttttatcctgggcatttgaaagggtggaattttcattaactgagatggggaagactgggtgatcaaggttggcaaggggcaggagagatgagaaattccacttgaaacgtattgagtttgagacgcttattaggacatccaggtggagatatatgtatatggagttcaggggagacacacaggctggaggtagccatgtagggctcattagcctattagttagtaatatagtttggccctgtgtccccacccaaatctcacctcaaattgtaatcctcataatccccatgtgtcaagggcaggaccaggtggaggtaattggatcatgggggtggttcgcccatgctgttctcatgatagtgagtgagttattgatggttatataattgtctggcatttcccctgcttgcactcattccgtcctgctgccctgggaagaaggtgcctgtttctcctttggcttctgccatgattgtaattttcctgaggcctcccagcaatgcggaactgtgagtcaattaaacctctttcctttataaattactcagtcttgggtatttcttcatagcactgtgagaatagactaatccagatggatttaaagctatgagactgcatgagattaccaagggactgagtgaagacagaggatggtataaaggccaggcatggtggctcacgcctgtaaaatcagcactttgggaggctgaggcagaattgcttcagcctaagggtttgagaccagcctggccatctcctcaaaaaattaaaaaaaaaattagctgggcgtggtgtgaacctatagtcccagctgctcggaaggctgatgcaggcgggcaggggtgaggggagaggatcacctgagtccaggaggttgaggctgcagtgacccatgtttgcgctactgcactgcagtctgggtgacgaagcaagtcctatctcaaaaagaacaacaaaaacaaaaaagagaatggtgtaaggattgagtctgggagactccagcatttggaaatcaggggactcgaaaaggagcacccagtaaggaaggagaacatcggagaatgtggcatctgggaagccagcatatgaggaaagcgtttccaggaaaggaggaaataatcagctgcatcaaatgcagcgaagaggtcaa

SEQ ID NO: 3075 - DNA, 1035 bp, Homo sapiens
accgcttaagtgagaattacactaaactttctttttcttttttatttttttgagaccaagtcttgctctatcgcctaggctggagtgcagtggcgcaatctctgctcactgtaacctctacctcccgggttccagcgattctcctgcctcagcctcccgagtagctgggagtacaggcacccgccccacgcccggctaatttttgtagtttttttttagtagaggtgggatttcaccatattggccaggctggtctcgaactcctgaccatgtgatccgcccacctttgcctcccaaagtgctgggattacaggcttcagccaccgctcccgacgaattacactaaacttttatagaatctatgtggattggtgttgctagtagctttgatattgaacttctgtatcccagtacaagttatttaccttagtgctgtagttgttgtacaattaatttagcgtgttgttgcctatattgcaaaaacttcgaatttttggattgagtgaaatttttatgtggcactgtattattgaacatataccatctgtatcttaactgaaaatgagtgatctaaagttgcggctgatggaaaagtgaaggtgatgtgttcagttttctataatgtgacagcttgctacatgtacaaggatatgacttacagacaagtcatttaaaaattgtccagcattaagcttataatatagcttatgacttataggcaagtctttcttttctttttttctttttttttttttttttgagacggagtctcgggtctgtcgccaggctagatagagtgcagtggcgcgatctcggctcactgcaagctccacctcccaggttcacgccattctcctgcctcagcctcccgagtagctgagactacaggcgcccactaccacagctggctaattttttgtatttttagtaaagacagggtttcactgtgttagccaggattgtctcgatttccagacctcgtgatctgcccgcctcggcctcccaaagtgtggggattacaggcgtgagccactg

SEQ ID NO: 3076 - DNA, 1066 bp, Homo sapiens
agaaatgggaactgcggatctccttgcttgagacagcaatccatgctgtgactgtggaaggcttctcttggcgagaattgtgtgtgcaaagggaacggtggagggtgggaacgaatttgtaagcgaagagaaaacgattgtgagatcttgatggtcgctgcagagtaacttcagcgctgagttcgtttgaaaccttcggtttgttaagattcagaataaccaattgctttgtctgttaaatctcccgatttctgttaggaaaataaaagcctcatttcttaattgccagagtctggatttttctgtggtgggattctgatcgatctagatgaagattctgacacattaccagttttacttgctggcagttgctggccccgacgttgaaactatgttgttcctttttgagaacaacttttattgctgtttaaatgctaattgggagacttcgattgtgtttctgtcatgtagggaagtcggtttgaagccttgtggtctctttcttgaggaatgatggcttcactgaacttgtgctatgcagaattgttgaggcgattgcttttgcttggacacaccaaaatatcttttgtaacaaattggctttacttctgcttaagaatgatgacatcatggatttaaagaggcaaggaaaatttgggggaagtaccatcatttagaattgaatatttagaattaagtctgtatatcttatggccattagtgatgctgtgttaaattgctaactttgagtgtattcacgtgtgtaatctgattgggtgtcttttctattgtatgttgtcattttatacccagtaactgtttgcttttgacaagccagtataaatagatgattcaatctacattgatccataggcatgttgcgtatcttaaaaagcttttcattgttaaaatgacaactgtttaggttattatttgaccattttctttctttctttctttctttctttctttctttctttttttttttttttttgcagtttctcactctgtcatccaggctggagtgcagtagcacagtctcggctctctgcaatctccatcccct

SEQ ID NO: 3077 - DNA, 1052 bp, Homo sapiens
tctatccagattctctcttttccacactgattcccacctcaaacacactttgctaacctttgtgttggttatctattgctgcataaccttaccagaaacttagcgacttaacacaatacatttaccatctgttcctatgggacagtctgggcacagcttagctggtcctctgcaaggctgcagtcagtgttggtcaggcctggggtctcacctgaaggcttacctgggagtgatcagcctccaagcttgtgtggttgctggcagcatttgctttcttgcagactgctggactgagcttcagtttcttgttggctgtcagaggctacctcagttcctagccacctgaccctctcccaagggcagctcacacaacatgacagcttccttcttcaaagccagcaagagaatttctcagcaaggcagatgttgcagtcttacataaggcaaccatgaaaataacatcttgtcacctttgtggcactctactggttagcagtcacaggtctaggccatctcaaggggcagggagtacataaggctgtgaacagcaggtggggatcacagtgaccacctgggagtctatctgccacacctcccagtgcatccaaattctgttgtgcagagggcaagtgaggtctagcataccccccaagaaagcagccatcttctaccatccacccaccagtttgtaaactccagtcaggggtgtaattgaagtgatgcctggtttgggattgagttttcctggagattctggtcctgtaatgagttttttccagctgggattccagttagtgatggacagcatcaagctgtcccttgctcctggccccagaccccacaaggtgcttttcaggctagattcctgagggctgtgtcatcagctgtgccacctcctcctccctaccatgatgaactgttctgggtacttacctgactccagagaaaggtcattaaggtcaaacaatgcaatgtgcatctgctagtgcctcatccgagtgacgctcaggtgaaggaacagcctgtggccacacgtctaaccaggggatagc

SEQ ID NO: 3078 - DNA, 1052 bp, Homo sapiens
ccccaaattcatatgttgaaatcagaacattattagccactagtgatttactaattaaaacaatgagaaattgctacgtacctatcagaatggccaacataaaagtgtgaccacatcaagtgctgtcaaggattcagagaaagctggatcactcatacattgctggtggggatgtaaaagattacagcccactctggagaatatctgtataatttttacttttaaaactctatgtgcaactaccataccacctcggaattacattccctgcatttatcacagagaaatagaatcttatgttcacacaaaacccatgtacttcaagtttatagcagccttgtttttaatagccaaaactggggaaacaatgtatacacgacttttgtgagatgaatggttaaactgtggtatatatccacagcatcaaatagtcctcagtaattttttttaaaaaaacaacaaatgattgatacccacaataacctggacgaatctccacagaattatggtgagtggacgaagggtaatcccaaaggttacatgtagaattccatttaagtaacattcttgaaatgaataaattataagagtggggaatagattagtagttgccaggggttaaggagggaaggaggagcagcactgaatagaaggggtcataactataaaaaggcaacatgatgaatcccggtgttgacggaaatgttctgtaccttgcttgtataaatgtcaatctcctggtactgtggcatttgcaatatttgcaaattttatttatttattcattcattcatttttctgagacggagtcttcctctgtcgcccagactggagtgcagtggcgcgatcttggctcactgcaacctccgtctcctgggttcgcaccattctcctgcctcagcctcctgagtagctgggactagaggtgcccaccaccatacccagctaattttttatatttttagtagagacggggtttcactgtgttagccaggatggtctcgatctcctgacctcatgatccacccacttcagcttcccaaagtgctggg

SEQ ID NO: 3079 - DNA, 1050 bp, Homo sapiens
ggttctgttactcccaaagctgagtgagggccctcttttttgttgttggtttttgttttgttttgttttgtttgagacagagtcttgctctgttgcccaggctggagtgcagtggcatgatctgggctcactgcaacctccgcctccggggtttaagctgttcgcctgcctcagcgtcccaagtagcagggactacaggcgtgcaccaccatgcccggctaatttttgtatttttagtagagacagggtttcaccaccttggccaggctggtcttgaactcttgacctcaagtgatccacctgccaaagtgctgggattataggcgtgcaccaccgtgtccggccgggccctggtttttgtacacacgtgcattgcagagctagagaaggtcatgacttgcccaagcacatatagcacatcagggcagaccctgggctcgaacccaggctttctgccaggactgggttaggcccagagttggggtgctgcacgatcaacaagctgggggatgctgggagttctgctgagtctctgggtgggggccagctctcccagcagctgagctggcgggagcagaagctggaggaggcccagggggttggcccagtggcaggtggaggcgctggagccagcagcccgcggggtatccggttccacaactacgcgccgcgcccccgcgcccgtgtgcgggattcacccagctgacactctcccggtcccagaaggtgcagcagccggcgggttttgagagtcccaggtgccctgcactgtgcaggagtgtggacgctgcccctccagggctgtgaccccgcctcagggccttttccctggcgcccgccatcagggctcttggctttgacaggcgatccacccttcggctcctcccaggagccataggaccctccctgcctgcccttcactcaagtcgaggggcctgatcagcaggctctttcctctcaggccctccactcagggtgtcaacagaggtggatcagatgagaaacctggatttctacacacacctggctacaatgagatggcaccactcc

SEQ ID NO: 3080 - DNA, 1035 bp, Homo sapiens
ctgcagattcctcagctgatgattggaggtggcaatgcccaccttctaagcctgttgccaggatgacatgggaaaagcgtgtaaggccgtggcacggtgcctggctgagtcaacagtaactgctgttcatcggtcatcaggcctgttagtctgagttctctgtggttttcagatgactctcttggccccagaatccgagccccacttccctgcaccgttccccatcgaatctctgaactcagggcttctttctgctcatctaacattaactaagcacctacttgggtcatggaaattaattttcctgtccatgtacacctgagccagacagaaccaggaagggaaatgctggtgggtttccaacccgggagatggtttttagatgatggctataccatttccattccctgtagtcgtttccattaatgctgatagttaatgcttgacaggtatgttcatgtcagtcattaaaggagatgctttatgtgtagctgtgcagctgtgggaagttgctgctgatctcctctgatcctccatttcatcatctgttaaacggggatgaggataaactacataggcatgttatgaagacaaaatgaggttatgtctaaaatacttagctgggtgcttgacgcatagtaagtgctgagtcagtaatagggtttttgtttgtttgtttgtttttgtttgtttgttttgagatggagtttcactcttgttgcccaggctggagtgcaatggcgcgattttggctcacctcaacctccgcctcccaggttcaagcgattctcctgcctcagccttccaagtagctgggattacaggcacgcgccaccatgcctggctaattttgtatttttagtagagacggggtttcaccatgttggtcaagctggtctcgaactctcgacctcaggtgatctgcccacttcggcctcccaaagtgctgggattacaggcatgagccaccgcgcccagcctgtttgattttttgagacagagtctcactcttgtcgcccaggttggagtgcagtg

SEQ ID NO: 3081 - DNA, 1094 bp, Homo sapiens
gggaggggcctttgtgcatctctgctcctacagctcagggctgggagtggcttacactgggggaatatgtgatccctgagcctgggtagtggctactttgtcagggtgctttgtgccaccttcgtccccttccagagctttctgtctgtgtggatgagtagggtaggaactggcatgaaaggtggaagagcaggtggtggcagcctgtgggcagccaggtgtgtaatgggcctctgttctgcctgagtcctgctggttaccaccacctcactccctgctattcttagcagctgagctcaggacagcactgactggcattagacagtacccttttccctctaggcctgtgtgttgagaggatgagggggccacccagacagatttttcccaactcctttggctcgggtaggtgggccatgtgctctgctgaccatttatggactggcgggtacaggacagagccatccagcagctcagagggctgagcctttcatacttccaggacatggcccattcaacacagactcccctggctgggtggtggcgagactggaatctgccccaaaggaaccacaggcctaggggcaagggttggactaggtggccttggtactgaccactttgggaaccagcatttctcccagccttcttcttccagacatcatcagcccagccacctttgagagcggacaggttatgtggtatgcagacagcacttgttattccctgggctcttcacagcatctctaacataagtcattattctgtttttacagatgaaggaattaagacttagagagggctactttttttttttttttttttttttgagacggagtcttgctctgtcacccagactagagtgcagtggtgcgatcatggctcactgcaacctccgcctcccaggttcaagcaattctcctgcctccgcctcccaagtagctggtattacaggcacatgccaccacgcccagctactttttgtatttttagtagagtcgcaatttcaccatgttggccaggctggtcttgaactactgacctcatgatctgcccgcctcagcctcccaaagtgctgggattacaggcgtgag

SEQ ID NO: 3082 - DNA, 1058 bp, Homo sapiens
tgttgcccaggctggagtgcagtggcatgatcttggctcactgcaacctctgcctcccgagttctagcaattctcctgcctcagcctcccgtgtagctgggattataggcacacaccaccacgcccagttaattttggtatttttagtacagatggggtttcgctgtgttggccaggctggtctcgaactcctagcctcaggtcatcctcccacctcgacgtcccaaagtgctgagattacaggcatgagccaccacacctgatcaatttttagttttttcaggaacctccaaactgttctcgatagtgattgcactattataatttacatttccactaacagcgtacaggggttccacaacctcgccagcatttgttgttgcctgtcttttggataaaagccattttaactggggtgagatgatatctcattgtagttttgatttgcatttctctgatgaccagtgacgttgaatacctttccatatgcctgtttgctatttgtatgtcttcttttgagaaatgtctgttcgtatcttttgcccatcttttgatggaactattagtatttttcctatatagttgtttgcgttctttatatattctggttattaatcccttgtcagatgggtagtttacaaatattttctcccatttgtgggctgtctcttcactttgttgatcgtttactttgctatgcagaagctttttaacttcatgtctgtttatcttataatgtatgtagttcagattatgctgtatagaaaactttaaaaaaatttgtcaccttcagttcttttcttaaaacatttttattgagctatgattaatatacaataaactacacacacttaaagtgtacaatttgataagtgttaacatatagataaaacccgtgaaaccatcagtaccatcaaggtaatggacatgtccctcacttccagaagtttgcatcctatttttattatcaaatgttatcccgtgagtatttttccacattatcaatgtatcttactgagcatctttagggccagggggtctgctgtggcccatacaag

SEQ ID NO: 3083 - DNA, 1033 bp, Homo sapiens
gccaagacaggtgagactgcggttctgacctacgggcctccatgaatatgcgcgagggcacctgggggccggcagagccgttcccctacgcaaagtaagcgtgttatgtctacaacccaacggggacactgagagccccaaaggccctgctttcttcctggagaacagcacccatctgcgtagtttctacctggctctatgaggtgagaacacactccccgctagcacagaaatcctacaaactcctgtgggggctgcgcttggaagcagaggctgtgtaagaggtgacttggggggtagggaaaaacaggaagattttcacacagggtgagaacccaagagactggagaccacggaccaatccctgcaaaaagcagccagggtagaaagggaagagctgagcggacttcacgatagctaatttgtgttacaaagccgatacggctgatgctcgctttttctcctatggcgtgcaggcgacatgttacttcctattcgccagccctccactgtaggattaacatttaagacgccaaccaagacacaaaccaaaacaaaaaaagatatgacccttagcgtacagtctacttttagaaactccagaaagtcaggggaaagcgcgaacgcagtcccccactaccacaaattatgcagtcgagtttcccacatttggggaaatcgcaggggtcagcacatccggagtgcaatggataagcctcgccctgggaaaaccaccttcgtgatcatggtatctcccctgccaggtaagtatgagatcttcgggctctgccccgacacagcctcatacgcctcactctttacacacacggtcacttgccccgcgcactcccgagccctttccagccctgacacacagctgggattctctcttccgatccgcggtcctgaacccgctcccagggcaggggaactccttcgtggcgaagcagcaagtggcgaagcagcagcctctgcgctgcctcatctacatagaagtcgccctgtccgtgatgtcaccgacagtgccttgccc

SEQ ID NO: 3084 - DNA, 1025 bp, Homo sapiens
atcgtttgagcctaggaggtggaggttgcagtgagccgagatcgcaccactgcactccagcctgggtgacagagtaagactccgtctcagaaaacaaaaaaaaagtagtaattgtgatcagtatgatttgtgggcacacgccctgagccctgccctccacaaactgtccacacatacttcatctgctcatctcttgtgaggcagacatggcaggattgtctgactcccttgcaggaatgtgcacacagtaggtgctcaatagtcccagcctgcaggcattcagtaagggagtgccactgtttgctaggcagcctgcccaggacttcacagggccatggcgagcatgcagtgcttttctcactccaactcatggaaatatttgccccctccatgtaaatatttctctcccctccccctcctccttccccctccccttccttaccccatcccctcccctcccctcctcttttgagacagagtttcactctgttgtccaggctggagtgcagtggcacgatctcggctcactgcaacctccgcctctctggttcaagttattaccctgccttagcctcccaagtagctgggattacagatgcccaccacaacacccggctaatttttgtattttagtagagacagggtttcaccatgttggccagcctggtcccgaactcctggcctcaagtgatctgcccacctcagcctcccaaagtgttgggattacaggcgtgagccaccgcatctggccccttgtaaatatttctgttggttggagttagaaaagcactccatgcatgttataaaataattccagcagaaagagaacgactcccccaccctgccccactgcacacatgatgcccacacatgctctgtctgacccacccccccccgctggttccagggagctggctgccacctgcttccaggagtgtctccctgtgcctttatatctccgtcctctctgagcctcagtgttcctctctgtaaaatggggctgtgatttcttgttcacacctggt

SEQ ID NO: 3085 - DNA, 1035 bp, Homo sapiens
gatcacttgaggtcagttgttcgagaccagcctggccaacgtgataaaaccccatctttactgaaaatacaaaaattagctgagtgtggtggctcacacctataatcccagctactcaggaggccaaggcaggagaatctcttgaacccgggaggtggaggtttcagtgagccaaggttgtgccactgtacttcagcctgggcaacagagcaagactccgtctcaaagaaaaaaagaaaagagaaaaaggggagtcctagtaagtgtgcccagtctgtcaccatcaagatagtgagggtcagcacagtggcctgcaagtcagagtaagcctgggatgagacttcagagctgctcttctcagactgcagctctgctcctcagtttctacctcccagagtcttgtgcatcccagagtccaggctgaaccgggccctctggcccagcgagtcctttgcattcctaggcaaggctggtgcgtagctagtgaacatctccctgatgtggtattattagggattgaagagttcccctgagcatgtttggttttctagatacaagttgagtattccttatcctaaatgcttgggtttcagtgtttggggtttcatatgttttcagattttggaatatttgccttacacttactagttgagcaccccaaatccgaaatctgaaatccatgctccagtgaacatttcctttgagcagcatattggtgctcaaaaagtttcagattttggaacattttggatttcagattttcagatttgggatgcccaacctgtaatagaaatttactcatttactcatttacataccaaacatttaacattttttggcttccttaaattagtatgctgaacttaataaataattggaaaatgtggagaaatttatgtatgtatttatttttaattgggcagcccccaaaccaaaataggttcagagaggctccatcattttttaaataagctataattttcagcctggggaacatagggcgaccctgtctctacaaaaactttaaaacttagc

SEQ ID NO: 3086 - DNA, 1045 bp, Homo sapiens
acggggtttcaccatgttggctgggctggtcttgaatccctgatctcaggtgatttcccaacctcagcctcccaaagtgctgggattacaggtgagaagagtatgtggagtctcagtattattttcttctttttgttttgttttgtttctttgaaacagcgtctcactctgtcacccaggctggagtgcagtggcgcaatcttggctcactgcaatctccgtctcccagggtcaagcgattctcctgcctctgcctcccgagtagctgggattacagacatgtgccaccacaccgggctaatttttgtatctttagtagagacggagtttcaccatgttggccaggctggtcttgaactcctgacctcaagtgattcgtctgtcttggcctcccaaagtactgggatacaggtgtgagccactgcacctggcctcagtattattttctataaatgcatatgaatctataattattaaaaaataaaaaggttggccaggcacggtggctcacgcctgtaatcctagcagtttgggaggccaaggcaggcagatcacctgaggttgggagtttgagactaccctgaccaacatagacaaaccacatctctactaaaaatacaaaattagccgggcctggtagcacatgcctgtaatcccagctactcgggagactgaggcaggagaattgcttgaaccggggaggcggaggttgtggtgagccaagattgcaccattgcactccagcctgggcaacaagagcaaaactcagtctcaaagataaataaataaataaatagtttaattttttaaaaaagcatttaactatggttatatgcagtaacatatgaatctcagaagcattatgttgagtgaaagaagctagacatgagactacgtaccgtatgatgccatttatatgaattctgtaaaaggcagactcgtgatgatagctgatcagttgctaagggtaggaaaaggggacttatgtttgccatcaagggcacaaaagacctttttggatggaaatactctgttgtaattgtgg

SEQ ID NO: 3087 - DNA, 1034 bp, Homo sapiens
atttgtccaaatcaccccaaaaccaccatctctgacgtaagcttccatgcgacagcctgatccgtttccctggacaggtctctttcctggaatgcagcccaggcacctgtgctcctggcacccttgaggtctctcctttgagccgtggtcaccgagagggttgaggacgcagcacccgaggtcccagcctttgcaggagcctccctgggcttagctggacttagatcttcggtggcctcatgtaaacgtggcagccagcctcttctagaaccctagcccagggactggagcaggaaagggaccttcaaagtgaagactgccttgtcccgcagctccttctggcttagattgaaaaatgggcttcctaatgggttaaatcctttaaaacaaggagttgtgggggaagggtgtcgtgcactcctagagaaaggtacacagttgcccggttgggaatgtgcttggcgctgaccctgcgggcatctgactggtcttccagctcaggaaaaagaatttgaaagaggcttagcgtgaaggggaatcaaagaggaggttgtgatttggtcgaaggtgcctggtttagtgctgtaattgtcttattattttttttatatatatatttcttggagtaaacattttaaataaacaacaacattgtctactgtcttggattttgcatttctttttcggttggaacggagctctgtttttcttaactccttatatgtgtacctcctaagccctggcacccacagaaggtggtgccaggagacatgtggccccaggggagcttccaggtttaaactgcactggttgaagtgagtggatcccccaactctgccccatgaaatgctaggggagtgggacagagtcagtacctcagttgtccaattcagaagtggagttctttgcattttcactggggctttgagaggaaaaaaataagtcatgggaggcatccagcgcggtgactgcatgtgcacccactccccagacttcagcagggggctctggtcaggccccggctgtggcttcag

SEQ ID NO: 3088 - DNA, 1787 bp, Homo sapiens
ggaggcaggtccgcaggtccacagagtagaggctgcgtggctgcaggagtcagatggcggggtgaggcccctgcggctcagtcagccagcctgctggccctgtctgccaagacacagagaggggtggtgcacctcacccaggcaggattgtgagccagagaggggggggatggaagtggagctggagccatgtccccacctgtccctgctgataagaggtggcccagtgggcttccttccagctgggtctcccagggcagcctggaaggctctgattggcagagcgttggtggcagtcacatggaaactagctgtcttgggcagaggggctttttgcagttttcaagggcactctgtttttctccatgctgacccgctttagcagcccagtttccagagtctcttcaacgcattgattagtccaggcgcctcaggcacacccaacgctgatttgtccccccaggtcgccatgggctactcacactccttggtgatagcaagagatgaaagtgagactgagaaagagaagatcaagaaactgccagaatacaacccccgaaccctctgatgctcccggagactcctccgactccacacctctcgcggcagctgtcatttccatgtgcactgggacgggaagtcaaacgaggaatttaaaaaagcaaaagttgaccgaaggtgcatttttgtttagactccctgaggttccgttttacacatgatccaacgttaactacctttttttctgtatgctttccaaagtccttttttttcccttaatgttgaattaaaatacttgctcatagttgatttaccattcctacaaaagaggcagaaactttgagcaatctaggttttttttttttttaagttttttctttcttcctctcctgaatacactccccaaaacacccctttccagttacaattagcatcgtgatccaagcagatgccacatggaagaggaatcgccatttactcagaaaaaatgtcccttacaggaaccggcagcagctaggcagtcaccggcccgcctccatccaaaatcacgctcgcgtgcttcggaagcatccgggtcactccttctccgctttttcttgcagatgggcctaggccggtgtcggttctgtttctccccttggctgcctgtacgcccacagccttctggctgcgacattatagaatcggccgtgtcccccctggtgggggattggggatctgtgtttagccatttatatctactttagctgttaaagaggtccaaatgaaaatcaggtgattgtggaaccatggggacttgggggtggggcagaggtgggaacatttgtatcagttgagtcagcttggtggctccctgtggagccagggctgagccttgtcacgcgcactcgccaattaagagatggaccagccagcagtcaagtgcattctccagtccttgcaagaaggatcagccctttctgtgccagcctcgatcgccttgtgctttggtctctttttctcccccccgcctggatcctgcctcgcgcgggccgtcctgttgctgagactcggggtaccgttctgctgacccagctccctttagtcacgtttgcttggctctggtaccaaatagttgggattaccgaagagtccccttccttgcgtgtcagcacggatgctgtgactgccacctgcgtcctcgtcaagtgcccgagctcgccgccgtgtgtgctgcgctgagtgagttatgaggtgcctttcccggaaccctcctctcgcctggacccaagagaggcgacagctgt

SEQ ID NO: 3089 - DNA, 1014 bp, Homo sapiens
tgtgcaggatgcacagcaaggtcccctgcctttggcccctaggcctgtctaagggctttgttgttttgttgaagcgttgagtggcctgcacggaacaatcttaggattgaggagaaacctgttggccctgttattgtgtttgctacttggaatgagtacgccaagggaaaagtggcagctcacactcatgcccttgagccatagctgcgtgggtgcaggtctggggctgctggccctgcagtgacagcctgcctgtttgcaggaagagcagcatcattgtggccgccgatgagagcaccatcagctggggtccgtcaccgacctttggggaactggtaagctgtcacctgtgcgggtcaggggaagtggaagccagtcagggtggctcatggcctttgggttctctccacctgtctcccaaaacacacagaagaaaaacatttgggattccccccttattgtattaaggtttgcaacacgattgagtcccatgagttttcaaggacaattctgtgctagtcagataattctgagtcatctctgcacatttgtaaactctgaaaattgggacttttcagatccggtttcccctcacattttgtaaaccacagttgggttatggtaggaaaagggcctgtttgttccctctcccctggaggcctaagtcagtgggaaactcacagttgtgggtgatttgaggacattcttcatttttccaaattgagtttaaacctgtgtttctgttgttaataccagttacttgagtgatgaggttagaactcatgaccctcaatttcacacacgtggccttccgcaaacaaatgtctttcattcttagatcctggtgctaggtgagtcttttttttttttttttttgagatggagtttctctgtcacccaggctggagtgcagtggcgcgatcttggctcactgcaccctctgtctcccaggttcaaatgattctcagttctcctgcttcagcctcctgagtagctgggactctaggcgtttgc

SEQ ID NO: 3090 - DNA, 1050 bp, Homo sapiens
gttcttctgtctgagaatgcctaggagtctctttgttctatgctttgttgaaaaagcctgggctaggattccagagatcaagttggtcctccccactgagtggtctcagctcaccacctccttcccttggaatcttcttgccgatgaagaatgcccagggaattgggctaggactagggtaggagatttcagtttgtgcaagtccaaaaactgatttgttttgtctgatgtagtcaggggaaataaagttggctcttgtttagggccttataggccaagttttttagtaagttgtagattcccatggtttagacatgaaacatcaaagaactgaattggcatgtcagaagatgggaaaacgagactgaagaagataaatcttaaacacttgaagtgtctctgagttcatttcatcagtgaccaggtacaggttacctctgtacctgtgggtgagggaagtctaaagaaaaatccaggccgggcgcagtggttcatgtttgtaatcagaggactttgggaggccaaggtgggcagatcatttgagaccagcctgagcaacatggtgagacccccatctctacaaaaaaaccacaaaaatcagctgggcatggtggtgcacacccaagtcctagcgacttgggaggctgaggtaggagaatcgcttgagcccaggaggtggaggttgtggtgagccgtgatcgtgccattgcattccagcctaggtaacagagcacgagaccctctcgagggggggaaaagaaacgaaaaatccaggaacaggtaggccttttctgttctttctgcaattgaatctgttttttttttgttgtgtttttttttttgtttcgttttgttttttttttttgagatggagtctcattccgtcacccaggctggagtgcagtgacgctatctcggctcactgcagcctccgcctcccaggttcaagagattctcctgtctcagcctcctgagtagctgggattacaggtgcacaccactgtgcccagctaatttttttgtattttagtagagatgggtttcaccatg

SEQ ID NO: 3091 - DNA, 1335 bp, Homo sapiens
ttccaggcgtggcccaccgtgcccaaccaaactgatgatcacagtgtgggaacaggagcagtttaaaactataaactacttagcagccctgctgctgcaggtggctgcaggagcttgggtgtctggcgtgttctcaggactggagcagccgggcttctggtgtgtggtgtgctgagctgggtctttgcgaaccagtccctgggtcattcggagtgtgggaattgcaggctttagccacccgtaaccatacgtttaggttactggtaattcataaaaacagaggcctgggattgtgtatggagcttttctgtctattcttggtcttttaggggctccttgtggtccctccagtggggtagagatcttacttgatagaccattccttgatcagcagcttcaacttttttgactgcaacccattgtaagaaataagttttcttttgcaacccaatctgaacgtataataccttacctggaattgttgtaacatggtgccattattatgtgtagagtattctttgtcattctgttctattcgtttttaaaaaataactggtcttagctcacaaaattgatttcactgacccactcactgtgctgtgcctaagattggaaatgctgcctttgttgaccaacgtgtgctggtctaaggcccagaagggccagattggggtgctgccggggctcactacagagtccgtgtgagcacactgacacgtcccttgtgcttgtgctgctgctgatggccggctctgtggtctctacaggacacaactcagatgggaagttcatcgcccgggcacagcggatagagtacgactgtgaactagttccccggcgagtggccatcttcattgagaagacgaaagatggacagattctgcctgtaccaaacgtggttgtacgagacgtggcctgtggcgctaaccacacggtgaggctcggcttttctcacttcctgagagtcgcaccaggatggaaggggtgtttatgctcaagtttcctgacgcttggctttggctaggaactgatcccaggtagacatctgcttgcttcttcaagagggctttgcaccttggccaaagggtccttggtcccagggcagggttccctgtcactgcctcctatgttaacttctcccgtgatttaaatagacacatcttaaacacgtagatgttttgccgccctcacctgcaccttaaggtaagcactttctgcttttggcttttatctaacataacatcacagacatctttccaggtcagtagatggtgccccatactggggatgtgagtcgtttttaatcagtaggttgtcccccccgccccccccccc

SEQ ID NO: 3092 - DNA, 1020 bp, Homo sapiens
aagttgctggaggcagccaggtgaaatgacatgaaaatcactcatctcattgggcagactgtttgccaggctgtctgctgcgtggcctttatacacaagcagggtcgcagacactgagttcgtccaaaaaaacaatccgtaggcccatcagggaaggctggattccgcctgggagggcacactgagcttcagacacccacacacccactggcacccccgccctgccccgccgccccgggtggagcccgcaagcgcgggagtctctcccacgattggctgtttctggtctctgaggaagaggagcaccccttaagtgagaaggggtgctgggagttctctgttactctatttaaatgttaattccacataaggcagaggaaagaagttatagagaaataaaagaaagcagcttagagcaaacaattatgtaaataataacgaaatacactaacctccatctaatgtgtgaggaaataggatccatgacgtaaaaacttgaataacagttaatgtccttcataggaatctgaccaccgtcactggagtagactcagtttaccggggtttttcacacatacacacgtatatatgtatatgtatacacacgtatgtatatgtgtgtgtgtgtgtatatatatgtgtgtgtgagtgtatatatatatttttttctttttctttttctttttctttttttaagatggagtctcgctctttcgcccagtctggagtgcagtggcgcgatctcggctcactgcaagccccgcctcccgggttcatgcccttctcctgtctcagcctcccgagtagccgggactacaggcgtgagccaccatgcccggcccacaaatacatttttattggcgtggttgggtttgcctataaatgcttagctagcttgatggatcagtcttcatgagcccttgaccaaatgtccaggtcacccaggaaactccctccccaaggccaaggccactgcggttaagctctggctgtctgaacttgcccctgaaccatgccctc

SEQ ID NO: 3093 - DNA, 1028 bp, Homo sapiens
acctggaccggttccacaccttcccacgcctggctggaggtaaggcctgcctcacctcctcctcccgtgtggccccagggacccctcccctggccattatgaaagaggagggaggtagaggggatccagccacaagtcaggtggatgaaccatttcaggcaccagcactgcccagtagaactttttgtgatgagggatgcgtccagtaccttcactctccaatatgcagccaccagccacacatggccatggagcccttgaagggtggcctgtgcgactgaggaactgcattatctagttttctttcattttaattaagttaaatcttagtagccagtcgtggctggtggctgccgtgtcgggcattgcagctgtaagcggaggcaagtgcaaatgcagagaccagaagtgggaatgaacttgtatttgaagaaacaaagcaaggcccatgagtagggagggaggagggctggtaggagaagacgggctgagacgtaggcagggctggaccttgttggcatattaaagttttcccacaaagaaacagtttcatggtcaaggaaatttggcatgtgtggtgttaaagcaaaatggactcctcccgtgcagaacttctcagagccttgaatgctctaatacgcatggcacatcttcaaggacaaggtctgccatgtagtgtttcccacacgcattgggccatggaaccccgtttctgcaaagacccccatggaccaagtgttttgtggagcacattttgggaatgtgctgaggcctagagggagggagagttgcagccagcacgtgaccagcagagctgggaccggtggtccagcatgtttctctgtggcgtgaattggggcccactggggagtctggaccctgttcctggactggtgggagttcggatgggggtgtcagggaaggtgagcgctcctcagggtcagctgtgtggctttctgctctcagagcctccttccctgcctccctgagggagagaggccgctggttaccactttccaacctggagc

SEQ ID NO: 3094 - DNA, 1014 bp, Homo sapiens
cccggtttaagtccaagcacatcaccccccaaggtgggaaacgaggtggaagggattgcagggcccaaacagagaagccttgggaggcttggcttgcgctcagcccctccaagaagggagccaagatctcataattctatcgccatcttgctcacttcccgagagcactctgtatgcccactgcagtgtttgaagccgcacacatgtgttctctggaacatcgcaccactccagcaaggtggctgtgggtatgtccattgtacagatgagaaaactttgagtcgtgccaggtgaaatgacttgttccttgtcaaagctagagagtggcagagtgggcatgtgacctcaggtctctttggcttccaagatcaccactgggttccaccactagagtctcgtgttgcacccagctttggaaagggaattctaaaagccaagataccctggaatcagactggagcagataaacctcatggcttttgggggggacttggagctttctcttgtcaggattcagagttgggtcactgctttgagcacgtgttgcgtatttgtatctgcatgtttaggtatttgcacgtgtacgtacaagttaaagaagggatttggatactggagggtctgtatcactggcaagtgattccagggaggccttgtgggcaggtgtaaagagtcatcccaggggacacctaggaccttctgctcttctttgccaggattaccctacttgatcatttattcttccatccgtctgtccgtccgtctgtccatccatccatccatccatccatccatccatccatccatccatccgtttgtccatcagtctgtccatccatccatccttttctgggccacggtgctcagtccctatgcttgggctttggggatgatgctgcatgaactgggagcttgcagaatctggggagcttgccaaggaactgttaaatcagggctggaagagtccttagagattggttagatattttctctcccttttgtcagagaggggca

SEQ ID NO: 3095 - DNA, 1125 bp, Homo sapiens
cactgtgactgtggaagttggagctagtgagaggaggaggaggtgggcagaggaaggagggtcccttgggctcgagctccacatcagccctgagctgctggcaagcacccctggcctgcagccagggagagccagagcctttgccaggcagcgagcctccgtgccttccactcctaggtcaggttttgacagcaccactttattactttgtttaagctgttagaaaatttcagaacatcagacacaccctattcaaatgtgagaacaaaaacaccttccagcagtgcctgcttctggaacaggactcctcctgcggaacagggttttgctcaatgactacctccccggtcatgctgctgtccagtgagcagccgggccagagcttgtcggaccgcagtgtgttctctgctagatgcggcagctgtgactcagggggaatgggggctgtatgcctgctcctgacacacctctgcccgttgtgctttgcaggtcttttatcagaaatcaccgatccagagagcttcctgaaggacctgttgaactcagtcccctgaccaccacacagcagctgcggcggcgaagacgaagctggcttgccttccaccctctgttctccctccttgtgcattaagttccctccgcgggatgctgcattgttaccccgccctcccctctctcatttttcttggtgtggcttggggtttttaggcttcctgttttatctcgtgtgtgtggtgcaccagctatgaggttgtctgtaacccaagccatcaaagggcctgtacatacctaggagccatgagttgtcccggccagcttcatacttgagtgtgcacatcttgagaaataaacaagtgacttaacacacattgaaaaggaaggtgttgcctgctgcttcaactcgtcctcagtggcgcaggccaaatggtttcccttgaatgcacagccatttccggcgtcagcccgggaagactcatgtcagacccgctgtctccaggcctgttgtcagcgctaagtgcaacctgtctattcttggccagcaagttggggcaccacattggatggctctgatttttcccaaaacaaagcccatgccttgctcttaattttttggccttaagagct

SEQ ID NO: 3096 - DNA, 1070 bp, Homo sapiens
ctttactaattggccttaaataattaagttgggcagggtcactcaggatttctgcttaccaaagcacaacagccacagcaaagggccaaatacggccgtggtccggggccgtgagcccggcactcatcaggcagactaggaaaggcactgtgggttagcccgatactgggaggagacccatgggggagagaccgcggctggaagggcgtgtagagatatcatcctgatgctggggcagcctcactggcggcaggctttgtcctaagtcctgtaagtcatggggtaaggggtagtagcagagacacagaaatgtagctcagcagaagctggcctcttctgcacacttgacattcagaaaaaaagttcctctgccaggaacttgcaagtacaaagcctgggacattctcaggcgtctgtcagaacttgatctgttatcttgtctgccagggtaaagagctgcagagaaatggattcttgtcctcatccacgggtccaccttccaggactttaggctgcagcatcatcacacgtatgcgggagagaaagtgggggcttgggaaggtactggggcagagggaggccacaggaagcatatttcagtagagagggaattgtccccatttaatattatttgttttttgcgagttatttattgaatgcaggtgtggatagcctgtctcatgctaggcagccccttcacttgaggcccatatagttttagcttctataatgaataccatctatgtttcttatttttatgattcttatatatacccatgcattttaatactaaacattttaatatatgtccctttagtcatgggatgtgttccagtgtgttttgaggtgtagaatactctgtgacaagggctcacctaggctttacttattacagatgtgatggctgttggcaaacaaaacctccgtagagcttgggtggtagaaactgaatcctgacactgatatttcactgtctgtgccgaggggagcctgatatttctgtgtttcatactggctctacctggtgtaatcattcctcaaacctcaaaccaagaattctgctgagaagg

SEQ ID NO: 3097 - DNA, 1024 bp, Homo sapiens
tttggaaaatataaaatttatgttgacaaataatagatttactcttctttttcaatgaattaacaaatatcttcagaatttctcagtgttttattttttattttttttttgagacagggtcccattctgtcacccaggctggagtgcagtggtatgatctcggctcactgcaaaccctgcctcctgggtgcaagcaatcctcctgcctcagcccccttagtagctgggactacaggcatatactaccgtgcccagctaatttttttgtattttgtatcgaaatggagtttcaccatattagccaggctggtctcgaactcctggactaaagcatcatctgtctgccttggcctcccaaagtgctgggattataggcgtgagtcaccgcgcccggccagttttagtttttaacatgagaaatggcaatagatacaaccatgtaaagcaaagctctctggagtccgtaataatttttgaagattgtaacagggttctgaggccaaacagcttgagacacgctggactggagtgtcatctgtggctctctctctgcaggctgcttctggttagtgacagtttgcattctggaggctgcttgtgaccctaggaaggtttttgcttaggaaactgcaaatcagccgtgggataggaattagtgtaagtgctataggattgtaggaagccagccacagcttctgctgcacaataaaaatgagtgaccttaagctcaatgtggagatgctgctgctaaattggatcaaaatggtttaacaggaacacatatttgggcataagagatacacgtgttgatcctcctgatcttcttgcctttgcacatcaccccctggggcaccagtgccatgctgttggggctatggctcaggtgtgcccttgagcgccctcaccttgctccacttgcctcctccaggatgtccccgttgaggccctcaccacggtgaagccatactgcaatgagatccatgcccaggctcaactgtggctcaagagagaccccaaggcatcc

SEQ ID NO: 3098 - DNA, 1024 bp, Homo sapiens
aataggtccagtgggattcttgtttccagagatggatcattatcacatagatgttcctctcctaatggttggtcaccgatagtaggaatttttatctgccacatttattaccttaaatagaaacttggctgggtgcagtggctcaagcctataatcccagtactttgggaggctaagatgggaggatcccctgagcccaggggttttagaccagcctgggcaagatggtgagaccccatctctacaaaatattttttaaaaaattaaatagaaacttcatcttgtggatgaagagtgggttacactgatgaatttttaaaaaggcagtacgagtcttgaactaataccatgttttgtgaactcttgtatttagtatatcaagctgtcttccattaaagtggacacgcggtacaccaccacccagcaggttgtgaagctcattggcagtcacaccatcagcaaagtgacagtgaaaatcggggatctgaaacggaccaagatggtgcggaccatcaacctgtattataacaaccgaaccgtgcaggccatcgtggagttgaaaaacaagtacgggctttttaggcctcgggaggggcagcaggttgtaaggctgaagctcagttgctgccttcggttcctggaatggagtaaggcagcacatccctagaggcctaatacatcctcttggcccctccattcatgaccaaaggacaaaagtgaaacaacagttctaagcatgttgacaaagattatttctaaattagcccagtggagccataggggtctgtggaagttcctcaacagcctgcctagggaggggaagctgagtgaggggacctccaggcttctcatgcccattttaactattcttacacaaaggtctagacttagataaaaccttctgtattgggaagtaattgtcatttcttggattaagacagctatgctcttgctcacagggcagaaagttatttctcaagaagcttctttagtacacacactcttcgatttccacatggtgcct

SEQ ID NO: 3099 - DNA, 1072 bp, Homo sapiens
gtcttgctcttttttcatgactctttggtggttttccataacttacaggccaaagagttctggaggacccagccacctgcttgactctagctttgtcacctataacaccctacacgcagccctgccagcctgcacatttcccaaggtgtggcgtgttgcctttgttcatgctgtcccttctggaattctttcctctccctctgctcccctttcttctcctgtctagcgaattcctagcccatcttcaagatccagcacgagctttggatccttgggaaaacttccctaacatatactccctgccatcaagtctgctcaagagagccttgtcctgggttcccggagcaccctgtgtgctccttcacctgtcttcccctctacactctcagcagaaaccatattttattcctgtttacaactccagtgcttgatacagaactgatgaataactgggagttgaatatgtgagacacgttgtgccctcaaactcttacagattctttttatgggaccacacagcttgcaggatagctgttgtttccactgtcctcacatctctcatttacctctgcctttttgtgttacatgaagccaggaatcttggctgagtttagtgatcttgcccaccttggtttatttaacaatttcttgttatcatgggaaattttggttctagggatagaatacatctcatagaagtcagagatccttactccctttttcttttttttttccaatttttttggcctttctagcactcatctttatgtaggcagagtacaatcaacccaatgtcaaaaaccatagagtgaaatattaggacttttaggaagtgaggtctgcctccactgtaacctttgcatgtaattaaattggccgcagaagcctgggccttctgggtttatagaataaactgtcagtcagtcttgattccagctctgaaaggcaccctttaccacctccaacatgtaatacgtctaatgagccaggctttttcctaattgtggtcatggaaaatcgatagtcacaggttctcatgcaaattttcttctcccagggtcatgctgctgat

SEQ ID NO: 3100 - DNA, 1529 bp, Homo sapiens
tttaggctgcacatggtccgtctaatgctgttggagagattactgcagaccctgcctcaattacgaaacgttggcggtgtccgggccatcccatacatgcaggtatctcttagctcacctggatctctgtcaggtcatgattggaccgtccttaagcatgcccacatctctcttccagaggacctggaagccttcgtttggtgttaggccacagaataatgaaatctaatttttgagctacaaattatagctcttcattttataaatgagaaagctaagggtcagagaattttttaaatgcacaagttcatccaggtagttattgacagagccagtgcaaaagcccacttctgagattctgagtctctagtctttatgttgatattagagtgtgggccaatagctgttcttccactcactagctgtcttcctcagaggcaaaactgttctttaattcttagtttggtgtaccaccctttctcaagctacttgcttggatataatataggttagtccattaattttacaaactttttacaaaacatttttttgtaatgtcaagtgtggcatatatcagaatttgacttttctgactctgaacactgaagctttggatacctggaatttagaacgctataatggattacagttatgattgatagggatgtcaggaagattaggatttcttctgaaacaccccgtatttcaagtcgttcttctttaggaaattgggttttgtgttttctgtctttgacttctaggtcattctaatgctcactacagatctggatggagaagatgagaaagacaagggggccctagacaacctgctctcccagcttattgctgagttgggtatggataaaaaggtaaaatctgagaggcagactgtgtgagaaacaggattggctgagatcctttctcaggttcccattcgtttcatagaggaacttcacctcgtttcaaggggtaaccatccactgagggctgcattctgttgagtcaacaaaagcgtattcagggcctgctttggcccgagcatagttttggaccctgagcatagttgagggcaaagatgaagttcttaccctcatggcccttttgtgctcagtgaggtgagaacattaaattagttgttcgtatcttaatatggcctcttaagtgtatcgggctctaggtaccccaagtatagtccatggatatactgggggttgttttgtgtctgattcaatctgaggaacattttagggctgatgggcttgacttgaagggatcttgttcagaggatgcctcaagcatcgagtaagtagaggtttctggacttacgctttggcctgcaggatgtctccaagaagaatgagcgcagcgccctgaatgaagtccatctggtagtaatgagactcctgagtgtcttcatgtcccgcaccaaatctggatccaagtcttccatatgtgaggtatttttgctttgggttcatgggtttggggaaaggtaagcggattgtctgggtagtgctagggccagcaca

SEQ ID NO: 3101 - DNA, 1048 bp, Homo sapiens
gcacccagctcttcctctctggacgcaggaaccctctctgacaccacagcatcaggtaactgtccacagcaaggagcacggctcagggccccaggaccctcaggccttgtttccactgctgtgagagtgtaatgggcagctgctttgacaggccattctggacttcctgcttctgccttggctttagaaagatgggtgtggagggtgtagtgctgtggctcggccccgccgcgcacagctccgcttcctcacactttgcatgctgcctggcttcagctacttccccacggaaaagccgagagagcggcatgcaggctgatcagctacagggcttccacttcagcttccagcgttctttgtcagagttctaacattttagacagtattaaaagagagacaagaaatagaactcataccttttaccttttttatcttcatttgcaaataaaaggagagctataagaagctagattatacttcagaattcttgttcagtgtgaccaaccatcaggatctgtgagcttgagagagagggtttttatggacaattaaaatctatagcaaatctccagaactcatcttctctttattttcaatcttttccctaatctgattaaaaaaaaaaaaatgtttcctgaatagagagttggaccaaatggagatacctggtcaacccctgagtaatttaagggttgatttatagttttttagactgatgcttccttgtgtttgttttttttcttttcttttggaagttttagcctgggtagttaagaaagggagagagcggctggccccacctgctgccatggcttgttgcttttcttaggtctctttagttgctgtcatttcaggctctgaggttgctgttgtgttgtgccagtcgtgttcccgctgtgctctgtggctgtcttggctttcctcccccatgtatctcatccagcattttcctcctgtctcagctcagccctgatcctggatgctgtggctgtctctggggaatttccttgcttcattattagcatctgatgaggatgattaggaggtg

SEQ ID NO: 3102 - DNA, 1033 bp, Homo sapiens
ctctaacttcttacactattgaaaattcagatggaagagtaaagggtctgaatagcaatatagaaaagtaggatgatcctggtgctcattcatgtttggaggacatttgggtggtaaacctaaaaggcaagtcaaggtcatgttttgtcatcacctgaggttgggggatattagggaacatttagtatctgccttcctcttcatatttccttgccttgtcttttgatatccagagagagtggacagctacttatttctgtgactcaagatatctggaaagacttttgaggacaatttgggagtttaggaaactgttaatgaaacaaatcataaataatacaggctactgtgtgtgaatgagtgtgtatgtgagtgtttgtcattttgtttgcatgaccttttacatggagataaaaggttacacttttgtctcagactctcaagtagttagagttttttcctccagattttcaaataatgtttgtctctcctttaggactaactcatattgaagctactgtcaatgctctggtggacatcatccatggctactgtacctgtgagctggattgtattaacacagcatccaagatctacatgcagatgctcttgtgtcctgtacgtagcattacaatcccagagagctcgcagcagccagggaatatctggaaaattgtttttagcttgctaagctaatgaaataaaatatatttagaggaagctgaagggaatgaagtttcaaatatcaataaaagctttaagatcttactccatggaagagaaagatttggaaaggggatgggctcagtctttcttattcagtgctgaatcaccagggacagcctactgcttgctacatagtaagtgctaggtaactcggtgaattgtgacttaaatgagcacatgaatgaaagtagtacatcaagatttctatttccagtgaccctttcacagaagctaagtgttaaaactactgattttagcacagagctaagacgtgcgctgggggcttgatcatctgataaaaagccag

SEQ ID NO: 3103 - DNA, 1036 bp, Homo sapiens
cctgaggtgttccagaggctagtgatcacagctcgctccattgccatcatgcgccccaacaaccttgtccactttacggagtcaaagctgccccagatggaaacaggtgaacttggcctctgtggccgtggtcctgagatctgcttcatatgcctatttaccctctcattcttactgttcttactggcctctgactgactgcatgctcagagacagggattttgcttcctggtctttataccttgtagggccttttgacattgagattgtacaattttaaacacattctttttccagtgcttatactttcgattatccttgagtttatttagtgttctagacatcagatataatctgtctctgaagttattacctcttaggagcttcaggggaaagctaagcttggttgggccctggttgctttaaagcaactatggcatatctttcgctttcatgccattcttttgccagtgctattattaataatgtgtagcaactttctcagtgctcagtgctgtttcctcatctcctcttctgttggctgggtagcaaacctgttttgtcattgtcaaattgagttgattgctgcctttacaattctgtgttatttacatgctcccatatgcatcatcattctgttcctccttttaatactacaatcccagaattgttctagagagatctctagaatgttcagatgttcctctacgttttagaagttgaacagttggaactgagatctttgaatctgcggtaaacatcctaaatgctccccgttctacttaattctaacatacaatgttttctgcgatattcctttcccagactgtttttttcctagatgtgcctgctggagtctagggatagttggcatattgattggggccccacttgaaactccctccccaggcaagcttccttgacctgagttaaccttaaaacaaattaaattccatctcagatttaccatcgttgataattttctttctcctgcttagaaggaatggatgaagggaaggaaccgcagaagcagttg

SEQ ID NO: 3104 - DNA, 1088 bp, Homo sapiens
cctggtgcagactctgtcctcattgtgactgcgaaattgggagccactggcctgtggctgtccaacattctgggatctctccactctgctgatttttctgtcctttcatcaggaaactttgagcttcatttgatgtattaaagaggcaaggtgacaggaaaggagtacaccggagcatggtagcagtaaagatagggctgcactgtgttgagtattcatttcaatagtgttgtgtccacctcactaatggggctacttctgtgtttaggccgagaggaggcagattgacatgaaattgcaaggctttcttaacgcacagaggaagacctcaggtcacacatggctgagagatggttggcaatggcttgctatgccactgaaaactaaactctcagaatacaaatccttgagccttactcaagactgcatttctctgtcatttattggccactgtctgatattctttcttctagatatagttgctgttagtgtgaatgatcatgatctgtactttgaacaaagaaagtgtgtagagacccctgggagtgaggggtaggggatacaatactctgaagcagaagaggacccttgcagtgatggttagggactcttctgagtaggagacgtaatcggcttttggtccatggaacttttaccacatgtattcagcatatatacacgattaaagtgctgcaaatatctcagaagataaagtttctctatgtctataaaattgacgtgatttacttctttgctccaactgttctggtctttgctttggaggggtggctttttagagaatgtgcttcctaaaggcctctcttgcttattgcagttggggcctcggtggatccagcaggtgtcaccatgatagatgctgtaaaaatttatggcaagactaaggagcagtttggctggcctgatgagcccccagaagaattcccttctgcctctgtcagcaacatctgcccttcaaatctgaaccagagcaacggcactggagatagcgactcagctgcccccactacgaccagtggaactgtcctggagaggtaccagtgctggcaggggttggcttcagtttttac

SEQ ID NO: 3105 - DNA, 1093 bp, Homo sapiens
tggtcctagaatttttctacttttaaatccagaatcactatgtgctagcttctcccaggagttaaaaaaatcagctgggtgccatgactttcacctgtagtaccagctacttggaaggctgaggtggagaattacttgaggcttagttcaagggtgcagtgagctgtgatcatgccacgccactccactccaatctgggtgatagagcaagaccctgtctctaaaaatgataacaagccatattttgtcacttttgctatgttgctgagtaggagctttctgtctttaggcaatagggaattgattctggttctaccctcactgtaccaagtgcacacctattaccatacttgtttcagaatttatttatgtatgtctgtcccctactcattccttgaaggagagtgaaaggtgttctgttcatctttataagaccagtgcctaacactccatttttttactgaatggagaatgaatgcctgttattggtcagttccggctatttggattcactaagatatttgggggatgggactgagatagatttcccttatttaatttttcttccatcctgcagatttatgacctgtgtgttgatgccttgagtccaaccttctattttctcctgccaagctcaaagataagagatgttaccttccttttcaatgaggagggaaagaacatcattgttataatgtcttcggctgggtacatctatactcagcttatggaagaggccagcagtgcccagcagggacccttctatgtcactaatgtgttggaaatcaatcatgaggacctgaaggttagagcacatgttgctatttccttctattccggatttaattatttagcaactcctctattcttttttctttgttcttttataacatttttctgtggacttcatctaactggatctttttttctttttctttgtttttccatctaactttctacctaatagcaaactctcttatcctttagggctaaattaattcaacttcaagttccatttttctcagggtctttgtaagatttacccacagggatctcatgcttagagtatgagagcacctgatcatgattgaaa

SEQ ID NO: 3106 - DNA, 1020 bp, Homo sapiens
cctatagagaaagcataagatgttttttcttaaccacaaacccctaagatctcactcacctgaagtaacaacagattttcagccagctagctatttccagttgtggtagatttccacgggtcatttgcgagtcaactattcaccccgccatagggcgttgaggcacatgtgtttttgtgggtgtttatatgcagggatatatttcgaattaaaaagacttattatttttgaaggatgaagattctctttgcaataaactctgcacttttacgatcacacagaaagaattcatgaaccagcattggtaagggtagttcttcctttaaggtgaagatttgctgggcaccgattgttgggacttctgagcttatttgctggttcttgttctttgtaggtaccactgtcacacctgtaaaatggtggatggcgtgggtgtctgcacagtgtgtgctaaggtgtgccacaaggatcatgagatttcctatgccaagtatggatccttcttctgtgactgtggagccaaggaagatggcagctgtttggtgagaggaccctccctgagctataaagggtggcttgttagtgacacgggattactgaagccaaactggaaaattcccatcacctccaggatacctgagtctaggaatatgttccagctcactcatcgatgatctgcacagttgtggcctaaggacttcatttagaatatcagaaccagcagattccttagagatcttgtagttcgtttttcctaagacctccccacaatttcacacgttataataaggcctgatactgtgagtgggtaaagaagttagatattaggtgaatactatgaagatcagaatttaggcttttggataacattgaaacgcttagccagtttcttctttgggtcaaattttcctcggagatctcaggcagtatttcctctgtgcttgaggcaagaacttagggactctgacattttctgtccctaggctctggtgaagagaactcctagcagtggcatgagct

SEQ ID NO: 3107 - DNA, 1614 bp, Homo sapiens
tacatcgcccccaaaagattctgatcagctggatgtaattcaggagaaccggcagctgctgcagttactgaccacatacattgttcgggaaaacaggtagaacaactacatttctgtcgtgtttccctagcaaccccagaaacacgttgatatttgcagttatctttccttcgggcaccagtcttagcattctcagcatttttgtatctacctctctctagactcaaggattctagtgtagctccttgatttttttcccatggaaaaacttttggaatgacttggcctgtcagttacaacctgaatgaatgttttatgctctactagcccaagtccaaagctgggattggtattgtagttatgtatttaatgtttaatttaaaacttcctttataacacacagaatgagattcctgttgattattcaccaacttgctctttcttttctcctagccaagttggggaaggtgtgtgtgctgttcttctgggcaccctgactcccatggcaacagagatgctggccaacggtgatgggactggcttccctgaacttatggttgtgatggccactctggccagtgcaggtcaaggtgctggtcaccttcagcttcataatgctgctgtggattggctgagcagatggtaagatgatgaagttgtatctgtaggttacaacattgatcttgagaagtgggttactttctttatagctcaaagtgagtacagaagaaatttgaatctctaccctttcattggagtttgggagttgggtgggtagcaaatagctctgttcactttagacttcatcttcatcattttcttagtagagtttcctgttcattgttcccaagataattcttggggaaagtatgccaagtgttaatgataattctaaggccagagcaccccaagctatgtaactatatagtacttatggagttttctaagaatgcttctgcttcacagtgtcctcagattgattcaaagttaatgaagatgcctcatttcgttggtttcttcgatgattttgtgtctcctctttcccctcttttttttctttgggacagcaagaaatacctgtcacagaagaatgtagttgaaaaactgaatgccaatgtaatgcatggaaaggtaagaaaagtgaggaatgacaatggggggtgaagggaaaggtgattctcacctctgtggtcaggtggaagtctctcgttcctattgagttctgtgcctggctagcctaccaaggataaggctgataatctcaaagactggaaatatgtagttgctaactgtgtgcctttaggcatgttttggctggcaagaagtgatgggaaggaaatatactggtaaataagcagacagaatctttcttaaaacatagagttcctgccatcctaagatattggaatgttatgggaaactgtctccctgctcaggctttggaactgtgccactctgagtcagtgttataaaaggccaaatacagcctcctcagctctagtccagatgctaagctttgtttaatttgcctgaaggttctggttactctggtaagaaaagcggtttgaaactgacagaaatcctgcattcaggcattttctcctcctgcccaac

SEQ ID NO: 3108 - DNA, 1035 bp, Homo sapiens
ttttgctttcaacatgaaaccacttaggggcacttgcagtgttttttggagaaattttaaagaatttttttccttgggggaagctcagattaatcatctaaatccactttagatggacctgtatttgccatttttgtttacatggttagaagtcttcaaagcagtttgttttcctaaaaggctttgctttctgttccccattgtaggatcaaatagctctaatgctggatttgagaaagcataaaccttcttgagtgccaaagacccgctatatttttcctggtggaatcttgcaaaaaggctgagagggtcgaggggtgcaatgagggaaacccttgttaaacacacaaatctctttcctaatattaaaacacaaatctctttccaaatagccaaaggcaatggaaacagttggctacattcattccttttttgcattaaagctcttctgacaaattctctgaatagtatattttcttttttattgctttatagtctatcgagttatttttgactattatcatgcagtgatttttaacctgtagtataaactctcaaaactagaattaaatgatagaatcaaaatatggggaaaagtaattgaactggttcacctgtccaagtttgttaatcagaaaggaacaatagcaacatttttgtgggggagcttgtagtacttttcatggccacaaatgacagggtgggcattaacacgcctgtgttaaggcttgcctcaagcaatcctcccctcgacctcccaaagtgttaggattatagactgagccactgtgcctggctggccaagtctgactttttttagccaaaatttagtttctgtcttgtctttaccatgtagcctttttttcttccttaatttgttatcttactgcctgggtttaggaaatttaactcttctagtgcttgacattataactcctggggaatgctctttttcccaccagatatagtcatcttttctctctggtaggtttttgtctacaatgaagcagaatgccctgcaaggtgtggtgccca

SEQ ID NO: 3109 - DNA, 1047 bp, Homo sapiens
gtggtggtgcatgcctgtaatccccgctactctggaggctgaggcaggagaatcgcttgagcctgggaggtggaggtttcagtgagccgggatcacgccatcgtactccagcctggacaacaagagtgaaactccgtcttaaaaaaaaaaaagtgatctgatgtggagctgggcatgctgcttttgattcggaggagggatggcttctgagaaggtgacatttgatccaaatgaaaagagggagtcagctccatgtgaaggtcaaggaaagtacgatggaatgtatcattgaaaagaggatattgaactcttcaagttaaattgtttgggtaggatttagcatttatgatgaaatctgtcagcttgttcagatttttgtgtctgtttgatattgtacagctcgaaatctatgacatgattggacaagcaatcagcagttctcgccgggctggtggtgaggtaagaagcgtatctgtctctgctgcatacttcctatcttgtcctctctgagatgtaaatatctctatgattatgttttttattttgtgcctttcacaacagcactatcagaatttccaattgctgggtgcttggtgcttgttaaacagccttttcctcatactgaacctcagtcctactgcgttggctgataaggggaaagagaaggacccactggctgccctccgagtcagagacatcctttctcgtactaaagagggagtgggctcccctaaactggggcctggaaaagggtatgtgtctacttgattataacttatattttgttttatttcgctaacattttatatttacagggagctagtatgacttcatatcaataggaaaatttgccttcctacctggcttgaatttagcaactaagataatgatcatgacctgttatctccacagcatagctttgtgatttttagataagtcactcattctctttgattctatttcctcatctgtcaaaggggaaaaatatctgtgcaatgtgtatttcaggaattttatgaagttcacatcagaaaaacatgtttctgt

SEQ ID NO: 3110 - DNA, 2100 bp, Homo sapiens
tagcctaggggactattcacctacagccaagaacttattttccacaaagagggcaaagactagagaacccccacagttgttgagctggagtcccagctcttcaggtctatccctaggatttgcagtcttttcttgttggtggagcctgacagtttgctcattttaggagtcgggaatgagttctctgtatgtcttcaatcccatttttgggaagtggagtcaggtagctcccccagtgctgaagcgccccatcttgcagtccttgcttctcccagtcatggatcaagactacgccaaggtgttgctgttgatagatgatgaatacaaggtactgtcttcagaggggatggagaacatgctagcggagtccggtttggggccaggtggtcaaacacagcggcccggagatggagtgctctctgcacccagcacgtgtttgggctctaaggccatcccgaagagaaatgatggctgtgtctgcatttgtgaaaactcaggttcttaacagaactgaatgtaaaccctaaactgagttcaaatcaactgatttgcagttttattcttaaggctctctttgatggggaaatttcctaactctttccttgggctctctgggtttttcaaggtcacagcttttccagccactcggaatgtcttgcgacagctacatgagcttgccccttccatcttcttctatttggtggatgcagagcagggacggctgtgtggatatcggcttcgaaaggtaggaaggcatgtcctggcacaaccctttgtggatgagatgcaggtgtttcctggccatttggctaagaagtgaattatgctactcattctactgtaaacttagattagcataatcctgatgtctgatacaaagtcaatcatttgttcatatttgttgggcagctactacatggcagatacggttctaggtgctgtggatggagtggtgcacagtagaacaaatctctgcccttgtggagctttcattccacattctttttctttttttttttgagatggagtcttgcactgtcgcccgggctggagtgcagtggtgcgatctcggctcactgcaacctctgcctccttggttcaagcgattctcctgcctcagacacccaagtagctgggattacaggcgtgcgccaccgcgcccggctaattttttgtatttttagtagagacagggctttgctgtgttggccaggatggtctcaaactcctgaccttgtgatccacctgcctcagcctcccaaagtgctgggattacaggcgtgagccaccgcgcctggccccattatttttctatagcagagagatgggactttttttccattcttgggagggtagaaggtaggaatgtgggttgagtaataagttgtacttttatatgaagatgatgttgaccaactcgtgatggaatgtgtgctttgaattttatttctagaaagggggtcagtttgctttaatcctcacatacttgagaccaactcttgtaaacagtaatacacgctggctgtgaagtccagctctgaagttcacgaggggctggcatggccttgttagcaggactgtttggagaagtactctgtggtgtgtactcacaaacagctctcccatcctgtcctgtaaggccttttgagaggcatagagtttaaccaatttgctagattggaagtctaggtttgtcacttactaactttgtgaccttgggctctggtcttctgttttcttatctgtaaaataaggtgataagtacctgtctcataaggttgttgtgagaattcaacacataaatcacataaaactgcctggcacatggtaaatgccatctgagttggaggtgctgttgttttgaaaatgcagcgcccttttgtgacatttgtaacagctaaccttagcataaacagcactggaaatggtctgcccagaagacacatcctttacccttgtgaatgaaaacataaataaataaaatcatccttctgagttaataaaaagaggaccttgaaagagacagttttgtagattcaggggagtgaactggagtgtgggtgtcatgaatctggagtcctgaggacatcatctgagtga

SEQ ID NO: 3111 - DNA, 1032 bp, Homo sapiens
catgtacctccttatggacccctagtctgatgtagagtatgttacttttcctttacaccagatggcttgctggggatgttcctgaaacgcctctcgtctcagcttatcctgctgcaagcatggacttcccacctctggaaaatgttttatgatgctcggaagccccggagtcagattaagaatgagatcaacattgacaccctggccagagatgaattcaacctccagaagatgatggtgatggtaacagcctcaggcaaggtgagtggggtttaagctccagttactgaaccttttcaaattctgagggtgaggaacaaaaagccttcagtgagggataacactggttctagttttcaaggacagactcagttctttggtttctctttctagtagtgagccaagtatttgtttatcttgcagctttttggcattgagagcagctctggcaccatcctgtggaaacagtatctacccaatgtcaagccagactcctcctttaaactgatggtccagagaactactgctcatttcccccatcccccacagtgcaccctgctggtgaaggacaaggtgaggcatccagctctgacttgagccagactcagtgtggcttttttgctattttgtaacttaaattgctcctaggcccttggaattgtgtgagttaatgaggaacattcaggggttagaactctgtttcttctagtttcatgcatgggtggaggaaccatccagcactgatgtggaattgtttagaaagtgggtgtgacttcaccagctatgtagggagccagctctcctcttttctaaacattggctgttggttgctgagtggctattttctcttctctctttgaggaagagcaggacacaaagatatttttgtgtcttcccagaattagaatggatttttgtgtattcattctagcatagaaggcgggcttggtagacactttcctggaacggctgcctggtgcgatctcggctcactgcagcctccacctcccaggttcaagcaattcttgtgcc

SEQ ID NO: 3112 - DNA, 1060 bp, Homo sapiens
ttctggcctggcatggtgtctcacgcctgtaatccctgcactttgggagcctgaggtgggtagatcacttgagctcaggagttcaagaccagcctgggcaaccccatctctacaaaaagtacaaaaaattagccaggcatggtggtgcgtgcttgtgatcccagctacttgggaggctgaggtgggaggatcacctgagcctcgggaggtagaggctgcagtgagccgtgatcgcaccactgcactgcagcctgggtgacagagtgagacgctgtctaaaaaaaaacacaacaaagaaaatgctatgaggcgggttatgaaatatccatgagcaacactggctggatgggagctgcagtgctcctggcctgcctggagggggcagccttacccacctgattggtgctctgtatttaggcctagtgttgccacatcttctaaccgtaggaaaatttagaaatctgattgtgaagtataatatcttctaaatgttgacaactaattcaaattaagaacaacaacaacaaaagcccccaaactgtgtgagccaaacaaaacctatttgggaattactagtttgtgacatctggctgaggcctggcagcccctgaggataatcctgtcctgggttgaaagctgacgctgcggtttcttcttccctctcttagtgacagcatccactaccagatggtgtattcttacggctctggggtggtgtgggccctcggagttgttcccttcagccatgtgaacattgtcaagtttaatgtggaagatggagagattgttcagcaggtacaggagggtgacaggagcctgtgaataaggtggggttgggggagacttgatagatttctttgtactggggaacagggaacttggctgggcagatgcaaaagctacttatgctccctcattctggtcacttgccagctgccttcccattaggcctctatttaaagtactcatatttgcatgtgttatcttctggggtggctaaaaaattacatagatctagtctctgcctgtaagtatcttacagtgctgtgaaatcacagta

SEQ ID NO: 3113 - DNA, 1012 bp, Homo sapiens
ttgccctggtggagaaggccctgcaggccgcgtatggcgccagcgcccccagcatgacctcggccaccctccggtggatgtaccaccactcacagctgcaggtaaccagtgaccctgtgcgctcagcttcttcccttccaggggaaccagcaatatctttagatgaaggctgaaacatttgtttatcgattcctctgaaatttctctttctttcaactctcacaaacattcttcccactggtctttttctatgttttttttttggggggacagagtctcactctgtcacccaggctggagtgcagtggcatgatctcgggtcactgcaacttctgcctcttgggccgaagcaactctcttgtctcagcctccccagtagctgggattacaggcgtgcgccaccatgcccagctaattgtttgtatttgtagtagagacagggtttcaccatgttgcccaggctggtctcaaattcctgaactcagacaattcgccctcctcagcctctgaaagtgctgggattataggcgtgagcccctgcgctcggccttctcattggtctttgatggtatctgagtgccaggctttgtaatgagagcttcattgcagggatttcattattccttcagctttatgaaatgactatcccagtgttattgacgaggaaactgagtttcacccagctatgaaaggggcagacattttaacacaggtttaactgtaaagcccactagtctcatccttttggtgggagctggagtttccctctctcagtgcctcatgtcttcctcacttatatccaactccagccttagatgttgcaatagtgtctggcatatatacagtaggtgctcaataaatgggagctaagtgctctacataatttttcacacccataaccatgttgaaaatagaaaagaggattgaatctcagagaggtttaataacttagccgcgtttacacagctgctggggggcagaactgggctgtgaatgtaggtctgtctggaag

SEQ ID NO: 3114 - DNA, 2035 bp, Homo sapiens
tggggcggggagcttcttcctgtactatgtaaacatcgcacctgtttcaaccaatctttgagccctatgtaaatcagacactgcctcctcatgcctgtccttgtgcatgctgctgcaggctggaagacccactcaggtgcccctctctctgcaggagagagagctattctctttttcttttgcctattaaacctctgctcttaacctcacttcacatgtgttcgtgtccttgacttccttggcatgacgcagtgaaccttgggtattaccccagatgaacgacactgcttcattccttggcatgaggcaatgatccttgggtcttaccccagatgaacgacactgcttcattttggggccccaggtgggatcaaggtatcatcatcagaacagtgaggacaggagtggacctcaaccatgtcctttcatttcaaggttcttggcctccattttaaaatcaaatcaaatactgggcccccttcagctatttaaaaatgattagtgtggctggcagccttacaagacttgggggacaggcttgctggggagaacattctgaagcagtgggaatttttacagttcaaggaagtaatcctgttaggcaagatcaggaaataccgtagtaactgaggtagagctcaaggcaatgccatttttgtgattttctaggaacagtgggtcttcccctcctctccccatagtgaggtctctctctgcccttggtctggagagcacatggcatttaaaggtcaacggccctacccagtggcataggaatcctctccatgaggcacattgtcagccctttgccaaaacactctggcttcccaattctcctccctttttgcacccctctgctggacaccaggctttatgctacttccataaatgggaaaactctgtcttcaacaataaggaggaaaatgtcctccaaaaccaaattttagtctcaatactgtcccatcagcaggaaaatagccatttggttcctatgttttttttaaggcacctattctgcttgtaattaaaatagtacttaaatagtaagggtaatttaagtccggaagttaactggaaccattctctaagggtactttagcacgagtcataatagcaggatatagagctcaaaccagcacacttcctccattatggagggaaatacaacagttgcctaaatgcaactgttacatagtctctcccaagatccatttttcagggagccacacaggtcacacaagtcttggaagtcaaaaggaaatcataagtgcaggactagagtcacatgggtaagcatgactaaccccaatcacttagttcctctggttccatggctgggggtcacacctgcaaccatgggaggcatgtttaacaagatgctgggacccaggaaccaaggagggaaaacagtaggggtggcgccctcactgtcttccccttcccctcctctggagtgcgttctgaagcactgggactcctttgactctgagatttggaagaaaaaacagctcattttcttttgcacaagagcatggccttcttactagacctttgcaagcattgcacaatggactcagctctttcagcagtcatatcagacaggcccaaagggaatgattccccaaaactagagaaacaaactcccaggaacccctcaaatgaaacttccagatgccctggcccttcctccctccctttcacattgtcagcttctccaattctaccacccaaacccccagacttttctatggtatttttccttccttcattcatgatttaaaatggctcctatctcttcttctataatgttcctccaaactgggagaagttaatttcctcaaaccttaaaatgcttggcttagggttgagctcggggaacagaacccagaagcctgacatgctgtcaaaagggtaaaaatttttatttttatttttatttatttattttttttgagacagagtctcgctctgttgtccaggctggaatgcagtggtgcaatctcaactcactgcagcctctgcctccctggttcaa

SEQ ID NO: 3115 - DNA, 1049 bp, Homo sapiens
ggagttcaagaccagcctggccaacatggtgaaactccatctctactaaaaatacaaaaattagccaggcgtggtggcacacacctgtaatcccaactacttgggaggctgaggcaggagaagcgcttgaacctgggaggcggaggttgctgtgagccgaaatcttgccgcagcactccagcctgggtgacagagtgagactctgtctcaaaaaaaagaaaaaaagaaatatatgtccttattaaaaattacgtgaatgttatagcagcattattcataatagccagaaagtggaaactgcccaaatgtcaatcttaataggtgaatggataaacaaaatatctgtatgtacaatggaacatttttcaaaaaaaaaaaggaattaagtatgaaacatctacaatgtggatgaaccttaaaaacatgttaagtgaaagaagccagtcacaaaaggcctcatattgtatgattccatttatatgaagtatctggaataagcaaatctattagacacagaaagtagatgagtggttgcctaggactgagagggagtttgggaggaaatggagattcactgctactgagtacagagtttcttttggggaggtgataaaaatgctctgaaattgactgtggtggttgtacaattcagaatacactaaacaccattaaattatacactttaagtgggtcagttgtatatagtgcctcaataatatgtaataaaacaatcaattagctcagaaatctgttagagcagggctcagcagggaagcctcatctgttcctcagtgtctcagaggtgatctagcagctggaggctagggttgcctgaagacattcactcaagcatgtggcagttgctgctgagggccagctggaatatcagctgctgtcatcaaccggcacacacgtgacctctgcatgtggcttccaagggagcacatcccaggcaaactaggcagaagccatgtggccttttatgtcccagcctcagaagtccataacatcactcttgtgtcctgggaggagagtcaaagatacctgtg

SEQ ID NO: 3116 - DNA, 1069 bp, Homo sapiens
tttggtttcactatgtatcttttcacttaaacgagaggacagagatcctctgtgaaattacagtgtctttggagaaaaatcaacttatatatgagttatgtttgtgtatttttacctggtcttttcccaaaaagatttcaggtgacagaagaatacaagccaatacgataatctttttttttttaattttttgagacagagtcctctctgtcacccaggctggagtgtagtggcgccatctcggctcactgcaccctccgcctcccaggttcaagcgattctcctcccttagtctcctgagtagctgggattacaggtgctcgccacagtgcctaatttctttttttttttttttttgtatttttattagaggtggggtttcaccgtgttggtcaggctggtctcgaactcctggcctcaagtgatcctcctgcctcggcctcccaaagtgctgggattacaggcatgagccactgcgtctggccaataatccttaataaaaatgtggactgagaaagctggaccgaggactgaggaccgtccgggaagagaacagcagctaccccgtgcttgccttcatgctgggaaggctgcgggtctggctttaggaggagcctgtgtagggtacgaggggcagcggcagctccacagcaggcggcagcccacgcccagtgggtgcacaccttcatccaactcagggctggcagtcaggaagatgaaatgccatccacgtcaagtttcggtctgtctcccactcaccgaagaatagtccctcctttaagggaggtgctgaagagtgctgagaacttgcttcccaccaaggcaggcttgggcttcaaaagatcagaacctgacccaagtggccctagttttccaccatcccacaccatcccaccaacgcttcagaagtcctgccagcatcaagccgggcatgaggccgtccagacagctcatcactgccctggggagacacatgcatgtcacaaacctgtgaggctcaagaccgcatcctgcacagggtgcaggagtagaggcggggcaacggcctctgccgtcgcggctttgggag

SEQ ID NO: 3117 - DNA, 1038 bp, Homo sapiens
tccagggtcaccaagtatgatggtggagctaagctttgaacccagacaacctgactccggggctcttaactaccacatggcattgcctccatcaataggagaagtaggaatactttgttagaagaaagagctggctacataggcaattcacagaggaagaaacacaaacgcctaatatgtgaaactttggtcctcactagtagttagaagtgcaaaataaaccgagatgggatggctggaaaagcctccttcatggatgactgttccttctgcttggtgggtggattcgtttcttgttggactgtgacctgcacatttcgtgactttctaatgaagtggatcccctcaccttggcattgagtctcttgagggataaagggcagcgattgactgggagaaatccagagtctggataatcagactccattatccattaagagcatcatcacccatgttggcatattaaaggctctgagaagtcccacagttaataaaaaaagaactgaacctgttatcccaactcacgttcaaggaatgtgctttgggaaacattgttttcctgggaaggatcataacctacacactaagtggcctggattctacacccttttttgacaatggccctaagtgtgatattagccaaaccttttattttcataagtgtttggtaaaatggggtagaaggaaacatagcttttttggaattatttatctatttgtgcaaatagagaactgcttcaggaaacttcctgctgcttcaataggagggacaaaggtagatgaaaaggaagcactatgtccattaagaaggtgccttggcaaatcttactggaagtcaggagacctgggctgtggctttgagtctgccactaatttgctttgggaattgcaggtctttgggtctcgggcccccactctgcgaagtgcaggcctgatggtctctcagtctctcagaactggaggtctgttgcctagaactaaaagaacatcaccatggatacccttctgttgatgtcaccactttcaggctcccctttt

SEQ ID NO: 3118 - DNA, 1026 bp, Homo sapiens
gtgatttttgaggaccctgtgtttttcagtccttcagagcagctgggctgctacaaagctgcatttagggtttcgtttggccccctgccccgggagggctttcctggaccgagtgcgagtgtgagtgtgagaaaactgcctaatgtccagtaaacattcgactcatactggccttaaagcttgcaagagcctaggagtaggtggcaaccaggccttaccgtaagggaactttaagttagtgttgcctgatttaaattcagagaactttttgttacagagaatttcaagcacgtgatataatgagcccccaattatctgtcactcaacttcagcagttatcctccgtgcccagcgttgtttcagctgctcctgctcactccacgcccccccactccccagctcgaatcagtttgaatcagatcctctggtgtaattgtcatgagcagtctgggtctctccattctgaaagccagattctaatagtgtacccgatgtaaacaacaggactaagcactgacttttgttttttgaaaattgtcagttaaaaaatttgtgagccttttttttaggattacagtaataatgtaacaggctcattgaaactggaaatcacaaacagggtttaaagatgacagagcccttcatctttcagcatttggagctatcactgatgctttttaagggctgtggatacctctcctgtgctttttttttttttttttttggagacagagtcttgctctgtcgcccaggctggagtgcagtggcacaatctcagcgcactgcaacctccgcctccccggttcaagcaattctcctgcttcagcctcccaagtagctgggattacaaggcatccaccaccacgcccagctaatttttgtacttttggtagagatggggttttgccatgtttgccaggctggtctcgaactcctgaccttaggtgatctgcccgcctcggcctcccaaagtgctgggattataggcatgagccactgtgcccggcctctcctgagcttttgagc

SEQ ID NO: 3119 - DNA, 1055 bp, Homo sapiens
ggggcattaatgtcattcatgaaggtggggccctcatgatctaatcacctcttaaaggcctcacctcttaactctggcattggggattatgtttcagcatatgaattttgagggggtaccagcattcagaccacaacacacataaaacactgccttctcttctcacatgcccagtgtcttccactctcccctgccaaccacagctaagatttctagggtcttcttttttttgtttttaatcagggtattatttgcaagtaataaaattaaccagctttaagtgtacagtttgagttttggtactaatcatgttgccaccaccacaatcgagttatagaacagtttcctcaccctaaaaagtcccttcatgcccctttggcccttttccccctcctagacagccttgttccccatccctagacaaccactgatctgctttgtcaccgcggttttgccttttctataattgtaaataaatggaagcagatagtatggagtcttttgtgtttgacctctttcgtgtaacatgatttatttgattcattcatgttgcatgtattaatatttccttttcttgctgtagagcattccatagtattccatggtatggacgtaccattcagcagttgatgaacatttgggttgcctccagtttttggatgttgagagtaaatctgttataaatcttcacagatagggccgggtgcggtggcttacacctgtaatcccagcattttgggaggccgaggcgggtggatcacgaggtcaagagatcgagaccatcctggctaacaacggtgaaaccccgtctctactagaaatacaaaaaattagccgggcatggtggcgggcacctgtagtcccagctactcgggaggctgaggcaggagaatggcgtgaacccgggaggtggagcttgcagtgagccgagattgcaccactgcactccagcctgggcgacagagcgagactccatctcaaaaaaaaaaaaaaaaaaaatcttcagagataagcttttatgtggactttttctttttcggttttctttcttcctt

SEQ ID NO: 3120 - DNA, 1055 bp, Homo sapiens
ctctgcacagccaaggctttctggggccccgaaatgaaaccttacagtaccttggaagtccagcctgggtagctttgtccagcctgtccaacccgggtacccgaggatctgctgtgacccagaaacatgacttaggttatagcccagcccccattttactcacaaggaacctgaagcttgagagcttgagtgaccggtgtgaacagcaggcctgggattcggatccctgtcagcccaagtcatgtgctggaccccactcactgtgttttccagaacacagtgagcagagggccccgtaaatacaggatcttgtcccatttccccttgcagcagatccaccagtgagggtgcggtgtggaattccaggggatgcaactgcaagatcacccatattgggaccagctagagccatatgctatttccagacctaggctttcacagattcatgtttcagtggaaggaaagggaggtttaatggttatggagcaccagccacatgctatgcactctgttagaacggtcctcaccacagcctgacaaggtaggttcaactttaggctggaggcagcatagtacaagaaaatagagttaggagccagactgctttaggataacagtacctctgcataaggtcgtaatgagggttaagtaatatctgtcaagtgcatccagtagcatctggcacatagtgatgtaaacattaactattgttattatcaccattttccaaaagtgtgcaaaggggtgtatggttagtccctgtctagctactaagtggaggaattgggttttctgactccagagcaaaccgtttttctccactccgtactgcctgccgatggctgctttggagtttgtctggctctgggttgtgccttgaacgcacaacttacctaatagagcctggggctcttttctccattaaagacaagctcactgtgagctgggcaccatgtgttgccagagcctcatgctatatgtcaggcccgaattccttgtttgtgccagtggaaccccctgtgactggagggttcctgccctcttccaggcttgga

SEQ ID NO: 3121 - DNA, 1062 bp, Homo sapiens
gccactgcactccagcctgggcgacagagtgagactccgtctcaaaaaaaaaaaaaaaaaaaaaagccaactcccagctgggcgtggtggctcatacctgtaatcccaacattttggaggctgaggtgggtggatcacttgaggccaggagtttgagaccagcctggccaacagtgaaaccccatctccactaaaaataataatcccagcgctttgggaggccgaagcaggtggatcacgaagtcaggagatagagaccatcctggctaacatggtgaaaccccgtctgtactaaaaatacaaaaaaattagccgggcgtggtggtgggcgcctgtagtcccagctactcgggaggctgaagcaggagaatggtgtgaacctgggaggtagagcttgcagtgagccgagatcatgccattgcactccagcctgggtgacagagcgagactcagtctcaaaaaaaaaaaaaaaaaaaaatcaaaaattagctaggcgtggtggcacctgcctgtaatcctagctactcaggaggcggaggcacgagaattgcttgaacctgggaagcagaggttgcagtgagctgagatggcgccactgcactccagcctgggcaacaaagcaagattctgtctcaaataaataaataaataaataagtaaataaataaagaaataataaaagccagttcctctagtcaattattttaaatcttctagttcaaaaatttatcagatgtatgaatctccttacaattttcctaggcaagtggccattcagcttctacttgaatgcttccagtggtaggcaactcatttccagaggcaactgggcttacatttggacagctttcattgtttgaaaaatttaattaattaattaatttattttgagatggactctcactctgtcgccaggctggaatgcagtggcacaatctcggctcactacaacctccgcctcccgggttcaagcaattctcctgcctcagcttcccaagtagctgagattacaggcgcccgccaccatgcccagctaatttttgtatttttagtagagatggg

SEQ ID NO: 3122 - DNA, 1039 bp, Homo sapiens
atcaaggcaaaattgtaattctttaagggtacgtagatgggattaatttgttatatcaaggccgagtatagtggctcaacctgtaatcccagcgctttgggaaggcctaggcaggaggatcgcttgaggccaggagtttgagagcagcctgggcaacacagaactcctctctttaaaaaaaaaaaaaaaaaaaaaaaacaaaaaaaagttggccgagcgcagtggctcacacctgtaatcccagcactttgggaggctgaggtgggcagatcacccgaggtcaggcgtttgagaccagcctggccaacatggtgaaaccccgtctctgctaaaaatacaaaaattagacaggtatggtggtgtgtgcctgtagtcccagctacttgggaggctgatgcaagagaattgcttgaacccaggaggcggaggttgcagtgagccaaggttgtgccactgcactccagcccaggtggcagagcgaggtctgtctgaaaaacaaaaacaaaaacaagtcagactccattgttatatcaagacaagagctaagtggttggcaattaagaaaaaaggattcattcctgggaagaactggctctcggggatcccatgtccttgggctcagttcctggggccagtgctgggctgctctcgtcctgctgcaggatggtggccgatcctgataaccctttggtgctggacatcctgacgggctcttccacctcttactccttcttcccggacaagcctatcacccaggtaagggcttcacaaccttgaggcttcgaaataaaaatgaagcagaacagcacatttggctgaggcgaaggaaatgactagttggtggggtggggcatgggcagaagcggtgtggtctcaggctcccccttcaggtagggccagggtcgttttggtctggcctgctgtcctcttgttcgggaggcgtggcagcttttcccttacttggaactgcttgggtcacagcctcgttttgttcccagtatccacatgcggtggggaagaacaccctcctcattgctgg

SEQ ID NO: 3123 - DNA, 1756 bp, Homo sapiens
aagtgggctccagactagggggcgggaggccggcctgggcggagcaaagggcgctcggcctcgttgattggccgcggctgcagagctgtctctctaggattgagccttttctttagggggacggggccttgattcactcccaccaatagggttcaaggaatccacctcccaccagggcacttccggcggcgctctccgcgccttatcgccaaagctgcggctctggacgcccagccgcggcgtatcccgatcacttccgggtagtgctccacgggcacgagccgcgattgggctaccgtagatggggtacttccggtgtgcacgtgctgggtccttcggcaggaggaggaagatggagcccagcaccgcggcccgggcttgggccctcttttggttgctgctgcccttgcttggcgcggtttgcgccagcggaccccgcaccttagtgctgctggacaacctcaacgtgcgggagactcattcgcttttcttccggagcctgaagggtgagagcggggtccgagggggtagcgtgtgggggcctggggttggtacagcatcgagggcattgaccactctccttccctctccctttcctggagcaggccgcccgggtctggcctgccgcttggcgtgcgggtccgcgatgtctgcagcaggggtttcccttcgcgtcccgtcttcctcaactacctgttttttcttgtccagaccggggctttgagctcacattcaagaccgctgatgaccccagcctgtctctcataaagtatggggaattcctctatgacaatctcatcattttctccccttcggtagaaggtaagggttccgcgtcgcccctagcactggaattcgagacccgggacttgatggattgctttcttctggttcttgggcatgtcctgggtcacaggatgggttgccagtcctggatggtgctaccacggagataaggaaaatgctcatttctgacctgaccctaggagggtacatctttctaaaagaaacagctaaggattgtggagtcaagtgttgctgcagaccgtggaacccagggccctgctgctctgctgagaagggagtttactctgtaaagggcctgataaaaagatggaaagctcctgggttgggtttgcctgggtggaaagaggaaatggcctgttattaatatggattgctataaagaggcattgtgcattgtggcagttgatcttaagaattcagatagattcatagtctcgggctgaaaaaagagccttagcaattatctaccaccccacccctcctcccatttgaggctggataaatatgtccagcagccttgcagtgggctagtcgtttaacagaatgaatatcttggccagattatccagttgatacttgagtattcttgttttacgaggcaatccactccaccactgaacaattctgttaagaagttcttatattaagaaatattgtctcctgctttattttgttcttatgctccccagcaccttagagaatagatagaatgcttatcttgtttgcaggcatagccttcacataatcacagcttattcggttgtttctcctccagactgaacatccccagctccttagctatttctcttttgccatacttttttggtgagcatgttagtcattctcttctttatttgcttcagtttatctttttcttaaaagactcaagttgtccctgtctgggtaagacaggactgccttcctcccttcagttaatgaagcttaggaa

SEQ ID NO: 3124 - DNA, 1083 bp, Homo sapiens
gccaggtgctgctgatggctcatgccctgaggcgcatactctactccacctggtgccctgccgactgccagtttgccttcatggctcgaaacccacggagcccagccagcaagctcttctgccacctctttgtgggcagccagccaggagaggtatctggggcttgaggcaggggaccgccacggaggccggaggggctgtgcgccaggcatcagggtgggttccttgagggctttgccagggcggcctgatccccctccaggcatgcacccctcaccacattggctctttctgtggctcttcccactgaggacaccacaaagcaagtcagtggcctcagcattccctagggcccaggggcgggaatctggccacgcgcttagagagtggagagtcacacctccaggccttcgctcatgccgttctgtctggcatcccctccccttctcatcctagcacattccactcactcttcaaggctcagcccatgtgtctgaaccccgccttgactcctctggatggccactctctctggggtcctgtgacatgaactgcacgctaccatcgtctgccctaattacaggcacctgagttctttgagagccgagtctgggtccaggtcttgagagagtgcttggcccagagcggtcggggtgggcgggtagatcagaaagtcaaagccagcctggctgttgtgaaggacagagccttggcagctaggcgcttggcaggcagacgctgggtttggttctgaccagcaaccatttgctgtcatcctgtatatccaggccatgtgctggatactggggtgacacgtggctgagtcatgttccttgagctgacgctcacggttctaactcgttgggtctggatggtgtgtgtggcggttgggatgcgctgctcccgacaagcactgggcctgtgctgggaacttcctgtgctctatttcactgactcctcaaaggggcacagggaggtggggatgaggaaaccgaggcacagagaggtgccatgctctgcccagggtcacacagcagctcctacatgacagagccaggattggaacccaagttctgacttcag

SEQ ID NO: 3125 - DNA, 1078 bp, Homo sapiens
acacagagacagctttgggaataagccaaaaacagggtgatctcattagattttgaagatatatgactcctttgggctacatttcatattgatcaatttctaggtatttttcactggcccaaagtattgcattcccttaacagcaagcacaagttctctatatcacttgttttttgttgttgttgttgttgtcgtcgttgttttgagacggagtcttgctcaggtgccccggagtgcagtggtgcaatctcagctcactgcaacctccacctcctgggttcaagcaattctcctgcttcagcctcccgagtagctgggattacaggtgtgtaccaccacgcctggcaatttttttgtatttttagtagagatggggtttcgccgtgttggtcaggctggtctcgaactcctgacctcaggtgatccgcctgcctcggcctcccaaagtgctgggattacaggagtgagccactgtgcctggcctatcccacttggtttttgactgaaggggaagtgtagaaatatattgatttgtgatttctggtgtcacctgtgttaccaaaaatcaaaacaaatcttttttattttttattattattattatttttgagacagagtctcgctctgtcgcccagtgtggagtgcagtggtgtgatcttggctcactgcaaactccgcctcccaggttcaagcgattctcccacctcagcctcctgagttgggtcctacaggcgcacacgaccacgcccagctaattttttgtatttttagtagagttggggtttcaccatgttagccaggatggtctcgatctcctgacctcgtgatccactcacctcagcctcccaaaatcctggggttacagatgtgagctaccactcacggcccaaatcttcttgatcatatgtttaaatatattttttaatatttggagcatgagttgtcacttcttgtttgccttttttataaggaaatgttggagagttacatcattgctaatgtagaaatgttaagtggaaaaatatacagtttggtaaaataaactagattctacatttatttgtgggtttttttcccc

SEQ ID NO: 3126 - DNA, 1033 bp, Homo sapiens
aaaatcaattgaccataaatataagggtttatttccggattctgagttctcttttgttctgtaggtgtatccttcatgctaatactgcactgtcttactgactgtagctttatagtgaattttgaaatttggaattataagccctctaactttttcaggaatgttttgactatgccgggtcctgtacagttccatacaaattgtccatttctgccaaaaaaaaaaaaccaaaaaaacagctggagttttggtaggaattgccttgaacctatagatcaatttggggagactcactgtcaacaacgttgagttttccaatccatgacacagaggtctctttatttaatttctctcagcagtgttttgtagttgttcggtgtacgagtcttgaattttttttgttaaatttattgccaagtattttattctttttccatgctgtcttgaatggtggaagtgttttctaattttcgttttcaggttgttaacgctaacctgtagaaatacaatcgatttgtccattgctcttgtatccttcgcccttgctgaactcaccagttgtagtagtttctttgtgaattccttacagttttctacatacaggatctgttatctgcaaataaagagcattttacttctttgtttctagtctggatgtcttttacttcttctgattgcctgattgctctagattaacctccattacagtgttgagtagaagtggtaacagcagacatcttcgccttgttccacatcctggagagaaagcattcagtccttcacaagttagctataggtttttcatagatgcctattgtcaggttgagcaagttcccttctatatatactactagtttcctgggagtttttatcatgaatggctattggatttgtcaagtggtttttcagtgtctgttgagatgattgtgtggtttgtgtcctttgttcgtgtggtctgttaacattatttgttttgtggtaaattctttaaagtttagttgccatgtgaaacctgaaaccctaatcagtgaat

SEQ ID NO: 3127 - DNA, 1046 bp, Homo sapiens
ttttgtgtgtttcaaaatttaaagtatttgatttcaagtcagtgaccagttggaaaacaaaattttaagcatttgaaaaaaattaagtatttgctgcctttgtgacataatgagctacttaattcttccaggtgcattagtcaaatggagtataagtaaaataggatggaaatggaagagggcacattaaattcaaatagaacaccttcactattacccaaaactctccttcagcactttgccatctgtaaacccatttttatgccacttattcagattatctttgattcttctttctgctgacattcatacagagccttcagggaaatgtcctggcatgctcattccttaagctcgtgccttaaaatgggacagatctgtgatcctgtaagtgataggtttgttctgcttttctcattttgatgccaaagattcatcttctaaatacagaatggaattaaaatggaaagaggttcttcattatacatagaatgttgttcgtgttcagtatggtctcttaggctgttttgaacaatttaaaattgtagtagaaatatttagtaattctgttacttctctgtagtcattatgaactgaagtcttctgaagttcattcttccctaccgtttttgtcatctatcatcaaattcacttccaaaataatttattttgaaaatatatgtcaggctctatctaataaaaaaaaacaactagtttaataaatcttttctaggcatgcttccagaagagtggtgcatcagtggttgctattcgaaaatacatcatccataagtatccttctctggagctggagagaaggggttatctccttaaacaagcactgaaaagagaattaaatagaggagtcatcaaacaggtattacacaattgttagtagtaagatcatttcattgtgtattagctttaagtctacagttagtaacatttaggctttttgtgccttttttgttaaaaataagtttcatgatgatgaaattccttaagtttaacctagttgaattatctgaggctaggtttcgaaaatg

SEQ ID NO: 3128 - DNA, 1635 bp, Homo sapiens
gaatgaagagaaggaagaaaataagtcttctgaggaaaccaaaaaggagtaaggagttatgtcttcttgctatttatatttgaagaatgtgtaaaaggactttagattagattgttttaaagtgttataacattggtttatgctaggtatttgctatttggatttaatttttagaattaccatttgaaataggtttattatatagttgtttgacctgttagaatatgctgtagttagcagaacacaatggtttgaataatccaaaagtctttgtcattggctttggaatgtgtttttgagcttgtaatttattgtgggagtatctgatattttaagcattggcaagacttcaataagaaatgaaacataactataaaaatctgacctagaagacatttcactattttattcctacttctgtgccaggagtgggttgtttttgtgtgcttatgttagaaggcattgatttgtatcaagccattggtagtgtgacctaaaagtctatatatgtttgatgaaatattcagttgaagaattggctttgagaatctgaaagtaaaatttgctattgatgtgtatctatataaagtgatggcagttactttttaatttttaatttttttttttttttttttgcaggagagctgatagtattcattccactcttttcataattggtcagaacagttagaaattgcttttaactatagtcatgcattgcttaacaatgggtatacattctgagagatacatctttaggcgatttcatcatcgtgccaacatcataaagtgtacttacacaaacctacgtggtacagcctactacatacctaggctttatgggatagtctgttgcttctaggctacaaacctgtacagcatgttactgtactaaatactgtaggcagttataacacaacggtaagtatttgtgtatttaaacatagaaaaggtacagtaaaaatataatataaaagataaaaaatggtatacctgtgtaggacacctaccatgaatggaccttaaaggattggaagttgtttgggtgagtgagtgagtggtaagtgaatgcaaaggcctaggactactgtgtgcaacttttaaaactaaaaagtttttatttttagcaacttttaaaactaaaaagtttttatttttaaaaacttttaaaactttaccaaaaacaaagacacaagccggacgcaatggtgcacagctgtagccctagctacttaggaagctgaggtggggggattgcttgagtcctgaaatttgaatctagattgggcaacgttgtgagacctcatatttataaaaaaacaaaactaagacacatacacacaccttaacctaggcctgcacaaggtcagggtcatcaatatcactgtcttccacctccagatcttgtcccactcaaggccttcaggggcagcaacacacatggacctgtcatttcctatgataacagtgctgtcttttggaataccttctgaaggacctgcttgaggctgttttacagttaactttttttttgtaggtagaaaacatatactctaatgataaaaagtatagtatagtaaacacataaactagtagcatagctgtttattatcaggtattatgtataattgtaat

SEQ ID NO: 3129 - DNA, 1080 bp, Homo sapiens
atatgacagtcttagaagcatacttttattctcctaggtgatggtctaaatttgcttctgtgggtctggaagctattagaatgtcatgttattcagcagtatttttccccttgtgttttcccttaatagaaggaaaaaaaaagtactttaatagagatagagtttaagattacagttaattttcctgactctttcgagaacagtaacaacaaaagccttctcttggtaaactgatctttgactaactgttccttagtctctttattctatccttctaagttcctgatggtggcaggaggggatggggttaggttccttaggagcttccttgcccttgttgtctttgttcatgtggaaggtgcaacagctgccgtggcttatgcattcgtcttagttgctgctttatgtagtctatattttggtagttttatctttctgagtaaccaaatcatctgtcacttacctataaattttatagttatattttttccctttggatgtgtattaaatttagacgttttagtttagttttgtttctgttaatcttcacaccaggtcttttctgtgctttaggttgattcttcaccacactgaaaccattaggaaaaatccttgtggttaacagcagaggcttcagagtgtaacctgtactcgggcctagaaattatttaaaatggcgactgatacgtctcaaggtgaactcgtccatcctaaggcactcccacttatagtaggagctcagctgatccacgcggacaagttaggtgaggtaggggctgacacattcttgaagctcactcttggatcaatccctgacttcaggccctgctgggtccttcttggtacatgttccttcccttactttggggagtctaggttgtgaatttgaaacaaaatcagattcttttcatcttccctttcccctcaaattcctgagaaaacctccaaccttctaaatttatagcaaatcaactataattatgtgtttccatttgaaattcaagctaaaataacatactttaaaaagtgtatcttaaaaatcatatttcacttcaaaaaaaacttgttaaaagtaatttg

SEQ ID NO: 3130 - DNA, 1060 bp, Homo sapiens
gccccccgggttctccgcccccgccgccgccattacggagctcccagtggtgagtgtgcggagcgccgaggctcgcgttccgccgctgcttccgtcgccggggcgggcgccgcggtgtccctgccgagcgtgagccccgaactgtcaccgcgccgagccccagcctcatccgtcggtgtccgcggtccgagctttccccgcctcgctggcggcccgcgctctcccccgccgtgcgcgttcgccgctgtggcctgtagctacctcgcctcgctgctttgtctccgctgctcttgccgtccttcccgcggccttctgcgggcggggctgtcggctgtcgctttgctgctccgcgacggcggccttgagtctcgctcccccggtgggaaacgtagaactggttactcgccaccttaggcggtggggtttgaatgagagcggtgcctcggtaggtcgtcagaaagttacagtcgcccatctgagcgtttgtaagagatggaggcaggagtggtgaggtgagagccccagatctgagggttggtactgcattaacagctgtgaccggggacagccacttaacctttttgagaaagagttgtctcccgtacggagaccggaccgggtgaactgtgctgccgcatccgcgtgcacgttctctctgttgtttattgtgcttcctgactttgcattgcattaaaaagtgagaatccaattcgaaataacgtctaaaaatcgcctggggctttttgagcacgctgtcttgtcttagagtgaaattagaggtgactagtgtcatttttgaaaggtgctctaattttgtttaacctgacataggcaaaaaacttgttagctttttgatttttcattgctcttctcaaaagtttagtgtaatttgtttcaaaatagaagtaacattttaaagtttgctgggttggttggttttggctttgtttttaagcttgcttggaagattgtagggctggaagttagtggagaacgtatactgaactcttcatttccggatgaaagttttaactccttacccagttagattgtgatttta

SEQ ID NO: 3131 - DNA, 1058 bp, Homo sapiens
tcaggactcaggacaataattcactttgagactgccactaccactgattttaaaatcttccatcaattgcctgcaatgcttaagaaacccaaagatgtcctctaaagaatgaataaaaccaaaagctatattatgcttttacaaaagtgggggtgggatttttataaaagtgggggtggggtttaaaatcaagccaataccatgtatgcaaatcacattgtctgccaactccaacctcattcaagccattctggtgagtataaagctgactgtgggcctctgcttgggcctctgcttctcctacagatattggagtgctgtgctttctaattttcccaccctttcatgaagtcgcagtctctacagatggttttccatttcagttgtttgtgggccatcaacctacaaaatgtatttatgaagaaagccagactactcccagataaatagtctttttcttttgtatctggataacaagagatttctgctggcttccatctctgaagaaataccacattaagagacttggcaagacttgtgaaacacaagaacaaaattttctatagcaataaaatgtttctctgaagtgtagttgaacacaatacaagatcccactacataagcccacagaggccatttttcagtggtggaatgctgtatgccactggtccccaatgcacaacctagatccctcacatgtgcagttcacaatgggttcgcgctcctgtgagaatctaatgccaccactgatctgacaggaggcggagctcaggtggaaatgcttgctcacacaccactcaccttctgttgtgcagcccagtttctaacaggccatggaccagtacgtgtccttggcccaggggctggggacccctgctgtatgctgcttttgttttgttttgagacagggtgttgctctgtcacccaggttggagtgcagtggcttgatcatggctcactgtagcctcaaactcctgggctcaagcgatcctcctgcctcaccctccccagtagctgggactacaggcacacaccaccacagaatactattgttgaag

SEQ ID NO: 3132 - DNA, 1034 bp, Homo sapiens
tttaaggctgcagtgagatacgatcacaccactgcactccaacctgagagacaaagtgagagcctatcaaaaataaaaaataaaataaataaacaaaagccacacacacacacaccaaaatctgtaggtagctatctaagatatgttaatatgttaggagatttggaggaaagaatgagagaacatctaacctatctaattggagtcccagaaggaaaattagcctaaatggagaagaggcaatatttgaagagacagtggctgagacttctagaagtgataaaatatacaaatctataatgaaagcccatatatgcaatacaggataattatattttagtgaaactgcataataccaaagacagatgaaagattttaaagaagctgggaagaagaagcacattacttacctgcctccccctcaaaaaaaaaatacacaaaaaattagactttgcagtagcaaccatgaaagccagaagatggtagaataatctcagagtgctgagaaacgagcagtaaatgtagaattccctgtgcagctgaactaacctttaagaattagggcaatgcatactgagaaacttaacaacatacttctaaatacccatgggtcaaagaagaaatcaaacatgatagtaaaaaacatttttaactgaatgaaaacaaaaccacaacatatcatcgatatttagaaaagaagaaaggtcaataacctcagcttcaaccttaaagaattagaaaaataaggccagacacaatggctcatgcctataatcccaacactttgggaggccaaggcaggaagattgcttgagcccaggagcttgagagaccagcccaggcaacagagcaagaccctatcaccaaaaaaaaaaaaaaaagaaattagaacaataagaacaaatgaagctccaagcaaatagaataaaggaaataataaacattatatcagaaatcaatgaaatagaaaaatttttagagaaagaccagtgaaatcaaaagctggttctccaggaggtggaggttgcagtgag

SEQ ID NO: 3133 - DNA, 2006 bp, Homo sapiens
ggaaaagacacagtgtggaatttataaactctgtgtattggactttttttgatgtttataaatcccaaataaccagctgtagctccccagattagtcacctcataaatcaattatttaatcttaagcagctgtacttcaattattcaccattgtatttatgtgcattcagacatcttagtttgaaagtcacaagtcttaagagattaactttttatcagtgaggaaaagtttgttttcgagactggtcttgctgtgtgtgttgcctgggccagacctcatactcctgggtgaaagctgtcttcccacctcagcctccctagtagctaggactatacaggtgtgcaccaccatgccctgctggaaacgttttgatttttcagctttttggggtttgcactgtttgacttcaagcaaatctttttttttttttttttttctgtttcttcttccactgtgaaagtaaatggattggatttatctctattttagagccataagaaagtgggagccttatggagggaggctgacctcagctggaaggactttttaccagaaggagaagatgtacataattttcttttggagcaggtaagaacaaggcttatgttttgctgtttgatagtagttgatctatttcatagaggaagtgaaggtaatttccttcgtattccagtcgttaaaattgcatcaaaataggaatcttggtaaagatgtccttttaagttcatgcttttaaagccactccaactgtgtggtcatcagatgattgatatttaaaaaaagaaaatgtaaaagacttagcaacctatagaaaaacaagctacagcaagcagaaatgaagttaacaaataaagcagggtgacagggccaaagctgtctcctgatttctgggtctgatggcaggccagaagcagccagaagttattctgtggggaatggagaccattaatacccttataaggtagaagattagagacaagcttatagcttgaaactacacaggtaaataagtgcaaggaagtagacacagtcttatacccagaaccttagctatcctgcctactgactggtaactagatccagaaatctacaaaacagaagaccccatgatcagtataatctggtcctataggaggatttgtgggctgttaggttgaggtaaccataaaacaaattagatcaagaaaagtaacagaaagaaaacaaaactctctcaaaacgttactgaaaatcaaaatcctaaaactcatgaggaaaactaaagctaagacagccaacaaaatcaggaataaggagaaaaaaaatcaccataggtaaaaagagaacaagaatgcaatctgaaaatgactttaaaataagtattttgttctggataaagatattatattaggttgctacagacattagctttctttttggttgtagtctggaacactgaagagcattcttgccacagcaataagaacctgcatgaagcataacttctgatgtgttactggacttagaagaggtggaagtaatttccttcaaagggacaaaaagaattaatgagggggaaaagccagagatgaaacctgaactgtgaatagtaattacatgtgaagggcatattgcccaaaggacacatagcccagtgggaagatactattacaaatgctgtcagatgtcatggaaaaagttgacttagtcccagttcagtattaccttggctcccagaagcagcaaatcaaaatgctctttggagaaacatcctcaacttaggtccccttattttctacaaatccaaattatttaaatatatgagttgacacttggtgttcatttaacatacaattaaagaagtaaagataaaagtaaacagacaataagtagtagatttagaccccatggacttgaggtaatggaattatcattcagagtataaaataacactatagtaaaagaaagaatcacaaaaatgagcaaacaagagactagtcaaaatggttaaagagatttgaaaaga

SEQ ID NO: 3134 - DNA, 1001 bp, Homo sapiens
aaaaaagagaaaggacgattttagattaaaggaatctgaacaacataacatgtaaagtcgggttctcaactggactcagcaacaacaaaaagctatattagacattcagagacagttgtggaaatttgaatatgtactatatatcaaatatttttattgacattatagtaaatctcttggacattcagaaagaaaacaacaattgatgaatctaaaagtgaagatatgtagttgtatattgtatgactctttaatttttctgtaggcttgaaattttgttagataaaaagttaatgtgagggaggtattaaataaaggagcagggaggaaaaagcggcagtggtgagacacctagatgagccttctcccttctgcatcagttcatcacccttcctacctacatcctcccccttcctacctacatcctcccccttcctacctacatcctcccccttggaagagctactttgctgcaaaggttgaaccaaaagattgtgaattcagggcaccagactaatttccagtagctgagaacagagagatacactgctttattggtgtatcagcaactctggctgaccgactttcacccttcagaccaaagatattgacttggctggatactctatagtaaacaccagttaacaagcacaaattaagaagcataccacaagaacttactaaaagaattttaatgcttaacctaaccatatcacttaaatttaactttcatatgaaggaagacctttttcattgaagattgtgcaaatattaacctacacagacacagtaacctctgttgacacattaaggcttttgaatcatgacattaaatttctatttcataatataccattttcaattttttaaatcagtgatcataaaataagtaaatattatgtagaaaaatacatttgactcaccctttgagtgatgtttaataaaattgttaaactaaacatgttagctttgtaaagatgcatcattataaaatttttttt

SEQ ID NO: 3135 - DNA, 1032 bp, Homo sapiens
gttgcagtgagccgagatcatccactgcattccatcctgggtgacagagtgagactgtctcaaacaaacaaaaaaaaagaaaatattacttgttttcttaacagtgtaatcatcatctgctttccacatataaaaatcaccttggttatctatagttcaatcttctaaagccttcaagcctctgaaattcttcaaaattcagaagaagtagaaggaagtttttgatgatgagtgaggtggaggtgagtgctttgcagaaactgttggaaatgtaccaaagtaaatgaacattaacgggaaatagccaaagaataaacctgatgtactgtgattcatcagttagcctcctggaaaattaggggtattcttataaattggcagcatagcctttttcttgcatggaagtagggaaatgtgaacgaattgcaaaaaaattagaatggccaagaaagatgaaacgccaagacagtaaggaagaaaacagtggagattggcttcagatgtaatttgaaggatgtacaaagtcaatgaataaccctttaaaaggggaaaaatatgatcctgtgatgaactggaggtatagggagtaaaagaccttagtaacacctaaagagtacaataggaggactctttggagaatcatgagccctgggccaggcttgcaatacagaaggggcagaatcgttgtatctttagaatttcattgtgcagtgtacaaagcaactgtgcctgcaatatggttaaaacaggtattaacattgggcatttactgaggacttactctgcgttgggtgctgttgtacatattcggcatgtattagtttgtattgtcctcgtaacattctcctgaagttgatgttattatcatacccatttttcagataaggaaactgaggtgcaaagatgtaaatcaacttgttcaaaatcttaactgctaataagtgccagattgaggattcaaagctaagtttctagcttcagaggagaaaatgctttatctcattacctttggggtattagtgtgtcaggcta

SEQ ID NO: 3136 - DNA, 1048 bp, Homo sapiens
aaagtgttaaatagtatcccttcagagaaaaaagttaaaacatcttaataaatattccctttaaagcactcttttacttgtttgttgaataaactttgaaatataattggtgcctcacacatctaatgttatctgtgaaaaattctgtatactttcagaaagtcttagtgttattttataatttgaatatgtgggggacatgggcttgtctttcctttgaaaagtgttgttttgtcttttaagtcgtggaagtatgggcagggagaagaatgacaagccccttccatctgcaacagctcggccaaatactttcatgaggggtggcagcagtaaagacctgctagacaatcagtctcaagaagagcagcggagagagatgctggagaccgtgaagcagctcacaggaggtgtggatgtggagaggaacagcactgaggctgagcgaaataaaacaagggagtcaggtgagagacttggcttaaacagatgcagatttgggttttaaatttggaaggaaaaataaaaaagagactgtgcctgagtagattttagaattaacacataatagcaacacataccagcatctgaagagttaaagggtacttcatagttttataacagttctcattccctaggtatgccttagctgaacagtttgtaaattttctcctttctctattaaatgttatggtgaggaggtcctcctgctgtattttaagcaatctgaatttcttacaagtccctgtaacatcccacacttgacgttgctgttagattgtgtatgctgtgtagagctcctcaaatgtgtgaaaattctcattgagccactgcaagacaaaccaaagagaaggtattaggttatctttagctgacttcatcttccgtggtaacctgttgtttttgtatgcatttagcatgtatatacttagaggacttgctcggataatgctctaaaaattgcttcatgtatttaacctgtgtttcagtttccttatctgttaaatggggataagttgtacctaccttttcaggatattatgaaaattaa

SEQ ID NO: 3137 - DNA, 1054 bp, Homo sapiens
ttggagaaataaaagcatgagtcatccttgacttagaacccctatggaatgtgatatgatctgagtagtaatcccacagattaaggcaaggccaaggaatcctcatcatttttatttttctctcctcctttcaaatgtacaaaatactgatacagataaaatccatttagtccacagagaaatatatgccatgcttaaaaatataataataaatttgggccagtctttcaccctgttctttgtatccattggctattggaatatgtagtatacaattggccagttttgactgagaagattttaatccttcagctctaatcctaaactgctcatagtgtcatctataagatacatgagaaactgccataatacagcttttgtaggtattttgtacttttccagtagtaaaaattgctaatttttaaattttaaaaaatgttcagtttatctggcagataaccttattttctgcttttatagtgcaattgggtatctcgaagagcagatcaagggcctaaaactatcgaacagattcacaaagaggctaaaatagaagaacaagaagagcaaaggaaggtccagcaactcatgaccaaagagaagagaagaccaggtgaggccggaatccaccagggtttagagaacttggaagtttcaggaatacatattaagaattatgtatttaggtataaaatgagatcagaaagaacagcccaaagaatagagtggtgattgttaggtgaagcagtttcacctgaagagtaaagttactgagtaaaagtagagaatgcaggaacaaagcatgatttctttcactacttaaaagccagtaagcaataagactttattgagcatcttctatatactcagaattggtgagacgagaaaaggaagtggaaaatgtagttacttccctctcaaagtgtacagtttatctggtaaggtaaaacttttgacaagcaaaagaggaacatttgttaagcaaatggaagatagtatatcaattatgaaatgtgttctccattaactgttaaaatttagagaaaaagaagag

SEQ ID NO: 3138 - DNA, 1093 bp, Homo sapiens
tgagacagcattgaaaatcctgaacatgccaagccaaggccaggacttaccattccattttcatttctgtttgattaccataattactacactgctgacaacccttgatgattctctagaatttgatccttttggggataagcatgtccaccctcaatactaacaaatatgtcagcagtataggccctgttgcttgaagaaaattactacctgatgctgacaacattcatatctaagattgctgagtgacctgtatgtggatgggtctctttacactaatgccacattgttagtttactactgtgtaaaaataaaaagctaggtgctttctagtgaattcagcttatcaagcagccttcctaaaacattctcaccgactcccttgctccctgagaaaaagaaacccgtcccgaacaacccatttaaacacacacattttagtgctgatcatggactgttaagtgaaaattgcagttgtctaaatagatccttttcccactgtcacatacctttcattcttgctattatccatgatcatatttgcatgcatctgccttgtccactgttgtgtctctgaaaaatcatagtttgaagccctgactcttactataattacattaggaggtgggtggggggcagtaactaggtttagttgaggtcatgagggtggagcccacacaatgggattagtgcccttggaagaggaaacacctgagctgtttctctccctgtcatgtaaggatacagtgagaagtcagccatttacgagccaggaagagggtcctcaccaagaacttaatctgccagtacattgattttggacttcgcagctttcagtactatgagaaataaacttccattgtttaagccacccagtctatggtattttgttatagcagcccaagcagattaaggtatccactcttcatgttctgttccaactaaccaatctcagtgggtctcttgaccacccagtgtccagcagacaacaagtgctcacttacagccctgtcaaatttaccatcccctaaggacaaaaaaaaaaaaaaaagaaaatcaccatgaatcactattctcagaggatatgttctca

SEQ ID NO: 3139 - DNA, 1031 bp, Homo sapiens
caatagatgctagcaaggctgtggagaaacagaatgcttttacactgttggtgggaacgtaagttggttcaacagtatgacgattcctcaaggatctagaaccagaagtaccatttgacccaacaatcccattactaggtgtataatcaaaagaatataaatcattctactataaagacacatgcacacgtgtgtttattgcagcactatttacaatagcaaagacatgaaaccaacccaaatgcccatcaatgatagactggataaagaaaatgtggtacatatacaccatggaatactatgcagccataaaaagaaatgagatcatgtccttttcagggacgtggatgaagctggaagccatcatcctcagcaaaataacactggaacagaaaactaagcactgcatgttctcactcataagtggtagtttcacattgagaacacatggacacagagaggggaacaacacacaccagggctttttgggggatgggggttgaggggagggaacttaaaggacaggtcagtaggtatagcaaaccaccatggcacatgtatacctatgtaacaaacctgcacatcctgcacctgtatctcgtggtttttttttttttttaaggaaaaaaaaaagacattcaatgttattcattattagggaagtgataaactaagaaaagataaaccatagttctgtaaaattcacccccactagattgaaaaaaaaatcccattttaaatgtttttaaagacgaatataaccatttatgagggcaattgggcaataatgttgaagatgttcatgtactatgcaataacatcaaattgctaaatgtaccagatatttacaaacgtgaaacaacaagaactctcgcatactgattgcaacagccactttggaaattgtttagcattatatactaaagctgaagtttttctgccataactagcatttcaattcttaggtatatacacaaccaataaacatacatatctcatatgctaggaaatatatacaaaaatgttgtagc

SEQ ID NO: 3140 - DNA, 1030 bp, Homo sapiens
ctatattaaagtttcagttacaatttatgttcttatagtagtactgtctggtttaacaactgttccctgttggtatttttccaatctgatgatctttatttcctttcagttataccatgtgtctcatacctctgggtttatctgacctgtttgttttttttttttaatgtttatcaaataatctgtgatatcatcagtactgtatccttagctggatgcatttgacaagattggtgtgaaattttgcagaaaccctaacttttgatcctgatgcattcttgatactaccatttctaattggggcagatggtgaagcataaaggaataattctgagaatgattgatgtgtaaaggtgtttgagcttatcagcttaggccccagactgtgttatcgcctagaaactgtatttttatgtaatgaatgacattaaagtctagacttttttctctgaagcgttaaatgaattcaaaagggcagcattggggccttaagtgagaaatgattctcatctatgtgtgctttgtatgaagtttttattctctcttgaaatctaatggctagcccttcagtgcaactcagaaagaaaaaaaaaaaaatctggtggcagtatttgcccagcactaacagaatgatatatcagaaaaagtaaaggttgtcaacatgcagcaggtctgcttgaaggtagcagagcttagtatcaacccaaatatttaaccttgaaaaattatttccaagcatttaagatagtaattatgaatattttgatacacaaaatgcaacttttaacttactctgttatctctacttagtgtgctggcagtataacatggcaacatacattggttttaacataagggtatagtgggaatccagcaggaacagagcagacaaataaaaggaagccttttttttcagggagtaatttagtttgactctcattgatgatatataacgggcttattttagtatttctgacccagcataatgagtggaatcttttatgatctacagtaaggcttagtgatgata

SEQ ID NO: 3141 - DNA, 1047 bp, Homo sapiens
ttagagagatactggatggaagaaagaggtttatcacaatataatatttacaggacagatcagcaagcccaagttagtgactagcaaatccagagagttctgtattgctggaaatgatacccgacactggtattccccttttactggcattggaagagcatctggcagagggaatcagacagtgccatgctagtgggtgcagtttgattttaaaaattattgcattcgttttaattgaaagggatatagagatattaccacattcctcgagatggcgttagtcatctttcataagacttgatctctgttgacagaaatcactctgtggaactgaattctgaaacaatgtattgagtacctgcagtatgggaagttccctgtggtaaatatgtatgataaacaagtaaataaggaatatatatgataaacatatggtaaacaaatataaaccctggaggatttttttatcttcagataccatcaaatgcattaaacctctgtcataatgctatataaactgtgactgactttgagatatatggagagatttggtatggatctgtaaggaaagatggttcctttgacagaaagtttgggctgggtgcggtggctcacgcctgtaatcccagcacttagggaggccgaggcgggcggatcacctgaggttgggagttcgagactagcctgaccaacatggagaaaccccgtctcgactaaaaatacaaaataagctgggcgtggtggcacatgcctgtaatttcagctacttgggaagctgaggcaggagaatcgcttgaacccggaaggcagaggttgcagtgagccaagattgtaccattgcactccagcctgggcaacaagagcgaaactccatctcaaaaaaagaaagaaagaaagtttggagtaggtgaaaagttttccttagtctgccaaatctagactaagttttgcaggaggtggggtttgagtgtaaaataccagacctcaaaggtaatctagatcaatatttttcaaactgttggatttaatacatttaatagattgtga

SEQ ID NO: 3142 - DNA, 1022 bp, Homo sapiens
gttccattattagaacattctactttgtttatgcacaactctgtggcaatgcaccggggctgttccctgagcattagtgaagtgtctatagttggaaagtcttcgcagtctcagttttgtgtcacttcaatctaagagacccagactctggacacattaatttcaaaccttggaactagggagtttatgttgtattccaaaagcatgtggagctacaagggagacttttttgtaattcagagtctcttacttagccgttatgtggccacaagatcttcagctaatctgcacaattcaggcgcttcaggccaacccagaaaattatctccacaaatgtagaaaataaaacagctttattaattttttaaaaattttatcttgagaccaagtctcactctttcacccaggctaaagtgcagtggtgtgatcacagctcactgcagcctcaatgtcccaggcttgggcaatcttcttgcctcagcctcctgagtagcttggaccacaggtgcatgacactatacctggctaattttttaattattctgtagagatggggtctccctgtgttgcccaggctggtcttgaactcctaggctcaagcagtgctccaatcttgacctcatggtggcatgagccaccatacctggccttatttttttagagacagagcctcactctgtcatccaggctggagtgcagtatattttatttttattttatttttttaagtgacagagtctagctatctatatttatatttatataaggggtagaggaagtgtttgcaattaaccacaggtgttctttagctaaagatctaagaaaagggagagagaaaggaaataaaaggaaaataaagatctctttattataccaaggaaatagaaaaaatgttaaactcttacaacttacttggatgactacctgattaataaataagttagtaaagagaagcaatattaagtttatctaaaaattgctgtcagatttatattgttgcatagctaatagtaggatactct

SEQ ID NO: 3143 - DNA, 1060 bp, Homo sapiens
attgatattgtttcttcctcaagtatttgcaaagaatccaaacagtctctaacagataaaaaagacaaggaaatagattcttccacagagcctccagaggagtcacagacctgatgatatcttcttgctttttggcccagtgacaccatgaaaacaatatgacccatgatgaggagaaaacaaatcgattgaaactcacaactgacatgcttagaattagcagacaaaatcattagagggttattagatacggttgctataactgtatttcacatattcaaaaagtagagataaggaatcgacataactggaaaacacagaattggtagaaccagtaaacagaaaactagtaaggacctaggagctggaatagcatagtcagccaacttgatttaattgactaaacattcaaacagtagatacacattcttttcaaatacaaattgaagatttaccaagatagaccatattgtggttccagaaacgaggcttaataactttaaaaggattcaagttggaaatcagtgagaaaaatatctctggaaaatcccccatatgtttagaaactaacacacttttaaataacgcagaggtcaaagaagaaatcagaaattataaaatattttgaaccgaatgaaaatgaaaacccacccattttctattttctattgctgttgtaatcaccacaaacataatggcttaaacaatacacattaattatcttacagttttggatgtcagaagtccaaaatgggtttcatttgggccaaaaatcaaggtgtcatcaggtctgtgactcctctggaggctctgtggaagagtctattcctttgtcttttttatctgttagagactgcttacattctttggctgtgtccccttcctccatcttcaaagccagcaacacagcatcttcaaatctctctgtgtttctcctacctccctcttttgcttgtaatgagcctttcgattacattggatccactgggttaatctaggataatagtctcctcatcacaagatcctttattatcacatttgtaaagtcagttttgccagg

SEQ ID NO: 3144 - DNA, 1037 bp, Homo sapiens
caaactggaaactgtcatggaaaaccaagaaatatgaatgacttaaccatgagtttttatgatgtgccaaaagagatgtgataaatccatgcttcactatgtttggtacaaaatccagaattaaattggttaatagattgatttcatttgttctggcaatgctaatttatatctaccatgtgacaggcccttttctgacctctagcaccacagagatgaatgaggcaaagtctttttccactgagaacttgataattttgtagagagacagataaatatatatatatatatatatatatagggatgggtaaggtgaagagaggagggaggaagtgatggtccctgttagagtgtattttttattattcatagtagctcccacatattaaggttaaagcaaatttctctgtgctttgcagtctggtaatgtagactcactgatggtcagatggaaagtagattttttttttccatctagagttatatattcgaggcagtgagctgtagcattttatttggagatgaaaagtgttgagtaggtgtaagggtaactgtattatagtctctttcctaattaaattacatatttgtgctgtagtgattgacttttttgcatctgtactagatttaccttgaattaaattgcagtcttttttgatgatggtagaagtggttcaaaagtgtcttattaaaatgcaaaagtgcctaaaacacagagcagtaaaaacagaggcctagaagatatgccagtggtctcattggagtcatctttgttctcagtgtcgacaattgcttaatggactgtcctccactgaactttttggagcaaacctacttagtgtcactttgccattttatttttttaatgacatactgtgctgttggggcaacaaactgcacatcctgtcatgctacaaaagcaaaagacaactttaaccaagataaaaatgaagctggaattcaggcaagaaagtgaaggataaggcagacttgagaggtggggtattgagtggggaagcgttttgaagttagatctg

SEQ ID NO: 3145 - DNA, 1060 bp, Homo sapiens
ccatcttaaaaaaaaaaagaaagcatcagttgttttcggattgaagaacaagctctgtaaaattagaatttggtgtgtatatatcttcagtgtactctgaaaagcctcagttattggccacacttttaatatcaccgtcactttagtaattaaatgcataaaactagatattaattggatgatatattaaagtcttgggaatttttattgtttattctctgtatctggtgggaggaaaaaggagtgttttgaacttgtgggaaagcattccccattaatcatccaggagtttgttttctacaattttaggaatgtatatgatgtatagtatgtaacattaactttcccactttttaaaagaattgtgacttttttattttattatttttacctgtatcagatataaaaccattatttaaattttcttaggcagagggagatttctaatttttctatttattttgtttttttggctcttgcttatagtacatttttaatgtatattttgtaagtttgttttatgaacttatccagataaattttcctggatgtagattgatggcaagttattctaaagcagatttgtgtttactttatctgctgcatgtcttggggaaagcatttgctggaactaaatctgggtttaatgtttgttagaactaaatctgggtttaatgtcctaaagctacagttctatcccaaagcctaaggacagccataccgtatggcttggatactaattttcagggtaacagcaatcttctctccatccagttgaaacaacgtcctttctcatcatcactgtgttggttcagtggtttattccctctctctcttttttaagctatcttttcactgagcatgtcacccatttgggagtctcagagctttatgtgagcatctcagttccaggttcccactttgcagggatccaagatctctcttttcttatgggtgttaaaaatacaaattcattggttatagagactggcacacccttctacacccccaggaatgtaaggatggcatcagccactgacctgtagtttaccttatattc

SEQ ID NO: 3146 - DNA, 1067 bp, Homo sapiens
tcttccatagcctgccgatagctaaaatattactgttttcagagttttttttttttaaccaaatttatgtaatgttagaaagggctcactatttttttcagagaaaatggttttttttctttacactgaggatttttttttcttttttcttctattttgagacagggtttcgttctatcacccaggatggagtgcagtgacacgatcatggctcactgcagcctccacctcccaggctcaagcagtcctctcacttcagcctcctgagtagctggagctacaggcatgaaccaccatgaccagctaatttttgtatttctagaggcgaggttttgccatgttgtgtaggctggtctcaaactcctgagctcaagcgacctgcctgctacggcctgccaaggtgctgggattacgggagctacctcagccagccaaggagtttttaaaaatttccttcttcactgtagattccttttgaaattagcatataaaaactgacttttctcaaagattgttatattactcccagaaacaacagtctctacattttgcagattgtttttttctttctcaatagaaatgtctttactgagagtttgtactcagttacacaatctcatgttaactctaaagtctccctcctgcttgattgacttaagtacttctgtttccataagcctcccctttcctccaaaaagttggaagaatgtgggatttgaaatcattctcagacttgagcacttgctacttatatgactttgggcctgtgactgatctctaaaaccctcagtttcctcatatgtaaaataggcaaataatttctaccccaacaatcgtggttgtgagaattaaaagggacaatgtatgtatggtatttgacccagttcctggcacataataagtgcttaacaaatgttagctgccattattaagcttccggtttctcagagtttttgacatgaagagctagaatatttacatgaaggccaaggttccagacaaatctaccattttacatttgtttggcaccttatgaagacatagggaatacttcacattggtttgta

SEQ ID NO: 3147 - DNA, 2042 bp, Homo sapiens
tatgattatgggatgcatttccatttgtttgtgtcatctgtgatttctttcagcagcgttttgtatttctccttgtagagattttcacctccttagttaagtatattcctaggtatttcattttatttttgcagctgtggtaaaaggtattgaattcttgatttaattctcagcttggtcgttgttggtgtatagcagtgctactgatttgtgtacatttattttgtaacctgaggctttactgaactcatttatcaaatctaggagtcttttggaggagtctctagggttttctaggtatacagttatatcatctgcaaacagtgatagtttgacttcctcttttccaatttggatgccctttatttctttctcttacctaattgctctagctaggacttccaaaactatgttgaatagaggtggtgaaatgtaggcatccttgtcttgttcctgttgtcagggagaatgctttcaactttttcccattcagtatgatattggctgtggttttgtcatatatggattttactattttgaggtaagtcccttttttgcctacttggttgaggattttatcataaagggatgctggattttgttgaatgctttttcagcgtctattgagatggtcatatggtttttgtttataattctttttatgtgatgtatcacatttattgacttacatatgttaaaccatctctgcatccttgaaataaaacccacttgatcatgataaattatctttttgatgtgctgttgcatttggttagctagtattttgttgacagtttttatatctgtgttcatcatggaaattggtctgtagttttctttttttgtgtgttctttcctggtttaggtatcagggtgatactggcttcatagaatgatttagggaggattctctctttcccagtcacttggaatagtttcagtaggattggtaccagttcttctttgaatgtctggtagaatttagccatgaatccatctggtccaggctttttttgtgtgttggaaattttaaaattactgattcaatcttgctgcttgtcattggtctgttcagggtttgtctttcctctgatttaatgtaggagggtggtatgttccaggaatttatccatttcctttaggttttatagtttgtatgcataaagttgttcatagtagtctcgagtgatgttttttatttctctggtgtttgttgtaatgtctccagtttcatttctaattgagcttatttggatcttctctcttttcttggttattctagtgaatagtctatctattttttcaaagaaccaatgttttgtttcattgatcttttgtaatgctttttttgtttgtttgtttgaatttcatttagttttgctgcaatttctgttatttctttttttttttttttgagacagagtcttgtttagtttgtgcttgtgcttgtttttctaattccttgaggtatgacattaggttgtcagtttgcactctttcagactttttgatgtagacatttagtgctgtaaactttgctcttggcacttcttttgctgtactccagaggttttgataacttgtatcattattatcatttgattcagataatttttccatcttgatttcattattaacccagataccatgtagaaacagattatttaatttccatgtatctgtgtagttttgagggttccttttgcccccaagaactttaaaaatcattttcttaagccctcttaagtctgccttcaagcttttattttgagtgtccgggtttcctctcatcatttctgaccttggcaacctttcattgctttcaaggatgttctctattgcagatgtgtattgtcttgtcaggtcagtgtttaaagaaaaaacaatatttcatcaatctgaatgctgttagcccaagcatacaccctctagtttgttaagttgttctgttattatttactcccttttgcatcacatattaaggtttctgaagggatttgagtttgtgaccccttcgttataaactatttcagggctaggcg

SEQ ID NO: 3148 - DNA, 2444 bp, Homo sapiens
ttttttggttcagctatatgttaatattaggaatatcattagaaacactgtttttacttcaaagttactgaggaaattagtttcatactgttcagaaacctcattgaataagatgtaacctcagttattctggacaggctggttaaaagttttatcagaacagctggaaaatagtggtaagaaaatatttcacatacagactgttaaaatttttggaaaacattgcccgtatctatttttcttactctgcataagttaatggattcattttctttctcctctccttaccaccccgtaacaccctatttcttcaggcaacataggagtattttgacattatttgatgatagtgttaccataatagatgatcacctgtgttcatttgatacgccctttatcttggctgggctgccctctacagttgatttcaaaggatctttcagtattaagatttttatcctctgcctgtgttatttagcaatgcccagtaagttgaacagataatgactcttctctacttgaggcttgtatcattcttgtggctcctgatattaactacattataaaaatacttaagtttgttcctgaagtgttgtttacagatcacatgcattgatgcatgatagattctgtttgctttgtaattacgagaaatgcagtccagtaatgggaggtttactgctttattgttccttttagcagccaacaaaaaaatgttgtcaccaaaactgtgtcagtggagataactagaagatggttcctgtagttgtattgcatcccaggttcctatgttaccaactttgcctcctgtgctttcttttcatctccatcacctactctctgtggcctgcccctttggtttcccccatttattccgttctcctgctatacctttctggctgttgtttttctgtgacttaatttctttagggctatctttgccatggggtaggaaggctgaatggggatgagccttggacactagatcccagttcttccttttgagcacaagatcaagttacttataccatctgtgggtggtttgatgcctaagagtaggacaaaataagaccagagtgggcccaaaggtcgaagcttggctttatttggactgatagcaacgaatattttgctgctttatttattttggtgcaagaccacattttaagattgttattatagttctccattttagagctataagtgccctcttatatacctgattagttaaaaagagcaagcaagtctctgtcattaagagtctgatatatattgaaaagtttatttcttaggacttttacaaaaataacaaatgacacagatggcaagtagatcacagagatgctagacaatgccagatcatgaaatgggtgatcatgagatccaagagtaagaaccagtagtcacaactgtacttgtgccaccaagcagacatttccttgcacactactataacttgtggctattaataatcatagaggatttttgccactggatttcagttaaatgtaacttgattctttgattctatgtgtggttaaattctcaagtgaagaactgtcattctgattttctagtcttctttcttctcctattattactaaatagaaagatatttttgttgagctgcatgctatttcctgtcccttccaactgatctgtaagcttttccattggctttctttctgtttcctgctgctttcttgcttcatatttgaagggaggattcagacctatccaggtaacaaactactggttctgcatggcctctttataactcagtctgcttattattacattgagattgattgctaatgaatggatacattcacattggaaatttactattggtatattgtttcaaggcttttaatcttgcagtgaaaattataactacaggtactggttgccattttgagaaatttgaactctgctgattccagaccattcttaggcctgtctagattgtccacttttattgcaaactattctagaaggctcagtttagtatgggattgtgccaccttttggagaggaaaaaaactgcttagttcagcatgtgacaaccctacagatggtttaatttagcttgaccctgatggactgggtaaatattttatgatcaaagagattccttgttcttctaagtattttataaattacttgaacagcagtcttttaggaggctacttttaatttttaatgatttgataatgaaccacttactctttatcagagtcagttcttttatataatagagaaatatcaatattagctaccccttttgttatactttattatacatatatgtatgtatatatacagtatgtgtgtatacatatatgtatgtatatatacagtatgtgtgtatacatatatgtatgtgtatatacagtatgtgcgtatacatgtatgtatacatacagtatgtgcgtatacatgta

SEQ ID NO: 3149 - DNA, 1033 bp, Homo sapiens
aaaagtatcctatcttgttggatctgcccaaaatactgcctcaaatgagagttttcaccttcctctgccatccttctggtgtattaataataaatccttgaaagatgaaagaagtaaaacagattgaaatgaagtttaggaggtgaattttatgttgtacatggctctcttttctgtgcctagctctttgcagcatttttatcagttacttggataagtgacatttatgtcaagttttctttttttttttttttttttttttttttggagacagagctctgtcgcccaggctggagtgcagtggcatgatcttggctcactgcaagctctgcctcccgggttcacgccattctcctgcttcagcctcccaagtagctgggactacaggcgcatgccaccacgcccagctaattttttttgtatttttttagtggagacggggtttcaccttgttagccaggatgggtcaggttttctaatgatcctgtagtttgacactgtcatgcagtcggtacaatctgaaatgatggcttgtttagccagataaattttcatagttacaaactacaaaatcctctatatgagcttcaaaacacaattgtaagagtacacactgaagtgaagaacacagcttatttagccaggttatgtataaagaggatttaaatgctttaaatgagtgtcagtaccaatcagtagtaaaatatcaaaactgctcctgtgattcttggtttcattaatggaattggagctggcaggaataagagaggtatattgccttttcactcagcaacaaatatttttttagtgagtgccaggtacattctgggcagaccccacctcgatacctttgtgttggaacaagattgaaagaaaagatcaagctcatttgggaattaaaaatcttggttggagggacaggatgctagggagagggttatgattgacttgaaacaaaaaatagtggtgtgaaaattggcagtaatggcagcgttcacataacttagtggtctgttgctgatggagaaggatt

SEQ ID NO: 3150 - DNA, 1031 bp, Homo sapiens
ccatgctgcaaacagatgtgctatcattctggctttgttattttatttatagggcatagtctgagtagatttagcataattcttaagggccctaggattttccagatagtaaataagtattggcttcaaattaaagtcaccagctacattagcccctaacagtagagtcagcctgttgaagctttgaagctttgatgccaggcattgacttctcactagctgtgaaagtcctagctaaagagaagtcaatgcatgacatcttgtttcaatagatggctgtttcatctacactgaaaatcatgtgtttagtgtaggcacttttatcagttttcttggctggatcttctggataacttgaagcagtttctccataagtacttgctgcttcaccttgcactttcatgttatggagacagctgctttcactaaacctcatgagctaaactttgctagcttcaacttttcttctgtagctttcttacctctcagccttcacagaattgaaatgagagttaggactttgctttggattacattttggcttaagggaatgttgtggctggtttgatcttctatccaaactgctctttctccatatcagcaataaggctgttttgctttatcatttgtgtgttcactggagtagcactttaaatttcctccaagaacttattctttgcatttacaacttggcttttgaagtagctttcagcctatctcagcttttaacatgccttcctcactaagtttagtcatttatagtttttatttaaagtgagagatgtgacacaagaccatatagaggccactgttcagttattaatttccatataatggcctaacttcaatattattgtgtctgctgaataggaaggtctaaggagaggagaaaaatgggagaggcggggggacaacagacagtaggtggagcagttagaacacacaactttcttaagtttgctgtcttctatgggtgcagttcatggcgctcccagttacaatgataacataaaaggtcagtgatcacacat

SEQ ID NO: 3151 - DNA, 1050 bp, Homo sapiens
gaatttttagtacaagtagttaagtatggcttgtggctcctgtattgaacaactcagctctagggcttccatatcccgattcttagtgaaacctaaattatataatattgaccacatgccgggaaatatagaaaaaatttagaatggaataatctccattataaattaccatggattaacagattatcaaattgacacctgagtgatgtcccattatgtggactctttaaagcttgtccctttctaacttgccagcaaatcatagcactgttcttcaagagtacttcagacttttaaaagatattcaccaaggaaatttctaattgcagatgttagtttttcatcttctagtaggctgacctatatactgaagcatattttgtattgctttgcaagttaataaatataggcatgcctcggagatattgcagacttggtttcagaccacgacaatcaagcaaataactgcaataaagcaagtcgtgaattttttggtttcccagtgtatatatgttatgtttccactgtgctgtagtctactaactgaacagtagaattatgtgtaagaaaatgatgtacatatagtaattaaatactttctcttttttttgagatggagtcttgctctgtcgcccaggctggagtacagtggcgcgatctcagctcaccgcagcctctgcctcccgggttcaagcaattctgcctcagcctcccgagtagctgagattacaggcatgtgccactacactggctaatttttgtatttctggtagagacggggtttcaccatgttggccaggctggtcttgaactcctgacctcgtgatccgcccacctcagcctcctaaagtgctgggattacaggtgtgtgccaccgcacccggctggtaattaaatactttctggctaaaaaatgctaatgattttctcagtcttcagtgagttgtaatctttttgctggtgaagtgtcttcaatgtagatgggtgctgactgatcagggtagtggttgctgaggattgagatggctgtggcaatttcttgaaataaga

SEQ ID NO: 3152 - DNA, 1032 bp, Homo sapiens
cgtaggtgacagagcgagaccctgtctccaaggaaaaaagaagaaaaatgaataaacacacttatatatgcataaagagaagtttataaagagaaattttaaagcaaaattaagaacttgtataaattaataggaatagcctattttaaaacttattggtatagctatgtagtcttattcagattttaagattttaagtctttaccagctctaagatgatagagatagatttgcatctagcccctttacaatttcaaattttacattccaacattgtaatcaatctggaatttcttttggtataatgagttgaggatggttaaccacctttcttctaaatgattatttagttttctcaacacaatttattaattttggtatttttctattaatttgaaatgtttctaatacattctgcatatatgtgggattatttcagcattctctgtattactcattccatgtcattaaatgttcttctgtatcttttttaatgactgcaaaggattatacactgtggctgagtaagtgcttcttacatctatatctctttattgatttaataataaatttcttaaagattaagtagccagggcgcagtggctcacgcctataatcccagcactttgggaggctgagcccggtggatcacctgaggtcaggagtttgagaccagcctgaccaacatgatgaaaccccatctgtactaaaaatataaaaaaattagccgggcgtggtggcatgcatctgtaatcccagctactcgggaggctgaggcaggagaattgcttggacccaggagggggaggttgcagtgagccaagattatgccattgcactccagtctgggtgacagagtgagactccgtctcaaagaagaaaaaaaaaaagattaaaataagtgaaacagtcatctatcttaggccttatttacgcacatagcccacagcacagtgttttctttgtgctagatttctgctaatgctgttgatttaatttttattatcaaaaattatttagaactctataaaa

SEQ ID NO: 3153 - DNA, 2084 bp, Homo sapiens
tttttacaaaggtactttggtcggtatgttgttcacttggtgttttcattgggtgatgtggacctggatcatcgtagtctgttatcttggtgatgtcctgtgtttttgaagcagatacacatgtttttgaagcaaaaagtgtcctgctttatgaagcagatatgcatcaatagaatttttgctacttctcttatttcaagcattttattgcagtgggatttgaaatgtgcactaattatacagacttggggaaaaaatttctcatgaggttgcaggtgcctctaagcaatgtgaatggaaaaccattttagggtcacaataaaataatgtgccatacctgtggaaatatggaatagtaaacgactgtcccgaaacccttaggaatgagaatgttggatttttttttaagacaaaaacttaaggatggataatgtaaatgtttaataattaaatagcaagaggtaaaggaggaaaacttttagttctaatatcaatataggccagtgttctcaaacttttatacttcaggatccctttatactcttaaatagaactctttgggcttctcaatcctatgtgcattgtatctactaataaaaatgtctgccacatacccatgtgtataagcatagtttatccttctttcaagtaaaatggcattgcaagaaaaagtggctagttcagtttataactctaatggtgttacaagtgcttttccttagtactactaatttacctctgaactgttttatgtcttctcacttgatcaatacagtatactaaaaagacatgctaaattttgttagtttactgttttatttatataacattctttaaatgaccaaattatagagatggaggataaatttgtggttgtcaagggagaggagtgaggcaagaaggaagatatttgtggctattaatagggtaggtagggtagggtaataccacagatccttgtcaaggaatattttgtattttgactgtaatggtggttatatgaatttatacatgtgataaaattgcatagaactaaatatacacacagatgtgcatgcatctgtagtgaaactcaggaaatctgaataaggttgatggattgtatcgatgtggtttttctggctgttgtactgtactgtagttagatattaccattagggaaactagatgaagagtatatgggagctctgttttatttctcaaattccgtgtaaatctataattatttcaacttaaaaagtgatacattctgttacagaagtgacattcttttgtcaattacctgtagaataagaaaaattgaaaagttaaataaagaagtgacattcttaagaactggcttttttttttctttcctttttttttttttaaaaaaaagtttaatttgtcgtgaaggcttagggatgaagaatacaatgactatcattgccttggttttcactaagtatatgtaagatttacttagtgaaatctcagatttcctgagtatatatttaagatttactagtagctacatccaccttgcttttctatcattgttgaaaatatcagcacaggcctgtgacatcttagtatttattttacgaaaatatttcacctcccacacctgctttaatagcattacagagatgcccaggactctgtggaccacactgtgataatcagtagcttaaagcttcagtctttattagctgaggaaaacaagtgctatgcttaagactgtgtaggaaattcagtgataggtctctgtcactgtctccagcgttttatattgtggtcttgtttgttggatattattgtacttctatgaaagtagagttgcagaagtttagagtgatataaaatatagaactcataaaagcaaaacatgggaattaacagtttgctatacctgtgttgtgcagtatgttagccatgggctatgtatgtggctatttacattctaaggattaaaatgtatataaatacaatttaaatggaaatcagtggttatagagtttgttttttgcaagaagaaaaagttctagacatctgttgtactatgtgcatatagttaacagtactgtatacttagtggttaagat

SEQ ID NO: 3154 - DNA, 1039 bp, Homo sapiens
ttttcttccccccctccttttttttttaaactatttctatctctttgttaatattctctatttatgtatcttttttctgatttcatttaggtctctcctcccccccaccacctttctttagcttattgagtgtatttaggacagtttaaaagtctttgtctagaggctgggcatggtggctcacgcctataatcccagcactttgggaggccaaggcaggcagatcacttgagatcaggagttcaagaccagcctggccaacatggcaaaaaccccgtctctactaaaaatactaaaactagccgggtgtggtagtgcatgcctcttatcccagctactagggaggctgggcaggagaattgcttgaacccaggggacagaggttgcagtgagccaagattgtgccactgcactccagccagggtgacagcataggactccataccaaaaaaaaaaaaaaaaaggtgtttgtctggagctgaaagccattatcctaactgaactaacacaggaactgaaaacgaaatactgcatcttgtcacttacaagtgggagctaaacactgagtacacatggatgcaaagaaaggaacaacagaccttggggcctacttgacgatggatggtgggaggagggtgagaatcaaaaaattgcctaccagatactgtgcttattacccaagtgacaaaatatctgtacacacgcaacccctgtgacacacaatttacctgtttaacaaagctgcacatgcactcctgaacctaaaataagagttaaaaagaaataaaaaccaaataccccaggaacttgtctttaacttttgaactgggccagacaaccacaatcacaacatccttgaaaacagctgaattatgccagcgcctccaccggtgataattctttcagaacaacaacaacttgttttgttttgagatggagtctcgctttgtcacccaggctggagtgcagtggcatgatctcggctcactgcagcctccacctcccaggttcaagcaattctcttgcctcagctcccaag

SEQ ID NO: 3155 - DNA, 1071 bp, Homo sapiens
ggctgtggtgagctatggttatgccactgcactccagcctgggtaacagagtgagaccttgtctcaaggaaaaaaaaatatgtaattgtcaacactgtgtatcttcatacctcttttcatcttgcaaaactgaaactttttgtccattaaatacagatctagtgtcccttatccagaatgcttgggaccagaagagttttggatttcagatttttctgaattttggagaattacattatttacaggttcagcattcctagtctgaaaatctcaagtgctccaatgagctttttaaatttttttgtttcatgccaactctcacaaatttacagattttggagcatttggattaaggacactaaacttctttttttttttttttttttttttttttgagacggagtcttgctctgtcatccaggctggagtgcagtggcacgatcttggctcactgcaagctccacctcctgggttcacgccattctcctgcctcagcctcccgagtagctggaactacaggtgcccgccaccacgcccagctaattttttgcatttttagtagagacggagttttgccatgttggccaggatggtctcgatctcttgacctcgtgatccacccacctcggcctcccaaagtgctgggattacaggcgtgagccactgcgcccggccaaggacactaaacttctaactccccattatctcctctccccatcccttgccaaccacaattttattttctttctctgtgatttgccatggtgtcggtacctcatagaagtggaatcaaacagtatttgttttcttgtgactggcttatttcatttagaataatgtcctcaaagctcatccatgttgtaatgtgtgagaactcgcttctttttaaaggatgaataatatttttttgtatgtatgtgccacattttgcttgtccattcatctgtcagtgaacacttgggctgctcctacctttttagctattgtgaataatgctgatatgaacatgggtgtggaaatatttattgttttgtttcgttttgttttgttttttaaatgagagtctcgctc

SEQ ID NO: 3156 - DNA, 1086 bp, Homo sapiens
tttttacggtattgattttatatgccaatttattttggtgatagaaccaaattataccctgccaggtactatgtaattgactcttctgattcacccagaataagagtgggtgttttttgcttccatacaatcagatacgcctagatttaaagttatactatagtgttttcaaactgttaaaagcagccaaactgcttccccccatatgacgagcagtgcctgatccatagtaagcccctaaatagttgaatgaaaactagctgtaaatgaaattttccagaagtgtcactttttggctgtttgcagtgtggatgctttatttggcgcaatagcttttttttttttttttcctttttctgactggtactgttaattttgtacagttcagtaaaagtttaccagtacaagcttaacttaaaaagagccaaatactctaagccacccttagagaccttattctgtgagggtctgggaatcttaatattccagctgttctgtcattgtgaatcaaataattaagacttaattgctaagctggaaaagtcttttttaggatgccatgacagagatttaggtcttttaaaccagttcagtactatactgaatagagaatttcttactttttctgagtaggtgatctcattgtttagtatgaatatttctagaatgtaactcataaataagcttttattttattatttttttagaggtggagtctcactctgtctctaggttggagtgcagtggcacgatcttggctcattgcaacctctacctcctgggctcaaaccatcctcccacctcagcctctcaagtagctaagactataggtgcatgccaccacacctggctaatttttgtatttttttgtagagacggggttttgccatgttgcccaggctggccttgacctcctgagctcaagcaatccacctgcctcagcctcccaaagtgttgggattacaggtgtgagccactgcgcccagcccacaaataagcatttatatagagacatggtatggtggctaggtataaagaaataccatctctgtgtaactgattttaaatattaaggtgtttaaagaa

SEQ ID NO: 3157 - DNA, 1435 bp, Homo sapiens
tggacacatgagagtcctacacatatgaaacacgaagaagggagagaaggttgagggcttgagtaccctcttcatagggaagagggaagcagggtggggaatgggctatcgggagttttagaggggaagtaaatggtttttaggtgaaatgaatgagtccaaattacaatagtcttagacaaagttcctctgagctcctgggaggtggcgggaaggtgaggaatgagacttcagtgtgaacaaaggttgtcttattatgaaggttaaatctcctaagagttacccccaaaagtaaaatgaaaagtctgtcttgatgtggtgatggctttagtctcttctgttttccatgattaatcttttgtgattatttgatgagcttccatgggagggtggtcttaagacaattgtgtttcttttggaaagacattttcttagtcatatctctgtgccccaccaagttcatggatggtaatggaaagaagagcgttcaaaatagaggggaagggattataggcttgaagtcaaaccataggttctagggctggctttgttactttctggttatatgatattggataaattatttaatatctctggaacttcgtttcttcatctgtcatatagggggaaattagaattctactgccctgtaagagcgttgttatgatggttgtgtaaattcctgcctcagaacaggatttcctaaatttagtaagtgcatttattatttgtattcctgccagacttggttctcctcaagatttatatatatgtatgtgtgtgtgtgcatgtatccttgcctgctaattcttttatttggctacctgtcgagatttagtgtgaaacttagaagctatctccaagagtttgaaatgtcttccatgtcttttctgatgttcggataaaagtaggatattaggcttggttattttctgttggcggtaatttgttttattcttctatacaaaacagattcagtcaactgaggataagatcaaagaaactattttttagctacatgtcctttttgatgtgacagtctccccttcttctgtgaattaaatctttttgtccaaagtaactacctatgtctgtgactcaatgtttgaccctcaatctactaaggtctaagtgaaagaagctaagctgaagaaaagtgaacttcataactttgaaacgtgaaagagggaaaatgaagaatattgtttccaatgtcctctgcaatctcattacctgcttctttgttaagacaggattttacacatccacaggtgcttcaccacacctgtgtatgtgccaagttttaaggcgtaatgtgcatttcccttttttacatgagctgtagttctttctagcttcgtcctctctggagattttgtttaattagtcaaagactttagactatgacatttcagacaatggtaaattggtgaga

SEQ ID NO: 3158 - DNA, 1048 bp, Homo sapiens
ttcatataagtacataaaacttaaaggtagagtttaacaaataattttaaagcaaaaaaaaaattttaaaccagctttaaaaaaatcacatgccctttctgtcataatttcctctctccccagaaataatactatctgccttttaaaagtcattttcctgcttctctttatagtgttgctaaacatgtgtacatctattgactaatacggtcaagttttgccggttttggatatttggataaatggaatcatactttatatattcttcttaatcttttactcagtaccatttgtgagggtcatctaaattgtgttatggtagttttttattctgtttctgtataggaaaattttcagtgtatgaaaatttcattattgatcaattctgttaatgaacagttgggttgtttccaatttttggttattaaaacaatacaactatgaacatttttgttcatgtaccctggtgcacgttttcattgttttcaaccagaggtatacctaggagtggaatggctgggtcatagggcatgactgtttccaagcttaccagctactgccaaattgcttcccaaagtggttgtaccagtttacatttctaccagcaagagaatgagaattttggaagccccacattgttaccaatgcaaaaatataatatctgtaagaagcaaaaatgtttctcgggcatattttcttttaaatgcaataagcagtacacacaaacatatattgcactacaagaaatggttgatgtattttgcttaggattaatattatagaaaagacaacagtctgtttagctttggaggtagttaagtagttgctgttttcagctgttctacacctctgctccctcccagccttcataattgagaaggtagcaatatctttcaaataatgggaaaacgtacttgttttctttgtatgagaacttgttgctactccctttaaagaagatggatttcaacagtatgacctgaaattgaacagtttaccaagagagaagaacccttagctagataatagaggattcagtaatcattaa

SEQ ID NO: 3159 - DNA, 1025 bp, Homo sapiens
caaagtccatagtagaacatacatggtatgtgtttgcttgagtttttaagtattacttgaatcatataaaattatttttcttttttaaggttaaaatatacttgaatatctgtaaatctggaatttcatgtaattcaacctattaagtataggtaagagtagagcaaggaggaatgccattttctttttctttctctttttttcttggtggttggggattggcaatgatattaacagaattcaaatggtgtcatgtataagtaaaacttccttcctcatatccactgtagtgctccttttagttgagcagaccagcttttatttagttctcaatatctgtagatttggggaaataaatgacctgaaggaagaactaggatgatacaaaatattaatgaagggaaaaatacttgacttatctattctgctgcttgaggagcataaagtatagaaattacccacataagaaaagctttgggatctttcaaaactacccagaattgaactttgttatttctgtgtatgagttgcagctgctgaaatgttttgagatgacctcactaaataaactttatcttgggatttagaaaataagggatgtcacacatataaaccatgtgccttttacctttataggaatcatttgttgctgaaaaattaatttacttgataggaatcctggagtttcctgttattcttttagtaactgattaattactatactttttaaagcagtatgttttcattcatattatataaaatatatagaataaaaacagtggtttgtgtgtgtgttatatttaacaatatatctattcagtcaatgcctgtttgtgtagaatccagtcacaagtctatatctgagtatttatagaaagtttggccaggtgtggtggctcatacctataatcctggcactttgggaagcggaggtaggaggatcacttgagtttcagagtttgagaccagcctgggcaacacagtgagaacttgtctctacaaaaaaaaaaaaaaaaaaaaaaaaa

SEQ ID NO: 3160 - DNA, 1033 bp, Homo sapiens
aacacactttttatatactaggcattatgataaatattatcttaatgtgttgaataaatcagcatgataagtccttacttttcacttttacagaagaggaaactaaacttaagtaatttgcttatatagtttctgtatagtagagccagaattcaaacttaggtctctgacaccaaaacccattctcatttttttctttttttcttccccccgccgccccaccactgttttttttttaagatagagtttcagtctgtctcccaggctggagtgcagtagcatgatcatagcttgctgcaacttctgggcttaatccttctctcccagcctccctagagctaggactacaagtgcacaccaccatgctaaatttttttttttttttttttggtagaaacaaccccatgctcttttattgatgctgtttagcctacttggatgccttgaatctgtttaccttctgtttatgttccttctttcaagtttgtgtttggaaagtgataattcgtgactcagcctcagaatggaggcatatatcacacatcttacatgatttggatctgtgtcagaggaacttaatattgtggttttgataatataattgaatttatgcttatagttgaatactaaaatctgagatttattaataccttggaattaaaatagaattcacttaccttggatcagttaaataactagttgattagcaactgactgaagatcaacaggaaaatagtaaggcattagttttaaaaaattaagttgtaagttggtaaatgactaattccattgcagtcactgaatgtatatcagtaatctccagactcgcatacaaccttgtcttggtggaaagctctgactatggattttgaacataagaaagagaatgtgagtgtctgttaaaagccatcactcctcagatgatgttaaaagtcttcactccacatcttctgaggagttgtcaagtgttcctgcttctgaccacaaggacagcaattggcctgtaatatatgtattccttgaaaaagtaagg

SEQ ID NO: 3161 - DNA, 1061 bp, Homo sapiens
ccatgttggccagcctcatctcaaactcctggcctcaggtgatctgcccaccttggccttccaaagtgctgggattacagacatgagccaccctgcccggccctatgtgtgtctttacggggaatttcctataggcaacatataggtgtgtaatgttttttaatccagccagtctatattttttaattgggaaatttaattcatttacattcatggttattattgatagataagtactaattcctatcattttgttaattgttttcttgttgttttgtatatcctttgttccttttttccctctccttgtttattatttcagtttgttggttttctgtagtgataagattcgattcttttttctttcttctttgtgtatctgatctatcagtgagttttatactttcccatgttttcatgattgtgattatcatcttttcacttacggtaaccaccccggcgaatactttactttttgtagaggcagggtcttgctgtgtttcccaggctggtctcgaactcctgggctcaagcgattctctcacctcgctcggcctctccaagtcctaggattaaaggcatgagccagtgtacctggattagttttcttttttaatacaacattgtattggaaaatatttttccaagttattacacagcagttataatcttcctaattctgtaggaacataataattaggaatttttaaagaactttcttcttagccatttaatctttttttcctgtttaatgcgtttgaattatttggtatggaaaagtaatgaaattttcttgattgttaagacagaaaggatttggttgtaagaagatttatgtatataaattattattatttttttctccagtagcatttatgaatgataactgaccatagttagaaatccagatttttgtatttgataaatttaaatacgagatgatagcatttagatattttcataatgttaggcattcttataatgtttagcttagaatttgccagtcatttggaaatacctaagtcagttgttctcaactggaggtgagtttacccccagag

SEQ ID NO: 3162 - DNA, 1097 bp, Homo sapiens
ttttcgtttgtgtttccctgatgatcagtgatattgagcacttttcatatacttgtcagccatttgtatatcttcttttgagaaatgtctgtttagatcatttgtcctttttttttctttttttttttttctagacagggccttgctctgttgcccaggctggaggacagtggtgcaatcctgactcactgcagcctcaacatcctgggcttgagtgatcctcctgcctcagcttcctgagtagctgggactacaagcatgctgcctccataccaggccaatttgtttatttatttttgtagctatggggtcacactatgttgcccaggatggtcttgaatgcctgggctcaagcagtcctcctatcttgacctcccagagtgggattacagatcactgcctgcccatttttaaattggatttttttcttcttttctttttgctgttgagttgtgtttcttatatagtttggctgttaatcaattgtcaaatgtatagtttgcatatattttctcccgttctgtaagttgtctctttactctgttgactgtttccttaaatttgcagaaactttttaattggatataatcccacttctctagttttgcttttttctctttttagattttacccaaaagaaaaatcttttttcagaccaatgttctgaagcatttccttggtgttttcttgtattcgtttcatggtttcagatcttaacatttaaatatttagtccattttggtttgattttggtatatggttagagatagggatctagtttcatttctctgcatgtagatatccagttttcccagcactgttgattgaggagactgtcctttctcctgtgtatattcttggcacccttaaaaaaatgaattggctataaataaatggatttgtttcttgattctctgttgtcttccattggtctatgtttttagtccagtatcatgctgttttggttactgtagctgtgcagcatattttgaagttaggtagtatcatgtctctatttttttattttttatttttattttttgagatgggatcttgctctctctcccaggctggagtgcagtgggcatatcttggct

SEQ ID NO: 3163 - DNA, 2056 bp, Homo sapiens
gcagtgtgatacatgattgcgcctctgaattccagcctggacagtagagcaaaatcctgtgtcttaagaaaaaagaaaacttaaaatatttttttctggcacaacctttctctaggtcttagttttttatagttttttcaaaaagtactatgcaaaagaacagcatcattgtcagaatccctcttaaaatacgataatgttttctaattacctaagtatactttcaccatttaattattatttttaaattaagataagtaaaaatgaaaacttctagtaatcctgagtgatttatggaggcaaatactataaccatttttggagtgtagcttgtctttcttgtcttttttttagaccctatgctttattctgtccctttatctcgtatcagctttttgtatgccattccttagataacatttcttaaataataaatggttatatattgtttattataaaagaatttaatcactcagcattgaatacttaagcttaagcttttactgtgtgtcatgcagtggtctaggtgttcaggatatggtaatggagcaacacagaccctcagccctcatggatattacatctttatgggataagaagacagcaaacaaatatatatacagtatactattgggttttagtaagtaacttgatgagaataaagcaggataaagggatagagaatgactggccattctaccttaactaattctctcagggaaagtctctctgaaaaggtggcaattaagctgaaactgaagatttctaggaaaaaaaaaacatttgtggtagaaggaacatcagtgcagaggcccagagataggagtgagctcaatgtagtcttagaaatggaagaaagccagtgtggctggaatggagggaggttggatttgagacatcagattatgtggactggtatggtttggctttgtgtccttacttaaatctcatgtcgaattgtaatccccaacaagtcaggggagggacctggtgggaggtgattggatcatgggggcagattttccccatgctgttcttgtgatagtgaatgatttttcatgagatctgatggttcaaaggtgtggcacttctccccttgctctctctctctctcctgccatcatgtaagacgtgccttgcttcctcttcgttttctaccattattgtaagtttcttggggcttccccagccacgtggaactgtgagtcagttaaacctcttttttttctttcttttttttttttttttaaattacacagtctcaggtagttctatagcagtgtgagaatggactaatacatggacattacagaccatagtaaagattttggattttaatctagatataatagaaagccagtggaggattaagaggagtaggtgtgaatttacttttaaaaggtcactgtggctgctgtatggagaatagactgtgtgatgtggacatgtggtggtgattgaaatgggagtaaggagaagtaaagtcagtagaatatgttgatgtcttggatgtgggatgtgagagaaaagagtaaaggtggtgtcgtagatcttggtttgggcaactgagtggtcctatttgtggagatgaatactgaatgaggaacgagtattttgttgaaaaaacctgagttataaaacctcataaatgaggacatgtaattctgtaattttattactttggagaatagatcatccaaatcctgtgagcaacagcacactgcctgtcatgcagtttacaggaaatatttgaatctaagcttttgaatgtatttttttagtttgatctaatttgatttttactatttaaaactactgtcatatttgtagtcctttgatcagttttaaaaaatcgagaccaggcatggtggctcaaacgtgtaatcccagcactttgggaggctgaggtgggtggatcacttgagctcaggagtttgaaaccagtctgggcaacatggtgaaaccctgtctctattagaaaaaaaaaaaaaagtgtgtgtgtggctgggtgtggtggctgacgcctgtaatcctagcactttggcatgccaaggag

SEQ ID NO: 3164 - DNA, 1016 bp, Homo sapiens
gttgtagatgtgtggtattatttctgagggctctgttctgttctgttggtctatatctctgttttggtaccagtaccatgctgttttggttactatagccttgtagtatagtttgaagtcaggtagtgtgatgcctccagctttgttcttctggcttaggattgtattggcagtgcgggcccttttttggttccagatgaactttaaagtagttttttccaattctgtgaagaaagttattggtagcctgatggggatggcaatgaatctataaattaccttgggcagtatggccattttcatgatattgattttatgaggccagcatcatcctgataccaaagcctgacaacaacaaaaaaagagaattttagaccaatatccctgatgaatattgatcctcaataaaatactggcaaaccgaatccagcagcacatcaaaaagcttatccacagtgaccaagtgggcttcgtcactgggatgcaaggctggatcaacatacacaaatcaataaatgtaatccagcatgtaaacagaaccaaagacaaaaacacatgattatctcaatagatgcagaaaaggcctttgacaaaattcaacagcccttcatgctaaaaactctcaataaattaggtattgatgggacgtatctcaaaataataagagctatttatgacaaacccacagccaatatcatactgaatgggcaaaaactggaagcattccctttgaaaactggcgcaagacagggatgcccctctctcaccactcctattcaacatagtgttggaagttggccagggcaatcaggcaggagaaagaaataaagggtattcaattaggaaaagaggaagtcaaattgtccctgtttgcagatgacgtgattgtatatttagaaaaccccatcgtctcagcccaaaatctccttaaactaataagcaacttcagcaaagtctcaggatacaaaatcaatgtgcaaaaatcacaagcattcttatataccaatgacagacaa

SEQ ID NO: 3165 - DNA, 1151 bp, Homo sapiens
gtaattttgttcaatggatatactgctgtagtggtgaagtcagggttttcaatgtgtccatcacttgaaaaacatatgttgtacccattaagtaatttctcatcatccccctactccttgtgagtctttgttttctgacattccacactctacctccatgtgtatacattatttaaatctcaacagtaagtgagaacatgtgatatttgtctttctgagttgtttcacataagatcatggcttccagttccatctatgttgctgcaaaagaatgacctcatttttttatggttgaatagtattccattgtgtatatatactacatcttctttatgcagtcatcttctgatggacacttaggttgattccatatttttgctattgtgcaaggtgggcatttttgaggagagaggcttactttgttgccttctgcctttgctttgccatatggattgattgtatttgaatctgaattgggcattagaaaacactgttaaagcatattagtctgttgtagaactaaaaatgtgagggcattagaaacttcatttgaaacttttgtgagtgtatcattcatttttgcatatgaatatcattttgtctcacagaaaatgtgtatgtgtatttttatcttgtgtagaaataacagcgtagtcagcagccattgttgcatagtctctggcaatattgttttgttttttttttgtttgtatgtttctaaacttacaggatatgtttctgggtaaacttaaaaatgactagcaggaaatcaattggcaatatgtgctgacttgtatctgagttaatagaaaatcagagccagaacaaggggttttctggctaagctctttgagactaatgtttctggatttgttaaaaatctaatataggtcaggtgtagtggctcatgcctgtaatcccggcactttgggaggctgaggcaagaggattgcttgagcccaggagtttgagactagcctgggcaatatagggagacaccatctctaccaaaaaatttaaagattagctgggcacgatggtacacacctgtagtcccagctactctggtgagtgaggtgagatcacttgagcccagaaggttgaggctgcagtcagctgtgaacccaacactgtactccaaaacaaaacaa

SEQ ID NO: 3166 - DNA, 1047 bp, Homo sapiens
agatagggcctctatcagccaggccggagtacagtggtgcaatcatagctcactgcagcttcgactcctgggctcaagccattctcagcctcccaaagtgctgggattacaggcatgagccactgcactcagccctttttctaaatatttatatgtttctgatttttaccactcacatttattttaaagtctttataagttggctatctttgagaaatggcatttgatttttcaaaactttttttggtagagttttaaatttggacttacgatactggataagtagtgattagattgtgctgaaatttatggaagaaagtcactttgagtatgccccttctacataagaacatagaatgtgctgaaaagctttctatttgagaatatttttattataacatgctttcctttaggcgttttattttgaaatgaaatgctgctgaatgctataagaaagaaaacatctttgtgggaattgggtatatctagaatgagaaagtaaaatattgcctgtagaatttttatacctcagaaaaaccaaataaagtaacattgacttcacatgggtatccatcttaagaaattatgtttagagttttgatagtttgtaggatttttttttctcagtaagggcattttaattgaatttaggaagtaaattataaatgatgtaaaagtttgtattcttcctgttaatgttataaccaaaagctaaaagataatgtagttcactgttttgcttagtgatcaaaaattttattttgtttattcattgctgttcactggaagacctgctgtcttgggtggctctgagtggggtgagattgacttgtagaatggttttcaactcttactggttgtgaatttacaaatacaggtagtgaggaaaagtttttccagtgtactctgatattattgagaatgatgactacaggatgaaggaagagaattatattttctgagtggtggtagctaatattttatgttactgttgataaccatcagatcattcttctttaaggggaaaaatagacttaattaaaaagt

SEQ ID NO: 3167 - DNA, 1035 bp, Homo sapiens
aataccattttagactgggtgtggtggctcacacctgtaatcacagcactttgggagactcaggaatttgagaccagcctaggcaacatggtgagacactgtctgtataaaatattaaaaattagctgggcatggtggctcactcctgtagtcccacctacttggaggctgaggtgggaggactgcttgagcccaggaagttgaggctgtagagagtcaggatcatgccactgcattccagcctgggtgacagagtgagaccttgtctcaaaaacaccccaaaaaccattttacaggttaggaaactaaacttgttggtctgacttaagtttatgctgcatattccttaggaagctagtaaaaagtaaaaaagaaggtaaagttcatactcgtgctcttatactgagatgcgtattaagtaatgtgagttgagattcatattcggtgccatagtcttttttcttaaccccatcaatcaattgggatatgcatatttataactggtatcttggatctattaggacatatttactgaagactatatgtatttgtataatagtatgttagatttttttttttttttttttgagatggagtctcactcactctgttgtccaggctgtagtgatctcggctcgctgcagcctctgcctcctgggttcaagtgattctcctgccttctgctcaagtagctgggattataggcatgcaccaccatgcccaactaatttttctatttttagtagagacgaggtttcaccacattagccaggctggtcagcctcccaaagtgctgggattacagatgtgagccactgcgcctggacatagatttttattagttggtttttttacatcaggacatggagtgctattgttagtttatgatttgacctaattttgcttacaaaggagtgattactcaattggaacagacttaatgatgtgtaattgagaggaaatagaggaaaagaagatggactggattgataaattgttgtaaatttatagattatgtaacttgtcaaaagtgac

SEQ ID NO: 3168 - DNA, 1564 bp, Homo sapiens
tgaaggacatttcttgaaagctttgtactacaccttgaattttttttttttctttgagaccgagtctcgctcttgtcacccaggctggagtgcagtagtgcaaccttggcttactgcctccgcctcctgggttcaagcacttctgcctctgcctcccaagtagctcggattacaggcgcccacgaccacagctggctaatttttgtatttttagtagagatggggtttcatcatgttggctaggctggtctggaactcctgacctcaggtgatccacctgcctcggcctcccaaagtgctgggattacaggcgtgagccaccatgcctggcctacaccttgaatttgaggaagagatacgtaatgtttaagatatttgaagaatatcttaaacacagtatcatgtgtttccaactcctaaattgatccctagatagaccatcagaaggctgtgtgtaccatagcaattctgtctcttagaaatgccttccatctaaagcctgctctttgtcaacactggaattacagcactggataaggtttgtgtattttttataggacctatgtggcagaattttacttaatcataatctaggaaggaactctgcagataagtttgttttctgtggtttaaaaagttatccactacaatttgtcttttcctgccactcacttccctttttattttaaccttaatgccagtaaattttaagacaagtttttggcccaaatgctctgatctattaatactttttttttctttctttttttttttttttgagacagtcttgctgtgttgcccaggctggaatgcagtggtgcaatcttggcccactgtaacctttgcctcccaggttcaagcgatatctcgtgcctcagcctcctgtgtagctgggactacaggtgcgtgtcaccaaagccagctaattttttgtatttttagtagagacagggttttgccgtgttggacaggctggtattgaactcctggtctcaagtgatctgctcatctcggcctcccacagtgcttggattacaggcttgagccaccgcatctggcctctgaactttagatattgaaggcatcgcatctttctttttttgatgaactgtttttcccacagtgttatgtcttgtattatttaagcctaccactgtctcagagtcattgtggactagggcagattaagaaaattggagatccttttgtgactagacagatgtcttacaacttttaaatattttgataatttaccattaagaaagaacggcaatgataatggaagacacaagaggaaaagcctggccatcaagctgtatagcagttttccagaggcttttactttttattgggattggattatattaaccttacattcatgttccaaccgtgtaattttgccctaatacattattttaacttttctctagcttctgtagacatcatgattcctgtcttgcttgaatccgaatctgtatagcttgaaacagcattattactagtataagtgcaattacacatcatccatatgtgtaatacaaactggcagactaagaccccagcc

SEQ ID NO: 3169 - DNA, 1023 bp, Homo sapiens
tatcactttggctatgtttattgagttttgaataaaaatatctaacaatatgtttactttgatacggagaacattatttatattaatgatattgatctttctattgccttcatttttgaaaaatatttttcctcacataaaattctgtgttgacaagtatttttctttctttttttgattattaaaaaaattttttttttgagacagtgtctcactgtttcccaggctggagtgcagtagtatgatcatggcttactacagccttgacctcctaggctcaggtgatcctcccacctcagcctcccaagtagcttggactacaggcacacatgaccacacctggcaacgttttctgtttcttgtagagatgggttttgccatgttggctaggctagtctcaaacttctcggctcaagctatcctccagccaaaagtgctgggattacaggtgtgagccaccatgcccagccacactcttttaaagtagtgcaaatgtcattgttttctgactcgtattgcttctcacaaggtctgctgtaattcttacctgtttacttaagtatatgtaattttttgttttcttcttcttgctgccttcatgctgtttgattttgatgtttccaggcttgtgtgtttgttggtttgttttatatttaccttgcttaggatttctctaaacttcttggatctgtggtttggaatttttttttttttttttctggaaaattctaggtcattatctcaagtatttcttttttttagtctcttttttcttctgtgaatccagttatacatatattataccatttgatactttcccacattagtggaacctcttttttttttttcttccctatgttgtagtttgagtaatttctgttgatacatcttaatgtatctttaagttcgttgatttttttttttttttttgaggcagaatctcactctgttgcccaggctggagtgtagtggcatgatcttgactcactgcaatctccatctcctgggttcaagtgattcttg

SEQ ID NO: 3170 - DNA, 1015 bp, Homo sapiens
ctccaaagtgttgggattataggtgtgagccaccacacctggccagcccagtgtatttctatatttactatatatgtatagctgagttttctaggtgtctttttatttcagctgaagaagaaattggaattattaaatctcaattttgacatgtgtatattttttcagcctgtaagatattttctgaacttagctccaacattgtatttctggagagttattaagtctcattatgactgagatacaggaatgtgaggtttgaaagagctaatcttagtattaatacccaatattttgagctgttaagattttaatcttataaagggcaggaataagactgtttaaaattattttgctcagtgaagtaaaattctaatgtgagattttattaaatagggtctgctttactatatttaggcgtaagcatagaagcagcaagtgacattgaaatccatggtgtaaatctccgcagtaagtacagttcaacgactgagaacattgtgatgatggtgacctttaagcatctgaattctgatgatacttatttatctataaatgagaatgacaatacttagattattaggataatggggaggactaggggaggactagagtatataaagtgcccggaatcatcctgggtgctgtcttagtgtatcagatatatttcaaaccttagtatttgtggcctttgaatttaaacagttgctgttattagcttcaattgttagagatagtgtcaatgagtggaatatgtcagctagaagctactccttttagattttccacattctgaaaggtaggactatgtttcctttttgatagttgcatcttcactctcctatagggagccagtgggactccaaaccaatagcatagacaacagtcattaagaaagaaggcttaggctgggcgcggtggctcatgcctgtaatcccagcactttgggaggccggggtgggcggatcacgaggtcaggagtttgagaccagcctggccaatatggtgaaaccct

SEQ ID NO: 3171 - DNA, 1045 bp, Homo sapiens
agccagagtttgagaccagcctgagcagtgtagtgagacctcgtctctacaaaaatttaaaattaattagccaagtgtggtggtgcacacctgtagccccaggtagtcatcaggctgaggcaggaggatcactttagcccaggagttcaaagttgcagtgaactatgattgtgccactgcagtctagcctgagcaacagagtgagacctagtctccaaaaaaaaaaaaggaaaaacaaacaaacaaaagcaaagtaatatcatatgagccacccatgtaattttagattttctagtagctacattaaaaagtaaaaagggaaaaacaggaaaaatcaattttaataatatttgactcaatatataaaaatattattaagacatcatataaaaattattagtgagatactgtattttacattctttgtactaagcctttgcacttcagtgtatgttttacacttacagtaacagcacaccttgtcttgcactagccagatttcaagacttcaatagcccagcgttcctggaggctacctattgaacagtgcagttctgtaatatattcaagtgtaaatactgttttctgtctgctttcagaaagaatcagaatgagcagatttgaggtgcaagggaaaggatgaagaggcagagctatatgacaggcaatacctatcagtattgtgatggttcataccatttccttcctgggttagttactctactaacaagtgtgggtaactttgtccaggcatttgggcactgtattgtgattttattatttatcagtttttcccattaaaccatgtagttaaggcaagggagtatggttttttgtttgtttgtttttgttttttttttgatacggagtctcgctctgccacccaggctggagtgcaatggtgcgatctcggctcactgcaacctccgcctcccaggttaaagcaattctcctgcctcagcctccagagtagctgggattacaggcatccaccaccatgcctggctaatttttgtgtttttagtagagatggggtttcaccatg

SEQ ID NO: 3172 - DNA, 1034 bp, Homo sapiens
atgagccactacacccagcccatttactgtaatttttagcctttgagaattttgtgatattggctagattttgccatagagatttgtaagtaaccaaattttattcctaacattgactactagataactgaatggttttggtgagactttaccattcacacttgaatatttatgttttctttaagggaaatcacaatgtatataagtttttaattttgtttcaaatgaattccatttgataaaacacgtagcatagctaggtggggtgactcaaaccagtaatcccactgagtcaggggcctgagtgggagtatcctttgaggctacgtgtttgagaccagcctgggaaacatagtgagaacctgtctcttaaaaaaaaaaaaggcataaaataaactggacacttttaagaggtatgttggtccggatcattggttttagaagatagagcaaaacttgagagttaaaccctagggttttttttgtttgtttgttttgttttgttttttagctctgattctactagaagtagtcatgtcatctttggcaattctcttaatgtaacattttggaacttggtttccttgtctatatgagagagttgatgataccttacaagttgtactgaggattacatgagccctccatgcaaaatactaaatacactgatacagatatggttggtactcaagaaataatggcataattttttttttcttgctatgttgcccaggctggtctcttaactcctggcctcaagcagtcctcccaccttggcttcccaaagtgctagaattacaggcatgagccaccatgcctggccaagaaacaatgctgttattactctagctagcagaaaacaaaaatcattttctggagaattagactatttaacaaggcacatgcttatcagtacgtgcgttacctcttctagtgttctgctgtgttgatattagtgaccaagatctgcatagtttgagaaccctctatttcaaggattaggaggtagaaagcttatgagaaagaaatctggc

SEQ ID NO: 3173 - DNA, 1035 bp, Homo sapiens
aacagaaaagccccccttctctagaaaagccatatgtgatcattatggaaaatacagggaaaaaaaaagaataacagtttactcataactctaactcattgatgtatttcgataaatttccttgaaggaattttttgtttatatatgtatacatatttttgtacatatttatgtacacataggttggcatatatgtgtttatatatatacatacacatttgcatagctgcaaatcatactgtaaatgtaactttgtattatttttcctattttaacatattgatatattaacatttctttctttcttttttttttttagagatagagtctctgttgctcaggctggagtacaatggcatgatcatagctcactgtaacctccaactcctgggctcaagctatcctcctgcctcagcttacccagttgctgggattacaggcatgagccaccctacctggccagtatagtcacatttcaaaaaacattctgaaggcatctttaatggctttatagtattagatatatgactgtgccacaatttactgaaaacacattccttattgttggattttttttttctttttttgacatgaggatcttgctgtgtttcctaggctggctttgaactcctggctatcctcccacctcagcctctcgagttgcagggattacagacatgcactttttttttttttttttttttaaatgagacagagtctcactctgtcgcccaggctggagtgcagtggcgcgatctcggctcactgcaagctccgcctcctgggttcacaccattctcctgccttagcctctcgagtagctgggactacaggcacctgccaccacagccagctgattttttgcatttttagtagagatggggtttcaccgtgttagtcaggatggtctcgatctcctgacctcgtgatccgcctaccttggcctcccaaagtgctgggatgacaggtgtgagccaccgcgcccggctgtttactcgatttttaagttaacagttttgctattgagaagaatgc

SEQ ID NO: 3174 - DNA, 1050 bp, Homo sapiens
taatagttcagctagaatttgaaatgttaggttaaattggctgcctttgaatgaaaaaggaacttctatttgtgttcagggtataatgctcagatgaaccgttggatatgcaaccagaaagcagttaggaagtgtttttcagtttagtctttcactggaaaccaaaactttgaaaaatatatttggagcggaggctacttatgacagaaggattcttaaagttcaactacttttgactcagaaggaaaactaagttgaaaatactcaaaaccagaaaaatagataatttcgtagaatgttgcaggttgttttgcctttctggctctcacaaaaaaggttagtgattgatactgtatctgcatattttctattcctttctctgtactttagttaatagcattttgtgattaaaaaaaatacgcccttgacttacttttcttgttgttattgaaagcagtttttcctgtgtctgagcatgtataacattagtgatctatatagagagtttgtttattgcaaccagaggcacattcctagggaagaatggtttttgaatgttccgttatcttatttccagtaggacatctttagaaatgagcaaattccattaaactaataaccctgattttggtggataagcacttatactaattctgctttgagaaaagagattgttcactctgctttaggagctgctggctaagtctggtgcttcttaacctttaactaagaaaaatgaggcttgctgacaataggtagtttttactggcctgtgaaacccaacagcatgttcagcaatgtaaaccacagcagctatcttttgctggcttcactgttgtttgaagtataatgaaatgcttcttggccggtctcggtggctcacgcctataatcccagcactttgggaggccaaggagggaggatcacctgaagtcaggagttcgagaccagcctggccaacatggtgaaatccagtctctactaaaaatagaaaaattagtcgggtgtggtggcacatacctataatcccagctactcaggaggctgtgg

SEQ ID NO: 3175 - DNA, 2032 bp, Homo sapiens
caaacaaaaaaaaactacaagaaaaaaacagtactctcaaatggaggtacgagatcagaaccttgaaagtcagtgaggactaggggaataggaagtagtatttgggctgacttgaagttgaggggaaggacatctacagttgagggaaatggtatgggcagagtcgtggtcagtggttaggaaatggtgtatggtgtatatggggtagtccgaagatccactgggataaaatagaaagcagcaaatgtgcatctgacaattttggagaacctttggatatctaactgtataatttattattcatttattattattttttgagatagggtcttgctttgttgcctaggctggagtgcagtggtacgatcatggctcactgcagcctcgacctctcaggctcacgcagtacttctgcctcaacctcccaagcagtagggaccacaggtggtcccaggttgatattttgtagagacgaggtttcactatgttgcctagcctggtcttgaactcctgggctcaagcgatcctctggctccagcctcccaaagtgcgggattaacagatgagagccactgtgcccggcctaatttttccaaggttttccaaggttttgctgaggtacatcctgtctagagggaaatgaaaaggaaagggtgatcatatcatgaaagctatcataaaggaagaaaaatagggatttgactatctttgatttctgaaagaagagttaaagttgactccagggttttgagactagaaaatgatgctgtcattgatagagtaagaaagatgtaggatttaattttatacgttgttttgagatagtggacagataaattcagtttaggacatgttggatttgaaatgagtgaaatatccaactcattttacaaacaaatggagataactgaagatgtttggaaatagggagatggaagtcagatgagcagaaatggttggaaaaacaaatctgtgataatataagcataatggagagagggaagagaaaagcaaagattattagtctatgcagtgtctggttacttgaggaagatgaggaagcttacagaaaagagaaagaagctgctgagaggaaagaggaggatcaacgcagcacaacctttaaactatccagaatagattcccactgagttttgtttatgtaattggaggaagtgacatttaatccttgatagctagtttttgattgaaagctcttgagtttttttttgttgttttttttttttttgagacagagtttcgctcttgttgcccaggctggagtgcaatggcgccatctcagctcgctgcagcctctgccctcagggttcaagcgattctcccatctcagcctcccgagtagctgggactataggcatgtgccaccacgcccagctaatttttgtatttttagtagagatggggtttcaccatgttggccaggctagtcttgaactcctgacctcaagtgatcctcctgcctcagcgtctcaaagtgctgggattacaggcctgagccactgcacccggctttttgtgtgtttctttacaagtctaaaattagttcttaaagggctttggtttggagagttacatttaagtttatacttttgcttattttctataatcatatattttagaaataaaaaaacttctcaaaatatttatttatttattttttagatggagtttcactctttcacccagggtggagtgcagtggcgctgtcatagctcactgcaaactcccaactcctgggctcaagcaattctcccgcattagcctcccaagtggctgagattagaggtgtgaggcaccgtacctgactaaaacttcaaaaatatgtaaatcacttgctgtctccctaataggctgctgttggggttctgggcagtagttactgtgaaatcattaatttgaacctggagttttcaataaaagattttaatatgctaatcaggaattgaacagagcatgataaactccattactatccttagttgataaattttaagcagaagaaaaggaactg

SEQ ID NO: 3176 - DNA, 1033 bp, Homo sapiens
tgtgcccagctaatttttaaaatttttggagagatagggataggggtctcactttgttgtccagtctgatcccaaactcctgggcttaagcaatcctcctgcctcggcctcccaaagtgttgggattataggcctgagccactgcacccagcccttgtttttttatttttaagctttgccaacatctgagttccccgacaatcgtgttcttaattcttgttaatatgttattagagttagaaaggattccttcttatattgcagataaaagaaggaaatgtgtagaaggtttttttttcttttttttctttttttgcccttttttttgtgcctcaaatctgaaggccttttatgtatagattgtactaggacctgcagatctagtgtctttactcatcataggtaacaattggatttagcgagaaaatataggtatttctgtttttgagtttcgttaacagcaaattgtttagatgggattaaaggcccaaaatgtactctagttatctttgtggaacccatggatgaacacctatatatatagagagagagtgtgtgtgtgtatgtatatgtatgtacgtgtgtatactcaccgttggactcaaactcaggtaattctactgcctcagcttcttgagtaggggggattacaagtgtgtgccactgtgcctagtttatgttgtgttttagtggtgttaaatcttgtgtaccaggtcagaataattgttttagttggaggagctaagttgaaataagtatttggttatcataagttacagttcataagcactttaaaaataaccccttttcttcaattaactatatattggcttggtgtgttggctcacacctgtaattctaacactttgagaggccaaggtgggtggattgcttgagcttaggagtttgaaacccccctgggcaacatggcaaaacctcgcctctaccaaaaatacaaaaattacctgggcatggtggtatgtgcctctggtcccagccactcaggaggctgaggtgggtggattgcttgagt

SEQ ID NO: 3177 - DNA, 1030 bp, Homo sapiens
tagttatttctctttattctcttatggtttgtaacgattcctgtgactttccttatcttttgtgactttgacacttttgaagattgctgatccattgtttatagggtgtccctcgttttggatttgtttgatgttttctcatgaatggggcgaggttatgcattccttctcattgccccatatcaggagattcatgatgtcagtatgatgatgattaccttgactacttggttaagttggcatcttgctggtctttctattgtggagttattctctttccttttgtagttgataagtatcttgtgggagatatttgatgagtttgcaaacaatgttagaatcttctcaaactttggttctcaattttagcaactgatggagcttgtctgcaacatttattgcttttgtggttgcccaattgtgactttctatttcactctttccttctacatttattgattataattctatgaggaaaagctttctttcctccatttgtttattattcatatcactatggactcatgggtatatattttattttatgggttaaaatccagtaactatcattgtttgttttcttactcagattgttctagctttggccatcaggaattccttcaggttgatttctgtgttctttcaagaagccattatcttttttttttttttttgagatggagtttcgctcttgctgcccaagctggagtgcaatagcacaatttcggctcactgcaacctctgcctcccaggttcaagcgattagcttgaacacagcctcctgagtagctgggattacaggcacctgccatcatgcctggctaactttttgtatttttgtatagacggggtttcaccatgttgcccaggctggtcttgaactcctgacctcagatgatccacccgcttggcctcccaaagtgctgggattacaggtgtaagccaccgcacctggcatctggataatttttcagttttttgtagagatagtcttactgtgttgcccaggctggtctcaaactcccagcct

SEQ ID NO: 3178 - DNA, 2164 bp, Homo sapiens
tctcatttagtggcttatcttttcattttcttgaggtctgtctctgtcacccaggctggagtgtaatggcataatcagatctcactgcagcctcgaactcctgagctcaaggagccctcccacctaagcttcccaagtaactgggactaactgcatgtgtgcgccactacacccagctactttttgtattttttgtagagacgggatttcaccatgttgcccaggctggtctccaactcctgggctcaagtgatctgcctacctttgccttccaaaatgcgggattataggtgcgagccaccactcctgcctagttttttattttcggtagagacagagtctcactgtgttgcccactcgtgtctcaaactcctgagctcaagtgattctcctgccttggcttcccaaagtgttggaattacagacatcagccaccccgcccagccttgtgcgttaaggttatataatccattaagtgcttgagatttagtgaggtgtgctatttataaaataaggcctattggataaacgaactttgaccatttctatccttttttatgcccggaaaacaagtgttgtctgcttttattattaagataaattactattaggcagtggtagttttgtaaaaaatagagtataagcatttgactgttttgctgtcctgtgaataattgaaattatgagttacaaattcttaggtttttggattttgcatagtgttagttctgtcaggttaaaattggttgttgattgatatgaggttatactcccaggctattctaatgtatatgttattataaagaaacaaaattggagctgggcacagtggctcacacttgtaatcccagcacttcgggaggctgaggcgggcagatcacctaaggtcaggagtacgagaccagcctggccgacatggagaaaccctgtctctactaaaaaaatacaaaaattagccaggtgtggtggcacgtgcttgtaatcccagctacttgggaggctgaggcaggagaatcgcttgaactcaggtggcggaggctacggtgagctgagatcacgccactgtactccagcctgggctacagagccagaccctgtctcaaaaaaacaaaacaaaacaaacaaaaaacaaaattgggaaatactgcttaatctcttgtttagcaggattctttttgctatttaggaaaagaccacattaaagaagaggttattttgttacccttaggtgtaataaaaacagtttatttgttttggataaagactttccacaaaaaaactcttcagttgcttaacattgggaagtgggaatgagtggagttgctgattttgtaagattgtatctgctttaagttttaaattattatgcatgtctccagcttagctcttactcaatattcaaaggaagtgggtcttaattagtccatgtataattttaatggcatcaagtacctaattaataattgttgaatctttgaggctaatgtagtcagctgatactccctgtgttacattgttgatctttttcagaaatattagagtttgaaagtagtccaacttcctggaataaatgctgtttcaaaagcagactacagagcacttgaccttagcttattaccttttatattgtgtgactgagtgagtgtatttaaatgtggtacattttaggtaaggcaatgaaagctgagtgtggctctggaatgtcattgatttcattcttgatcttcattagaaaaatcatagttaaaggatccaaacataagtatgcattagcttatttttcctttacacatagtagacagtaaatttaaaaagaagtgtctttgaaaggtgccaccatgagccagtgatttttctaagctggaaaggagtttggggatttttctggttcagctttctgccccctctcctacctttgttctagaggctgaggggaggttagggcaacttgcctaaccataaagttcatgccaactcaaatttatttgaggtctttaacaacactgaccagtgacctactaatagatcctgtttctcctgtaatggtcctggtttggatagtaaattatatggatacccccacctggtaaccattacatagcttagacaattaggaatctttttatttatttatttttttttggagatggagtctcgctctgtc

SEQ ID NO: 3179 - DNA, 1069 bp, Homo sapiens
taggccaggctggcctcggactcctgaccttaagtgatctgcccctctcagcctctaaaagtgttgggattacaggcgtgagccactgcgcccagcttattcattttttcgagatggggtctggctgtgtctttcaggctggagtgtagtggcataattatggctcacagtagccttgacctgctgggctcaagcagtcctcctgcctcagcctcttgtgtaactgggaccacagacacactccgctatgcctggctaattttttaattttttttttttttttagagatctcagtttgttgcccaggctgatctcaaactcctgggctcaagggatcctctcgctttggcctaccaaagtgccgggattacaggtatgagccattgagcctggcatggaagtatgaatttttaaaaggaaaaaaaagagtttaagactatagtcagggtttagataggcagaggtgggtggattatgatgagtgggtgatcaatatgaacaaagatttgggcctgaagcaagtgtagtgtatgctgtgttctaaggatttggatctgtgtgcttggaatggaggattctcatggtagaatattcaagataatggatccagattctagagcattttgaataaataagaggaagttagacttcagctgtgtgaaaccattacttttttaaaaaacagctttattgagatgtaatccacataccgtatgagtcacccatttagagtgtataattcagtggttttgggtatattcaaaaccagttgagaattgtacaactactaccataattttagaatatttttgtcactccccaaaggaacctgtttgactccccatgactccccattttcccccaattctccctgccctaggcaagtccaagtctattttctgcctctatatatctgcctattttgaactttttacgtaaatggactaatgtattttttgtgtgtgatttgtttcagcataatgttttcagggttcgtctgtgttgtaaccatgtattagcacttcatttttaaaattattgagtaatattccatgtaccatggacattt

SEQ ID NO: 3180 - DNA, 1095 bp, Homo sapiens
gaatagttttattctgtatctacttgaaatataagtgaactttttgtttatttggaatgcttttcttgggaatattttttcacctttggcttttagcttagaagttatgactgcacattacaaaggggaatgttcaaacctttatcagtaagtcaaacatcttttgagttattgttcctgtaatgttttgcattatttgcaagattaaaactcagtgtaacatcacaagtttttttcccatacaattatttacatttctttattatctctttaagttcatctttatatgttcaagtatactaagtttttaaaaaaggctgggagccagagtcctaattttttttttctttgtgacggagtctcactctgttgcccaggctggattgcagtgttgtgatcttggctcattgcaacctccacctcccgggttcaagcggttcccctgcctcagcctcctgagtagctgggattacaggcacccggcaccacgcctggctaatttttgtatttttagttgaggcagggtttcaccatattggcctggctggtcttgaactcctgaccttggccttccaaagtactgggattacagacgtgagccactgcacctagtgtatttatatattggccaggctggtctcgaactcttcatctcaggtgatccatctgcctcagcttcccaaagtgctgggattacaggcgtgagccatcgcgtctggcatttagttggttttcaggaagtgttagtatcatgaggagtgattgaaggaaggaggaaaagaccacagggattcatgcgggatgagggaaagaggattgaagtgtgggaacaaacataattttggaataaggagagaaaattaagtgggaatagaaaatgaacacagccagttttaaaccagaatactatttttacattgagaatggaaaggactgaaccttgaaggttaaatgagatgattcctgaccttttttctaggtcctagtaattagtatgtaagaaatagaacttggtcggagaacttggccaggtgcagtgactcatggcctgtaatcccagcacttcaggagcccaaggtgggtggattgcttgag

SEQ ID NO: 3181 - DNA, 1841 bp, Homo sapiens
ataagacattgaattttgttaatagaatgtaaactccatgaaggcagagatttttgtttattttgttcactgtggaattgctagcacctagaatactgcttgacagacagtaggcagtctgtaaatttatttgtttgtttgtttgtttgtttgtttatttatttatttttgagatggagtttcactcttgtcgccctggctggagtgctagtggcacaatctcagttcacttcaacctccgcctcctggattcaagtgattctcctgcctcagcctctagagtagctgggactacaggcgtgcaccaccacgcctggctaatttttgtatttttagtagaggcggggtttcaccatgttggtcaagatgttctcaatctcctgatcttgtgatccgcctgccttggcctcccaaagtgctgggattacaggcttgagccaccgtgcctggcctgtaaatatttattaaataaaaagtgtgttggactttgggaatcaatttgaagataagttttaggattaatatagatggcatcacaactcacttacagcattcaaagctgccctcaaattattttgcagggatgtataattgaattgaaaataattctgtaatttcctttcagatggaatagcattgacccagtttacaaagccatctgaagtgcctgagttgtatttgaagtacatattgatactgaggattagggttggtatgaaggccaaagaggaacaacatctgtagtcaaatattattattaaaaacttatgattataagagcaagacataattaaatgagaaatttggaaaaatatagaaaagtaaaaaatcactcataatcttattagtggagacaaccccttttattttattttattttatttatttatttttttggggggagagagtgttgccctgtttcccaggctggagtgcagtggcacaatcttgggtcactgcaacctctgcctcccgggttcaaacaattctgcctcagcctcccaagtagctgggattacaggtgcatgccattatacgcagctaatttttgtattttgggtagaggtggggtttcaccatgttggccaggctggtctcgaactcttgacttcaggtgatctgcccacctcggcctcccaaggtgctgggattacaggtgtgagccaccgcgccttgccacttttttaaagaggtggggtcttactctacctcccagggcatggtcatggctcactacagccttgacctcctgggctcaagcaatcctcccacctcagcctcccaaggagctcggaccacaggtgtgtgccaccacacctagctaatttttttgtagagatggggttttgccatgttacccaggctggtctcgaactcttgggctcaagccacctgctcaccttggcctcccaaagttctgggattacaggcatgtgtcccagtgtgtagctgtgataaccacttttaacattttggtgtatttctgtcctgatttttttttttctgtggattttaatattagtggtcatacatttttgtaacataaagtcagattatgtacctagttttgtatcttgcttaatttgctacctaagtatctgccatgaaaagtactttttttggccaggtgtggtggttcatgcctgtaatcccagtactttgggaggctggggcaggaggatcacttgagtctaggaatttgagaccagcctgggcaacatagtgagaccccatctctaataaaaattaaaaaatagtttgccaggagtggcagtgcatgcctgtagtccctgctactcaggaggctgaggccggaggattgcttgagcccgggaggtcaa

SEQ ID NO: 3182 - DNA, 1033 bp, Homo sapiens
caaaaattagccgggcgtggtggcgcctgcctgtaatttcagctactcaggaggccaaggcaggagaatcgcttgaacccacgaggcagaagttgcaatgagccgagactgcaccactgcgctccagcctgggttacagagtgagactccacctcaaaaaaaacaaaatcaaaggtcttctagaaaatgtttggaacccacgtcttttttttttttttttttttttttttttgagattgagtctcgctctgttgccaggctggagtatagtggcatgatcttggctcactgcaacctccgcctcttgggttcaaacgattcccctacctcagcctcctgagtagttgggactacaggtgtgcgccaccatgcctggctaattttttgtattttagtagagacggggtttcactgtgttggccaggatggtcttgatctcctgaccttgtgatccgcctgcttctacctcccaaagtgctgggattacaggcgtgagccactgcacccggccgagaaccacatcttaagtcaatggagaggattcctgtaatcccagcactttgggaggccgaggtgggcagatcatgagatcaggagatcgagaccatcctggctaacacggtgaaaccccgtctctactaaaaatacataaaattagccaggcgtggtggcaggcgcctgtagtcccagctacttggtaggctgaggcaggagaatggcgtgaacccgcgaggcggagattgcagtgagccgagatcgctctactgcactccaacctgggtgacagcgagactccatctcaataaataaataaataaataaataggattgccacattttgccatttatattgaggcttcaatagatgtggcaagtttatgaattcattaattcagcatccactgtgtgctgctacactcagtgctagatgtaggattgaagagctaaggtagaaatctttgccctcaaagaacttggtccttttggttagaggtgggtaaacaaaacgtcatgaggcaagtacagtgataac

SEQ ID NO: 3183 - DNA, 1285 bp, Homo sapiens
cgtttgacttttagagattgtaggatgtttgagcaagtaagaagctaactgctgtgaggtccccagattatttcacagtctgtagtttgattcttgtctgtatagattactttgagaagggaaagcaatctcccttctagagtcatttcaggtcattgtttgttttctgccaagtgtcattttctctgttctttaaacctagttcgtgattttcaatccaggcaccgcggtgcagtgtaaagataaattccattccagtgtgacgtgtgtactgatttcataatgtttttatcctgcatgattctgttcaattaggaattgttcaccgatgagaaagtgtggtgataacttagcgttgcttatggaaaacctggttggttttgttcagtgtctctggggtgggggaagattggctggtttgcctacttaaaggcagagttcagtgttgaatcttttaaacctgtctttgcttactactttgtgagtttaaattcctttctaatttcattttttaccttgattgcctatactcggttaggacttttaagtttctgaattgtgctaccacgtaaattactcattacctgcatctttgagctgttttggcaattgaacagaaataaaaggaaacctgtagtaggtgtccttgatgtacagagtagtaaggaccacagtgctgaatgtgacactgtttggtgaattgggtggctttttgggatacagctgtgtttcaagtatgctttttctcagtgcatttcatagaaggacttataaaagctctgagttggttgcaacattcaagtagttacaaaagctgaaacttaattttcttttgaataaaaagcacttgttaaagagataaatttaagtgtaagttccagtgtagataattttaaaccaattttagtcatatggaacacttacttttgtgtggctttaagtttttactttgcctcatgccattgaagctaaaattaatcttcctcttgatgtgtttcacagctcttattgttttctctttgcttttacacactgaaaggttacaattgctaaaatagaaaattttattatataaacagtaaaggaagtataggttgtagatttcatcagacataccagtggtgaagtgttatcaactggtaatggggtattgattaaaaaaggattgaaatagagcagttctacttttctaccctgagggagtatgggaatttgtatttgacgcaagtggtcattgttcaataagtggataacatttaagcatcttggcaggagtgcatagctg

SEQ ID NO: 3184 - DNA, 1055 bp, Homo sapiens
tgtttcctgggctggtctggtggaagatggccatgagaaagcggcacttcatcttccttcgcccctgagtgttcagtgggtggttactcggcatcctgttgggcttccggtgtggtggctgggagccagagagaggagggcatgagagctcacagagtcacaggaggtgggacttggaggtcatctaggccaacttcctcatagggcagaccaaggctcacaaagggaaagagacttacctgaggctatacagcaggttagaggcaggacttagaccctgattctagactcctcatccagcactctttctagataagatggaggtatggaggttttggagccagacagatgtgggttgtagtcccagctctgtcacttagtcccagctgggtgacctttggtgagtgaccatctctgagcctcggttttctcctctatgaaatgggatgatggtagcacctttctcatagtggtgttgtgaaaagtggttgataatttatgacaggttgtaaagctcacaggacggtgcacggagttggcccttgggaggtgggagctgttattacctttgtggctccgtcatttttttttttttgagacggagtctcgctctgttgcccagattggagtgcagtggcacgatctcagctcactacaacctccacctcctgggtttaagcaattctcctgcctcagcctcccaagtagttgggattacaggcaggtgccaccatgcctggctaacttttgtattttttagtagagacggggtttcaccatgttggccaggctggtctcgaactcctgacctcaagtaatttgcctgcctcggcctcccaaagaagttgggattatgggcgtgagccactgcgcccagcccgtggctctgtcatcctaacctcctgaagcaccggaaagaatggctgcgtgctggccctcacatatgctgttttctgatgaacgcggttagggagggaagatgagaatgggccatggttggcccatctctctgctacttattttatttccccactatatttgagagactccttagc

SEQ ID NO: 3185 - DNA, 1065 bp, Homo sapiens
aaacaaggatgttgttaccttttgttaaagaataaatacattgttttccctgcagagttggggaggccaggggaagaacaggatttgaggcatgagagggctacaaggtgggcttggcagaatgttctgggcgttagcccagaaaaccagcttggccaagtccacactttcatgtctacggtgagagaggaaccatgagcaaatgtttacaattttttgtgcttctgctcaatttttttctctccaattgactgggtaagcctcctgccatagtcaaagggcttcattcatttgttcattcactcactcaccaaacaagtctgtctggcacaacacgaggcatgggggccgtggtcagtgtgagtgagactgataggtctctctctcccacagtctgatggacaggcaggcagacagatacagagcaggaaattacaagcgcaattactgttgtcagggagacacgcggggggctgtgggattggaccgggaacctgacctgaggatcagaaaaggctccctgagcacatggcattaaaatcataacctaaagagcgagtgggactgggaagagtgttggggggcggggggtggagggagcagaatgtgcaagagtacagaccgctgtgccttcagggatggttcatctggaggcacggaggactgtgcttaggaggtggcccggagggtgcactcagggatggtcatatgaaggacctggggctcaatccttagggcagtggggagccactcaggagtttattttttaaatttaattaatttacttatttattgagacatagtcttgctctgtcacccaggctgagtgcagtggtgcaatctcagctcactgcagcctcagcctccctggttcaagtgattctcctcagtctcccgagtagctgggattacaggcgtgccaccatgcgactaacttctgtatttttttagtagacaccgggtttcgccatgttgcccaggctggtcttggactgctgacctcaagtgatccacccgcctcagcctcccacagtgctgggattacaggtgtgagccaccgcaccc

SEQ ID NO: 3186 - DNA, 1101 bp, Homo sapiens
accaccactgtctgtctgcagggctgttagccgggccaccccctctgaaggtgaaactgagcaggttagacccagcccctcagcttgtgtttggtgggagagggtgggggtgtgtagagggctgagctgattcctccctgttcttctgtcacctctctggggtgggagctatgtatctgggtttgagccccctggtcctcagttgctgggtgacttgggcaggccacggcccttccccgtgacctctgcccttgcattgttggaggatttgatgggagtgtgaaagggacttggcagttgccaggtggggagaagtttcaggggttcccaatgggatggaaagacctggagcctggaattccaagggtgggcccctcccagggtggggttctctgaggcagggacttggcagagttggggcacactggtgccagccacccaccatgccatgtttcatggtgtctccatccccctttgccctgcagatgaggccacagaagcacaaggggaaggtgccgtgtcaagcccaggcagacgagacctctgccctgaagaccaacaccagcccgtgggctgccccctgcctccccaccctccccatggcccacccatctgggctgtctctgcagggcagagccgtccagacctgggatcagggaagctgctggcatcgtccccacccccagcctgggggtctgggctggggcagggattgctcagtggaagcaggactgggggtctggcttgccccctccctgggcctccatcacccctgagcatccctctggactcagagggaacaaggtgggagagagagtttgagacagctccgtgtggagagcttagcccctggaggcagcacaaggaggatgtgatatgtgggggagtgagcactgggttgggagccgggtcctggtttccaatttgggttctgctgtgtgactctgggcaagtcactctccctctctgggcatgtctgctacaaatggacaagattatttcagaggtcactgaagactgtgattacatgcacctgccttagaaggtaggattttcttcccagggacctcctatcaccctaccctgcttcttgaggtccct

SEQ ID NO: 3187 - DNA, 1032 bp, Homo sapiens
aatcacagtgagataccatcttatcagttagcatggctattatcaaaaagacaataacatgtaactaggatgcagagaaaagggaactcttatacggacttttggtgggaatgtaaattagtacagccattatggaaaacagtatggaagtttctcagaaaactaaaaatataactaccatatgatccagcaatcccactagtggtatttatccaaaggaaaagaaatcagtgtatcgaaaggatatttgcactctcatgtttattgcagcactgttcacaacagccaaggtatggaatcaacctacatgtccatcagtagatgccttgatatgttatatttatatgtagacatacaatgggatactattattcagccattaaaaaaatgaaatcctgtcatttgcagcaacatgggtggaactggaggacattatgttaagtgaaataagccaggctcagaaagacaatactgtattttctcactcatacgtaggagctaaaaaagctgatcttttggctgtagaatggtagttatgagtggatgggaaaggggccatatgaagggaggttggttaatgggtacaaacatacaatttgatagaaagaataagttctggtattcagtagtacagtagggtgatatgttgtatatttcaaaagagctagaagaaaagataatgcaatgttcccaacacaaagaaatgataggccgggcgcagtggatcacttgaacccaagagttcaggaccaacctgggcaacatagtgagaccctgtctctactacaaattttaaaaaaagagccaggcatggtggctcgcacctgtggtctcagatacttgggaggctgaggtgggtggattgcttgagccggggagttggaggctgcagtgagctgtcatcatgccactacactcaagcctgggtgacagattgagaccctgtctcaaaaaagaagaaataataaatattcaaggtgatggagataactaaataccctgatgtgatcattatacactgtatgcatgtat

SEQ ID NO: 3188 - DNA, 1138 bp, Homo sapiens
cagggtgtctaaacatttccatgtctaaaggtgtctttaagaatgggaaaatagtcccccctgcctttcctcttcacacacacagtataccacttctgcagtgttgactctagacccatagccagcagggcatctgctgttaaacctggacgctgctggctgtggctgaaactgagttatctactggacagtgtgtttgtgtcttatagcaatatcagtagttgaatcatgggccatacttcaaatttcagactccctctcccttgtggttttgaattgtcttcatttgttttctaggctgatgaaccaattgcagattatgctgcaatggatgatgtcatgcaaggtaaagatgaatttgttttaggaatctgctgattaggttttagacggaggtgggattttagatattgaagctttagtgtacagtgcttttactttgaaccttgaaaaaagcttccacatattgttacagtagaatacattatcttaaaagatcatagaaaggagggaaagatatctacaaaaacttggaaagctaacctgaggaaactgaaataaatgtgagctctgcctgtggaggaggtcaacaagaagcaaaactaagtcagattgcagtgccccagacaggcacacacaaattagaggcctaggtacctctgaaggtgggaatgaattgtgagcctaaaaagaagataacatgatacttgtttggaaaactgtataagaagcagttagacaactctctacctttcacatccttgtcacttccccatctccacctggacctcagatgggcacccagaattatgtgtttccacacttggaaaaattaaactagaaaggtgggaacgaagcctataccaaataggagaccatctcttagccctttgctcaaattcgggcagcccattacttaccctcccccaggtgggaagggatttctctccagggaaactagtcaagaaaataaccagtggatgtaaaaagtctggttctgtatgatcaagtgagatttctcccagggatgcaaggatgttcaacatatgcaaaccaatacatcacatcagcagaatgaaggacaaaaatcatatgatcatcttaatagacaaagaaaaagcatttgataaaattcaac

SEQ ID NO: 3189 - DNA, 1040 bp, Homo sapiens
tggagtctcgcactgttgcctgtgctggagtgcaatggcactatctcagctcaccacaatgtccgcctcctgggtttaaatgattctcctgccccagcctcctaagtagctgggattataggcgcccaccaccacacccggctaattttttatatttttagtagagacggggtttcactgtgttggccaggctggtctcgaactcctgacctcgtgatccgcccaccgcagcctcccaaagtgctgagattacaggcaggagccaccgcacccggccttttttttttttttttttttgagatggatcctagccttgtcaaccaggctggagtacagtggcacaatctcggctcgctgcaacctccacctcccaggttcaagtgattctcctgcctcagcctcccaagtagctgggattacaggcatgcgccaccactcctggctaattttttgtatctttaatggagacggggtttcacctaggctggtcttgaactcctgatgtcatgatcctcccgccttggccttccaaagtgctgggattataggcgtgagccaccgcatccggcccataaattgtcttttgagaacaggaaatcgtgggaatatggttgatgtaggtggagataagtttcagcttctcaaaaagtcagacccccacattggaggatattttgtactttaaactcatggattttctactcaaagttttatttttaacagatgagatgtttgttttctttctttactactaaaatagtgtagtgaaattgtggatggtgttctccctgaaagaatgaaagtgttacaatagccatctgcaatatctgtgacagggcagaggtatctgggcttgttggcctgtctgcatgttgatactgttacttcatttttaacattgattgagagagtctgaaaagccgtcttgatttgaatcttggtgtgcccaaaataaatgttacttgtggtttcccaaccggtgtaaagggatgtcagcatttgttttccgtggcttattggcgctcataaaataacctcaa

SEQ ID NO: 3190 - DNA, 1042 bp, Homo sapiens
tttgggtttattcccagtgtagatataagcccctggagagtttcaagcaaggtcatgatatgatctgatttatagtttaaaaaaaatcaccctggctatagtgtttggaattgctgtgagggcataacagaaataagagaggtcagttagagcctcttccattgacctgcaaggataggtgaaattgattggatatgtttgggaagtggaggtgttaatacttgcttggattggatttccaagcatttttattatattagggatggctcttgggtagatcctgacccatatctctagatatcttattaatttatttaattccatgctttctgggattaaagacaaaatggaatacattttatttgatgcttgtttccaaacacattttttagaagggtaacttataattatgccctggaggccaagggttctgctttacaagctaaataaactaaggccttcatttcctaatttgccgagaaaatgaagttaatgagtataaatgtctctgtttctccctgtaaaattttcttaaatcttttgttctctggtataaaatattatccaatttagatgtagtttcattattcagtttaataagagtatttcatagtgtttgcaagagagcgcttcttccatctttcgttttctcaattcttaaagagcatgtaactcctgccacttgaatagtttgagaacttgaaaaggcttggcaatcagtgtgctcgggaaggtgtcaagcaccttcgaacttctgcaaaataacatcattgtacaagactgataataataactgctctgcagagacctcttaaatgtatggtgagcacattaaatactacaagaataagtcatagggtaaaaaactaacatgttaaaagagcatagaaaaccgtgaaggcttgattcttgatccactctccagtctataatcccaccatgataaaggtgttcctcgtcttgataaaggttgccggtcccagcccccacatcctccatagcctgccttcctagggtctgacctacttctctttgttgtcct

SEQ ID NO: 3191 - DNA, 1053 bp, Homo sapiens
ggctggacacagcttacaaaatattattttaatgcagtgtgatttcaagattagtcaaatgggaggcaataaagtctgcaggaaatgataacctttgagtgtgggagtagatgtaattttgttaagcagcgcttgccatggcacagaggtcccaggactcctggaatcccatttttgactacttccttccttgcaaggagaaagaaaatgcacggttttagctttgtacgtttgtttttatctcatgatttttttttcaatcacagacctagattaaggacgtaaaattgaggttaatggctacctcctttagaattaaaatgaaatcggaaattcagaagtttttgaaaacaagaaaagagagctagaaataccaaactttagcaaagcaagaaaagcgtacctgtggatttttcttaagtttaagaaataggaaatagataatgactttttttcagctgttttttttttttccaaatatatttttttaaactcaggtgagttatgcatatctgaaaatgaaagaaggcttgtttctaaagaggcttggagcaaactgcagcagtactttccaaaggctcctgagtttccaagttacaaagagtgctgttcacagtgcaaggtactgaacgctactgacatctggggaaatggcatgccacctccctgggttgacttcccaggggaattaacactgtacttctgacgggggtgtagggaggaggcaggtcatgtgctgtcagcaggagacagttgattgcttcattctctttcagattttagaaagagaaggggaagaaaatgaagccttacataagatgattgcaaacgagcaaaagacttctctcccaaatttgttccaggataaaaacagaccgtgtctcagtaactggccagaggtataatgattcccacaaaagaaagaatgcatcttttctttttaaagcccttgccaaattcccagtgagctatttcagaacaacccagaacttctcatattctcatttgtttagttatctaaccaggggatttactccagcctgctattttttg

SEQ ID NO: 3192 - DNA, 1074 bp, Homo sapiens
tgtacgggttcatttattatgctaggcactctgtggaagccaggtgtgttttggaggggcttggtgactgagcttcactagttcggagccccagctggcttgtttcactgggaaattcccaatggcactgtctgctattgggccactaaggtttttccgtaagtatcttttatttgcctgcctggaaaattcagacctgctgtcgctcttcggaagctgtagaaagaagaggacttaggagtccctgcattgaagagtggaaaggtttaattatccctgtctcagcttgtcacttcatttgtctctgtgttttgtgtcccctgttcaggggccttaggttttgttgtcctagaataagcatctagtcttttgtggctagagggggcagtgatctcaagggcagagaaggggactgagcatctaactacatacttcttaaatagactttccatcccttctctcattttttgtaaatccctacctttacttcatgaggacccagtttttgggtctgtgggacagtactgcagtgtagcaaatctggctacttcttgactttcgccaacttagagttaatttttattgtgtctcattaaccttcttttaaacccttataatttttatccctgttgttgcctctgttgtcttcatcattataactgtatgtcttttatatatatatataaataattcctttggtgtggtggttcacatctataacctcagcacttcaagaggctgaggcatttgagagcagcctgggcaacatagtgagaccccacctctatttaaaaaataaaataaaaattaggcaaagtggcacacggctgtagtcctagatgcccaggaaactgaggcaggagcattgcttgagcccaggagattgtggttacagtgagctatgatcacgccactgcactccagcctgggtgacagagtgagatcctgtctctaaaaataaaagtttttttttttttaattctttattgtgatttgatgatgtttcatgaggcacttaaagtaaatgcagttttaaacatcattttaacctggaaagtccttgatttaaatttt

SEQ ID NO: 3193 - DNA, 1040 bp, Homo sapiens
ttgccccagctggagtacagtggtggaatcgtagtgcactacagcctagaacttctaggcttaagcagtcctcccacctcagcttcccaagtagctaggactacaggcacacatcaccatggcttgctaatttttacactttttgtagagacagggtctcactatgttgcccaggctggtctcaaactcctgtcctcaagctaccctccctgcttggcttcccaaagctcttggtggtatgagccactatacctgccactgttcttaattcacaatgaataaaccatgcaataggaagagcgttcacattttagatgattcctaaaacttctttgtgttttaaaccaggcccttcattttgcttttccttttagtgtgctttgaagatcactttcacatgaagatcattatttataattatcagctatatttaacccccccaccttagaacctcagtgatttgattatcatcttgtaaagattgcatgtaaaccttgtcagatactgtatttagatacttttaatgtaatacaacattttgtctctcattgttctttattcagataacagtattgccgtcttggtttctaattgtcttagtaaaataatttagggtatataccaatttgccatattgccaacatttgtgactttggtttagaatgtgtctgtgtttgtgaagtgctgaaaacattttcctaacaggaagtctgtttgaatgaaatatatttcctttcattctttcttgcctgtagtgaaagccctgtgtaaggaatgtgtagtagaacgttgtcgcatattgcgtctgaagaaccaactaaatgaagattataaaactgttaataatctgctgaaagcagcagtaaaggggtatgttgcacagtgtacattgttaatgataaactaagaagttttcaagaggtcataaccaagcatctcgttatttattaaaaataggaagttgggatttttagaagaagggtgataaagtggatggtagagccagatcaaaagtaaattttgcaatgactgcccctgtg

SEQ ID NO: 3194 - DNA, 1063 bp, Homo sapiens
aatatattttaactaaattttaattcaattctgacccttctttgtaatctgttactttaactctgtccaagggttgggattaccctaaataattaaactgaccttaatgtaactggaaatgatttggaaatgaacccatgattcagatctctaaatttataggtctttgttcaaaggtgttgggacctagaaatctattttccaaactttattcacggtttcctgtgtccactgggcaagagaaagggacttaactgggtctaaagtgaaatactcatttgaaccactctttagaactatagagttcaaagatgttatgtgtcaagttagcactgtgcttcctttggctgttttcattcagcatataggaaccttatgttcttagaatatgcttatgttcttagagtatttctctgtgttatttatacttttaccaattatgagctatataattcttttccatttgcagtaaacttatattgtagacagtccacgctgtaaaattatgtagaatctcaaagttaatgagcatggttttgtgctggcaagagaagtcttttgttatgcattttctaaatcttatttttgtgtgtgaacatatttaaaaaaacaaagatcacttaccctaaaatctaagcctcagtaggaacgtgcttttggccctttttatttccattgaaatatacttaaattatctctaggtaaagtgtttcagatgtttttgatgctgtgattgttctagactttataactttccaaagaaaatgtgtcatgttcaaaatccaggtttttttttttctttttaaagaactttgaaccaaaatgtatatttccctgtggtaaatattttaatattttgctttcctcatcaaatgctgaggtttcatatagtccggtatctccagcttgataataggagagttctccctcatttggagttgattatgtccatggcctttggaaagcaatgcttgtagtttactgaatcacaaatactagggaatatatttgaggggcctacttagagtctttttctagtgcagaaacatctgtagtgtaaaaa

SEQ ID NO: 3195 - DNA, 1047 bp, Homo sapiens
attttctcttaccatttcctgtggagagcagattcattttgataatcttctaaaccaaagaattctagtttcaaagaaaatgtggtatatatacacaatggaatactattcaggcttaaatggaaaggatactctatcatgtgtgatcacatggatgaatctggaggacattgtgctatgtgaaacaagccgggctcagaaagacaaatactggcctgggcgcagtggctcatgcctgtaatcccagcactttgggaggccaaggcgggtggatcacccgagtttgggagttcaagaccagcctgaccaacatggagaaacgccgtctctactaaaaatacaaaattagccaggcatggtggcgcatgccagtaatcccagctactcgggaagctgaggcaagggaatcacttgaacctgggaggtggaggttgcagtgagcccagacagcgccattgcgctccagcctgggcaacaagaccaaactccatctcaaaaaaaagacaaatactgcatgatctcatcgatactatatatagaatctaaaaaagtcaaacacgtacaaacagagaagaaaatggtggttaccagaacccagggagtggaggtggtggatggcagaggcgatgaggaatggggaggtgatgttcaaagagtacaaagcttcggttcaacaggacgagtaagttttggagctttattgcatagcatggtgactgcagttaataatgcgttgtgcattttgaaatagctaaaataacagattttaagtgttctcaccacagaaaatggatatattagcttgatttaatcattccatgatgtaaacatatcaaacatcatattgtacccataaatatatgcaaatattatttgtctttttttttttttttttttttttttttgagacggagtcttgccttgttttccaggccggagtgcaatggcatgatctcggctcactgcaacctccgcctcccgggttcaagcagttttcctgcctcagcttcctgagtagctgggattacaggcactcaataccatgct

SEQ ID NO: 3196 - DNA, 1078 bp, Homo sapiens
tgttatccgcctgcctcagcctcccaaagtgctgggattgcaggtgtgagccactgtgtccggccgaaaaggtgtattttcttttaaccttattcccactcatgctctgtaggtaaccaatttcattagtctcttgtttttcctttctgtatttctttttgtacaaaatgagcagaaatatgtacatgtatattttccttatatatttcttacacataacagtatactagagatactcctttgcattttgctttttttacttaataatgtgtcctggatttataaattaccttatatctgttcatagatatctttttcatgctgtgtgtgtgtgtgtgtgtgtgtgtgtgtgtgtgtgtgttttacagttgcatagtactctgccatatagatgtaccatattgtctatttttgggcatttgggtggcttccaatattttgcaattaacagacagtgctgtaatgaataaccttatgagtgagattttgcattgttggaggtatagcctaaggaacagtaaatcctcagaaatgagattgctaggtctaaaggtagttgtctatgtagttttgttagtgactgcatttctaccagcagtatatgcatgctttcttctccacaccctcacaaactgagtgtcttatactttctcagttttgctaatttatagatgagaagtggtatctcattttagttttaatttgtttgtctctcatgaaactatggtcttttaaaaattaaaggttttttttttccccttagacgaaactgcaaaggaaatccgaattgcttggttggtattggtgagcatatttggttaggagaaatagatgaaaatagttttcataacatcgatgatcccaactgtgagaggagaaaaaaggtaaaccatcattttttaagcgattgctatatgctgttttttgtttttgtttttgcttttgttttgggcctgtgatcagaaaactctactgatttcaggtaacctgtgcagctttaagataagcagtagaacttaagactctaagccacttgaattggaacacttcttaatgatatgctttaaaacaggcagct

SEQ ID NO: 3197 - DNA, 1015 bp, Homo sapiens
ctgcttagaattttgatagatgtcaaaagttcataccatttatcctggtcctctagagtgagtgtgcctattaccttatacaaagcatttctattcccagcttccatctgattagcgaaaaatagcatcttattttcatttgccattttttgctggtgacattgagcatctttttaattttattttttagttttatagagataggatctcatgttttgcccaggccggtcttgaactcctgggcccaagaaatcctcagccttggcctcccaaagtgctgggattacaggcgtgagccactgtgtcccttctcctttttatatttacttgccatttgtatttctcctgtgaattgtgtgttctggattgttggtcattttcttactgattttcaagagcttattgaatatttctttcttttttttttttttttttttgagaccgagtctcagtctgttgcccaggctggagtgcagtggtgtgatctcagcttgctgcaacctctgcttcctgggttcaagcgattttcctgcctcagcctcccaagtagctgagactacaggtgcctgccactatgcctgggtaatttttgtatttttgtagagaggggtttcactatgttggccaggctggtcttgaactcctgaccatgtgatccgcctgcctcagcctctcaaagtgttggattacaggcgtgagccatcacgcccggccgaatatttcttttttctttctttttttctttctttctttcttggttttttttttttgagacagagtcttgctctgtttcccaggctggagtgctgtggtgtgatctcagctcactgcaacctttgcctcccagattcgagctattcttttgcttcagcctcccaagtagctgggattacaggtccgtgccaccactcctggctaacatttgtattttcagtagagacggggtttcaccatgttggccaggctggtcttgaatacctgacctcaggtgatccacctgccttggcctctcaaa

SEQ ID NO: 3198 - DNA, 1026 bp, Homo sapiens
tcatctccatcgacccgcccagcagcaccgtgcagcagggccaggatgccagcttcaagtgcctcatccatgacggggcagcccccatcagcctcgagtggaagacccggaaccaggagctggagggtgagccaggctggtgggcaggtgggcaagctgggggcaggcatgggggtgccgtcatccccactgtgcaagggtggggcagaagtctggacgccccacattcatggtgtggccctgagtaaggcccttcccgtctctgtatggcaagagcgctggacccaggagtttccaaggcctttgttactttctgctatctgcgactccatgagctagacacacccaggccggagggattggggaagtgggcccaggggcacaggctggcagcaccaagacacgagaaggaccaggtcaatcctctctcaccctcccccatgcaacctcacagacaacgtccacatcagtcccaatggctccatcatcaccatcgtgggcacccggcccagcaaccacggtacctaccgctgcgtggcctccaatgcctacggtgtggcccagagtgtggtgaacctcagtgtgcacggtgaggggacgttgaccctgtggggctctgccctgtttccagccctgattctcagctcagagcctccaagtttaaatcctccttccaccattgactctgtcttgggcattctccctctctgagcctcagtttccacctcagtgcagtggggagacaggtgcccacccagcagttactaagctggaggccatggcagtgtgggtgagcagcagagccctgcctgtgtgtcagtggttgtcattcctccgcacagggccccctacagtgtccgtgctccccgagggccccgtgtgggtgaaagtgggaaaggctgtcaccctggagtgtgtcagtgccggggagccccgctcctctgctcgttggacccggatcagcagcacccctgccaagttggagcagcggacatatgggctcatggacagccacgcggtgctgca

SEQ ID NO: 3199 - DNA, 1028 bp, Homo sapiens
ggtgttggctaggtgatccctcccagcttggacagtacaggatccaggaatgcattggaaccttttgcaggcaggtttctcttgtgtctcattctccccgggggtctttggagagctcactcacttggtgtgtgagctctggggtggataggactgggagagaaggaagaagtggtacttacacctcgtaagtgcctgatactagcacttaggttgtcctgttgaattctgacggcagccttgtgagggggtcatttttattcccattttacagatgaagacacagaggctcagagaggtcaagtgatttgcccagggccacacagctaggaaactgccaggctaaagtgtccagtcaacagttaacagtggtatggggtggcatgtgcccaacacacatttcctaggatggctttgacttattaataaaatatgatagatatagtagtcatcgcaaaaaactatcaacgtgtctcagagatttgaatacctctgcatccaaacttcacctcccaggctgcctctgacactcagaagtagcccagaaatcctttatttagtggtttcttgatttctgctttggaaaatatggtcagttgtaattatgggtatgtgagagttcagaggagagagagctgcgtgggctggagcgggctggaaaggcttggcaccgaactgggagtggagctgggctggccggcagctgagggggctgagatgggctggggtgggccaagctcacagcctccagggacgtttcctgaagggcctgcagtggggctgtgcaccagggaaattgcaagcctcttcaggactccctccctcccggccctgcacctccccacgggggccctggagcaggccaggctccagttaaggcatgttcagccccagacctttgctccggcctctccacccaggcttcccagggaactgggtaaagggctgtgctatgggacagcgaggccaggcaccctgaggcttgagcagttgacagcatgaggactaagatgaccccagccagcccg

SEQ ID NO: 3200 - DNA, 1124 bp, Homo sapiens
aacagttccagccacgcacggtggctcacgcctgtaatcccagcactttgggaggccaaggctggcggatcactcgaggccaggagttcgagaccagcctggccaacatggtgaaacctcatctctgctaaaaatatgaaaattagctgggtgtggtggtgcatgcctgtaatcccagctacctgggaggctgaagcagtagaatcgcttgaacccgggaggcggcagttgcaatgagccaagattgtgccactgcactccagcctgggcaacagagcgagactctgtctcaaaaaagaaaaaacagttccagtcccttaggagaatttcttatagatcaaatcacaagaaacaaaggcatagctcacttttacggagggcctactgtgtgcagtaatccctttatgttcttataactccgaggatggtccaggcactagcagcccgggcctcaactgggagcttgtcagaaatgcagagtttcaggcccccttggacctactgactcagaatctgcacgccgacaagatctccaagtgactcatgtgctcgttaaagctggagaagggctgctttccgtctgctgtctcatttcatcctgaaaaccacccctggagagatgactgccatagaaactccatcaatgctcatactcttcccagattcttcccttcttccctttctttggtccaggtgggggttcagtgaagaatagggtgtcaaagcccctgacaggactgaagaaagttgagagtattacttgcttttgagactttttttttttttttttgagacagggtcttgctctgtcacccaggctggagtgcagtggcacaatcttggctcactgcaacctccgcctcctgagttcaagcgattctcctgcctcagcctcccaagtagctgggattacaggtgcacaccaccacacccagctaatttttgtatttttagtagagacggggtttcaccatgttggccaggctggtctcaaactcccgacctcaagtgatccgccagccttggttgctcaaagtgctgggattacaggcctgagccactgcgcccagcccctttgagacttaatcagactctcttgtttccattcacctgcaggctcggca

SEQ ID NO: 3201 - DNA, 1954 bp, Homo sapiens
gctgactgaaacccagaagtatgtgtggaactcacttcgcggggagccgccggcctcactgcccagcctggtggcgtcagggctgtgtcaatagcagccttgagaggggtgtggctcgtggctgctggggtggccgggtcgggggtgctgtcatgaaagccctgagaacaaggtggctctttgaggcctgggaatgtgaggcctttgagtcttgctgcccccagaaccactctcccttcccttccatgatgctcatctgtgccaggcctgcaggaacctcagagcatccctggaggcatctgtggcatcctgagatagccttaggaccagctcctagctcctgaccagggcccattccctgagccatgaaggagggtgtcctgttgctctgggttttaggggagtatctggtgcgcaaagccttgcagagtgtgttgaatgaatgaatgaacaaatgatgtatgtgattaagcgttttttaaaattcatttcacaaatatctgtggagcatcttctatgtatctgactgtgttctagatcttttttttttttttgagatggagtcttgatctgttacccaggctagagtgcagtggtatgatctcgccgcactgcaatctctgccccccaggttcaagagattctcctgccttagcctcccaagtagctgggattacaggaacacgccaccacgtccagctaatttttgtatttttagtagagatggagttccaccatgttggccaggttggtcttgaactcctgacctcaagtgatccacccatcttggcctcccaaagcactgggattacaggcgtgagccactgcacccgccctgttctagatcttgaggttaccgcagagaataaaaatgtcagattccttcctctcatgtcacttgcgttatagctagtgcaggaagacagacaataaatgaaatacatcaggtggtgataagtgctcagaagaaaaaataaaacagggaagagggcagtgagtgatgaggcggggtaggtagggtggggtggtaggaaaagcctctgataagataaatttgaactgaaggagacctgaagtaagtgagcgggtgagcctcgcagatatcaatggaaagggcattccaggcagagggcacagctagtgcagaggcccagaggtgggagtgtccttggcatgtctgtggaaaagcaaggaggcccgtggggctggagcagcatcagtgagggggagcatggtggatgcagcaggcaggggggtggcagagggtgatcagcagagctttggccatgggaaggaccttggatttgcgtctgagtgaattgagaagtcactgaaggggcccggtgttccataggattgctttggctgctgtgtggagaggagcacggggagggtccagagcaaaggcaaggaggccgtgacccaggacagacgatgggagctcaagctaggaccacggaggtgggagatggttgaatccccagtacattttgaagatgggtcaccaggatttgctagtgggttggatgtggggcgggacagaaagagaagagtccgggatgcctccacagtctttggcttcagcatcccgaaggatggagctgccactacctgagatgggaaagttccaggaggagtgggcaggaggtggagtccagaattctcagaacagttaatttatttgtgtcttctcttacgatctcttgtttggacaataaaaattcctaaaaaaaaaaaaaaaaaaaccggcaggtgggccaggagtggtggctcacacctgtaatccccacactttgggagaccaaggtaggaggatcacttgagcccaggaggtggaggttgcagtgaaccatgatcttgccactgcgctccagcctgggtgatagaacgcgatcctgtctcttaaaaaaaaaaaagaaaaaagaatggcaagtgatggaggggacagcatggg

SEQ ID NO: 3202 - DNA, 1065 bp, Homo sapiens
aacaaacaataaaaagtttttcggggccaggcgcggtggcacacgccagtaatcccaggactttgggaggccgaggcgagcggatcatgaggtcaggagttcaagatcagcctggccagcatagtgaaaccctgtctctactaaaaatgcaaaaagttagccaggcatggtggcacgtacctgtagtcccagctactccggaggctgaggcaggagaatggcgttaacccgggaggcggagcttgcagtgagccgagatcgcgccactgcactccagcctgggcgacagagcaagactctgtctcaaaaaaaaaaaaagagggcatcacactttgttgcccaggctggtctcaaactcctggcctcaagcgatcctctcgcctcggtctcctaaagtgttgggatgacaggcataagccatcatgcctggcctgtctctgaagtcttacagacccaagtatgagtctctgggctgcggtttctggctgtgtgatctggggcgagttcctctctctgagccttagtttccaaatctgtacaatggggttgaggagtttgttgcaagtcaaaaatgagatcaattcctagcccaggctcccagcacaccttggaccctctttgcctgctacccttgctctcatctgcccttcagtttggtccggagccagtggcttatggggaagggttgggcacagcagcagggtgagatgggccttagggagctccaggcttccccgggacgggggacaggaccacaggaagctgatctgtgattaagtgtgggtgtaatttcagctgttgggaggtgaggaggcttgctggaggagggggctgggcctgggtgactcggcaggccttggcctgctgacccctttagggcggccctgcaggggacaggcgtcttgagggagcctcggtggtgattaaggtgttttccagggcctaggagggaagtcgctgagatacctgtttcctgcctcagctggatttcctcactggggaggctgccagctgaactgcaggagcctccccttcctggcggtccctcagccctcctccacgcag

SEQ ID NO: 3203 - DNA, 1110 bp, Homo sapiens
agaaactagctcactcaaggctgccatccttcacttgcagcctccctgccattctccttcactggttggcaaccttgagagttcaaagaaaatcaacctctgtggtggtcaactaaaggtattaggaaactaagtctgtggctcttctctgctgatggaaacagaagggcgccaagccatgcctaaaaagatctcgccaataattcttgtctttgagtgttggagccctggattctggtgctatagctcctggtgccaaagtctggatctttccacatttcagcagcaccaacatctgctgctactcaaaatgtcctgttgaagagggacagctgtgatgcccttttgctggggctgccatcttgaaatctgagtgcaataggatttgcttgtaacagttatttcaggatattttgtttctttaatctgcacactttctagatagattttatttttaagtgtcctcagcattgcagaaaataacattgtaatagcaagtaaaggctggaggctgtttctctgggcttcaaatggctggcaaggctggctctcaaatcccaaagttgggaggcatgtttctgaaaagcaactgaggtgtgactgtttggacccaggcctcatcatcaggggtcctggaggaagcctccaagtagaggggagacctggtagttgaatagttgtttaatcaagccaaatagtcccactgcccccggtcaacaaacccacttttatgacagttttcttccgcagcttggctcttaaattttactggcaggtgtatggttgttggagggttcctagtgagttgggggacctggcaatagagctgcttggttggaggaagtgaagctggcttagtaccagcagctgatctcttccacgtgctgctgctttttttgccactctgatactaaaccagagaaagctgcaggtggataaagaagctgtggctgttttttgcttttgggtggcaatgagaaagagtcacagtgtgggttaaagggatctgcagtggggccaaggatgccaccccaccctcagctgtaggcaagcttgcacataaataacccccgtcagtggagtgttcgggatgcagggggcactatagtg

SEQ ID NO: 3204 - DNA, 1029 bp, Homo sapiens
aatttacaagctacaaggagacggcctccagccgccacttgcggtttaagctacagagtctaagccgccgccttgatgagttggaggaagccacaaaaaacctccagaaagcagaggatgaactcctggatctccaggacaaggtgattcaggcagaaggtagcaactccagcatgttggcggagattgaagtgctgcgccagcgggtgctgagaattgaaggcaaagacgaggaaattaagagagcagaggatctgtgtcgtctgatgaaggagaaacttgaagaggaagaaaacctcacccgggagctgaaatctgagattgagcggcttcagaaacgaatggctgaattagagaagctagaagaggccttcagcaggagtaagaatgactgtacccagctgtgtctgagcctgaatgaggagagaaatctgaccaagaaaatctcctctgagctggaaatgctcagagtcaaagtgaaagaactagaatcttctgaggaccgcctggataaaactgagcagagtttagcgtcagagttagaaaagctgaaatcattaactctgagctttgtaagtgagagaaaatacttgaatgaaaaggagaaagaaaatgagaaattgataaaagaactcactcaaaaactagagcagaacaaaaaaatgaaccgagattatacaaggaatgcttctaatctggaaagaaatgacctacggattgaggatggcatctcttccacactgccgtccaaagaatcaagaaggaagggtggtctggactacctaaagcaggtagagaatgaaacaagaaacaaatcagaaaatgaaaagaaccgcaatcaggaagacaacaaagtcaaagaccttaaccaagagattgagaaacttaagacacaaatcaaacactttgaatcgttggaagaagagcttaagaaaatgaagtccaaaaataacgaccttcaggataattacctaagtgaacaaaataaaaacaaattattagccagccaactggaggagataaagctac

SEQ ID NO: 3205 - DNA, 1032 bp, Homo sapiens
agccataccagtggggatgaagtgtcatctcatttttttttttgagatggagtttcactcttgtcgcccaggctggagtgcagtggcgcaatcttggctcattgcaacctctgccttccgagttcaagcagttctcctgcctcagcctcctgagtagcagagattacaggtgcctaccaccacacccggctaatttttgtatttttagtggaggtggggtttcgacatgttggccaggctggttttgaactcctgacctcaggtaatccacctgcctcagcctcccaaagtgccgggattacaggtgtgagccaccatgcctcgcctcactttggttttgatttgcagtttcctaacagttaatgatgttgagcatcttttcatatgcttattggccattcgtatatcttctttgaagaaatgcctgtgcaaatcctttgcccatttttagttggatattttttattattgagtcgtaagatctctgtatctctctgtatattctggatactcgtctcttactggatataggatttggaaatactttctatgtgggtttttttatttaattgcctagagttcattgcccatgccatgtataaagatgatatagtggaactagaggttctgacagagcatatgttgactgaagtgattgccatatgacagatagcaccattgttgttatgcagttctagaagcctttgattacaagaaaggaagtaagcatttaactgggaactggggaacttttattttatttttttgagatggagtcttgctctgtcgcccaggctggagtgcagtggcacgatctcggctcactgcaagctccgcctcccgggttcatgccattctcccgtctcagcctccctgagtagctgggactacaggcacccaccaccacgcccggctacttttttgtatttttagtatttttagtagagacagggtttcactgtgttagccaggatggtctcgatctcctgatctcgtgatccacccgcctcggcctcccaaagtgctgggatt

SEQ ID NO: 3206 - DNA, 1050 bp, Homo sapiens
ctattgtatagatgtattatagtttgtttattgaccagttgaggagcatttgggttgtgtgtgtgtgtgatagagtctcactctgttgcccaggcgggggctgcagcctcaacctcccaggctcaatgattctcctacctcagcctcctgagtagctgagatgactacaggtgtgcaccaccgtttgtgggtaatatttttgatttctagtagagtcgaggtctcactatgtcactcaggctggtctcgaactcccaaagtgccatgactggctgcgactctgtcttaaaaacaaaacaaaacaaaacaaaacaaaaacaggtaagagaaagggcatcatctcagattaaaggggtttttcatgttgaataatttagccttatgaaaaatttactattcttgggtgaaaataccattgactaaaatgactgccctaggaggtctgttgttatgctaatagtgtatgttgaaatgacaggttacagtttactgggattagtttaggctgaagtggtctgtgagggcttcatgcaggcagttagactagagtttttcagtggtggatggatagaggttgaagaggcagaaaggaaagagaaggttttgtttttcttttactttttaaatttttttcttttgtatttgagaaagttaaggatgagggaatggttttctaggcaagagcaaatcaagggcaaagatagagattagacgtattattgatgggaactgggaatacttgtctggtctagtaatagagtttagattatggactaggaaggagataagatagtgaagtaatgctcattgagattatgaacagtcttaacagtcatactgaggaatttggacctgatcttgctaacatttgggaatcattgaaggtttacaagttgagcagtgacttgatgaacttggaattatgacattaatcaagaagtgttgtatagattatctgaaaggaagccagttaaggaatttttttaaagaaataaaattatgctgcaggcatgaatttagcaagtggaatgggaagaaaaaggaatatat

SEQ ID NO: 3207 - DNA, 2124 bp, Homo sapiens
aattctgaaatatttggtatatttcttttgaatttgtctttagagcatattacgtgttcttaattctggtaagtcatcattgtgcaggtgcttatatttaacttttggagataggaaagtctggtgaaggaagtgagtggtcagcattgtttttggccacaaatgaaatgttattctaaaaggtggagactagcattttgtgtgtgtgtgaggtttgtctttgagaatcctataaatggcacgtcaaaaaagttttgagtcttggccacatgattggaagatgcgcccagtcatcccaatccttggaaggtcttacctcccaagatggcgccattgaataacagcacttgttttcagtgctgaaacctctataaaacaaatcatggtatgaatatgacccatattacaattaaattggaattctcttaatgaaaacattaggttgtattaatgtcactgtgattttatttataacgttaataaattaatattgttaaattttgtctaagaaaggaacatgtttagtctgctgacaggcaaatctgtgtaggaacagattcgaactgaagtataattaaagggtgaaatgtatttttctggcccactttccaatgctttattttttgtttttattttttgagacagtctcgctctgttgcccaggctggagtgcagtggcatgatctcggctcactgcaacttctgcctcctgggttcaagcgattctcctgcctcagcctccccagtagctgggattacaggctcatgccaccatgcctggctaatttttgtatttttagtagagacagggtttcaccatgttggccaggctggtctcgaactacgacctcaagtgattcacctgccttggcctcccaaagtgctgggattacaggtgtgagctaccgtgcctggccggctttatttgcataggctttctacagatgctgaagaactcaaatagaaaaatggtatcatttaccttggtctgacagcatttttctgtttctaaacataaatctctgtttttatctagtttcaagttaactggtaacgttaactgttgagataaagttaatttttggttaagtcctggaacagctttatcaaaaatgtgctgttttcccaattatctgcgggtatttatctgatttaggccattttagtgattcaccagtgaatgagcagctcatttaagtgttaatttttttttagatggagtttcactcttgttgcccaggctggagtgagtgcaatggcacgatcttggctctcgggttcaagtgattccctcatctcagccttccgagtagctgggattacaggcacccgccaccacgcctggcccatttaagtttataattcagatattttgaagaattcttagtcattgaggactaatgatgaaaccagttgctgacttctatatgacagctacagtacttaagtaccttttatgtgtttatttaatctcttttcagcaacccattagggtagatattaatgaggataactattattatcctcattttgcagaggaaaaaactaagtccctaagatgtgagatcggtttgacccaaggtcagtgccaagctaggatttgaccttgagtttactcttgaacattacattgttttaacacataatgattttatgaactgtgtactgccctgtaagtaaatgaggtcaacattgtcttatgtttcctaggattgaaagaaagccatttttagatcttgatggacttaaagattcattaaatggaagactttacagaagtatacagaaactagttaaatatagaagattcttatagagatatttagaaaatgtagttagggtgtgtaaacaaagtaatggtccctggtagatttaaatcaggaataccagtttttatgcttcttgccacagctgtaatggagtataatatgatatattcttagtgtaatttgataaaattagacattttccaacatatgcgaaaatattttctgtaggaacttgaggacttatcattatgttagaattttgttttgagactagatcctagggcagttttaaagtgactaccagaatcttaaagacatgtgatggaaaaatagatgggaggacagttaatggagc

SEQ ID NO: 3208 - DNA, 1029 bp, Homo sapiens
cacacaaatgatttaatacattgtagtgcatgttgggatagagcaaaggagggcagattcaaggaagacttccaggagacgagtcctgaactcaatctcttaattcattcaactaagatttaatgtaggagatctagattctgtgggggttcagatgaggtagggattacttctgttttatatgaggtaggatgacaatgggggtaggtggtagtagaaattagaatatttctttgggatgatacttgaagtaagccaggattttagatacagaggtatatgagaagggtgtgttctaagatgataaagcagaaggaactaaaatacagaagtcaaatggcacgacgtataccagctgtatttactgaaatatgcctagaggtgctgtgttaagcctcaggtacacaaaaacataaaacatgaccctgccttcataattagaactcaagtgagatgtttgaagtgtaatacaatgtgatttgtatgaaaaatcacattgtgtgtgtggtaggaggtatagattagtttttaagaaggcgtaattttcttgactggtggttggttctgtttggtttgactcatgggtgcctgaaataaaaggagtaggaaatacagatgtaaaggtaagttgggctgttatttactgttgtttactttggcagaaatggtctaaaaaactaagcatgtgacgagtaatgagaggggagcagcaggagtctgagtttgggttccttttcttccattagttcctgtgtgactctcccttgtgatcattgatctttactggaggtacagagtacctggtctggtcctcagttttaagaaaatgaattacctagtatactccaaggcccaacttctgtaccccatagttggaaattgtcagctttcctacaaagattgatttatgagctgctctttaaagcaacttcttataacattttcaaccttttgactgttcacaattaagagtccttcaatcttttcccatcccaatagatgaaatggcaagacaaaatttccatgagt

SEQ ID NO: 3209 - DNA, 1024 bp, Homo sapiens
agtgtttctctgatctagctactcacaattccattcccaaagtagtgacctagttctgtcacttgggtttcaaagggagttgaagtgtcactgagtgagtacagcaaacctgtttaatgatttataggaagcaaataaaaagaattttgtttgctaacctagaagtatatcagattttggtttcaatttataattttgcaaaatataaagacatttcctggctaactccatccagatgaattattcagtattttttctcctatcttaatgaagttaatttgaatgctaatttcctataaccaagaaaacagttgaattaaataacccttatcttttaaacttaaagcttatactactaataatcatttaacattcacttccttttttctgacttaattggtaggtaaataaaatacttcaaatttgattggcaaattggaaaatcacttagaacaatctgctagtattttttattccctttgttttttcctttacacatttgtactgcaaaataaatcaaggacaaagactcacactgaattgatcaacttgtgtttggtcttcatgggaattacatcttttttcccctcaacatttattaaaggaacatacagaatttcagactatagcaaactaatacctttagcttgactaagagttgattttcgttaaggaacagaacttgtaatttatttcgacatactttaatgtatgactcatccctgttaaagttgtgagactcaaaactacgcccaaatcacttaattttatgtccttccctgtttactgtgtctgaccttcaagatttcgtgactgatgctgaaatggaagccaaccactgcagaaatttgggggaaaatgagatctgaagaatacaaggggaagtaggaattcatttctagcatttccaaacctgcttaatcgtgtctgctccaccacagtcagaggaaaagactgagttcatggaaattaccagctaagccttacatctgtctttaatgtttttaggaagtatactgaaaag

SEQ ID NO: 3210 - DNA, 1052 bp, Homo sapiens
ctgccttagacggagtctgttagacgtgccttcttatggtgtttatgccttagctgtctcttcctgaggaaatgtatgaataagaaaggcttcttgatattttgaccttagacttgatatctaatgcaacacccttcctcccccatttataggaatagtactcattcattgagtactattatatgccagacacacgacgctaggtggtttgtattatctttatatccacaataaccttgatttaggtagtagtatccctgttttactgtgagaaaactgaggcccagaaaggttaagtgataattgtatggctagtttgtgataactatagatactacaactaaaaatttacctttctggttcttttttttcattcttacctttctctagcaatacatatttagctctttagagctagttacaatatattttttatgttagacttactgtgtggggagttttgaatttaaaaactaaaaaaaaaaaacaccagaaggtttattctaaaggtttaaatttttaaaatttaatctgctgttgtgtgcttctgttacccctgaccttagttagcattgcaggatactttcttttccatattttgtgattgatatatgtgtgattctttgtatgtacaaaagcttgagcttgagttttttagaggaaaggaataaaataaattaagttggttgaattaagtatgtcttggtggatttggttatccccacagcaaacttgagcattcagtttacccatgattaagggtgctgatactatatttaagggcgttctgccttccatctcttttctaatatcaatagtattaattgatgccaggcaagaggagtgctgccatatttgggtcagctacttcgtcaagagtattttgcagaatgtacctgaagctattctgaaagttaaatatcattagatacattgtcaaaccctgaagctgaaattccagccattcagggagcccctcagggagatcactgcttttcccttgcaaaaataaaaatagtgtataaaatactatttaaatatatactcttatc

SEQ ID NO: 3211 - DNA, 1212 bp, Homo sapiens
catcattcaaaaatgctgctcaaacttgaagtgggtaggaatttctggggattttgattaagatgcagattctgactcattaaatctgagatgggcaagagtctgcatttctgacaagctcataggtgatgccagtgttcctgactacactttcagtagcagagttacagattatcccacattttgggggattttggagaatgatcttagtagaaaagataacaacagatgtttgcagtgatttgcctggatgtagttggtctgagatttaaaactatgataaatgttgccacaaatgtttaatagtgtttgggaccccaaggaaagattaggaacattgtctgcaaaaaaatgaaatgaatttagaaaaacaggctttaatagtttcaaggaattgctagaaaataatgggaaggcatatgcagaaaagatcaggatgctgagaaaatgtcatggcatgtttatttaggaattagatctgaaaacagttacatgagttatagaaaaaataaagctcagaaaggaaggattgataggttactaaaaatgcctatgtggttttatttttggaatctgtaactttgtctccccaggaaggttttcactaactagttcaaagtaaatcttgggccaagtgtggtggctcattcctgtaatcccagcacttttggaggccagggcaggtggatcacttgaggtcaggcgggcgtgcacctgtacctagctacttgggaggctgagacaggagaatcacttaaaaccgggaggcagaggttgcactgaggcgagatcgcaccactgccctccagcctgggcgagagagtgagtctctgtctcaaaaaaacaaccaactaaccaacacccccgccaccaaaaaaaaaaaaatcaaagtaaatcttgggtagtaagtgaaagcagactaatgaagaaaattgttaaaggtgactttttttttttttttgagatggagtctcgctctgtcaccgaggctggagtgcgatggtgcgatcttggctcactacaacgtccgcttcccgggttcaagtgattctactgcctcagcctcctgagtagctgggattacaggcacatgccaccatgcccggctaatttttgtatttttagtaagagatggggttttgccatgttggtcagactgatcttgagctcctgacctcgtgaacccctcacctcggccttccaaagtgctgg

SEQ ID NO: 3212 - DNA, 1053 bp, Homo sapiens
aggaagttttaaggtaagcagtaggaatattcatgtaattctgatgagtttatgtaagttaaggaaaatgcaatgccagtttgttgactttaaacactaaaaacaaaatacattttgtggaaccaacaaaggagacattctggggaaaaacttaaattgctcaaatttaaataagggctctcactttatatagtagatttgtcaggatcccatgaacattgcttttcttgatttctcacatatgagggttgggcaaaagggacttctctagcctcttcgataatgtaggtagacttgtacttagtgaatcccattataatgttaggtactatgttctaagactatttctataattggactgaaggctcctgcaaacataaattgctgatatggatatagtaacataagaaataccaaaatagggacatttgcaagaccttttccatttaatcatcagtttaataaaaatcatgcttttggtacagtgttcatgtaccataactgtattggaatatttgtacgatgttaaatatttttaataaaatttaacatgttcaaaatgttgtgttggtgattttgggtggggtgtgatgggtttgattgtgcaaaacagatttagtagttatgtgatttaggcttttgtagttaaatggagtttctgtcttcaaatttagtactagatactgtacctgttctaaggaaggtagtgaaggagtaggatagtaaaaatgaaaaggctgaactccccagagatttattaaattgccaggaagcttgactgaggttagaactagatctacaggtggcagataggaatattggctgtggcataacaggctgccaatagcgtttttgtgaggaaattgtggcattttggaaatgatcctagagaatctacagaggtgggcaaacgtaaacacttgtacagtgctttcagtaggctttttattgccccagtgcccttgtgccctcgatgtgacatgccacaagtgaaggagaagtggtgaggggattatttgaggaaagctttgttggacagtttggatgcatcat

SEQ ID NO: 3213 - DNA, 1062 bp, Homo sapiens
ccttgtagaaaaataggactttaatattaaattattttgttcttaataggaacatataataacacttcacttacttttaaattggtagcagatcagcaggaaaggcctgcaagtatgaagtaatgaaatactcagggtatattttaagtgagcaaaatagacaccttataatcttaaaaagtctcttggagagacaataaatttgctttaactgtcatttcagtctagtattatattttctatattttgttggatagattaacatataatgcatcttaaagagatatttattgcacactaattttagtgaaaacaagaagacattgatagaatggagggcttaaacaccaaagatactatttttaaaaatcttccaaagtaatcttaacactgtaaaatgaaactttaaaaagttttagcagtttgacaataatggcctcaatttagagatatgttgagacaatgactttgggtcaagaggaaattacatagctgaaatattaagaccttgaacatagcagaaacataaacctatgaacaacttgtgttttgtgtgaaagctagggtagctgataggattagcagatattggtagaattaagagtcaatatttaaattattgctaaagattaaaatccctcatcttatagtttgtaggggattccatgatggtaaggtatagattgaaattaaatttagtaactaggcatttctgaccataccatataaaaaataattgtaatatggtataaacactgattaaaagtaattatggattttcatgcctgaagaaccttctcagtattcttacagcactgtatcttctttattggttgagaatatcagtctagaaagactttcctagatgttaaatgtgctagtcagtgtcatgaatataaacccttacttgtaagtttgctatagactagttgtacaacactagaatgaaattatgtaatacttttaagaattgtagtgattgcagggttgtgttaaggtaacattttatgcatgtgtcagtgacagaaaggatcagggtataaaacttagcactaaatagca

SEQ ID NO: 3214 - DNA, 1054 bp, Homo sapiens
agacagatccagttgtttttcttatgcccatgtatgcaagtaaagacaccaaacattctttaaatgctgcttttaaactttgaaagtacaatttgaagttgtaactatacatctaattagacttaagtaaaaccctgatttttttcctggaaagaacaaaatctacaaataaaatttgagttgtttgtatttcttaattaggtgttacaagctacaaagttgtcataaagaatgctaagaatggggatagaaatgattctgagaaaacaaaccctcgcaaaaacataagattaaaacttgggttccatgtcaaaatcctttcctttaattgcaaattatattttgaattttaaagtggccacctcctcctctgtccttttcactaattaaaaatatatttgcagaggtaccctctaatatttggtttataggttttgtggctattttaaattgtaaagcataatcctataaacattaaaactcaagagcttttcttctttcatgtcttgtaaattaacactgtagcagcattcagagaaaatagattcagagctcaacttttcacataaataaatctaacagtgtaatatataaacctgaaaaatgtcagttgagggaggtctttattctagattggcatttttttttttttaaattaggtacaaattatgagtgtaaggaatttggtttcctgctctcctgtctttccatcttttttgttccccaagctaattgatttggctttatttatgagcctgttacagtaaagtgtgtgttgggaaatatattgaggtatagagctattctttgtaggtaccctggtgagaccgatacaaatatgcccctccccataatggaatactaatttttatttgatcactcatttatagcagttgcttaaatgtatgtatttatatgaaggtattttaatttttaagagcaaaaaagttctaataagttgccagatttctaataaatgcaggtttatttggtgaaaagataaggaaaatgagttatgattctgtagtttttttaaaatgagttcagcataatt

SEQ ID NO: 3215 - DNA, 1260 bp, Homo sapiens
attatcacgactatcgtggaggctatgaagatccctactacggctatgatgatggctatgcagtaagaggaagaggaggaggaaggggagggcgaggtgctccaccaccaccaagggggaggggagcaccacctccaagaggtagagctggctattcacagaggggggcacctttgggaccaccaagaggctctaggggtggcagagggggtcctgctcaacagcagagaggccgtggttcccgtggatctcggggcaatcgtgggggcaatgtaggaggcaagagaaaggcagatgggtacaaccagcctgattccaagcgtcgtcagaccaacaaccaacagaactggggttcccaacccatcgctcagcagccgcttcagcaaggtggtgactattctggtaactatggttacaataatgacaaccaggaattttatcaggatacttatgggcaacagtggaagtagacaagtaagggcttgaaaatgatactggcaagatacgattggctctagatctacattcttcaaaaaaaaaaattggcttaactgtttcatctttaagtagcattttgctgccatttgtattgggctgaagaaatcactattgtgtatatactcaagtctttttatttttcctcttttcataaatgctcttggacattattgggcttgcagagttcccttattctggggattacaatgcttttatcgtttcaggcttcattttagcttcaaaacaagctgggcacactgttaaatcatgattttgcagaacctttggttttggacagtttcatttttttggatttgggatagattacataggagtatggagtatgctgtaaataaaaatacaagctagtgctttgtcttagtagttttaagaaattaaagcaaacaaatttaagttttcttgtattgaaaataacctatgattgtatgttttgcattcctagaagtaggttaactgtgtttttaaattgttataacttcacacctttttgaaatctgccctacaaaatttgtttggcttaaacgtcaaaagccgtgacaatttgttctttgatgtgattgtatttccaatttcttgttcatgtaagatttcaataaaactaaaaaatctattcaaaacattacctatttcaaattcaattgtgtcctaaaacattattttattcgtaatccttgcaaggaatattgttttcaaagtataactgcctatgtgagtgatcaaattcatgcaaaatttcttgtt

SEQ ID NO: 3216 - DNA, 2108 bp, Homo sapiens
ttcatagatcctatatcctgagaaaggagataagaccaagaatataaaaaataaaaattaaaggaatatttagacattgtgataagacactgaagcaggaaatacaggatatttagctagagaatagctactatccctgtttccatggttttggaagacttttctgataagatgacatgtcaaccagcacctgaaggatgaagaggttgtagcatacaaagagcaaaaggaagtgcattccaagacagcaacacgtgccaaggttccaaggcaagaaagaagtcagtatattacagtaactgaggaggccagtattattaaaaggtagaattaggagtagagttgtatgaaatgaagtaggcagggcttctgtaggccatgtaaggagttgggtttttattgtatatataatgagaaggtatttaaaggttttaagcaggaaataacacctatttcttgtttatgggatattattcctagcgctctgtggataggggcttggagagaaggggtgtgagtggaagctgataaattagttgaagctgtcatactagtacagatacaggattagactagggtaatagcagtggagatagaaagaagtaaatgagtttggaattggataggagagatgaaggaagaaatcaagaatggctaaccaatttctggcttcagaaccaggtggatggcactgtttattagataggaagtctagggaaggcagattttggccatggtggttcagttttggaaaagttaaatttgcaatgtctaagacatcaaagaggatacatcgggtaagaacgtaggcacatctagagcttagagaagtctggggtaggaaaaaaatctaagtatttataagggtataggtaacatttaaaagtagggctagctgacattatttagaaagaacacatacggagagataagggcaaaggactaagaccagaggaacactaatatttagtgatcacttccattcttggtaaaaatagtaacttttaagttagcttcaaggaagatttttggccatgattagttgtcaaaagttagttctcttgggtttatattactaattttgtttttaagatccttgttagtgctttaataaagtcatgttatatcaaacgctctaaaacattgtagcatgttaaatgtcagaatatagtagatttgttgtatatggctgtaccttcagaacccctaaaattaaaaaggaacatcaaatactgtcccaaaccccatatctaattatgttgatctaattgtctacaaaattagtgactcatgttgaggctgcttcacttatattttgctcatcgtcaagtggatttaggtctgcctaatcgctagatgtgtggtggatgcttttggcttatatatctggctgttggtttaacagagggtttggtggacgttattctctatcatcaacccgatgacaaaaagaagaatcgggggttctgcttccttgaatatgaggatcacaagtcagcagcacaagccagacgccggctgatgagtggaaaagtaaaagtgtggggaaatgtagttacagttgaatgggctgaccctgtggaagaaccagatccagaagtcatggctaaggtaaatacagttgcttggaatgggcatagggtcatcatttaaattttgtactcagaataaagctcaaatattttgagttttatgataaatagaaattgtagctttagacttcaactgtttggcaaggagcggctttaacactaaagttaacagcctgtcttggtatccaggaatttccattaacaatcccttttcctgcagattaaatgtgcaaaaggaactgaaatgaaattccttcaattaagtagtcccatacacactgggtgtttgtttagtgctaggcactgtgagggatagaggttttttttttttttaaaagtcctgagtaaagagagaagtaatgttttggagattataagttataatcttcattgactatattatgactttattacttggccatgaattatgttttatttagatttatagctaatttttctttttttaagctttttttgtagtttttatttttaaaaatattttatttattattatta

SEQ ID NO: 3217 - DNA, 1029 bp, Homo sapiens
cacctgtaatcccagtactttggagggccaagaaaggaacaggaagatcacttgagtccaggagtttgagaccaccctgagcatcatagtgagagcctctctcttcccccaaccgccacccccagatattagctgggcatagtggcaagagcctctggtcccagctacttgagaggctgaggtgggaggattacttgagtctgggagtgtgaggatatagtgagccatgatcatgccactgcgctgcagcctgggcgacaaggtgagaccctgtctcaaaaacaaaccaaacatttatcagtgaaaggaaataaatataatacaatctaaagtaaggggtgttttgttgtgttttgtttttggattgtttggagacaggaaggagccagtgggaagggaaggatggtactgagcaaaatatgagagttgaaggaataacgatttgcagttatttccagaaagtggtaagaagaaatgggcttatttattgtggctaaggagttaaccttagaaaggaggtagatctctttctctgaggtgcgatagaagtgaaagtagacattgtgagaggtaagaatatgaagaaaccaatgactttctcaggtgatatccttagaatgaggtttagtgaatgaggattggggaccttaaggaggtagaagaattgcaataactattgtgtgagaatcatgccaaggagtcaaaagaatacctcaagttttaccagatagcagtgaaagtgagtcttgattattttggaaaggattatctctagatagtacatctgttgtagagcttaacttcagaaacttaatgtccataataatgtcggcatattttggattggattgctattattacttctatatttacctattattccagctatttttcagactgtgaaatggtgatgtagatgagtttcactagaaaatttgtcatgcaaatactaattttactcattcagactttgtggattacaaatgttttaatataaaattttttgttttttttttgagatggagtctc

SEQ ID NO: 3218 - DNA, 1028 bp, Homo sapiens
ttgtttacttttgtctgtctctctcagtagaatataaacttcatgaatgcctagaccttgtctgtggtagtcactatatttctagaatctagaaaaatatatggcacatgagtccaaggtatatctaattacttgtctcttgaaagatttgtattatacaagttctgagtagggtgggagccatgtgtttgtataggctaggcatttacgtggagcaacttcaagcagatactttaaagattaattggatatgggtggtaatgggaggaattgaaaacatctgagatgtctgtttatggaagtagttcctcagtcacctggaggtgggggctaggaggggagagaaacagaaattatattcttctaaaggtagacgggggcaatcagaggagccagttgacaaggctgggttttaatcattttgatttttagaaaaaatcatttgttacaaacatgtcttcatcatagatttcaaggtataaagatgagattggtattctgaatacttcaggtaagaaaaggttttgacggtggtagttgcatcaccagtgttaatacttgtagagaaggcaaggatgatgagaactgagggggaaaaatacttttatttttcttcctgagacagtttcactcttgtcacccaggctggggtgcaatggcgcgatctcagctcgctgcaacctccgcctctcaggttcaagcaattatcctgcctcagcctcccgagtggctggaattacaggtgcctgccaccatgcctggccaatttttgtatttttagtagagatggggtttcaccatgttggccaggctggtcttgaactcctgacctcaagtattccgcccgtctcagcctcccaaagtgctgggattacaggcataagtcactgtgcccggcctggaaaaagacttgaatttggttattagaagtttattagtgacatctgggtatacagctcgagttagaggaagaagccaattatagagggttaaagagaacatagatgctgtgtgcttttctcagtatg

SEQ ID NO: 3219 - DNA, 1074 bp, Homo sapiens
ctgggattacaggcgtgagtcaccatgtctggcctaataaactcggagataaccaattcgaaacaaatagttgatatgttaattgtaaaacacatacgcattctcttagattgcattgttcctttaggagaaagatgcattcttctgtatgttaaatgttgttgtatacagcaaatatgattccagcaaaatccctatatgtgatcactagcctaaaaccactcctgtcaagcaatcactttcagcaaagtcctaatggaaagtttcagatttctctcataaagttaaagttcatgagattgtgcaagtacttgttgacaaagttttgaaaactcaggaaaagtaggtttttaatgtgttgctagtagatataataaattggttttaattgtgatttttgatgttgtgaggtttggattttgttcttttatatgttctttcagtcatcattaaacatttttaggtcttgattgaggaggttgaagttagagtcagtgcctgagactgtgcagtattaaaattatgagaggactatgatatctcatttttgggtaaaatctgtaaattaacccattagatgagcactcattaacagacattgttgctaagtattgttctgagatgagaaatatgcaaggatgataggtagtaattttgaaatatattttttagtgtgtctgagctctcagacctactctagttgtagtatttttgtattcttcagctagtattgttaagctgctttgggaagcaagttctgtttttgtttttgtttttttgagatggagtctcactctgtcgcccaggctggagtgtaatggcacgatctcggctcactgcaacctccgcctcccaggttcaagcgatcctcctgcctgagcctcccaagtagctgggactgcaagcatgcaccaccatgctcagctaatttttgtatttttaggagagacggggtttcaccatgttggccaggctggtctcaaactcttgacctcatgatccacccgcctcggcctcccaaagtgctgggattacaggagtgagcaacctcgcctggccaagttctgtttgtac

SEQ ID NO: 3220 - DNA, 1019 bp, Homo sapiens
gcgggtggatcacgaggtcaggagatcgagaccatcctggctaacaacggtgaggccacctgtctactaaaaatacaaaaaattagccgggtgtggtggcaggcgcctgtagtcccagctacttgggaggctgaggcaggagaatggcgtgaacccgggaggcggagcttgcagtgagccaagatcgcgccactgcactccagcctgagcgacagagcgagactccgtctcaaaaaaaaaaaaccaaaaaaactgaagtgtaaatttctcttttctaggtagattgtgtttctttgtttaccattgtatcttttcttctctaagctctttatatagatgttgcctcaattataacataaattcctgagagcaaggagattatcttcttttctatgattgctcttaatacctaatagaatgtaaggaaggttggtaatcaggaaacacaagattttacttatttttcggaacctgactatacttatttggtaattgccaaatatttttagtctgtactgtatgattcttgtctgattacctgattcttgtggagcttatgatatggcaggagtacaaaccagaaggatcaaacaaaatcaagcttaaatgatggaactttaagtacactagaggctgggtatggtggctcattcctgtaatcccagcactttgggaggccaagtcgggtggatcacgagatcaggagattgagaccatcctggctaacacggtgaaaccctgtctttactaaaaatacaaaaaattagccgggcgttgtggcgggtgcctgtagtcccagctgctcgggaggctgaggcaggaaaagggcgtgaacctgggaggcggagcttgcagtgagccgagatcgcgctactgcactccagcctgggtgacacagcgagactccgtctcaaaaaaaaaaaaaaaaaaaagtacactagaaagacagtgggggctgggcacagtggctcacacctgtactcctagcactttgggaggccaagacaggcggatctcat

SEQ ID NO: 3221 - DNA, 1035 bp, Homo sapiens
gatgaggtcaaatgcctctttccatgtttcctagaaagtttcactttttttttttttgagacggagtcttgctctgtcgcccaggctggagtagcggcgcagtcttggatcactgcaagctccacctcccaagttcatgccattctcctgcctcagcctcccaagtagctgggattacagccatgcaccaccacacccagctaattatttgtatttttaggaaagatagggtttcactgtgttggccagattggtctcgatctcctgaccttgtgatccgcccacctcggccttcaaagtgctgggattacagacgtgagccaccacgcccagctgaaagtttcacttttcaaaactagtgtttagaaatgaaataatttagaggaattacataagaaggataattttggggatcgacactcaattgcatgtttaatgaaaagccctaattcatactcttcctcattccctcttttgtggccatgaatgacgtatatttattgatgcttcgctggtagtttcttggattgatccagtaatgtctcttggttcagttattttccagccactttgtttcttttctcttgataaaaaggttataacttgataaaaagttgttataactgctttcctccttttgaatattcagttacctcagtttctttatttataaaatggggatagtaatagtgactaccttacagagttattgtaaggagtaaatgaattaacatatataaagcacttagaataatgcctggaatgtagcaagaactatataaccatgaaccattattattattaccattttattacttagataaacagctttgaaaaggtaaatatacagcttttaatgaaagaccagtgaacctaattccttagttaaatggatactcgtgtcttgctgtagtgacatacttttcttttttttttttttttttgagacagagtctcactctgtggcccaggctggagtgctggagtgcagtagcgccatctcagctcatctcagctcacttcaacctctgtctc

SEQ ID NO: 3222 - DNA, 1042 bp, Homo sapiens
atctgctggtagcatttaccctagccagcttttaatcttgtgcaagccattttccttctctggatctcagcttcatcatctgtaaaatggtccctgttctgagagagactgttatctctcagaaaataaacagtgtgactgtcagcagctcgcaggaatgaggcagggaaggaggaatggaacaaacctgagtcacagtgttggttgcttgggctgcccctaaggcttaggcaccagccagtcctgggttcaactcctggccccaccacttaacagctgtgtgacttggacaaatgacttatctcagccataggctcctcttctataaaatgggataatgatcctgccttatggggctataattttaacatatgaagggcctagcagagtgcctgggcctaaaaattataactaggagcctgtaatcctagcactttgggaggccaagacaggaggatcacttgggctcaggagttcgaaaccagcctgggcaacatagtgagaccttgcctctatttaaaaaattgataataataatacatatataataaatataatacatatatttagaagccacacatggtggctaatgactgtaatctcagctacttgggaggctgaggcaggaggattgcttaaggccaggaaatttgagaccagcttgggagacagagctagaccttgtctctaaaaaagaataataataataattagtaataatagcagcttctactttagagtttcctttgtgccaggcagtggagtaaggtctttgcatctattaccagatttattctccctggcagggaaagctgctattgttattcccaatttataggtaagtagtgaggaatccctgccacctaagcgtggctcaaggtttcaaggttggtgggtgtgtggtatttaaatactttcctgcctgcaccaggagtacctgtacccatcccatgaataacactggactgttgctgtagtctccttctgcaatgatctcggtcttagtaactagcatttaagtactttcacccactatttcatt

SEQ ID NO: 3223 - DNA, 1688 bp, Homo sapiens
taccgcacccggccttcacacccagctgatttttgtatttttagtggagatggagtttcaccatgttggccaggctggtcttgaattcctgacctcaagttatccacccgcctcagcctcccaaagtgctaggattacaggcatgagccgccgcgttcggccgaatatctttatacatagaatgctttcccatatttttacttgtttcctaggtcagatccctaggattgaaatgatgaggtcaaagagcatggactttgctaaggctctttcatacattttccaaaatcatttcatatctaattggttttggatctgaccttgtatttttggaaggatgctaggcattgtgagaaatataaagaaataaaacacatcttcctgccttctcagagctaatgatctagtttgagagatgaagcctttacataaggcaacattttttatgatttataatgtaaggcaacattttttatgatttatattcccatttgctttccaaagggatctaaggtagcttatgagattaacaggttacagattgtattatttctaagttgtacaaggagtgagaaagtaatgttcagaggcttaggagaggtgggtgaaggtgctccctggcaggtttggggtttgaattttgaccagacagtcacttttcttgactctcctgccctacgctggcctatgtgacttaccaggatatccgtgctgttggcaactttaaggagcagacagtgattgccgtcaaggcccctccgcagacgagactggaagtgcccgacaggactgaggtgagaggggaaatatttggtggagagcagggttgagaccctgccagggagcgttccaggcggctctgcagactctgtccctggcactgcctagccccatgctttgcaggcccattgtggtgtccatggcaatattggtggccttcaagcttgggcagaaatggcagaagctggaaagggcaacggagactgagtagtggcctgagaaaatctctgttcctggtttctttctgcatcccaccagccctgggttcctgcgcacatgcacactcatgcccacgtatgacggtgtcaatactcatgaaaatcctttcatgctgaccgtgctttcccaggttaaagaccaaaattcctgacactccctatgaggcttcggtgctctgagaccccagctgacgttgccaacctccttttccccgctgccccatctgtctttgttttggccacactgacctgtctgcagtttccccattgcactaagctcattcctagtatgagatcttctgttttgtttgatttatttatttatttatttatttatttttgagacagagtctcactctgttgcccaggctggagtgcagtgacacaatcttggctgactgcaatctccgcctcctgggttgaagcgattctcctgcctcagcctcccaagtagctgagattacagatgcccgccactactcccggctaagttttgtattttttttttagtagagatggggtttcaccatgttggtcaggctggtcttgaactcctgacctcatgatccacctgcctcggcctcccaaagtgctgggattacaggcatgagccaccacactcaacctatttgattttttttaagacagcgtcttgctctgtcacccaggctggagtgcagtggcatgatc

SEQ ID NO: 3224 - DNA, 1651 bp, Homo sapiens
tctcagcctcccaagtagctgggattactttttgtatttttagtagagatggggtttcaccatgttggccaggctagcttcgaactcctgacctcaggtgatccacccgccttggcctcccaaagtgctgggattacaagcgtgagccaccacgcccggtcctccttttctttcaatttgtctacattttccagatttcctcttgtgaggcatgaaagaaaataaacattttaacacacaactctacaaggcaggtcaggtgaggaggtgtaggctcagagaggcaagacagtgaatcccaggctgttcagctacgaagtggcagagctgggatctgaaagcaaggttcgaccccttacatttgctcctacccccaccatctgacttagggcttaggagagaccaggctccactctgcgtgaccttgggcaagtcaattcctcttccccaagtcccagtttcctcaccgtggtgcccgtaagggggttgtgcctggtgatctctgaccctctgcacttctgcagctgcctgaggaaggagctgtactcttctccataggggttggcagggtgggcttgcgtcctgaccaggccttgaagatccagccaaaggggctgcctaagagcgtccaggatagggctaagctggcctctggctgtggccatagcctttgctctcctcccctcatcgcagtctcttttcagctcacccttgaactttccccttttcccactggtgctccccatacatcagtgctagcagctccctggtgggggcactccctatgggcaaagcgctttgctgcactatctcactgaatcctcagcataggtggagacaatgatgcccattttataggtgacttgacgtcaactgatttcccagctaagaaggggaaggcctagatgcaaagccaggccagtctgactccaagacctgtgctcagcctcaccttgatgctgatcctcctgggcttgtcctctgccacctgtgttctgcaggttcagcccaagccataggctgactttcctctgggcactgtccaaaggtgtcagggaggtatccttagggggacacttgccgcattgggaccctgggagtgcagaataagggtgaaggagagtgagaaaagagagaaggctgtgtgtgtgtgtgtgtgtgtgtgtgtgtgcaagtacatgcagtgatgggggcaggtgggcgtagcccaggccttggcccaaattctagcaaatcctggggcagcgtgtgtgggatgcagctgaggcagcctggtacatggctttgcagtcagacaggcctgggttcaaaccctggctccggcctttgtgtgaccttgggcatgtgcttactctctgtaagtctccattttttggcttccgagagccagtgccaatactgatgtggtaggactgttacgagcatgtaacaggctcagcatagatattctgttcaaggtcttcctgggattctttctggtttgttctggcgggggagacaggtgtggctggggaggctctgggctgccccacctctgcctcaggtagaactccacctgagcttcccttcctctccctgcccttggtgctcctgctgggggatatatgaagaatactaggatgtgcagccttggtcaggattgatggaggcc

SEQ ID NO: 3225 - DNA, 1065 bp, Homo sapiens
atagttagcctatcctaggcatgaactattctcattttagataggatgacttgataaataggatgaagtgagcaacctgtttgtcttcggttattgctatctacaagacattctgctagtcactgtggaaaagtttccttctcttgggttttttcctcttccccttcctcttaacagtgttggttatctttattatgtttctgtgtatttgtaacagctgtttcacccttgtattgcataatggggatttttcttggaataaaaagtgaggcatgtaaattcattgagaactaaccgtagtttgtaaagaagtaaaaggcctttgtatctagttttttgcagatcacatttctttgaatgctggaaagtgaaataaactggtctaggagccaaaaataaatcttgggtttttttaagattttgctcttagatttgtaaccacctgggtacaactttttcctaatttgtgtaagaggttttagagatgcactctgtccctcttgctttacaaattgcctacaagaatgcaaccaaaatactagaaactgaaacttacacaaaacctttcaggttttttcctgtgttgtagttctagggaagaggatagtttattagtatttattttaagcttaaggataggttttggacctggattccatcatagtataactgccatcgaaaagaagacaaattgaaattacagcatttacctaaggttcacagtatggctgacttcagcagccttacatggtaagttctctgtaccagctatttttggttctcgcaattgcatcgacttgggaaattcctatcaccattctctatataggctaaccaaaacttttatcagtacctttcctaaagtatgaagttaggtaatcttccactcccacttccatttactcattttgcttgagtcaaaccaaaaatctagtgtattactagattagtcactaaaaatctagtgtattcaatatatacactagattcaatatatagcttaaaaactaacagacacctaggctgagatttgtccaatacatgaagttcaattctgcaatcctt

SEQ ID NO: 3226 - DNA, 1048 bp, Homo sapiens
tcatgattgctcattaagcctcttgggttaactaacttaagaggttatttggtagtgttaagatgaaatttggatcagctaattccaagtttatattttcattattggatggatcagtaattctgctctccctcttataaacaagacgcattagggcttaacgtttatgacatgattttaaatcattttaaattgaatgttgatgagcaactaatattaagtgataacctctttggggaagtaggttaggtattttgtggtttgaattctatctactttatgacaattatagctaatttattaagtattcatgatgtgccagacacttgaaaaggctatgtgttaactcactcttcacaaaaccttatgagaaagatacttttattttccccatatcacagataaggaaactgaggcacaaagaaaagactgtaaggcagagccaggatttaagcccaggcctggtcccttagttttgggggggttttgtttgttttacagactataatttgagagaagtagattgaggagatagctcattgaaattgttcattttctgtatagaactagaaggcctaatttcatttttatttttacttgtgtcaacttatttttagacttggactattgagaatcttatatgttgttcctaaagcgacacacctaacagcttcaaaaggactatattacagttgaacccatggtagtttggatcctactgatacttgatgaggatctttacgtagtgttttatgttagttttgggtgatgtagttgagtcccccacttactgagtttacctactgtgtatgactgggctcaatgataaatagaatggttatatcaacactcaaatgagggctgacacacttcacctctccttttacttaagatctctctgcattttttttttttttttgaagccaagtaagcaagaagaaaaatgagagataatgcttcagtgagagaggaaaggtgctacatagagtatgagctgttaagttacatcccaggggaaagacctgggaactattgtattattctcttg

SEQ ID NO: 3227 - DNA, 1082 bp, Homo sapiens
tgcttgaagtatttggtgaaaagatgttggttgaccataatttgcaacattgtctcattaaaaataaactttcatattcatatttggtagaactgttaacctagaaatgtagcttgctaataagatagaatgatacaaaagtgaagtagtagccacagtacaacactgactgctcagacacatttaggttcagggtggacctttatgtcttgtcaagatgtctaggcccggctgggcgtggtggctcacacctgtaatcccagcactttgggaggccgaggcgggcggatcacgaggtcaggagttcgagaccagcctgaccaacacggtgaaaccccgtctctactaaaaatacaaaaattatccgggcatggtggcacatgcctgtaatctcagctactcaggaggctgaggcaagagaatcgcttgaacctgggaggtagaagttgcagtgagccaaaatcacgccactgcactccagcctgggcaacagagtgagactccgtctcaaaaaaaaaaaaaaaccggatgtctaggccaatgataattatttttgatgcagtgtggattagttcttttgttaaccccactgtcttggggaatgatgccagctgggaaattgagtttttgactgaaacatggagccttcactgctttttttctggttcctatgaagatttggaacatagaaaacacaaaaactcaccttaaaatttgagcaggtcgttgatggcaaaaataattttaaggaaaaaggaatattcttatgtagttattctaaagtttaaggagcgttgttgaccataatattgcttagttttcttactgctgttaagtaagtaaattgtttcaaagtaggttttgtgtgtgtgtgcctagtgtaaaagaactgaaattttgatgcttacagcacttggctcgtgcatttgtatcaaaatttgcctgcctctttatgagggaggcctgcttttcacacctcagtttatttaatacgaggcaagttgtaagacaacactcattctaggtgattctgtggtgccatgaaatttaaggtaatttggggaaaaggattagtcagtttt

SEQ ID NO: 3228 - DNA, 1035 bp, Homo sapiens
ccttaacttctttaacttagccctgtgaagactgctggccctgcgctgctttagcacaatgatcagttggccctgaatgagttgcagaaggccttctccctggtataggtacctaactgggacctatgggagactggtccctgacccagagtttcaggtgaccttacttccgttcctttcagtgagatcatctccctgcaacaagggtttgggttgtggacctcagactaggaaaagttcttcctgcttaaattcagtgagcctcaaacttttaagttagtggagtcctagtgagacttagggaaaagccaaaaactactcctgcagggccagtgatcaaggacagttgtgagaattggttgcaaagctccattacagagaaaataatagctatatctggcttagtaaataaaggtagcagtgcgttctggcttacaacatagacctcattttacctagtgttgggtggccgaggaatcaaggtcagtagtagtttgattcaagagtgtgtgatatttgaggcaaaaaaggctagtaattcaaagcaatctaaaggagaatgataattttaaaatacatattcagtaagtctatggttttaaaatagttgaaaagaaataagtaacaggcttatgaatttcatttttgaaaagaccataaagtacaaatttctccatgactgacatcagagtgatactcggctgcctctgctgctgctgtctcttctgtctgactccattcgcaatagccttttcttcctatccctggcttaccgagtaaagtagaaacttgccatcagcccaggattctgttttcgagggtagccccagagaggatgctctgttctcattaataatttttacagctctcaatataaatcctttttatacttattatattctgtctcttggggtaacaaagtagtgtacccattaagtgaacgtattccttctaattagtttagagcccagctgcattaaccttgagggatgttcagttacagtattcaaggttctgaactccccatcagccttt

SEQ ID NO: 3229 - DNA, 1965 bp, Homo sapiens
cttaaataggctttgttctcaccattcccttgtttcgagttgccttcagattattttggaagagttcttactacaagatgaggctttttatttcacaaataatgaatctacacacagaaaataagtggtttgggtttttggtgtttcgtgggggttttttgctagctttgtgatttgcttttgtcttaaatttaagaaggaaagaaagcaataattctttccataaataattctttccataatttctaatagttacgttagcatctagagaaattttctctttacgtcatcttgacacttaactatttaagaagttcgatatttgtgactttttcagaccatatttatctactgttaagtgtgtaaatctgtcgctaaaattggggagtaaaaataagtgcttggtatttttcagagtgctagagtcgatttgatgctgtaaaagtaaaaaaaaaaaaaaaaacaaggcttatatacaacctaatgctgctgtaccttttatgaaaaatgacggctgtagataaaaataagttgtggtcattcccttgtaccatacatatgtctgctgttgtcctgttaatgtaaactgcatttttatcttccaaattcttggatcctagctttccttcatcaaaaagatatattgcctatacatcttaaggacttggacataaaaatttgaggtctttttatgatgttttaggtctgaagacttgcggcgtgaatttggtcgttatggtcctatagttgatgtgtatgttccacttgatttctacactcgccgtccaagaggatttgcttatgttcaatatcctttcttcagatggctgattagtgaggggtgttgaagtttgaaattcaagtttatgtaagtggtaacatctaaaaagtagttctttttgtcctctaataaatgtctgtcttcaaatttttgaaaattaattctgactcacacattgctctcgttattaaagttaatccaaaaatggtaaaatatataaattcccattcatgcttctgaaactcatatcgatgattatatatgtgatttaaatttgaatgcactctggttgctactacctttaatgtaagtcctttaaaagttaatatgttcttgtgcttagcaattaaaatttggtattcttgtttgttaatttgaatcacttgatcaaaaacaaattgtataacaatgaggtaaacttctttaatattgtcccctaatttgctgtcctctgttgttacctcagagaatgtaaagctgtacagttatggcgaccccaaagagaaagcatgaaagaacctttagagtagagttcaacacttaaggcaagtagacaagccaaagacctcttaaggatcaggcttgaagagaagggagagtttgggaaaagaaaaaataaagaaaagctggaagaaggacaagcctaatgggagacaaagcctcgctttatctacaaaagggggaaaaggttgtttttcaaagttaaagataaagccatctgtcatatttggccaagcatctcatgacaagtccttctgacaagcacttaaagagttaaaggtcaagatgaagttgaatgatggccaagattaaaggagtcatacctgatgtatcctacagaataactatttttcttttttttttttttaatgttttgtaagcagttaattttcaaaattattctggtttggtctagtgacaaaacctgtaacttgatttatgtgggcctttgatgttgtgattgtggtcttgtgtaaatgcactctctcttatgaagttaaagtgtaacaggatgtatattcttaagattaaattcagcatattttggttttggaccaggtggtcagatgccacggagtagcaggcagtgctctttggagtagcgtggggttctggggttaagccacagagccctgcttaaaggagagacaggtgcatgcactggggactacttagaaacagct

SEQ ID NO: 3230 - DNA, 1028 bp, Homo sapiens
ctttatcccaaaacatacatacttgcctcttaatagtttcttgctcttttcgcccaaagggtttgtgatggtcaatattaggtgtcaacttaattgggttgaaggatgcctagatggctgttaaagttttgtttctgggggtgtctgtgagggtgttgccagaggagactgacatttgagtcagtggactgggaatggaagactcgtcctcactcagtgtgggtgggcacaacccaactggctgccaggctggctggaaagcaggtggcagatggtgggatagcttcacttgctgggtcttccagcttccttctttctcccgtgcgggatgcttccttctgctcctcctgcccttgaacatcacactccgggttttttggcctttagactcttggacttaagttagtggtttgctgggggctctcggatctttggtcacagactgaaggctgcactttcagcttccctggttttgagggtttcagattcggactgagtcactatggcttctttctttcccaccttgctgacggcctatcgtgggacttcgccttgtgatcgtgtgagccaattctccttaataaactccctttcatatatacgtataacctattagttctgttcctctggagaaccctgactaataaagggttgttgctttttctttaaaatctagtaattttatttgactgtgtgttggtattgctcattcattctgagttgatatttttaggcactcaatattctcacttaatacatggttccaaggcatttttattttaggaaggttttcttaaattatagttttagtatttgttctattctcttgttttgattttcttctttagggactcatatcacttgtatgttggatcttctttttctgtgttcagtatttgtcttttgggcacagagactcacacctataattccaagactttgtgaggcataggtaggaggatcgcttgagcccaagagtttgagaccagcctgggcaacatggtgaggccctgtctcaaattaaagaa

SEQ ID NO: 3231 - DNA, 1033 bp, Homo sapiens
tgtcaacaacaacaacaacaaaacaaaagctaataagttaaagaattgagatttgaacccacatctttctgattccattcttgcaggactggactaagttagggagtgccctgcgctcaagttctgcctgacctctggctacttattgtgtgactgagtaaattctctcctctcagagtctcaatttccctctataagaacagattagtgaatcactataaggggggagttccctattaaaatcatcttgatttgcttttctagattactgatgttctttctccagacgttctgatctgccctcttggaggactgcacagtccttcatccctcccctcctttccacgatcatgcctgtgcagaagccactgttcccaaagagtatgacacttctccttggcatgttggggaggagtaaaagttagggccactgtaagtgagcactgagagccagggctcctctgtgtgtctgtgaaagttgtgtactgaacaatgacggcaccatttaccagacgggacatgcgctgctgaacatgaggaccttgctgacagccgtccttttctaacacttgaatgctttctaattatccagaactcttaatgcaaatctgttgacctatattcaaatattgaaagaatatatacccacatgtcaacagtgcttctctgtgggcactgaaataccaggatttcaatcttttctccgtcttcccccaaacgggctacattgaacttgcactgcttttgtaattagaaattctatacaaagccccagtttaaatgtcattaaaccaaaataatttcccattgacaaatggccattgtgtccctatccttcctgggacaagggcagggatgaagagagtgaagactgagtccttgcccagtgatcccctgggaggcacaggaatggagacgggggggctgtctggcttgcaggggggctgtctggcttgcaggctctcagcagcgagctcagctatctgatctcattttgattttgcaattaaaattactatcatttattgagcac

SEQ ID NO: 3232 - DNA, 1028 bp, Homo sapiens
atccacttctcctgcccctgaacactgcttattacctctgagcctcagtttccttatctgtcaaatgaggactatggtatttacctcttagtatggttgtgagagttaagtagtgtgtgcttagcctcgtgtctgacacatagtgagtgctcaaggggatggtggtcactataatcattatctttataatcaaatggcttggtttcccagtggccttgaacctgggtcttctgacacatgaccctccacttctccctccaccccacccaggaggtcatatatgtaacaacccttccacttgtctcccactcccatccttcccagttgtgacccatgtctggtctctgcagatggagaggtgaccagtggctttggcctggctggggagctctccaccccaactccacatcccctcagcccctccacaaaggccaagtacaaacattgctcagcactgagcaaccagctgggggagggtgaactaggcactcaccctcgcttgcatttcttgtagactttgtaaatgttctcttcagggaacccatacttctcagagatctggaaggaaaagacaggtgattcattgcctgctgcccacgctagatttatacaagtcttttatgccatcactttttttacttcctgattacaaaagtaaaacatatgcatattgtgggcaaatatgaagaagaaaattacaatcatctataatcctgtttctcagagatagacaccattaacatctgggtgtgcatcttcccatcttttggtcatgtgtacgtacggttgtgtgtataaatgtttttaggttccacatggttttatatatctttttacttatcatcctagtataagccttcctatgtcacaacaaacacttgtcaagcagcatttttagtggctgaaaaatatcctgaagagcatctaccatttccctgaacttgcccatgagatattgaaactgtcctagtgctgagggtgcacccatgtaccagctggctggcctcgtgcaagctacctgtggagac

SEQ ID NO: 3233 - DNA, 1035 bp, Homo sapiens
caagtaacagcgctgaggcatgtggagaggttgtgtgtggcgtggggccacgtccctgctggccccttgcaggtcgtgagggtttggatgctcgagaggccttacagctccttaaggatgatctgaattttgccgtccagctcccccatgtccagcaggaaggcgacgtggttgctgtaatgctgaatgatgttgttgtccatgttgactaagattctggaatggaagaggggatgtggttggaacacagcaggcgccctgttttcaggccttctgagtgaccaggatgagtgatgggtcatacccagtgggtacctgccacattttaggcacctcacaaaccttccctctgatcctcacaacaaccccacgaggtgagggagtcacagtctcctttactgcacaatgcccagtggccgagccacaacccaacccaggcctgctggcccccacactcacagctactgcgccggattgcctctctcctggtacacccgaggatggacactcaagcaactagtatgtagatctgggggagacgcagtgctcccttagtcaccatattgaggactcggacatgaagtgtgagttcaagccccggaggggtggtgggttgggttcaacaagaggctaggatgtgtccctcaggcatgcctgagccagaggcaggtgccacacaagcccctcccagttccattcccaggaagctgaaatctcaggaggattgtccgatagacttgaggggctaggcccactctctccccatattctccaggcaaggacctgggtcaacctgagagagacggaatcttcatggctgtgggcccctgcagggagtcagagccattgtttatgccaaagaaagagcagccctctagaagctgctcctgatgaaggacccaccaagatgtgacttgagctgatcacatcaaccttctccttgccccttccctgctgtcttctgagcatgtaatggagttgggtatatccacccacacattcaccatccaccattcattcacatacacacactcc

SEQ ID NO: 3234 - DNA, 1872 bp, Homo sapiens
tcagcctcccaaagtgctaggattacaagcgtgatccactgcacctggccaatttaatagtaatgccaaataaagtctacttaagtgccactatagtatggtctccaatactgcaaaaccttgttctgatccaataaaaagggaccacacaactcaatagaggcaaagctgattttaacctccagggctctggaacagcaaaccagtgcaactcaacacatttttcttgactgcataaaaacgtagaccctattaggctattccctggcttaaaatcctgtgatggctctctattgcttttaggataaaatggggtcagcttattaatatgtcctgcctgaccctcctcaaagaaggcaaggtgtatctggatttattttcatgttttagctgacagacttcttgtgttacggttttagaatgaagctcgtaaattaaatcaccaggaagttgtggaagaagataaaagactaaaattacctgcaaattgggaagccaaaaaagctcgtttggagtgggaactaaaggaagaggaaaagaaaaaggttaggaactattctatcttcataagtgatttagtcaatcattctgttgtatcaagacactacaacatggtggttgtatacactggctcttaggccaagctgccagaattgaaattctggctctgctcagtaccaactgcaacacgttgggtgagtttatttaacttctctgtacctctgttttctcatcaataaaacagggactgtaacaataattatttgagttcattatgaattaagtgagttaatgcatgtaaaacatttaaaacaaggtctgacacctgataaacactcaataagtatcatgtgctcacttatataccatagtatattcccaaatttcctttaaatgctattaaagtggccgggtgcagtggctcatgcctgtaatcccagcacttttgggaggccgaggctggcagatcatttgaggtcaggaatttgagaccagcatggccaacatggtgaaaccccatctctactaaaaatacaaaaattagccgggcatggtggcatgtgcctgtagtcccagctacttgggaggctaagagatgagaatcccttgaacctgggaggtggaggttgcagtgagctgagatcgcgccactgcactccagcctgcgtgacagagtgagtgaaactccaactaaaaaaatactattaaagtattggttgatatttattggatctttcttgatgtaaagtagatcaaattattgcatgtatcataattgtaggtgtcagcttttttcttctttttaggaatgtgcggcaagaggagaagactatgagaaagtgaagttgctggagatcagtgcagaagatgcagaaagatgggagaggaaaaagaagaggaaaaaccctgatctgggattttcaggtcagattgacctttattgaaccttattgactgggctgttagtcatttccttcattgtttctggtttcaagaaaggatgtgcctcttgtgcttcgtgggatattcttgatgaggcttaagaccaagaaaagtacaaatatgtctcttaggagagaagttaaaaaaaaaggctgtacttcagttagccaggtttttaaatacttgatgataaaatttatcaaagtctgtttgtcagcatcttcaggatagaagctatgcttagaatagtgttatgggcatatattacttcacacagattgagtatccctagtatgaaaatctgaaatcccaaatgttgcaaaatccaaaactgtttgaatgccaacatggtgctatgatgctcaaaggaaatgctgattggagcatttcagattttgaatttaagtataataaagatattccaaaatc

SEQ ID NO: 3235 - DNA, 1073 bp, Homo sapiens
caggcgccggcttccgcgactcgacttgttttttctctcttggttttttaggaagtcctgagttgaggcttgcgggatcctttccggagaaagcgcaggctaaagccgcaggtgaagatgtccaactacgtgaacgacatgtggccgggctcgccgcaggagaaggattcgccctcgacctcgcggtcgggcgggtccagccggctgtcgtcgcggtctaggagccgctctttttccagaagctctcggtcccattcccgcgtctcgagccggttttcgtccaggagtcggaggagcaagtccaggtcccgttcccgaaggcgccaccagcggaagtacaggcgctactcgcggtcatactcgcggagccggtcgcgatcccgcagccgccgttaccgagagaggcgctacgggttcaccaggagatactaccggtctccttcgcggtaccggtcccggtcccgtagcaggtcgcgctctcggggaaggtcgtactgcggaagggcgtacgcgatcgcgcggggacagcgctactacggctttggtcgcacagtgtacccggaggagcacagcagatggagggacagatccaggacgaggtcgcggagcagaaccccctttcgcttaagtgaaaaaggtgggtgggtcatttacctttccatttgtggtaatgtatggtggcagtatatgagtaggctagggaaccaacgttgctgtgtagtttcaatattagttcctttagtgcccgaaatctttttggaggaaagagggaggacattacctgtatttaagtggacagcattctctttagggttaaaggtcaactggatgttaaatggctcaggatgtagggaactttttttcctattggctgactgttcttagtgggtggagccttttaaatgttatgattaagttaaaggttctaagttaacgtgattgggaagaacaatatcaaaacacgccttcttttagttgacattattactgaataaaattggattgtcgagtatcctaagtgacctaggaggccgggcgcggcggctcacctctgtaatcccagcacttgggga

SEQ ID NO: 3236 - DNA, 1061 bp, Homo sapiens
tgcccttccaacatactcacctcaaaggacgcccgggcacacggcttcaagggtaggttggtcccaattcttcttactacacttcgagcagccccatgtggcttgttttgccagattgggatggtctggagcaaagagacggagacagctacaaccccagagaatgaatccaactactgtccttgtcctctcctctctaggtttgtggagactgaattccacaaacctagggacagggcactctctaggggcaagtcaactctcaattatagtgagggcaggttccccagttgccagcctacaccctggccagccacccaagggaatacctgctgctgctaaggcagtcaatgttgggagggtcagggaaggggagaggaagtagctgagtgtagagattatccaggctttccttcccgtcctctgtacagaaaggcagacatacactgactcctgaagtgccccaggatcatagttggttcttcttagggggagggagtgaaacggtggccttgctccaattccaggcctctggagaaaggagtgctcaactggagagtctcagaaccttttacagtacttcagcaggcccagcacccaaccttccccaccatacccctgccctgggaatgccccttaccacagtggcttccattcctgacatttgaaccagctcctgcacttgaaggacaaggcagccactgggcagctccgggaggcgggaggcgtgactccttcatatcaggccatctggaggagcaccagatttccctcttgtgaaacaaccccccacagtggggatttaatggtcaccacacaagccccaaaaaaccaggccctgcagagccatgacttcacaggggagaaaaccagcccaagaggctgccctcacccaacacttagctctaagtccagactcttaaaggttctgttaaagatctgcggccaggcgcagtggctcacatctgtaatcccagcactttgggaggccgaggtgggcggatcacgaggtcaggagagcgagaccatcctggctaacacagtgaagccctgtctctact

SEQ ID NO: 3237 - DNA, 1048 bp, Homo sapiens
agttaaagccttgctctctgaattaggctttgacttaagcgaatgttgtggctactttgatcatttatccagaccactcaaactttcttcatatcagcaataaggctgttttgctttcttatttgtgttttcactggagtggcacttataatttccttcaagaacttttcctttgcatttacaacttggctgtttgatgcaaaaggctcagcttttggcctcttggggcatgtcttcctcacttaagcatgatcatttctagcttttgatttaaagtgagagacctatgacttctcctttcacttgaacacttagaggccattatagagttcttcattggcctaatttcagtattaaatagggcagcccaaggagagggagagagttgaggcagtggccagtgagtggaacagtcaaaacatgcacaacatttattgatgaagtttgccatcatatagagatgtggttcatggtgccccaaaacaattacaatagtaacattaaagatcactgattggccaggcgcagtggctcacgcctgtaatctcagcactttgggaggccgaggcgggcggatcacgaggtcaggagatcgagaccatcctggccaacacagtgaaaccccgtctctactaaaaatacaaaaaaattagccgggcgtggtggccagcacctgtagtcccagctactcgggaggctgaggcaggagaatggcgtgaacccaggaggcagaggttgcagtgagccgagatcgtgccactgcactccagcctgggtgacagcgagactccatctaaaaaaaaaaaaaaatcactgatcacagatacaataatgaaaaagtttggaatactgcaagaagtaccaaaatgggacacagacatgaactgagcacatgctgttggaaaatggcactgacggacttgctcaacacaggcttgccacaaaccttcaatttgtaaaaacaaaaacaaaaacacatcttcaaagtgtaaagcaaggtgcaataaaataaggtatgtctatactgtataaaatacaaacagccgcc

SEQ ID NO: 3238 - DNA, 1071 bp, Homo sapiens
agggccagatttggttggaaatgggagtgcagtgggacattatgaatagtgccacagaagcaggaagtataagggatgtttgtgaaacacgaaataaaagttaaggagtcttgaagaccaccataatttttgacagcaacttcaagtttgggggtccccagaaccattctcaggtttcataatttgctagaagtactcacagaagtcactgaaagctgttatggttacagtttattgcagtgaggagacacaaatgaaaatcagccaatggcaggggtatagagagccaagtctgggagaatcccaagcctaaatcttccggtgtcctcctagtgaagaaacagacaatgccaactgctctcagcagtgatatgtaacagtacacacagagtactgccaatcatggaagcttaactgagccttgatatccagagttgttttgggggcttagtcacatgcatgtggttgactcaccttcctgctgactttagttttcagcccttatagaggtcatgctgttaatgcatggcctgaagacccctccataaatcacattgttagcacagattatttggtgtggcccaaagctcccaggttaaaaaacaaaacaaaacactcctatcaggtgggacattccaaggatttagagattatctctcaggagctgccaggcctctccttgcataagattctttttttttttttttttttttttgagacggagtttcaaaaatttttgcccgggctggagtgcaatggcacgatctcaactcactgcgacctccgcctcctgggttcaagcgattctcctgcctcagcctttcatgtagctggattacaggcgtgcaccaccaacccaggctaattatttttgtaatttttgtagagacggggtcttactgtgttgggattacaggcacgagccaccgcacctggccaagattctttactacatagggaataattcaatttggctaaagtgtagactattccctggagttgaaggtgagcttaggagggtaaactagtgctatgttgttggaaattgatggaaggcgtttgttgtcatgg

SEQ ID NO: 3239 - DNA, 1006 bp, Homo sapiens
ggctcacacctgtaatcccaacagtttgggaggctgaggtgggtggatcacccgaggtcaggagtttaagaccaacctggccaacacggcgaaaccctgtctctactaaaaataccaaaattagctgtgcgtggtggcaggcgcctgtaatcccagctactcaggaggctgaggcaggagaactgcttgaacccaggaggcggaggttgcagtgaactccagcctgggcaacaagagtgaaactcctgtctcaaaaaaaaaaacaacaaaaaaaaaaaccttaaataatctaatcttctaccttaagaaactagaaaaagaagagcaatctaaacccatagtgaccagaaggaaggaaataatacaatttagagtgaaaataaatagtaaagaaaaacaatcaacatcaaaagttggttctttgcaaagatcaacaaactcaacacacctttagctagactgatcaagaataaaagagagcacagtggctcacacctataatcccagcattttaggaggctgaggtgggaggatcccctgaacccaggagttcaagaccagcctgggcaacatagggagaccctatctctaccaaaaaatacaaaaattagcctgatgtggtggtacatgcctgtagttccagctactcaggaggctgaggtgtaaggatcactgaacccagggaggttgaggctgcactgagcggtgattgagccactgcactccagcctgggtaagagagtgacaccctgtctcaatcagtcagtcagcaagaggccaggtgaggtggctgaaaaaaccctatctctactaaaaatacagaaattagccagttatgttggtgtgtgcctgtagtcccagctactcgggaggctgaggcaggagaatcacttgaacccgggagacaggttgcagtgagccgagattgtgccactgcattccagcctgggcgacagagtgagactgtctaaaaaagaaaataaagagataaaaataattagaatac

SEQ ID NO: 3240 - DNA, 1027 bp, Homo sapiens
agctctgtggagaggttcatgcagtgaggagctgaggccttttgccaacagttgtgtgagtgagggagtcatcttgaaattggataccgcacctctagttgatattttgaatgcaacctcactagactgtgagacagacccacccatctaggcttaacccaaattcttcatgcacagaagttgtgagataataaatgcctggctggatttcagactggtgacccacttatacctcttatctccccctttttgaacataatgtctgtaacagttatgcccgttccaaattgtatgttagatgtatgagggaagataatttgtctttagttcacaggcctgcagatctaaaggaactgtatttaaactacatttttggacttcacatgtacctgttttagatgctagtatccttgatattaagctaatgctataaagagatgagatttttgtagagttttgggagggagggagtatattttgcatatgggaagaatgtaagtaatttgggccagaaggtggactgtgatggtttcaaaatatgtccacactcttcccttcaagaggtggagcttcattctcctgcctttatgtttggattggacttggtaacttgctatttatttatttatttgtttgtttatttttttgagatggagtcttactctgttgcctagactggagtgcagtggcatgatcttggctcactgcaacctccacctgctgggttgaagcagttctcctgcctcaccttatgagtaactgggattacaggcgtgcaccactatgcccggctaatttttgtatttttagtacagacggggttttaccatgttggctagactggtctcaaactcctgacctcaggtgatctacctgccttggcctcccaaagggattacaggcgtgagccactgcgccgggccgtaacttgcttctaatgaatagaatattgcgggaactgatggtgtgtgactttttcagattgggtcataaatggctttgtgacctcttttgattgctcactctg

SEQ ID NO: 3241 - DNA, 1031 bp, Homo sapiens
agatgagaagcaggagttgagcagataaataaaagcagtggggccaggcacggtggctcatgcctgtaatcccagcactttgggagaccgaggcaggcagatcacgagttcaagagatcgaaacgatcctgtccatggtgaaaccccatctctcctcaaaatacaaaaatattagctaggtgtggtggcaggcatctgtagtcccagctactcaggaggctgaggcaggagaatctcttgaacctgggaggcggaggttgcagtgagctgagatcacacgactgcattccagcctgggcaacagagtgagactccatcccccaccaaaaaaaaaaaaaaaaaaaaaagtggtgggggtgttccagacaaagggagcagcacatggagggtggagagaggcgagatggcagcatgtgagcatggctggactgtggatgcaggtgcactcgtctcccactaaggagtcccgcctaagcatcctagaaatctggggccagaaggatcttaatcatcaacaaatccaacctcctccttttccaaatgaagcccagagaggggaagccatttttccaaggtcacatagaaagctaatgatggagaatagactcaaacttgctgcactgcctgagttttggattttctttttttccttccattccttccctctgcccttccctcccactgtcctccaattcatatttgtcacatgcctactttgcaccagcccagtaccctgacctccttgccttagaaccttaggcttccagagcctaggtcatcaccacctcttcctatcaaacctcctccccacaccccgttcctgcctgacctttcctactcgttaaaaatccagatgcctaggttgcttcccataccaacaagatcagaatgtctgggggtgggggccaggtgtcagtattttttaaagatccctggatgattccatttgtagcaaagtttgagaaccactgttttagccctgatgaagggcccctccacctcctgtcccttggcctctgggttgcagatga

SEQ ID NO: 3242 - DNA, 2069 bp, Homo sapiens
tctcagaacttaaattgtgtggttcccacaggctgtaatatatgcactgaggttgtgttgggcctctttgaggtgggggctgggggtcgtgacttgacaggcttttttttttttttttttttttgactgatgacaccttacccttcctttacaggataagcacattgaagaagtgcggaagaacaaagaatccaaagaccctgctgacgagactgaagctgactaatttgttctgagaactgactttctccccatccccttcctaaatatccaaagactgtactggccagtgtcattttattttttccctcctgacaaatattttagaagctaatgtaggactgtataggtagatccagatccagactgtaagatgttgttttaggggctaaaggggagaaactgaaagtgttttactctttttctaaagtgttggtctttctaatgtagctatttttcttgttgcatcttttctacttcagtacacttggtgtactgggttaatggctagtactgtattggctctgtgaaaacatatttgtgaaaagagtatgtagtggcttcttttgaactgttagatgctgaatatctgttcacttttcaatcccaattctgtcccaatcttaccagatgctactggacttgaatggttaataaaactgcacagtgctgttggtggcagtgacttcttttgagttaggttaataaatcaagccatagagcccctcctggttgatacttgttccagatggggcctttggggctggtagaaatacccaacgcacaaatgaccgcacgttctctgccccgtttcttgccccagtgtggtttgcattgtctccttccacaatgactgctttgtttggatgcctcagcccaggtcagctgttactttctttcagatgtttatttgcaaacaaccattttttgttctgtgtcccttttaaaaggcagattaaaagcacaagcgtgtttctagagaacagttgagagagaatctcaagattctacttggtggtttgcttgctctacgttacaggtggggcatgtcctcatcctttcctgccataaaagctatgacacgagaatcagaatattaataaaactttatgtactgctgtagcaactcctgtgaaatgactaaagggaaccttaattatttctaaagtagcatttgactcgggtggttaaggttggcagatacgtcatcttgtatccagaggctgtaatagtccccattgtcagtgctttgcctctcaattcagggaacgcctttggcagctttcctgtgctatttgagaaatagcctaattatacatattttgtgcctctcagacatctgtataaaagctcttggaagccaagcacttatagcaaaagatgattgctaatactgcggtggggtccatgtgttgctaacgcatgtgcctctgctgcttgggctgtatcttgagattggggttttaccaaacttattcatgagaacaataacagcctacctcaacttacctcctaagattgttaggattaaatgggtttgtggcaagagagcacacttagaacatagatatttagcattccgtataaatcacgattactgttttcaaccagaggctaatgagtgatctaagtttatactcttgagttggaaattatgcagtttttatattccttaaattgacttttaaatttacttaaatgatcaatcagaggaattctgaacaaagcttggtttaaggagttacgcccatgtagggcaaataggagcaagtgcaagtatagttgaatacaacaataggttctgagcaatatctaaaccaagaggacaggatgaggcttgtgtgcagtggtgcagcacagttcatcttggctcctgtctctggcacatagcaggtgctctgggatctttaaaataccagttctgaatagatgggaatataaagagggcctgagggtagaaacttggcataatgatacgaggtgtcctacaagtggcagtgagcttttgttcatctaagacatttagggagggaaactggcctcaggagaaagcaagggaaggatcaaca

SEQ ID NO: 3243 - DNA, 1059 bp, Homo sapiens
aaggaaataccagtcctcatttattgaactcctgttacatgcccgctcctttgtttatatttttctcctttaatacatggtgttgcctcaaataatggaaattagaaacagtttcaggaatgttaagtcgtttttctgcagtcatacaactagtaagtgttggggtcagaattcaagccctggtctatcttaaaccaaagctcatgcttctctcatgcttcctctttgaaaagatttgttgccagatgattctttggcactttggttttgttttttgagagctgtacaataacattttaaattgctagtgtgattgtgttgctcagctggtatcatggtagcttttctcttatctaaacaattctattataaagtaactatctttaaaagctaatcagaagaatcaataaatattaatatgctagttgtagaaaatttgggaaatacagaaatttataaatggaaattaaaagtattcattatcccgcttccgagaagcaaccagtgttaacattttggtgtgtttctttccattcaatgttactcattaacaactgtacataacttttcatttaactccctttctcaacaaccctgataggattgattttaaagctggggcaagtgaggcacaaaaggtaaggtaataaccttccccagaccagcatagtgatttgtagtatacacacacacccgcccgaagagcctcagtgcttacactaaggagtcgtcttctatgcaatagtgtgagttcatggagtaggaggaagcaatacaaccaaaggttggacagtggaaagctttttagacatcaaccctggccctgtagtcattagcctgtgctttacatagtaactggctaaatataatgaaactcccatcatgactaggatttggcagaagagaatcaatagaaccagtgtcagatgctctgtggttatcctgcaagtcagtggttccaatgtgttttgagaacaagctgttctgttgaaggggtcataccaaggtatggtctggtaattaatgcagtttcctgagacaaaagctaataagcctttt

SEQ ID NO: 3244 - DNA, 1045 bp, Homo sapiens
tcccctggcgaccgcagctggtgattgaggggcggcgctcccgggccccacgagggttcttctgtcttcgcggccggacgcgcggacagcgtgggtggcggcaggttgggcatggggacggcgggaggcggtggcgagctcaccgcgggaccacccgggggcctgttcccggggcctgccccacccgctgaactgtgaagggggtggtggcggcggcctggaggtgtttttggcgggagttggggggggcgtccgcgcagggggagtcaggcaggggcggagttacccggattggaccgttagccccgcccacccctccccttcccacgcgcgcgggctccggggtgttgagttcggggagattcgaaaaggcgcggggaggaagggggcggggccaggggccggagcgcaaggcgtgctctgattggccgggggcgaccggtcctcttttcctcgcccggaccagggccacgcccatcctgggtccggtgctgcgtctaattctctgcttttcttaaatcttgtcgctgcctctgattttaattcctagcttttgggaacctgtcatcctacgtttttggtactagctggcgtctacaaaagtcataatgttaaaaagatcaacaagagatacagcatttttcatgacataacggcagcaaatataagtcaaaatctagaggttcataaacattttgcttgctgttgggcaaggaagcttaaacctgagggacaataggagttcaacattattggttactattagcttgggcgttttcttatccaccacgtcagacacagacaaagcaggggtgggtatttcatttgcacaatgagttgtaggcagtattaagatggctccgggggcactgttgagttgaatctggaatatcttcttacagtttcggtgaaatgttaaagagtttatgggggaaaaattcttcacccttgtgactttgtctgattttaaaaatccaagagttttatgaccgagaaagctcagttaacttgattttctggaaccaatatcatattcaggtcatat

SEQ ID NO: 3245 - DNA, 1152 bp, Homo sapiens
tcaacctctcaaatagctgggactacaggtacatgctaccatgccctgctaattttttaatttttttttttaagagatggtgtcttgctatgttgcccaggctggtcttgaactcttgggctcaagtgatcctcctgcctcagcctcccaaagtgctgggattacagggatgaaccaccatgcccagcccaaggtttttcatttgtgtatctattatttgagtggaagatgattgtcctttattgagatggagaagaatagaggagcatttcaggggtctgaggaaggaaatggcaaaatcttaaggcccataatattgctcttggtgacatggttttgctgttggcaccaaggaggcttttcctgacctcacatagaaccttgtgcaatcagggcactaagttatattgttttgccactttgtctattctgtcttccctgctggactgggagctccttgaaagcaggaacactcatttatgtctatatccaaagcacatagtagacactcaatgaatgttgaatgaatgaataattaaatgaatgaagtgccattctgtggaactcaggtcagtcacctgagagtagatccaggagaagagggatatctgatccttgttctcagagagtttgaaatctagaaggatctttggtgaaaagtaaaagtgatccctacctaagatcctgactgaaggccgtgggccctggtacccccctcctggctttctgagcctttaccccaccagagggaggaactccgcccttccctccaccaccctaactattcttgcctgggatccgcatggcaattccaaatgtctggtcctattccaggtgtgcggtggctctggatgcttggatgtttcctctggaacgtgacttttaccccaaggcccgaggacctgtgttctttatcaatactgagaaattccagacaatggagagtgtcaatttgatgaagaagatatgtgcccagcatgaacagtctaggatcataaccgttctgtgagtaaaccacaaggtcgtgatcccagggccctctccatttgccacttgctgtggtgcccttaacttctggattacccaaaactttctacccattagtaggatacctgaatacttcctgaattgcaaagtctaaattcttttaga

SEQ ID NO: 3246 - DNA, 1035 bp, Homo sapiens
acttcaaaaatgaaatacaaggctgggcgtgttcactcatgcctgtaagcccagcactttgggaggctgaggcgggcggatcacctgaggtcaggagttcgagaccagcctggccaacatggtgaaacccctctctactaaaaacataaaaattagctgggcatggtgttgcacgcctataatcccagctattggggaggctgaggcagaagaattgcttgaacccaggaggcggaggttgcagtgagccaagattgtgcctacattccaacctgggcgacagagcaagactctgtctcaaaaaaaaatagtaagttgtgtaaagaaaaatattaattatataatatggcagttcctatgagagtgtggcaaaaatcaagagggcttggaagttttttctttgctcttgcaactggctggatgcagttcatatatttttcaaccagtaggtggcaccccaacctaattttttgcagttgtaacctggtggcagaaggggcaggactgatggcttgggcaagactgttatgccaagttttatttgcatgtatttggactttctttttttggagacaaagtctctctctgtcgcccaggctggagtccagtggcacaatctcggctcactgcaacctccgcctcccaggttcaagcaattctctgcctcagcctcccgagtagctgggattacaggcgcctaccacatgcccggctaatttttgtatttttagtaaagacggggtttcaccatgttgttcaggctggtcttgaactactgacctcatgatttacccgccttggcctcccaaagtgctgggattacaggcgtgagccactgcacccggccacatttggacttattaacacatatgaagtgcttggtattttagagtgcttccacacacacaatcctcattagagatagacaggatggggagaattaataagccattgcccgtgttacagtgaggaagcagaaagatgagaagtttgaactttggtcagcctggctttctcataacccattttgctgac

SEQ ID NO: 3247 - DNA, 1066 bp, Homo sapiens
cgagatcgcgccactgcactccagcttggtgacagagtgagactctgtctcaaaaaaaagaaaaagaaaggtctgtaactcgaacatcatttggtgggctaagtgctttacttgcagggtcatttaatcctcatttcaaccccttttataattgaggcgacaggcccaaggtccctctcccgggatgttttggaagaacagttcaaaccttggttttggtgggtgtagaatctgtttcttactttggagccatctggtagtacaacagccatggtgtcctaacatagccaacctagccatggctaacctccatgtcctcgtcagaccccagacccagacatcatcaggttttgaactcccttagtctggctccagagcatgtgccataacgcaaaattgcaaggttagtactgtccagtcctttgatccgcagcagtgtgtggaagaggcagatagaggagcatttgagtctgggtgtttttggaggcttctcatacctgattggtccctataattatgaggaagagagggatggacatggttggagtgtaggcatcagcggaagtcagatcctgcccagaccagctccccatcctctgcctatgctatcagccttgacgcacccttcctcagcacactgggcatccaggagaagtacctggcaccctcgaaccagtcagtggagcaggaagccatgcagctgtagcaacaaggtggaccctggagagcaggatgcataatccagcactggggaaagtggaggctcctgatgcaggctgcagacccaagagcaagtcctcccagccagagctggcgggctggcaaggggatattcagctctgcaaaggacttctggccaaaaagccagacatggtgccaagcagaacaccccccatactgtcagtggtgtccgtgagctctgggccctgccaccagaaagtcgagcactggtcctagtcaggctgtgatgaaatgtgctacaatacaagagtttattttctactttttgtgacttccaaacttttcttcagtcttccgggcccaggggtttggggaagaatgaggg

SEQ ID NO: 3248 - DNA, 1045 bp, Homo sapiens
cgctcttgttgcccaggctggatcgcacaatggcgcaatcttggctctgtgtaacctctgcctcccatattcaagcaattctcctgcctcagcctcccaagtagctggtattagtgtgcgccactgtgcccagttagtttttatatttttagtagagacggggtttcaccatgttggccaggctggtctggaactcttgacctcaggtgatccacctgcctcagcctcccaaagtgctgggattacaggcatgagccactgcgcccggccgtggatgactgatttcatattgatcagttgggcttcctgatgactgtctctcatgtgcaaaggtggtcccttggcttcagagttggttgtactgaggacaagagaggatattgatcaataggagtaacaaatacagaggcccagaaatgagagggcattagtcattcgggagagatgcaggagtccagttcctggtgtgttgcatgtgaagaggaaagggcgttgcaggggtacaggcagggctgccgagggaggggcctgagtgccctactaaggaatgtggacttcagttcatgggtgggcagtgggagcaagtattcaagcagtactgttgaacagggtgtgacacaatcagatgtacattttagaaaagcccctgcaattgtggaaaatgcatttaagggacgtgattgggggcaaaagagttttacagtcttgctaggtgagaagggttgaaagatttgtagtgagaatagaaagaaaggtgtagaatggaaaaatactaaggagatagactgtaagagtcagtgactgaatgggatagatggagctggagtagaacttagcttcccagatctctggcttagacggtgggtggttgtactaatcactgaggcaggaaaaggaggagggagcaggtttgtcacatggatgaaagggacaagagctggcagatgtgctgtgttcaggggtccatgggacatccagagctgtccaagaggcagccagacttttggagcttggttagtgactaatgaggctggagccaaggtca

SEQ ID NO: 3249 - DNA, 1022 bp, Homo sapiens
agcgctgcctcagtgacccaggcccacaccctgagcctggggagggagaaccgttcttccccaaggggcagtaacaccagggccagcaggcagcgcctgtcccctcacagactcttccaccagagcaggggctgctgggggctccccttgcccttcctgacccggattggccctgcccctccccctaccgcatggcagctgggcccacagcccccaccccagcacagctcctcccctgccgcctcccgggaagcatcctccccaccagagctgcctccccaatccatttggcagaactgctggggctggtgaggccggccctgcccctccctagatccaggcttctcccggacctggactagggcctcggaggctcctccctctgcctcatcctcctcctcattcagaccaatcttagtttctaaccaaagagtctctggctcagctgtggtcccacccaggaagggagggagctgaggcctcccttgagtaggccctgctttatcaggggacaaaccaggggtaccaggcacatggctgggggagggactgctgacccaccaaggtctcacactcctcctgccagctctgtcaccctggccaccacccaacctgtccttactcagagctgcgggctgagggcatctctgagtgtctctgcctggagcaggggtggtttctacggtgacagtgacgtgactcagagcttttcgaactgtgctcccacggggaccactgggcccctcaggggaagctgctaggggaaggactggccgtggctccagaatgtgctgcctttttaagttttgtttgttcacactcctatatatgattgtttgcacagagggcgctcctgtttttaaaacattttgaaaacccctggctgaacagtgctctgcctctaactccctcctcacactccagaattacccttcctcatctgtgcctgtctgtccaacccctcccccacgtctctctgcctgctgggctcttaactgttgctcgaagactgtgacatcaga

SEQ ID NO: 3250 - DNA, 1026 bp, Homo sapiens
gccagtattaaggggaaaaggtgtgccctttttaagctacatcaccctgtctgagcctcagtttccccagtctaaaggggggtgatgtctgtaaagccctgagcacattgtaagtgctcactaatgggagttgctactattcctggagccttaaaggaagaggtgagggtggggtcaagcactggaggatggttttaggtatatggactggagggcattggggtgagctgagtactgaggttaggggtgcaaatgagaccattagctgaattgtctgagctcgttctttagttgggaggtggggagacacatgttcagcaaatggattcgtgctgataaatactgtactgaagatggaaagatggataaatataatcccagcctcaagggagaggctggcatgtaaacaggcacttgtgatgtgctgtgaagtgctgcagcaggagcctgcagagctgtgggtgtgcgggagggaggagtggaggtgggtgggtcaggaaaggcttcccagagctttgagctgggtcctgaaggttaagaatgagtgttttggccaggtgcggtggctcacacctgtaatcccggcactttgggaggctgagatgggcggatcacttgaggtcaggagttccagaccagcctggtcaacatggtgaaagctcatctctactaaaaatacaaaaattagccaggtgtgatggtgcaagtctctaatcccagctacttgggaggttgagacaggagaatggcttgaacccaggaggtggaggttgctgtgagccgagatcgcctcactgcactctagcctgggcgacagcgaaactctgtttcaaaaaaaaaaaaaaacaatgagtgtgcttagctcacatagaggggagaactggagaagggcacagagatgtgaatgacacagagccacagatcatgcagaaccattgacctttgcttctaaaactcattgggatgtttccaacccttccacctcacccccaaacacgcctcactcacctgttttgctgggcagag

SEQ ID NO: 3251 - DNA, 1059 bp, Homo sapiens
cagagggcagtcggaccccagcgcagaggaatttttggttgctcaggtgatggcttcttaaaaaaataaaaaaccagaggctggtgtgttccccttccaaacccgaggagggcaggcctggggagaaggctctggtttctatgatctcttcgataaaaaataatccaaaataataacaaaatacgtggtttctctttcaccctttcccccctccaggaactgaggtcagaaatgggggtgaagggacaagggataccctggtatggcctggatatcaaggtgtgggcctcttttttgccccttaccacccataagtaaatttataaataaataaatcaatcataaatagacactgtctttgtatatgtgcatatataatctttctctctcctatttaggcaactatgtgactaatctctctgactctttagctcagaaattcaaacgtaaagtgacatggtcaaggtcaagtttgggggaagagggacatctgggacttggaatggcactgtaaaactcccagcattctggaattgcaacccagctgggctgtgagacatttctgagtagaacactgaccacctgaacattctggaaccgtggagccagctgggcccccatagggatctgaacagaaccttgaaacacccaatgtcctagaactccagaaccagctgggtctggggggtgtggagctgggggtttggaaagaagccctggagagcctaacattctggaattctgtagtaatcagggttgaagggtcatgaagactcagctagacatcactgggggagcgggatcggaaggggatcttggaagaggaacagcagcagcagacagcccacagcactttctgcacatcctggttgcggaaggcgtagatgatagggttgatcatggagttgtaggtggcagggagcaaggtaagataggtgtagagaggtggagagtgggcatcacccagcaggcagtagacagtgaagggcaaccagcaggcggcaaaggctccaagcaccacggccagtgtggcaatgcccttgcgggtggccacatagt

SEQ ID NO: 3252 - DNA, 1093 bp, Homo sapiens
caacagtgaggtttcttttcttctgccctaactattgtgtagcctcttatgctgaaatcggcttctgctggcttctccggctttcagagccctgaaacaaagagaaacaggatctgtccctacccagcacagcaaatggttgtagtaattgccaaagccctcataaagccctccggcttgaggagagagtgtatagtcatgggttctgcctctgtgcccttgctggccgcttctcctctgccttctttcctggaactcagggtgtggggactgagcctgtaggggacagcatgccgtcttgctgtggccactcccaagtgtgccctcttccctctttacacatcaggtgtctctggcacaggacttggcactaagctccatgctgagacaccaggctatgtgggcccccaccttgtttcccagcctgcaccttagaagccgaaggtgctttcatcagaaccctaaaatggtcgttgaaggcgcctgggccgcagcccagcagtagttggagaggcaggcagagggcagtggttctcccaaataggagacctggggcctggccaggccagggtttgggcctaatggctttgactaaattacccccatcctccttgcccggaaaagggagagctagagccactcactgtcattctgctctgaccttgaagggggcggtgttggcctggcttctggaatggactgagtccatcgtggaaagggctgggggcaggaggaggtggggaggggcactgcctgcggaaggtaggattagatcattagctcagtgacctcctagggtttcgatgtgctatgttctcatcctacagttggtttggtaatgatctgcaagtcccggagagcaacagcacagctctgcctgacgctctcattaaaatctatgcagccaagctcggcactttgtagcagccggccttgcgaagcctcctcagctcggggggccggggacccagtgagccgagaggccctctgggctccacttatgcatatgcaccaaaaaaaaaaaaaaaaaaaaaaggcttctttagacccagagccctttaagatgataaaggacccaatgcaggtaatcctg

SEQ ID NO: 3253 - DNA, 2068 bp, Homo sapiens
tttaaaaactatatctctaaataattttaaagcattaagaaaagattgctgacacttgatctagcctagtgttctccctagttcttcttttgcaaataaacacatttttcaaaaagtaaaaactgaggctcagagaaattaaatacagtggtctcctgccttatccagtttcaattacctgtgttccactctggttcaaaaacaggtgaatacagtgcagtaagatgttttgagagaccacattcacttaacttttactaatattactgtaattgttctattactgttcttaatgtcttactgtgcctaatttataaattaaactttatcatatgtatgtatagaaaaaaatacacctcagtactatctgcagttttaggcgtcatctgagggtattggaactatgttctgaggataaggggtgactactgtaatttaattgttcaaggaagaaagtgtacctggtctttcaaacccagtatagcacactttgtagcatcctgttttgcaactctcctgttctgtagattctgtcaattagaaatgcttccacttggacttctgccttagtctttcactccctcatgtagtacattctccatactgctgccagagagagctttctaaatgcaaatctgatcatgtcactctctggcctcaatcttaaatagctccctatagcttttagcacactctgttaagtgctgtagcccggcatacaaggctctctgtgcctcagcttttgtctgccttattagtctcatcactcatgacttcctgcacttcagccacataagccatttactgttcctggaacactgtttttgcctctgcatatgctactccctccacctggaagttcttaactagctttatttgtcctttaagacaccttttcttaactgactgcccctctttgccccaacttgagctggatacttccattataccttgaacttaacatttgtagtcacacttaccagagtattattgtcccctttatttatatctccaggagcttgcaagctctgtgagggcagaggaagtattaaattaatatcctaagtgtgtggcacagtgcctggtatataagtttcactgaatgaacaaataattgtatattactttatacaaagacaatatatatgtatgcttttttttttctttttaagagatgggatctcactatgttgcctaggctggcctcaaattcctgggctcaagtgatcctcctgccttggcctcccaaagtgttgagattacaggtgtgagccaccatgcctggctccatatatatttcatagttgtcatttgtgtgccagattttcaccagctctacccatatttattgaggaaagaaatgaagaagggagggaagggaggagaagggaagggaacagaaaagaagggagaaggaggctgggtgcgatggctcacacctgtaatcccagcactttgggaggccaaggcaggcagatcacctgaggtcaggagttcgagaccagcctaggcaacatggagaaaccccgtctgtactaaaaatacaaaattagccaggcgtggggcgcgtgcctgtaatcccagctactcaggaggctgaggcagaagaatcgcttgaacccgggaggcagaggttgtgatgagctgagattgtgccattgcactccagcctgggcaacaagagtgaaactctgtctcaaaaaaaacaaaaaagagtctgggagagggaaaaaagaaaggcagacagcttggtgggtagatgggtgggacaaaagtattgaggagaggaagacaagaagctggtttgggagattcagggtcttattaacattttaggccaagtacctggaaagtttaaaacaccctgtatttctttggacatgtgctaattatcatgacttattctgacatttcttagcctttttggaaatttctcttcttggctgataactatcatttttctctctttacattagggagtaagagctttgaggtacaagaatgagacggttgtggcagacactcatgttgtcacggtagtcttggtctctaattttttttttctttt

SEQ ID NO: 3254 - DNA, 1049 bp, Homo sapiens
caaaaagttgcagaagggtatatacgttaatattagaaataaaaaaatcaggtcaagaccaacctgggcaatatagtgagacactgtctctacaaaaaaattttaaaagtggctgggcgcagtagttcatgcctgtaatcccagccttttgggaggccaaggcgggaggatcccttgagcccagtagttcgagaccaccctggacaacgtaagaagaccctgtctctacaaaaaatttaaaaactagctgggcattggtggtgcctgcctgtggtcccagctacttgggaggatctcttgagcccaggagtttgaggctgcagtgatctgtaattgcaccactgcacttcaccgtgaacaacaggaaaacagtctcaaaaaaaaaaaaaattagttgggcatggtggcacacgcttgtggtcccagctactcaggaggctgaagtaggaggattgcctgagcccaggagttacaggttacaaagagtgatcatgcactgcattccagtctggacaacaaagtaagaccctgtatctttaaaaaaaaaaaaaaaaaaaaaatatatatatatatatatatatatatatatatatacacacacacacacacacatatatatatacacacatatatatacacatatatatgtatatatattagagtcatatgaagttctagaatgtgacactaaacaatataacatttagagatagaaatgtgataaaactataaagtaaaggaaatggtaaacacacgtcacacgtttaagatagttatttcaggataaggaaaggagatggctttgggagagtatgcagggggctttaaggctaatagtaatattcttttttgtttttttgagacagagtcttggtctgttgcccaggctggagtgcagtggcgtgatcccagctcactgcaacctctgcctcccaggttcaagcatccttctgccttagccccccagtagctgggattacaggcatgtgccaccatgcctggctagtttttgtatttttaatagagactgggttttgccatgttggcca

SEQ ID NO: 3255 - DNA, 2010 bp, Homo sapiens
ggtgcgatcatggctcactgcagccttaacctctgtggctcaagtgatcctcccacctcagcctcttgggtacttgggactacagatgcaggtcaccatgccaggctaattgttttattttttatttttattttttttttgaggcagagtctcgctctgttgcccaagctggagggcagtggcatgatctcggctcactgcaacctctgcctcctgggtttaggcgcgattctcctgcctcagcctcctgagtagctgggactataggctcatgccaccatgcgcagctaatttttgtatttttagtagaggcggggtttcatcatgttggccaggatggtctcgatcttgtgacctcgtgatccgcccacctcagcctcccaaagtgctgggattagaggtgtgagccaccatgcccagcctaattgttttattttttatggagatggagtctcactatgttgcctaggctattcttgaactcctgggctcaagtgatcctcagcttcagcctcccagagtgctgagattacaggcgtgtgagctactttgcctgggtgtgttttatttttaagtaaatgggaagtctggaagaagtgttttgtttttaaattgaggtgcttgaagatttaaaaaaaaaactttttaatgaaaaaatatcaagcatacatgtaagtaaagagaatgatgtaatgaactcctatgtatctatctcctagcctcaacaagtatcaactcatggccattacaacaggtctttgaataacattattttgttcaccttcattgcgttataatgttgatgagaaaaaaaatgtattcctggccggggctactgtctgtgtagtttgcacgttctccccacatctgtgtgggctttctccagtactttggtttccctccaggtactctggtttcctcccgcatcacagaattgttcgtgtttgatgaattggtgtctctaaatggtcccagtctgagtgagtgtgggtgcgtgtgtgattgatgggatggcatcctgcccagagttggttcccaccttgctccctgggctgttgggacaggctccggccacccatgaccctgaactggaataattaggtaaatacttatctttcttgtttttattaatctttcttaaatgtttgtgtagctcacatttgtttcagtgtttaatattggaagtgttttggtctttctttagaagtttggtgatgttttttgtgaccagaaatatgctataggaacttaactcttgtttacattagactgtggtaaaattggttttgttatacattgttttgcttaaaatagtaatatccaagaatctattgatgagttaagtgaggacttactgtgttgtttcttccaatacccctctttcctcctctgttacaattttttccatgattaacaatgtaactttttttttctttctttttttttttttttttttggccatggagtctggagtcttgctctgttacccagggtggagtgcagtggtgcagttttggctcactgcaacctcagcctcccgagtagctgggactacaggcacctgccaccacgcccggctaattttttgtatttttagtagagacggggtttcaccatgttagccaggatggtcttcatctcctgacctcgtgatccgcccgcctcggcctctgaaagtgctggaattagaggcatgagccaccgctcttggccatttattggctatttatatgtctatttaaatctgttgcttcttttaaaattgggttatttgtccttttattgtattttaatagttctttattccggatacaggttatcagataaattatttacaaagattttctcccattctgtgggttgtcttttcacttttcatgatcatgccctataaagcacaattttttttgttgtttgtttccttttttttttttttttttgagacaaggtcttgctgtgtctcccaggctggaatgcagtggtgccatcatggctcactgcagccttgaa

SEQ ID NO: 3256 - DNA, 1029 bp, Homo sapiens
caccttctgggcacacctgtctggaagaggcaggaggactcaggtcacagtcccctgaaactgttgcctctgtgctagatgcaaaaagctcatccacccaccaagccccctccctacatcccccagactcagagatgaagacattaccccacgcttcctgactgctgacggggaagacaacactacactcaagctaacgatgcaatatgagctggaagtgggggcaagaagcagtgagaccccctgagagttagggaggagggcttctctgaggagaaagcttctacagagccaagcctaaggtgctgggcagaaaagtgagggagttcctggaggaggaagaggatgtgcaaaggcctagagatgcgaaagggtaacaggaggcaggagccacaagcagttagctctgttgggcacacgctgtgtttagggaggggagagggctttggcaaggtcactctgggtaaggtggaggctggttggagcgggtgggcagcatcagagaaagcagtggatgaggctcagataggccaaccgcagagaaacctgtgttcagcctcaagaatcacccgcagggagaaaatgcctgtgttcagcggctgctgaggaagaagaagagactcggggaggctgtccaggtggggcaggccgggcccagttggcttcaagggaatcagagtggggcctggtgagtccggctgagggctcagaggagtggcggcccagaggaggtttcggggaggggaggagacagtggtggattgctcagtggaagggactggggctcaacatgagataggtcttgagaaggggaggaagggcagtgaagggttgtgggccccagggctttggaactggggcagagagaggagacccaggaaggaagtgggagtttgacgggttgattatggcacagtgaaggggccccttaactcgaagggaagatgggggttcactatgaagagaggggcatagggagagggaagtgatggtaggaaggcttggtgagaacaggggctccaggagatg

SEQ ID NO: 3257 - DNA, 1030 bp, Homo sapiens
tacctggaggaggctgggccggtgggcaggggttgagctgtggccaccagaccatttggggaattcagatctattgcccgtcttgttgcccacagagatctccagtgtgacagcccaggcggcagagccgagggtgagtggtgggggttctcctggagccctttcggggtaagaaggagggaggccgtgcccttgttagaacttcctggccttctccttaagtttgatcaccctgctgatgtgcttccctctcaaaggcaggggtcctgttcttcctgagtgcatagccagattcccaaaggggatgagctgtcaataagtgaaactgggccgggcatggtggctcacgcctgtaatcccagtattttgggaggctgaggcaagtggatcatctgaggtcaggagctccagaccagcctggccaacttggtgaaaccccgtctctactaaaatacaaaaattagccaggtgtggtggcgcatgcctgtaatcccaggtgcttgggaggctgacacctgagaatcgcttgcactaggaggcggaggttgcagtgagctgagatcacgctgcttcactctagcctgggcgacagagtgagactctcttccaaaaaaaaaaaaaaaagtgaaactgggcccatgaggggctcactatacacatggtggtttgagaaaggctgggagtcagcaaggggatggggcttggggtggggaggggagcttggtaaggagatgagacctcaggagggaggggtccaggagctcatcaaggatatgggaagctgatgaggatgtaggtgttcagtaagggacctcctgctcttcctgcctggcaggtcctggtcccggcttctcgcaccctcatgtcagccccggccccgcccggcggcctgcggaggacaaggtcaggatgcgtgtgaagccccagggcctggtggtgacttccagtgccgtgtgcagctctcctgactacctccgggaacccaagtactaccccggcggcccccccaccccccggcccctgcttccca

SEQ ID NO: 3258 - DNA, 1049 bp, Homo sapiens
aggtagtcagtcgatcagtgcaccggggaggatattggatttctgaaccgcaagtcagcactattcgggcctgttatctctcccaggctcgggggtcaggaggcgggaggcttggcgcactggccgcccccgccgagccagcttgggcgcgtccactccccctgcccacacatcccagctctggcctgtctactgcccacacaggcctcccctcggcccttctccccggcccaccctgcctctgcttcgctgcctctttctcaggctcctgcagaaacccctggtccctgctctctcctgcctttcccatctctgcctggctcgcttcccccgtgcctctctcccctctggggctcttccttggtccttactggcctcagactcactctgggcctgagctaccccctcccctcagcctctgacaaggtctcacccgcctctctctaccttcctctccatctcccttcttccatgagcccctcatcaccagtccgtctctgcttttgtgtttgtgcgtgcccgtcttccagtttctgtctttctctgtctctctgtctctgtttctctccccatgtctctgtgtctccctgtgtatctttctccctcttcctctctgtcttttcctctctccctctggcacgctctctctctctgtcttttcctctctctctcttgtgtggtctcggctggtgtctgcaaccagaacaaatctcccccagccaacaccccctgaacaaggaggccagagcagctaatgggaaacatgtgattctgccttgcgcctggagcaccgtgaagggagccttagtcccagcccagcccctgcacccctccttgctgtgttccccccaccacactgtcctctgcctcccagcagctcccccagcctgtgtgggcactgttggaagttcatttacactgggtgggggcctgacgtttatctgctggggagtatcaggttgtggaggggctaagggcagctttgctcctgaagttcccccccaacactcagggccaggcagaccccatgcagactcctcccacccacc

SEQ ID NO: 3259 - DNA, 1035 bp, Homo sapiens
caagtctagggagaggagccacttgctcagggtcacagatacctttggcaagaccaggctgggacctgggctgtttgcactccacctcactgtagttagagaattggaacagctgcagggggcctcctgggagtggagggggccggagcctggggagagaagcaggcaggcacccttgtggccagagcccccccaggggagggggaggcgccgctgctgccgggagagagagggagggaggcgagagaggaggggaaacagtgagtcaggcttccaagagctgaggatgagagagccagagctgggagggagagggcagggagggctgctcagaagggaggagagggagggggcccaaccaggggcaaggagagctcgagagggagggagccagcccctggccctggccctggccctggccctgtggtagggctgtgtggagggtgtagccaatatggactttacccatggtaggtcaggaaggagcctgattctgcccctgcagcatctctttcttctttcctcatttatgatcctaccccagggtctcaggagggatgactgtgtcctcccatcccttcctcttgggcctcagtttccccatccattgtgggatttggactgtgagctattggagagggagtgggggacagggacagagtagccagggagaatgttaagggatgctgtctgaagctgctggctttgtgacgggggcgctgtcaccagtgcaaggtagggtgctggtctctgcgttcatgtcatgacggtggatgctggtgttggggggcttgggcaggcggtgagcactgggatgcactgtatatatttgtgtgtgaggtgctagattcaggatggccagtgcctagacagggccagggtcactacatggccaaaaccagcctccactgttgtgggggtgacactggtgtgatccccccacgtccctatgggtagatggaggtgggaatggccccagtgcagttggcaagaacaacccctcatgcctggaactgggaccagagcaggaggggt

SEQ ID NO: 3260 - DNA, 1050 bp, Homo sapiens
cagtactttgagaggccaaagtaggaggatcacttgaggccaggagtttgagaccagcctgggcaacataacaagacgtgccatctctaaataaattaaaaaatgtgaagggatgtgctaaaaattactttctgtctcccagtgatcatcttgtgtttccctagggctgtgtgctccccactttggagaccactgcctagggggaatccctagtcccattataacaccccaccaccctgtggcttattccaggggtaaagaaaataaatgcactctgaggctggtatctacctctagttggatccctgctaatcctcattgttctgacgaaacggccagacccagtggctcacgcctgtaatctcagcactttggaaggctgaggcgggtggatcacctgatgtcaggagttagaaaccagcctggctgaccgggcgtggtggctcctgtaatcccagcactttgggaggctgaggtgggaggatcacctgaggtcaggagttcaagaccagcctgacgaacatagagaaaccccatgtctactaaaaatacaaaatcagcccggcatggtggctcatgcctgtaatcccagctactcgggaggatgaggcaggagaatcgcttgaacctgggaggcggaggttgcggtgagccgagatcgtgccattgcactccagcctgggctcaaaactccatctcaaaaaaaaaaaaaaaaaaaaaaaagaaaccagcctggccaacatggtgaaaccccgtctctactaaaatacaaaaattaactgggtatggtacacacctgtagtcccagctacttggaagtctgagaatcacttgaacctgggaggcggaggttgcagtgagccgagatggtgccactgcactgcagcctgggccacagagagagacttcatctcaacaaacaagagaaaacagtcacaggtgtggctttcaagcccagcgttcgctgctgtgaaatttttctcactgcagcatttggctactcagcccttttttttttttctttttttttttttttttgagacggagtct

SEQ ID NO: 3261 - DNA, 1054 bp, Homo sapiens
cagttctattgtagtaacttgtaaaaattctcgtttttctttctgagcagtgtaatgaccactttatcatctgaggcagtgtaacatagtgaaacttggatttgaattctggctttcccactttttagttagaatcttgagcaggctatgtcagctctgagaacctccatttcctcatttacaaaaagaaaacgttatttcccctgggtttgttgtgaagattgaaaaaaacatagtctgtaaagcgtctaaatctagtattgccatttaaagggattatataatggactttaatgttgactctttggcagtgtgtgatcatgtaactgaatcaaatagctacccatttggcctcaagatgagactttccaaaagcctatggtcattttttggccaacttgattggctgtttcttacagaaaaagaaactagttcaatgatgtttttgacaactcctgaaagtaatctacatcttgaataaaagaaccaattttgagataaagttagtgagacgtaacatcccaataagaattctctggccgggcgcggtggctcacgcctgtaatcccagctctttgggaggccgaggcaggcagatcacaaggtcaggagatcgagatcatcctggctaattcggtgaaactccatctctgctaaaaatacaaaaaattagccaggcaaggtggtgggcgcctgtagtcccagctactcaggaggctgaggcaggagaatggtgtgaacccgggaggcagagcttgcagtgagccgagattgcacaactgcattccagcctgggcaacagagcgagactctgtctcaaaaaaaagaattctctgctttaactctgtttctaaatgagatctagcagctgtgtagagaaggctccacctacttggtttctaacagtggatgaatgtatggttgttttctatacatgcagagttgttaacatctgcggaactatgcaaatgtgtaaaactcagccagcatgttcatttgcaagtgtgttccttcttggttattttctcaaagaacaatgactaaaaacaagtaa

SEQ ID NO: 3262 - DNA, 1072 bp, Homo sapiens
taaaaatacaaaaattagccgggcgtggttctgcgcacctataatcccagctactcaggaggctgaggcaggagaattgcttgaacctgggaggcagaggttgcagtgagccgagatcatgccactgcactccagcctgggcgacagagcaagactctgtctcaaaatgaataaataaaaataaagcaatctcaaaatactagcaataaaggattattaagtaaaccatgacacatttataacatactacaaatgatacagaaaagcgtgtattgccacaaagaagtgtttgccataaattgttgagaaaagcatattacaatgtggtatgcaggatttgacccaatttttacaaagcagcatatatataagtgtctttataaacatggataaaatagactgaaatacagtatatactttttatccttttatttttcaattgtgcagaaggcctcttggtgttttgtattttgtttttgaaatacattcattacagaaaatttggataataaagactgttttaggctgggcatggtgactcacgcccgtaatcccagcactttgggaggccaatgctggcgggtcacctgaagtcagaagtttgaaaccagcctggccaacgtgatgaaactccatctctactaatgatacaaaaatgagctgggtgcctgtaatcccagctacccagaagctgagacagaaaaattgattgaacctaggagacagaggttgcagtgagccaagattgcgccactgcactccagcagattgcgcactgctctgttgctctgggcaacagagcaagactgactcaaaaaaaaaaatgcggttctccttcaaaaaccacaagttatctatagagaaataacttggtagttatgtaatttttaaattttttccttctcagaaaaataaaggataattcattcagcagttattgttggagtaccaattctgaactagactgtgcttggttccaggtataaaaagaatgaggtagacacagtccctgccatcaagcagggaggtagatactatggatacctaatactacttgttcatataaaatgca

SEQ ID NO: 3263 - DNA, 1147 bp, Homo sapiens
gttccagaccagcctggccaacatggtgaaaccccatctctactaaaaatgcaaaatgctggcacatatagtcccagctactcaggaggctgagccaggagaatcgcttgagcccgggagacggaggttgcagtgagctgagatcacgccattgcatgccagcctggacaacaggagcgaaactctgtctcaaagaaaaaaaatttaaaaagatgtccaacatggccaagctcttactccatttccccaggagctccatttgatagtcaaaaaatctgtcctacaagaagctattcttctaccttttacagttcatcacaagacctacaagcaattccaaagtcctgtctccattagtcatttctcaaaccttttcccaataccatctcattttgtcagtgacctgaacagcagcaccagcctgtctacaccctaaagctggggtttcctcttgaaggtctgttctggcagcagcaggtcattcttccttatcctgtcccccactctgacctattcattttggtgaattctcagagcaacatgtgtatctattcagcaggagctctggagttagacaaacctgggtttggattctaaaagtgtggtattggtttgctatatgaccttggtttccatctctctgaagcaaggataatgagatttgttttgaaattcaatgttctaatatatttaaagtacttggcacatggcaggtgttgaatgagtggtagttattactttcttaattgaattttgcatgttttttcttttcagagagcccgagcccagcacattgtgccctgtactatatctcagctgctttctgccactttggttgatgaagtgttcagaattgggaatgttgagatttcacaggtatgtcaaataatttgtgaaagaatcacttactcataataaagaatgaaataagacttcattaaaaaatacaaaaatgtagccttggtttcagggggaaccagaccttttttttttttctttgtttcttctaacctaggtcactattgtggggatcatcagacatgcagagaaggctccaaccaacattgtttacaaaatagatgacatgacagctgcacccatggacgttcgccagtgggttgacacagatgtaagtggctgtttttga

SEQ ID NO: 3264 - DNA, 1048 bp, Homo sapiens
aagggggagaccctcttcattagagtcctcatgaaattagccaaatgatgagtccttccctagctgggcatggtgggttctctttttttttttttttttttttttgttgttgttgttgagatggagtctcgctctgtcacccaggctggagtacagtggcatgatctcggctcactgcaacctccgcctcccaggttcaagcgattctcctacctcagcctcctgattagctgagattacaggcgcccaccaccacgcctggctaatttttgtatttttagtagagatggggtttcaccatgttgaccaggctgttctcaaactcctgacctcaggtgatctgctcaccttggcctcccaaagtgctgggattacaggcatgagccaccatgcctggccaggcactgtgggttctacaggatgggtctgtaatgtcacggtgagggctctctctagtagtagatctggagtgaggtgtgtcttgggttgaggaggtggcttgactttcgaatgtaaaactgactgtgccttagcatcaccctgtccagtgcccctggggcagctggtagtgtccagaagaatggacacctgctccagatttagatgcccatctgggcttttgtttgatttgcggcgttcctgtcttctgtaaagctagtgagttgtcccaagagactgatgccacagcttgttcgcagtttacacaaactcagctttaaaattccaaatagaatctgacttgcaaactctagctgcagcatgtggagcttctagatgtttactaccttgaatggttgtcagtgtcactgaaccacaggggagaggagtatggggtagagcaatggtctgggccaaggaatggtgagcttagggtcttcctctgactccttactcctcaaggaggcagttagggtccctcttaagcaggcttctatttcttaccactaaattggtttcctttttcatccagaagttagaactccccagatattcacactataggatctgaattccgagattctaaaatatcttaaaccacaagagagaa

SEQ ID NO: 3265 - DNA, 1471 bp, Homo sapiens
acttacagtctggtgtaggacataagaacatttgaagtgtaagggagcttgtgcttattcccatgagctgttggagaaatgaaatattgagataggagtagaaacaagggatgggatagttacagaactcatgaagactgggatgtgaatcaggtcttaagaggaattggacagcaaggggtgtgagagtgatcacccacacataagagattccataaggcatttcattatcctgccactgtatatggtctttttatagtatgtcatgatggtaatatcacttctactccctggactgaagtaatatgttttgtcttttaacaggagtgtgaccaggtacatgtggaagatgtggcttctgatgacaatggccaagacttgaggtgataaacataatgattcttgaacaccagtacacctgttatgtgcaagatctgtctgtctaggtttggaggaaaacaaagataaatagaatatatctctgaaagagctcacaacctgttagaggacatagaaacaaacatagttaaccgtgatgtatagtgtgagaaggtgacaatagaaaatgccgtggagcacgagaagaaagaattctgttgggatagggagtgggtagtgccaacactggagaggtttctcagtggagtagcattaaagcagaacattaaagaatgggtagcaagccaggcacagtggctcacacctgtaattgcagcatcttagaagcgcgaggcaggaggatcacttgagtcttggagttcaagaccagcctggacaacacagggagatcccatctctgtaaggtagtcttccacattttattatagtgaaagttaaaccaaggagatctcagtggcaaaatgcttgctcaggctcctcattcctctttgttctggcccactagccttagctaagaaagatccaaaaatttatctagcttaaagacttataagaaaaaaacctgtcacatcttttcatattagtttgtttgaatgtttatccctttttataagtaaaatgttcttcccagtaactaccccaaaattcagtgttctatccaccagttctcaaatacggagtagaactggacataccaccttaataaggacctagtcaggtagagctgagaatattggaaggtttcactttcaggtacagcatccagttgtacatgttgtggtgtcacatggtcatggagggcacaattcttatgacactttactgttcttttcagggaaaagtctggtctgaagagtttatattctgctctgaaccccagttgttttttttcctcttatacgtgtggctaaccagtaattacttatcatgtcttagcagctatattttcttaagcacagaatctcactcttagcatattgggatctattttaacttttgattgaaccaagttgttcagtcatttttagatctttacttatgaaatattaatccttcctagtttgtataattg

SEQ ID NO: 3266 - DNA, 1068 bp, Homo sapiens
ggattttctttttaaaagtaggcttttgtgtagccaaaattatcaccaaaaccatgcacttaagagtgtttcactcataaagaatatccttggactctcatgcagatgcaaagctttgtttatggttgcctagtttattgcaaattaaaaggcagatactgctaaggaagtcaagaagtgacagaccacagaggaaaaacagtgaaattagaacctaaaaatcagaactataattaagttatatttagtactaaacaattgtctttacacatcacagtagcctctgcggtatctctgtaatatatgtagcacagcacagtttttatttttgaaacagtaactgagaaaatctaaaggtatgtgtgctatttcctccttgctcagaaggcaggaagggatataaatatattttagaaagattgttactcaggagcattatgataaaaagaaaataaaaatgaacagctatgatgtttgtcagtatgagatagatttatatgttctgacttggaaagatgaatcttagaggtattatgtggaaaagcaaattatgtacactatgtataacacagtccttggctggcagtggctcatgcctgtaatcccaacactttaaaaagccaaggtggaggattgcttgaggccaggagttcaagactggcctgggcgacatagcaagaccccacctctacaaaaaattagtcaagtatggtggcacacacccatagtctcagctactcctgtagctgaggcatgaggattatttgagcctaggtgacagaggaagaccctgtctcttaacaacaacaacaacaacaaaaaatcacaatcccatttttgttaaaaagaagattagtgaatacatagaagaaatctggactgagtgtagtggctcatgcctataatcccagcactaaaggaggctggggcaaaagtatcgcttgaggcctggagttcaagaccagcctgggcaacaaagcaaaaccctatcttatttaaaaaaaaaaaaaagaagaagaagaaatcatctgggtgactcttctgcaaactgttaatagtggttaagtc

SEQ ID NO: 3267 - DNA, 1023 bp, Homo sapiens
tttgatattctaaattggggtagggaataaagctgtgttagagttggacaactttgcatctaattgtaaccttatgtgtgttttctctccttttcacattctggagtgtggctctaaaataaagttgtgttgtattgcaacacgacagagtaatagaagtagagtggtggtatactggcataacaagtttttggttttcttgttatttgtctattttcagtacttgtgtgataagattatatacttactttagctttgtatgtgagttaggtacagtggttggtagaaaagctaaaaacagctgtgactttaattaaatatacaagcaatcacatcttttgggagaagtgctggtttcacttttgttagatagaaatggagtatttcatttttataatgtatgcagctttctaatttttgtctctttgtctcctgtcagtaggacatggtaaggtggacttagaatcccatttttccttttttgtttgaaaatcaggacagaaagagcagggtctgagaacgtaaagattttgcttaaataattgggcagtacagttagtagaagttcattatttcagaattaaattaggtcctatctttggatgattattttctttagttctaaaagtcaaggtttcactctacttatttatttttattattgagatgcagaagaattgagttttccttgaaattgatgacatatagacagatagttggttgtgaatgcatttagttgatattccggtttgtcctatttaaagtgattctgtgtgtctgtgttaacagttatgtaaatgttccacattaaagcaggttagatgttatcataacttgctgacttgctaggccagtccctatcatttttagtgtaactctaatccttaaaaaaatattttattatctgcacgtggctgtcattgtaaaatgttcaatgcattaggcaccatagtaaccagcagaagtggttccacatgttggcttttgcaaggtattataaaagtcattgtgtacacctctctt

SEQ ID NO: 3268 - DNA, 1034 bp, Homo sapiens
ttatgctcaattccacataaagaggacaaaaaacttcagacaagggagttcagagttttggattccaccactgtttctgctgcttacaggttcatgaggcagtgccttctcttttgtttaatttcctcaactttaaaataaggattacatttaatgatctgtgatactctatcctttgtagcatcttttgttatatattttcttgcatttccaagagagaatcgtgtctgtccaatagagtgaaaccaaatgtgaagtctcttccaatagcaaattctttaactattggaagttcgttgcttttgcttagagctgtaaaatgaaccaaccctgagtttgtgtacagtgtctaaataacttcttaggaaagagatgacacagccagaaaatcaaatgaatctttctgcctatactgttgtcacaaacagggtaagattttttaggtaaggcaagatcactgtgatttgaaatgcttttccctcaaaactgaaattttttttctaatggaaaaagttgggggcaagaatgaagaatttgtgtctaattttagcttaatgtcttgaacattttttatataagcatttaaaaatatgtatttaaacattttactatacttttaaatgtaagctttgtatctgcttttgattcttatcaaattatatgtaagctattattaaactaacataaaaacatgtattcaccttttaaataagcttgtattgaaatagtttacagttacagtgtagttaaacttattgttcacatgttgtttgtttctcatttttcgtttctgtagacaacaaacttatactatttttaaaagtagagtttgcttctttcccccctgtatgtaattcttgggtgagcacctaagaaaaattattcagattaggctgtggccaatcttatgacctcttttatactttatccaggaacagtctgaagacacatatgattttacagctgtgcctgactgaatatgtctttatcttctcataacccagataacacttggttttattgtttagattttt

SEQ ID NO: 3269 - DNA, 1025 bp, Homo sapiens
caaagagtgactagagaaagaaactgttttgtgcagaagtagaagttgaaaagttttaggagtcttttgttcttctaaaatgactttggcctgtatattctgcattgaagccattaaatgaaatgagcatcctgtgtagtcattggagcagttgtgttccatgctgctgatcttcaagcctgaccctccacctagctgccaaaccaaaacaaacaaacaaacaaacaaacaaacccagagacagcttaatgtgtgtttgtttttaaagctcaggaaaaaaaattaccgttgattttctacaaaaatttctactttagttggtagccctaagggctcaatttaaaatatgtttctgcatattagttttaggcttaccaagttttcttattttggtttggtttgattatttttggttcttttttgtcattttatttgctaatgtactttgtcttacttgttttgtttgtttgttttttggtccttgaatcctgtgtttacggagatgtagttttttgtttgtttgtttgtttttttgagacaaaaaacaaaacaaaaccttgctctgttggccaggctgtagtgcagtggcacgatctcggctcactgcagccctgacctcctgggctgaagtcatcctcccacagcctccagaatagctgggactacaggttcatgccaccatacctggctaattttgaaatttttttggagaggcagagtttcaccatgttgcccaggctgatctcaaactcctggactcaagcaatctgcctgcctcgggctctcaaagtgctgagattaaaggtgtgagccaccacccacaggcggctgatgtagttttgaaaatttaagaaacaaagtatacctccaacaagtccttgtcacttgtaccttgtagcattatggtttctgtgctgtgcctaagctgtttcatgacttcatttattttgttttgattataaataaaagcctcatggaacttctttttaggtagcggtttgtccaaaagatatttctgttctgca

SEQ ID NO: 3270 - DNA, 1027 bp, Homo sapiens
tggatgtgcacagctgaggcaaaaacgccaatattttgggacgttcagctctgttttcggcatggacgcttcttacaggacacttgtgatgatagaggacagaatttgtggagagatcattagccccagatttatgaatttattgtgttgtttccgaaaagtggtctgctgaagagttcactatagtaatttcaaagtaatctttaaacttagtatgcacatatgcattttttcatttttactgtattaagttttctatttgtcttcctcttccttcattagccagactttacttagaattacattacttagaagtacattacttagaatattcttctaacttttgtatttttttttccttaccatttccacctttgtagtaaaactatcattttctcattttgagatttagggcacctttcttaaatttccctagaggtttaaagtcatttataacatgaaggaattgcatttaataatggttagtgctccctttcccaaattttgtgatctagagtataggcttgggtaatctttattttttcccgatgtttatagtgtatatctagcacttgattgcagcggtttttgtgtcatcagtttctgtaatctataaattgtgctttaaaatgtagtacttcagtatgaacttaaatacagctttgagcacctgcttatcttttggctaattagctatagaaaaatcttcattatatgatacatatacatataagagtgtatagtccttggcttattccaaaattgggctctcttcagctgtttttagcaaaggactttggagcttggccatgttagtcctagaagccacggagaaggacccttctgattggctttcaggacttatctaactgctaagtgaagcctctttgaaagtttcttatgtgtacctcctccccactacctagctctagcttctgtccaacctggcctattttccatccttcaaaacaaaccccaatgtgtatggcttactccagctgcttccttaccttcaggtttgtgggct

SEQ ID NO: 3271 - DNA, 1030 bp, Homo sapiens
gcttaggcaggaaaatcgcttgaaccgcggaggtggaggttgcagtgagccgagatctcgccattgcactccagcctgggcaataagagcgagactccatctcaaaaaaaaaaaaaatagagttgttcctcctattggccctacccctgctctatggggttggaatcagactttcgtagagtgggccagccattgctcacaggtttccacaggtgattctaatattcactctgattgagaaccactgggccttgtaaattataaagtgtccattgggctatttttttcttttttgagttattacggtttctcgacatttgcaaaaataaagggagggggagttaaactcttttaatgaatgaaggagaaatgcaaaattttctcatgtaaaaatgtctctgggtgtaaaataaattattatttttatgatgaaaataagcattatgttatttgagtaccataagacaatataattgttattctgttgatttgatcattcatatttctttagcaatttctagaactgtgtgccagcctgtgttctagaacatggggtactattctagatgctgattataatatatataattactgagcaactcttaaatatacatgtaatttattttcaccttttttatggttttgattttgatacttccaggttcttcagatagatcctgaagttacagatgaagaaataaaaaagaggtttcggcaggtacagtactatttccctgtttgaactttttgaaaatgtatgaagcacatgattcttttatcacttgctattattgacttgatatgtttgggccaaaatttaacttttttttaaggctgtgtaactgttttgtaaaaaaaagctcataataatatataaaatcttaaataatttaatgaccatagcttacctatgaatagaatgaattttatatccaaatagaatctctgcaactccttaattaagagggataagtataaagtagaataatagagcttgcatggagttgtaactaccaaaccccctgtcttc

SEQ ID NO: 3272 - DNA, 1020 bp, Homo sapiens
ccgcctcctgggttcaagtgattctcttgcctcagtctcccaagtagctggacaggtgtgcgccaccatgcctgactaatttttgtatttttagtagagacggggtttcaccacattggctaggttggtctcaaactcctgacctcaggtgatccgcctgcctcggtctcccaaagtgctggtattacacatgtgaggcattgcgcccggcctgagaactacaactttagacttactgttgtgaaaatctcaaactagcctctattgcaaacatgtgtttgcatcatataggcatgcatagacatgctgacggggtttatgttacagccaaaaagctaatgccaacaccaaccgctggcacttctatatttacttccaggagcccttgcctttaccacccataccccgctacccatgtacctcccactcccccagattgaggagggagctagctaataggcaactgaagcactggattggaactgcaactcaaggttgtgggagcaagagttctgaagtgaagaccttgatcagcacaaacctgatcatgtgaccttgtgaaagttacttcacaattccctgcttcggttactatggttataaaattaaactaatggaatggatctatttgctaaaaatatgagatttaatgagcaaataattttaaagtgctccattaattctgcgattgttaaataacttcactgcataaaattctatagaactctttcaaatatataaaaaaaagcaccccaatgattctttttttttttggaaacagggtctcactctgttgcctaggctggagtacagtgccatgatcacagctcacttcaacctcagcctcccaggtagctgggactgcaggcctgtaccgccattattattattattattattattttgtattttctgcagaaatggggtttggtcatgttacccaggctggtctcaagctcctgggatcaagtgatccgtccgcctttgcctcccaaagtgctgggattacagcggggagcc

SEQ ID NO: 3273 - DNA, 1096 bp, Homo sapiens
tctttctttctttctttttttcccctcttttccttttcttcttttaaatatacgtttggaaatttgccgggcgtggtggcgggcgcctgtaatcccagctactcgggaggctgaggcaggagaatcgcttgaatccgggagacggaggttgcagtgagccgagaacgcgccactacactccagcctggacgacgagagtgatactccgtctcagtcaatcaatcaatcaatcaatcgtttgattttcgttttatgcttttacttccaaatttatatttattgcaaaaaatgtggaatataacaaagtgtaaaggtgaaactgaaataacccgaaattatatttccccctctgtggtttttttttttccgtctctgtgtttttcaatgtttttcaggccttctgtcttgagctcgtattactgctgttcactgatgtattgtaaaagcgtaaaaccggacgtgacccaaatgtctatcaaaggagactgatgagagaaataaacggatttgttcacacaacggcttctacagcaaagaaacagaaggtagctccaagtgctctgaaatggaaaggtatgcaggatttcctgttaggttaaaacagaacgaagcaaaaaccgaggttgcgcaatgatacatatagaacagtctcatagttgtatacatagttacacagaggaaacaaagatctggaaagatgtgtagtttgcacctgttaccattggttagctctggggtggacggagaagggagaagttttaagattctttatataatacacttatttaatatctatctatgtgctaagttgtattacatttgttgttttttaaagagatccttttaaacagagaagggagaactccctcaaatcccaattgcactacaaagagaaaccaacatgttggttatttttatagcatataagtttatataccgtattaataatgtatagctatatagcctgctttttccacttagcacatttcataatttttgtaatattaaatattccttaaatataattgttaatggttgcagactattcatgtatgctataatttattaatccttattgagaacatttagggttttc

SEQ ID NO: 3274 - DNA, 1124 bp, Homo sapiens
ccactatgtctggctaatttttgtatttttagtagagacagggtttcaccacgttgcccagggcagtcttgaactcctgaccccaagtgatctgcctgccttggcctaccaaagtgctaggattacaggcatgaaccactgtgccgggccagaaagtcttagcatcttagtaacatttacatttggcctccctcgtgtgcccttagctattcattaccagagggcaaagatggttagaacatgatttacccaccctaaaatgcattgaaggcatcagagggcaccgtgggccacaaggcctggtagccacaaatgttcagtggtggctggagctcatgatgcattctttggtgggacgtctctcagcattagggagagttgagagtggggtagaaacaaggggttccatgtagcacacactgtatttagaatgactggtccaggatgaaacctaatttgagtggacatccatggatgagaaatgcggatatgggactgagaccagctcctaggaaaatgtctgggtgggggaaatctgggaattagtaacacaatggcttacacttcctttgcaggacaatctctatgggaagcagaaggcaaggaccccggtcattttaggtagaaacaacagcatgctaatgcaaaaaattatgcagtgtgctactgaacttcagaggtgatcaataaaagaagaataaaaagactaataaaagtatatttgtgtttgtatttttttgtagagaccgaactggtctcttcccgagctcaagcaatccatctcccaaagtgagccaccatgcccagcccttaaagagatctttggagattttttatgatgtaggatgaatgctttgcctcaagcagtaagtcccaacacatgacaaggttggacagtttccccatttacttgggaaacacggaagtgagcagtataaagttcacacggagggtctgctttggctttgagctatcttccttaatcctttctgagctgccttctcccgtgtcaaaatattgatcctaaagtgatccaggccttgtatatgcagatgctgcaactcatgaaaatagatgaaacccattattagagcaagtactaattcttaggccaactggcctgt

SEQ ID NO: 3275 - DNA, 2183 bp, Homo sapiens
atgctggtgtcaggatggcctccagttgaatctgtgacatttaccagctaggtgattttgggactggtgactacgcgcgagacctctggaggtcgccctggtagacacggttttcagaaggacgggttttaggcattcagacccttgcgtgcatcccagcttgttgctttcagcctcgctaagtgactaagcgaccttcaggaagtaacttaatcggtctaaacctcttacctgtaataggcggataaaacggtcccatcaagactgagaaaaagcacaccagctattggcacagcgtgggcagtggggcctacaggatgactgacttagtctacagagatcccggcgtacttaagcaggtagtaatgatggacaggtgaggctttaggcggccgccctgggatctgaattgccccttggcccttatcgaagctgcagctgcttccgcatagctgctgtggtcaaaaaggagcccagagtgacagttttccttgacggtcgccgttctgtttgttgtaactgatctgcaacattttgggaaaatacagttccattgtacctgccacctttcagctgtagccagagacctttatcaaaatgggcttgtttccacagaacagcagaacggttgggggtttgcatgtacagttaaccagcataagactcgtactgggaaaatccagctgggatgtgacacagcttaactgatagcttaaggcatcagtattgggaccaaaggctggtcagatttgtatcattctgaggaccaaatgatgggaacaataaaattgttcatgacagttgttctcattttgctgtccagatgaagactcttaagatgacagaaggtgatttttctggtgatcgaggacttccggggtaatgacagtgatgaaatgcaggggacctggtaggtttcttttggagactaactgggggctgcctggtgggacagaacagcatgtttccaagggctgtggctggtcatagccatgggatctccaactgcatgcaagagcaacctggaaagactttgacagcgcaggtcagtacaatacctgcaagctgccactcagctttcctataatgtttcaggaccagggctggaagccttccatgtgtcaacttcaatgtagatgggtttttttttttttttttttttgagacggagtcttgctctgtcacccaggctgctggagtgcagtggcatgatctcggctcatggcaacctctgcctcctgggttcaagcgactctcctacctcatcctcccgagtagctgggattacaggtgcccaccatcacacccagctaattttcttgtatttttagtagagatggttttcaccatgttggctagatgggtctcgaacttctgacctcgggtgatccgcccgactcggcctccccttccaaagtgctgggattacaggcatgagccaccgctcctggccagtttagttttcacgctaagctttttgttctgcaggttgcccccaagtttcctggcagtgtgtgatactgaggaggtgagcttgtttctggagctgtgctttaaggtaaagttgatcagcttaatcctcctgatccctttcccatcggatctgaacactggtcttggtggtcgtaaaaggaggaaaagtaatagtgaagctggcctaaatgttgtaatctggtatatggcatgtgggctagtttcagacaggtttcagagatggttggatctctgaaattgtaaaatgaagtataatcttaggctaagggaaggatgcgtgtgaagctctggaggttggtatagtaatagctgacctattactgcatttgggagggatctgtcatagcttccttgcctcttaattaagggtggtgtttttttcttttagattcatgttacatgtaaagctgtcctcatttgtgactatggacctatggagttgggtaagttagtgactacccaaagctttgtcacaacttggtgtgtagctgcaggtagtgctcaactatctgggatcctgtcctaagtagtcaacctaatagaactataaggttacttaggtctgtgtcaaagttacagctttttttttttttttttttgagacagggtctttctgtcacccaggctggagtgcagtggcacaatcttggctaattgcctcccaggttcaagtgattctcctgcctcag

SEQ ID NO: 3276 - DNA, 1050 bp, Homo sapiens
tgtcacctaggctggaatgcagtagtggtgtgatcatggcttattgcagcctcaacttcttgggctcaggcaatcctcctgccttagcctcctgagtagctaggaccacatgctaccatgtccagctaagtgttttttgtgttttgtttttttttttgtggggcggtgggggcgagtctcactctgttgcccaggctggagtacagtggcgtgatctcggctcactgcaagctctgtctcctgtgttcaagtgattgtcctgcctcagtctccccagtagctgggagggattataggcatgtgccactacgcctagccaatttttttgtatttttagtagagatggggtttcaccatgttggtcaggctcctctcgaactcctgacctcaggtgatctacccgccttggcctcccaaagtgctgggattacagacctgagccaccacacccagccccagctaaatttttacagagatagggcttccccatgttccccaggctggtcttgaactcctgtctcaagtggtccttccacttcaggcacccaacatgctgggattacagacatgagctactgcacgcggccctagtttatttttgtacataagattcttcatttcatttacttgcttccttgtttaaattttgtggactatttcacttaatatttggaaatgagatggtttctaaatatcagctgagagtaataaacattcttcattccctcaatttttaacctgtggatattaaatggtcaccattccatatatactgaagaaccctcaaagtctaacagacctcattttacttacttttttttttttttttttttcttggtagagactaggtctcgctatgttgcccaagctggtcttgaactactgggctcaagtgatgctaccacctgggcctcccaaagtgctgggattacagttgtgagccattgcaccaggcctctttttactctcaagattcatcctttattacaggttcttctagagctaattcttgtgcttttcttctccagttaattggccttggtcctcaca

SEQ ID NO: 3277 - DNA, 1069 bp, Homo sapiens
acatgtgcctctaaaacttttttctactcttctaagtggattcctctcagtttgtccatcagcaaaatagaagtaatcgttatacaaaacatataattgaatgaaagcatctcctccttcttaaggctcctctaaatgtcaaggactataacatattagggtacttatgtattgtggcatttgagaactaaattctgttttcacagaagcatagattattcaagatagaaaaacgggaactttgtagagcttttccttgcaatgtagaaagacatttaattttagatttaggaggccaagaaagactaatttggactgggcatgatggctcacacctgtaatcccagcactttgggaggccaaggcgggcgggtcacctgagatcaggagttcgagacccgcctggccaacatggcaaaaccccgtctctactaaacatacaaaaattagctgggcatggtggcacatgcctgtagtcccagctactctggaggctgaggtgggagagaatcacttgaatcctggaggtggaggttcaatgagccgagattgtgtcactgtactccagcctggacaacagaatgagactctgtctgaaaaaaaaaaaaagtaatttgaaaaacaagggcttaaatttgattgattttccagttaattatatcatgaactagatgtttgggggaattgggcttagttaaaactactattttttccccagggttagcctgtactatttgcaagcgcctattatatataaatgatcaaaactaacttataccaacttataagggaaagcataccgatgcccatgtcaccacttcaaagtacttgatggtttaattaatgataatttattcctgagttaacatccttacctatacttgcaaaatgtacttcatttcatttgtggctctagcgttgacttattataataggacttcaaaatacccgatcagaaaatcattgcattataattagagccgataggaacaaaggacaaaaggacatattacctttttttttttttttgtgagacggagtttcgctctttcactcttgttacccaggc

SEQ ID NO: 3278 - DNA, 1057 bp, Homo sapiens
gacttgggctcctaagaggcagaagcgggacagtgaagacccgggctcctaaggattcagaaacggggcagcgaagacttaggttcctgaggggcagaagcagacagagaaaacttgagtttggaagggaacagaagcgggcagtgaagactggggcttctttggggacgggatccgggctttgagactccgagttcctgagtctcggaacagggctgtgagtacccaagctcctaaaagccttggatctaagggaccatggatatgagatcagcctacaaagtaaagggaaagggtttggaaaagatttagtgatccattttttcacagtattccctgaacccagagagataaaggacgtattcaggggaagacaacttctccttcgcactgcctacttggctcttggcaagcttttcttgtgtcagatactcaatctaggaagcccatatgcaaacatcttcattttctgcttcattcttgggaatcagatgtgaagttgaaaacagttggaactcagttatgtacttgataagtgctttaaatcccattccactcaaccctgaatgagcacagatctctgcatctcaaataaaagaatgtcagtgatggaagagtcccaaaagatcatcttttaaaaactcctattttacatttaagaaggctaaggttcaaagaggcttaggattacagtgaggcaatggttagttagatcataattttaatacagtacccttctgtgcgtagcaaatgagatgcttggttaatgttccttaaatgcttctagaatctttgctttatcttcaaactcaggagggaattttttttttttttttttttttgagacaggttctctctctgtcgcccagtctgaagtgcagcggctcagtcttggccccgtgcacctccaacctcctaggctcaagcagtcttcccacctatacctcctgagtagctggaactacgggcgtgtgccaccacgccctgctaatttttaaattttttgtagaaacagggtctcactatattgcccaggctggtctcaaactcctaagct

SEQ ID NO: 3279 - DNA, 1623 bp, Homo sapiens
tctgattggcattgtgagggttcagaaaacaatcctcagccagtgccagccatgctttatattggggggtgtaactccacatgtatgccctttggtctttttatctcctgattagcatgaagtcacatgtgacacaaacagtatcccatgtctcctcaggtcgggctcccgctcccggagcaagagccggagccggagccagagtcggagccggagcaagaaagagaaaagcaggagccccagcaaggaaaagagccgcagccgcagccatagcgctggcaagagccgcagcaagagcaaagaccaagctgaagagaagatccaaaacaatgacaatgtcgggaaacccaagagccggagtcctagcaggcataaaagtaagagcaaaagtcggagcaggagtcaggagaggagagtggaggaggagaagcgagggagtgtgagcaggggcaggagccaggagaagagcctccgccagagtcggagccggagcaggagcaaagggggcagcaggagccggagcaggagccgcagcaagagcaaggacaagaggaagggcaggaagagaagcagagaggagagccgcagtcgcagtcgcagccgcagcaagagtgagaggagcagaaagcgaggcagcaagcgagacagcaaggcgggcagcagcaagaagaagaagaaggaagacactgaccgctcccagtccagatctccatcccgctccgtgtcaaaggagcgggaacatgccaagtctgaatccagccagagggaaggtcgaggagagagtgagaatgctggcaccaatcaggagacccggtccaggtcgagatccaattccaaatcgaaaccaaaccttccatcagaatcacgctccagatcaaagtcagcttcaaaaacccgatctcggtccaagtctagatccaggtctgcttccagatcgccctcccgatctagatctaggtcccactcaaggtcctaactggctatggccacagctggaactacccgagaagtcttttgtacatgtttggtagccgtagcacaagtgattggagtagaacatgtcactgctgtacatttttaactcccctaatggtgtgtctataattgttaaatctaagtgcttcctctcagtaaagcctcctggcaccaggccttcctgctcgactgaaaaaaattttctctttgaaaatccccttttactcatggcccacagtagaatatccaaaacgccttggctttcaggcctggcctttcctacagggagctcagtaacctggacggctctaaggctggaatgaccacataggtaggtatggtgagttcaaccatttttgctcttgaattgatgcccttcgatgtatgccatttagtgaaagtgctaagtcttaagtttcctaccactttggtttcatatttttggacttaacaaagttgtgaatagcacagtcgaggaaaattgatacctgcagtaacccataggaaataaactgtagagttccatattctggtattgtgattatattgttttatattaaaaaagaaaagaaaagaattttttttaattttatttttccccgtcttgcaaagtatagtgacccctgtttccattaaatttgaataaag

SEQ ID NO: 3280 - DNA, 1136 bp, Homo sapiens
gtgtggttaacatttcaaaagttgaagtcttagagtaccttagttttaaaaatacgtcattccagttctaccttttcagaattatgactgataacctgagcagtacatcagctattgaatgacgaagatgagcgcattggcaatgggataagaatggactaaagtttagagcagcccatgtaattcagtgtggcttttgtttgtggtatccagatacctgtctatacttggtaagactcatggtgcctgcctttttttacagggaaaatgacagcaacttcccctcattcttttgactaggtttgtgaggatagaatgtgaccagaggaaaatagttttggtaaagacaacacagtgcttgggatcagacgaattttggatttcagggttttttttgggatttgggaatgtttgtattgtacttaatggttgagcattcctaaacaaaatccaaaatgttctgatgagcaaatttgagcatcttgttgctgctcagaaagtttcggattttcgagcatttcagattttggattttcggattcagaatactcaacctattgcagagaaacattaaagaaaggagtttcttctcttacttgaagggtgttgtgtattgaatagtgaggtcatgctttttattctttcatatgcataggggaggaagattgaaagtgtatcgcagggctctttgtgtttctgtcaatccctgctgtggaggggtttttacatttgtcttagattctttctcctgaattcctgcatcctatgaattattgaaaggtgttctttgtttttaatagagcagaagaggaaggatttctgctgttagaattagagaaatttatctcttgggttgttttgtgaggcttattcacaagtcacaccagagatgtatatacatatatgtacacacgtgcatacatataatagtatgtatacatgcatgtgtgtattttatattcctttttactctgacagaggattcaaaaggagattgctttctgagaaaagagatttgtttcacgttacttgctgcaaagcacaaagggagtgttaagcttggctttaaaaggctctagtgttagttaccaggaagagctttactttgttgaaggcactaattaattcaggaacag

SEQ ID NO: 3281 - DNA, 1024 bp, Homo sapiens
tcataattggtgttgaagacatggtccagtaagaagcaattatgaaaaataataaacaatctagcatggatcaagccttatgaagaatctagaaatttaacaacataaaccagaaacaacgactattagattttacactaaaaattcgaaatcaatgagtaggaattcaaaggctctggaaggaagaagtgagcaacccaaaaggaagatggagcgataagaggaaagagcctttcaggaccctaaatacctgggtggtttttttaaggaactgttcattcttacagttatgctgccaaaccatgatatgcatgaaatgtcattgaaagtcaaggttgaaatgaagtcattttagagtttcaaagacaggtatgacagtcaccaaacagcacacaatatgacctcctggcatcattgaggaatcattacagaggaaaacgacttctgggaagaagaccaatggtaaagatgtatttcaagcaaaaattgcctgtatggcaaaaacgctggagagtctgaaaggaaggagtgagtacaaaagaaaaagcataacttagctacgtatgtaagcttatagtcccctagcagaagggcagtggatctccctactgggaagcatgtttgaacatatctagattgtgattagtaattgaaactcagaggccgggcgcggtggcctgtaatcccagcactttgggaggccgaggcgggcagatgacgaggtcaggagatcgagaccatcctggttaagatggtgaaaccccgtctctactaaaaatgaaaataaaaattaaaaaaaagtagccgggcatggtggcaggcacctgtagtcccagctactcgagaggctgaggcaggagaatggcgtgaacctgggaggtggagcttgcagtgagccgagatcgtgccactgcactccagcctgggcgacagcgagactctgtctcaaaaaaaaaagtaattgaaactcagaaacagattttggatgctttagataggtctttgaagaattgctggagttcag

SEQ ID NO: 3282 - DNA, 1029 bp, Homo sapiens
ggttttagggaaaactgttgaggaatcaggcctggagaaaatactcaacggggaaaactgggaaccagatgttaggtagggcttggaaggcatggatataaaattaaaaggactggggtgacattttagggcactaaaccttgggtgttagagaactcttggcttaaaaaagaaactctactttgcaacagttgtaatatagctaccgtttactccccagggttatactagtaactgacacctgaaacattttgaaagttacctaagtatgtttcacgtatgagaaaactggtagctaccgtattctcaaatgatgatttgggtttaaaaagccatttcaaattaattattagaatcgttttctttctgaggacgtctttagtaaagtactgatttcttttacagtaaaaggctttaaaaactactccttttctacagtaaaacgttcagttcttaaggatatattgaagtggcgggtagacgttattgtatacataccatatatgtgaaagttgaaactccagtttttttcagagcccagctaaattgacagcataactaacttttgtggacaaagtgtggattttgaagccagccaggcctaagtcaaatcctggttccaccacttactacgtatgggcaagttacttctctgaacctggttgttcattcatgtggaaaaggaagattagagataataaatgtaaagcatttggcttaggcagtaagtggcagctataatcagagggatgaggaaacatctttgcttgttggtgtttgataacataaagcgtgtttggtgaggtcttttctaatgttactcaggtgatagtgtgcaggaaatgacaagactgttaatgggaaactgattcatcaaccaaatgtattgataacccatcaacaaaatgtccaccactgtgctaaatgaattgggggaggaggcagaaaacagttctgctcttgaataaattaagcattatgacatgtgcactttgaattaagaaatgtttgctttcgctttaaactcta

SEQ ID NO: 3283 - DNA, 1024 bp, Homo sapiens
ctgggctcaggcaatcctctcaccttggcctcccaaagtgctggtattacaggtgtgagctgccatccccagcatgcatttatttattcattcattcatttattttctgagacagggtctcactctgttgcccagactggagtgcagtagtgcgatcagggctcactgcaacctcaatttcatggcctcaggtgattctcccacctcagcctcctgagaagctgggactacaggcatgccgccttgcccagctaattttctgtactttttttgtagagatggggtctccttttgttgcccaagctggtcttgaactcctgggctcaagtgatccacctgcctcagcctcccaaagtgctgggattataggcatgagccactgctcccagctggaatctgtatttttcaacctttcccagagattctgagagcagggtttataaaggaaccagggttggagtagaagcgccatggcaggttcaggaagggctctgtctctgccttgcatccactctttgttctctttggacttttcaggcgtggaggaaccatggtaacctatggggggatggccaagcagcccgtcgtagcctctgtggtaagctgggtgcagagggaggcatgcctggagccgggccagacacctcagccaggccacatcccctggcacgacagctgtctaagcttaggcaatgccccgttcctggaggggagtctgtacccttaagcggtacctgaagttcttgccctcagagcccagcatgtccttcctgtgtctgcagagcctgctcatttttaaggatctcaaacttcgaggcttttggttgtcccagtggaagaaggatcacagtccaggtgagtgcatggcccagtgccaagagtcacagatgagggcagtgcctaaaaatggcagcagaaatgaccagctattctgagccctggaggggtgattgggtccccagccccacagaaggatcaaagagaatagccttagtccagctacagtcagcaaacagttattgga

SEQ ID NO: 3284 - DNA, 1059 bp, Homo sapiens
aatcccaatgtcattgcagggggaagcgttgttacgggtgtaggcactggagccagaatggctgggttcaagcccctgctctgtgacttactagctgtgggcctgtggaaagttaggcaatacgtgaaaaacaatccaggcctccgtctcttcatctgtaaaatgggggttatataaaccctctgcctctgaagggtggtctaacacgggtccccagcccccaggccgcagaccagtaccagttcgtggcctgttaggaaccaggtcacgcagcaggaggtgagcggtgggtgagcgagcatggccacctgagctccgcctcctgacagatcagtggcagcattcgattctcatgggcatgtgaaccctattgtgaagcacgcagggaagggatctaggtcccatgctccttatgagaatctaatgcctgagaatctgaggcggaacagtttcatcccaaaaccatctcccccactccagtccatggaaaaattgtcttccatgaaaccggtcctggtgccaacaaggttagggaccgctggtctaaaggacactgggcgatatacaaattgctgtacaaatgacggatggacttcagctttctcatctctaaaacaaggttgttacgaggattccctgaggcagtgcatgcaaaatgcttagaactgtgcctggcacatagtagaagcctggtaagtgtcagctagtctgattagatgaagtgcagcagggatacagaagagagagggcttggctcccaggagctactttctacagcaggtggcagtcaaggggcacttaagaccaaactacccagcagcctcagggacagaagtacctgccctaggacagcagctccttccatttggtagttttgaaagtctaccttgtgttgtccccaaatgtgcctgaggtcatccttaatcaacagactcctagaagagccagggagtggggaggtgaacataggttaagtcaagtgaactccaggcttattcacttaaaaattatgttagcctcaatcctgtatgtcagctgacatgggggtgtgggtgtcag

SEQ ID NO: 3285 - DNA, 1052 bp, Homo sapiens
ctcccttgcctacagaaggatccccggctgggagcctttgacctattgcagatctatacagggcttgatttggttctcttcctggctccacaggggattctgtcatccagaatgcatccaacagcggagtggggcaagcagtcatccagatcgccgcagccctgggcctaagaaccatcaatgtggtccgagacaggtgcgtggggaaggaggcttcatcccagaccatgtcttgggtctttcccacctcccatccctgcggtgcccagttgtccaccagagggcgcccttgcataagcataaactggctttaggcatcgctaacagttggcggctgaaacagatgagtcagtcctaagaaatgaagtccagctggcttttggcgataggatgagtgaatctgacatgtaaagagagggcaggaaggaggtggagactgcccttactgaatagctaagactttctgagactcttggcttgtgataacctcatgttttcaaaaccccagttgatatttgggaatgatttgagctgtattattctttctgtgaactgtctaacccaaggcccctttacccttgcttttgtgtggtacttggaagtgcgctaaatacagacgtgaaggagacaggggcaggtttgtcatctgtcttttacagatgaggaaactgaagtttcagggagcagcttgccctggaagacacagcaagtcagtaatagactcggtttcctcacttactctctttccatcatatcgtccagtttctctaggcctcactgtccatgaatgtggctgtggctgtcatggaagcccactcttagtataatcgacaccagcttcagttcctcagttgtactcgcaaaaataattccatttgccttaaccaaagagacccagagccactcctggtctagactgtgtatgtccaacactctgaagaaccacttgaaaagaggggggaagtggagtttgtcctttcagtagaagaaatcaggaagttaagtgacttctccctgggcacagatggcttctaacactattgagctgtcag

SEQ ID NO: 3286 - DNA, 1113 bp, Homo sapiens
gtgccaggattacaggcgtgagccaccatgcctggccatgactggcagttatgccacattttctcactagtgagaaaagttcgatcccagacatttgctcaacagtgagttaagactaaaacttctctgccctctgggagctcacagtctaacaaggagatagcacatatacacatattctgactgcaaaactaggtgataagtaaaaagagctctgaactcagagtctgaaagacctgaatccaagtttaaatttgtatctgcagttccaaaatcctgaaagcgctggaaactgacaggttttttctataactcatttgaaggaaacgatctaacgaggtttttatgtggtctttattcatcccacttagcctgagtattcctacattttgctgcagaaacattcatgtatctgatcacagggtgctacaacagcccccattgggtatgtagataatacatggccccaagagttttggaaaagggattgtgaacctatgtcttgtcctgatcaattgacaaaaaatgtatgaaatggcttcacaaactaaacattagtaaactcatatgagatagtcttaaatagcatgatgtataattctgtacaatgggaatactgagcaagtgattttttttttttctggactaggaagagggtcaaaagatatcttaagggaagtaaactttgaactgggccttgaagggtgagttgaattcctcacttcatagagaagctgtggaagaaaacattctgggctataggaagaacgtatagaaaatgtgcagaaaaaatgtctttaaacagcttgagcacatgaattttgtcagcttacagaaaaactctgatgatctgtgaaaatacaggagagaagcactgtggataatacaaaggggcagctagtccgaaatccatttgctctgggcaggatttttcttttgaatgcagacttaatacacacattgagagtgaaacatcactatctgggctgatgcctccttgcttagtgcccacctgttagcgctccctccatctccccataaggcaacggcagccggtccagcctgtgctcatttcactgccctctgcttggtgtggggtcagccccttacctg

SEQ ID NO: 3287 - DNA, 1018 bp, Homo sapiens
cccagattcaggcggctttacttgttctcgtatggactgaagccagagactgggattctctttgtagtcatgtcttacaaggtttagggtaaccacactgtcacagaaagaatcaggtgtcctttacacatcctggtaactggctgtctgggtcaggttacaccaggtaggggtcatgggactacctagagtctgaacagagcattgtcagaactagtgtggtttgtgatgcttgcgctgtgggccacacctctgcaagcaggagggaaggaatgaggaacagccttctcaggtctgaatcctcaaaaggaggcctccaggtttctcctgttctcacgtccctgttttcattcctgttggcctccaaacattgcagctgttctctcctaagccattttcccctgttgcttagtttctttccctttcttccaaaatgggattccctaaataagtatttgggccttttttatttaaaagattaaactgtagatctaagtaaagtaagactgtgcagaagaatgacaaacatttgagaaatttcagagttctccatagccactgtcccttgtgcagagttctagattccctatcagatagttcccagaaacccaggggccaggcatggtggctcatgcctgtaatcccagcactttgggaggccgaggcgggcggatcaccagaggtcaggtgctcgagaccagcctggccacatgtcgaaaccctgtctctactaaaaatacaaaaattagtcgggcacagtggtgcatgcctgtaatcctagctactcgggagaccgaggcaggagaatcgcttgaacccaggaggcagaggttgcagtgagctgagattgcaccacaccactgcactccagcctcagcgacagagtgaggctgtgtctcaaaaaaaaaaaaaaaaaaaaaaaagatagttcccagaaacgcttagttcttctcttgccttctttttttcctgaaagtccgctcagaactttgccattctctggatcttctggtgaaaa

SEQ ID NO: 3288 - DNA, 1080 bp, Homo sapiens
gccagatgggggccttgcctgaaagactggtccccttgatcgctggaggcatgtgggtggcaaccagggctgggcagggcttagggtgtgtgggccaaacccccctggggttggcaaagccgcctgtcaggcctcctggtgggggcccctggacacagggagcagaccctctgcctcatggggtaggagtggctgcctcctgtgttctctggatttcttctcccaacaactacaaccctggacttgcctccccaggcctcttgcctgtaaatagaagcccgcaaactgtacagatttacagaggcatcgagactgggccctgggagttgccatctgagagccgatggccccagcatcccccaggtgcctgcctggcaccacagtgaccctggcctcagcgtggcaaatgcatgtaaatatttttcgtaggcagcgtggctccagagagccccctgaagacagtgtccctccctcctgtgagtcctttctcctgtacagaacctgcctggggtgggtgggggtctgccattccctcccccaggccttccctgccccttctctcccctgtaacctgtttattaaccatacctgtcctgagttcatggccaaaaccttaaataagaaaaacaaaagaaaaagacagtggaaaaaagagaccaaggcgcctgccccactgcgggtactctcctgttccagccttgtgaaggaactggttttgtttttgtttttttttttttttttttttttttgtttgtttgtttttttaacacttcctgtgctgtgcccatttataagaggaaataaaattaagctgaaatgatgtgccgtgtccagagtatgagataaatatggtcatttggggagggcagcccatggccgcaccctgggccccagccatcttcccccatcaaagaaattgagaaccaagcagggaaaattgaccaacagccccttgtgggaaccattatggtaaaagctgctgttggttgagagtgtccaggaaaccacggagccgctgcggtgaggctgggatgggggctgtggttgggaggggccaggcagtggtgagaggggcctgtg

SEQ ID NO: 3289 - DNA, 1128 bp, Homo sapiens
tcatctcttgttcccctcatccctgccaccagtctggggcttcaggacctcatgtcagatggatgggaggaagaaagctcctgattggctggtggtggaagaaagggtggggcttgagatgagcctgagccctgacttggcacccacagtgctcactgagatctcctttttggggcagagaggcactcaggctggtttccaggacaaacatttggtaaacacagcccttgaaatcatctagacactgcaacctcttgctcgtatcccagggcctctctctagctgggtgagagggtgtcccttgtcaccagcctgttttgtcctggtctctctggggttgttgaatctctcctcttgcctgccaagtacacatgtacccagacttcatttctttctgcatcttcccccaagaaacagcttcctgagggtgctggggcagccactggtgaggaggggctgctctgatgtccctcctatgaggggactctgcacagacaccattgcccacactatcaccatattttcactcagtcacacacaagacaaaagcatgcaatgacaaaaccatacgcaatcctgaccgcccagccaatcaagacatatcacagaacacacgcgtccttccaagaatgtttatcctcatgcatcacttacacacccccagacacgtactgcaatgcaagtcactagtcatggtcacatgacagtgacagtgtggcctcctcctaccccaaatacacccacactctggcaccacacacattgtctccagctttcaggcttactggggagggtggaatcgagccagaacaatcagcccatattgggtccccctaagttgccccgtcatactcagtcccatgccatggtgcccacaccaaccatgcagccgccaaccccagccagtgtcagacacaatcccatgtggatgcacagtctcactccacatgacctgctctcaatgctggagggaaacaggcaggcccttgcctttctcggaaaaagtgtggggccacagcccttttagggcattgcatgcaggtgggcctggcttcacccctacctgcttcctccccaccgcagctggcagagggggaggtttggggccagacccccactagctgggag

SEQ ID NO: 3290 - DNA, 1046 bp, Homo sapiens
cagctgggtctagcagaatctcgggagagaagggcaccgcgaaccccactctgccatgtagcaactgtgtgcccctcggtgctccccctccctgaatccctgtattttcacctgtggatggtgagaaatacgacttcttctcagtgcctctaggagggtttgggataggaagctggggtctggcacagaggaggagctctcaaaatggtagcaaaaagaaggcagctgagactgggcccagtgagggcacgggctggcatctgaggagatggtacggggtctgcacgccacagagctggctccccacagccctcgcctctggtctcccctccttagccaagtcctttgagcctctttcaaattaatctttgtaaaacccgtttatattgggtcacatctctattcgcaaagttccctggctcccctccctcctgcctggttccgagcccaggagctggctgtggcttctccctcccccatcccctactccccatctcatttcctcccaagttccttcactgtcccggctttgcgtcagccagattgctcaagcagttcccctgcctcaagggcttcttttcccttttaccctccgcctctgcctctgggggaagcccttagtgtaccacccctgccttgagcttgtggtaggggtgcctttggggtctgactcttcccagaatgccactcctgtgttcccctgcaagccccagcaagttttgcagccagtagcgcctcagttgctgctgcctggattcaacctcatagaaactgtaggctgggtgggcaggaatagtcaaggaaggcttcccgggagaggcggcccccagaatttttgacttggcagagagaagttggggaacatcagcaactgaccacctttagctgggctgtgccttcctcctttctctcatcttttctgggaaaattgggtaaagagagggggttgggagacctaatcttgatggccattgcttacctgggatcctcatgcccctcacaaccacccagctccctagctctctccctctcccccaccccctcag

SEQ ID NO: 3291 - DNA, 1027 bp, Homo sapiens
caacagctatactgtcttgtcttctgatgatcaatatgtgcattttcctacatccttcaatattccttgtagcaagtaaaaaaaagccttctatgacacatttatgtcttttaataacctcattagacagtgtagatttgtgagaactcaattgttgatagctgcgtaatattccatgttatggttgtaccctcatttatttaactcgtcccctgtcgttcagtatgtgggttatttccattttttccctctcgtaaattacattgtcctggatctccttgacctaaggatcaaattcttgggagtccagagtgtcagaatcagaaaggcccttagaccaccatgcttggttttccattttgcaaatggggcaaaggaaaggcagagaagggggaagaggatttgtccacggtcttggaggctgtgggcgcctgagccagggctgctacctgctctcctgttggggctggggtggggatgtgggtggaggcaggtgccacagtgggaaaaagggcatcctggggggatggtgggaacacagggctgggtagagggcagactggaggtgacaggagagatacaggcttggggtagggagggctctgctgccatgatatctttgcagaggagttgactgggatgggacaggcccaaagggaacatttcctgccctctgagctgcctttgtagatgggagtagggggtggggataggtttggtttgtgagaggcttgagtgtgtgagttggggcgagtgggagggtgtgtgtctgggcttggtggatttttcttggggggggtctgtggtgtttcagcttggccttctctgccctccccattccactcctccccgggcttctgctctctgggacttgggctccatagccccttccccagcaggtgcagtcctcgtgcccctcatctccagccacaagtgggtgtgggactgccggcttcctggccagggcagctgtggctgggtgggggtggggactgagacatccccctcctggtcccggctcccaatt

SEQ ID NO: 3292 - DNA, 1047 bp, Homo sapiens
tgtggtcttttgtggccaatttctttcacttaacataatggtttcaaggttcatccacactgtagtatcagtattagttcatttgtttatttttgagactgagttttgctcttgttgcccaggctggggtgcaatggcatgatctcggctccctgcaacctctgcctcccaggttcaagcaattctgcctcagcctcccaaatagctgggactacaggcacgtgccaccacaccttgctaattttgtatttttagtagagatggggttttaccatgttgcccaggctggtctcgaactcctgacctcaggtgaccctcccacctcggcctcccaaagtgttgggattacaggtgtgagccaccatgcccagcctcagtattagtttttttttcttttgccaaataatattccattgtatgaacataccacattttatttattcattcatcagctgatggatatttgggtggtttcaatcttttggctattatgaataatgctaccttttttggtgtgtggacatatatattttcatttttcttgaatatataccctaggagtagaattactgagtcatatggaaactccatttaacattttgagagactgccagcctctttcctaaagcggctgtgctgttttacattcccaccagtggtgtgtgagggttccgatttccccacgtcctcgccaacgcttgtgattatctgactttttgatcacattcattcttgcatccattcatccctcaagtatttatagaacatctatattcaacaaggcagaaggcccactgcagagctgggaagggaatttatcccttgaagagttgtttagaagattccatggcataatatctagaacaacccccaccaagctcagcacatagtagatgctcagagacgggagacagggagcatcaaggagaggatctgggggtggtcagcaaccatggggcccccgggaatggaggaaaagaggatggaatttgtacgtgctgaccacgtactgtgtgtgggaaccagtgcttcagtccttatgaccct

SEQ ID NO: 3293 - DNA, 1033 bp, Homo sapiens
cctttatttcaccacctgcctggggaaaccctgatcagagtcttcggcactagggcctcgtggggattctgatttctgggggggattctgtttctttgatcagagcatttctgacttatgggaaaatgatgcccaaccaagagatgttgaagttggggccctgagcagggaggaggggtggttgcctgagactagggtgggatggggacgcctccatgaggaggggacgcgtgagctgggcattaagggtgctggctcctggggcattttgaaatttttggttgtcatagtagtggaagtgcagctggcattggccaggtgggggtcgggctgctaaatggctacagtgtccagaacagtcccgctggtggaaaatcgtcctgcccaggtaccaatagtgttgcttttgacaaatgtttggtcatgagacatggtggggggggggggggctcctggtgggtggggtgggtatggaccatggcacagtggtgagactgtctttgtcatgctgtgggagggaggaacattccacactgcctggggcaccgtggaggtgcacagagattgcatgggccgattcccctgaccctgcaccttccccaccctcagcacttccctcccttttgcctttccatgtttacagggatgtgtgtcccgtgttgtgtctaaggggatggccgtgataaatggtggaaagagggcgtttgggcatcagcccaacttggctgttgggctggcctttccctggtggagctccctataggggagggggccacgctgctgtgactcggtccctaatggcagcagctggcctctgatcctgccgggggaggctcaggggaggatgaatcagctgagacttgacatggacttggacttggactttgacctctgcatgtcagctgggtgaacttgggcaggtcactatacttgtgtcgtcctctgagcctgtgttgtcctctatgaagctggagggtgaccatggtgctacagggtgttgcaagagctagggcttacttggcgcagagtccag

SEQ ID NO: 3294 - DNA, 1047 bp, Homo sapiens
ctaccgcctcccaaggctctgtagcccataaaagcagctactctgagggccactgggggtgtatggggtggggagagagagctttataaactgcgaagggctgtcagcaagattgtgtgtgcgtgcatgtgtacatttgtgtgtgtgcccacacatgtgtatgcggaagggagtttatgtctgggtcatgtggtcagggcacaggagaggggaaatgtttggaatctcaggatgagaggggtctaaaaagccaccataagccctgatatgtgccagatgcccccagtgttggggactgagtctgcagaggtgaccaggcctgcctttaaccccctctggcccttagaaagtgtgtggaggccaaatccgtgttcctcctgctccatctctgagcactggccccattgcagccaagattctctctggcctcatagtgattgaggcttagagatggggtgtgacttggtgggggtcccccagctgtcaggagtgatgtcagtgctttcttgatagactttgagcttcctgggcaggctcgtggctgccatgttttctcactgaacccccagggaccactctgtgcttggtgcaggctcgagtgaatgattcaaaggaatgaatgaatgaatgagggaataaaggaatgaaggaagccgggactgtgagctatggagcccaggcaggggcttgtgtcctttcctgtgtaggtgggttggggacagtgaggctggcagagtcctgctgcatgcaaggcatgtgcccgtgggctgggaggcgccagggggctgcatcgggcgggccttcagtctgagtgccaaggcactgccaccaccacatctgggcaggaccgagggactgtggctctggactacagcccagctgcttggagccctttgattttgtgtctcaagggacagggtggccagagccaggagctgcccaggccccaggcccttgctcccatcatccccccaaacccctgtcccagcagggagcagggtcctggacttcctgacctgtctcactggcccctccaggcctctgtcc

SEQ ID NO: 3295 - DNA, 1112 bp, Homo sapiens
cccagcacagtggcttatgcctgtaatcccagcactttgggaggccaaggtgggtagattgctagggcccaggagtttgagaccagcctgggcagcatagtgaaaccccatctctataaaaagttggctgggcatggtggtgcactcctatagtctcagctgcttggggtgctaaggcaggaggatcgcttgagcccgggaggttgaggctgcagtgagcagcctgggtgacagatcctaagagaccctgtttcaaaaaaaaaaaaaaaaaaaatttattcccttctgacacttggttaatcactgtgtctcttgccttttgcttctttagcccctgccagtgtaatctttaatttaattagatgatatcttagttgctttgaggtactcaacattttgggcatttaagacattgtattcattaacatcactattttgatgtgacttgcagtcttctaacataaatccactggcagcacagtttagccaatgtacagagattggagacagcagggaaactgggcaggaggcaccaggtatagccatggtgcaggcatttaatttcaagatacctaagacctggggcaatgagtttgggggaagggctccagtcaaaatcccagtgtctctctttctatatatcctgtcaccatcacccatttcctactcacagactcagtttctggccatttcatttacttcctttgtttgcacacttttcattaattgagaaccattcctgctgactctgcagtcactgtgacctagtagtaagatcataggtgttggagtcacagcttaggctagaattctaattctgtcactttctatccatagtttgaaatatgtgacttaagcccctctgtctcagtttcttttatataccagcagaggtggggtgttcaggataatgtattgttgacagtttggtttactgatatagtggtttaccatacagttcagccagattgcttgggtttgaatgttgggaatctaggtctatagttttgtaagtcttttaatttgcctcttccttggtgtctccatctatggtggtgtccactccgtaagactgttaggaaaatttaattaaaacatgttacacggttaga

SEQ ID NO: 3296 - DNA, 1112 bp, Homo sapiens; identical to SEQ ID NO: 3295

SEQ ID NO: 3297 - DNA, 1033 bp, Homo sapiens
tccagtctgagtttgttttgcattttctgagtttttattgctggtgctcaggtgctaggttcacctggtcggcacatttcttcctcatttcatttactaggggccatgctaactgttgctccagccttactagcagtctaccatcaacggtaaaagcattcccttctcaatctttgtgcaaaagtttccttccaggttgttgagttgacccacgaaagtcatgacgctaatagaattgtcttgacacaaaaacaacagcattgaagaaatcagaaatggtgcaggctttcgggtgtgggaatgcttttttctctcttgaatgaagttgctgaagagtggtcttaagttatcctgttctgtaaccaacaggaggactcacgaatggcagtggaagatacatctctgctgctccaggcgctgaagccaagtaccgcagtgcaagcagcgcctccagcctcttcagcccgagcagcactcttttctcttcctctcgtttgcgatatggaatgtctgatgtcatgccttctggcaggagcaggcttttggaagattttcgaaacaaccggtaccccaatttacaactgcgggagattgctggacatataatggaattttcccaagaccagcatgggtccaggtgagtacttggctttggcactttaaggtacccgaaattgtaatgccttaactgtcttggctcagatgggtatctacttaaataaattgccatatagtaattttttaaaagcgtgcctcttagtttgcatcacattatttcatagggatttaagaaacaaacatgaacacaaagacatacatacacttcggctgctttaagcattatgaagaatcttttgctctcaaagagttgctattcaaatacaagtttgatctagggtgctgaggagtaagacagctctaccacctttctttgttgttccactctgtagaagtgacagtctatgtagagacgagagaagaaactattatagaagacagaatttggtttggtttaccccttcctgttgggctg

SEQ ID NO: 3298 - DNA, 1053 bp, Homo sapiens
ttttacttaacccatttctttacatcttataggtcttataggttcagatttttatttcttcttgagtcagttttgataatttgtgaccttctaggaatttgtccatttcatctaaaatgccaaatttgttagcataaaatgtactattttaataagtgaaatctctctctcaatcttcctctcccatcttccccatacatgcatatatacccatgaatgtgtacatataaaatatgttgtgaccctgaacaaggcagatgttgcaagtatttattttgtttgacttatgtgttacatgtctcaatttaacagtattattaatcatagttaataaatatgaattttcttaacaactagatctgtaactctcatttgtggtttatatgtgggttacatagaaaaccttaaactctcacctataactgaaacatccatgtctagtaaattctacttcccatctcaaagagaaaaaaagtaagggatgtggatatgagtgtccccaaagactgactgtaatggtttcatgccctgcctacccatggatctctttatcctactcccccgccctttctcacccctcatttcttagaatgcttctccatgcttacagttttttgcacaatcccctggctgtatcatttaaaaactcttaaacatcaagaggtagcaggtacagttttttgttgacgacacccaggcttttcatttgccctggaagaaaagtgttgtggttgttcattacttcagaaatgaaatatataatagtaaaaatgagctcaaaagttcataagctgtctagggcaaaaaaatgaaagcatttataactaaatttcaatttagttctaaacttagttctaaactaaaaagcatttagttttattattgtgatagaagtattatcttctcaaaatgtattctttctgtcctttatcttcagggttttatacgccttttagttttttaggaaaagcacagctcaaacagaaaatacctttctctgtccttgcttgaactgaaggagaagtttctaagttactggccagtaagcagtag

SEQ ID NO: 3299 - DNA, 1063 bp, Homo sapiens
ctgtcctgggcaaatcagcacatgtggccactttaccaagaagattctgttcttaaccagcaagattaaaagtggcttcatggactcagaagtgagaacttgactaaaaacaaacaggatgccttcgtttggataggcagactagaaagtgatttataagattcaagagaagtctgaagtgggtagggtaatagacttattattctagacctaggagtgatagctttgagtttgaaagaggcgagtttcaagtcaaaactatgtttatatatacacattggcatgtgtgtgcgtatcctgaagttttatacagtaagaactttagttgtagaactcattttctcaggttatatatgaacatcactttataaaagttactgtgacattcctgattagtaggtccataataggtagacagggggatggggtacattgcacaacagtgtttcctagtgacacaatgcctggctttaaacactgggggttaatgcagaatctggagagagctgtcaaactcccagtttgatacgtggctagaaggaaggaagtaatgttcactgacctggcatttacctgctggtgttaatggttttgggtcctgtacatacaacactggaaggtataggtattatttcgtgtctcaggacttaaatatcttgcctagcctgtgtcatctcagatttgaacagatttagaatcaagccttttcgactccaaagcatgcagtttcagtgtatatcctgttacatgatgtactcaggatatcttgaaccagtccattaccaaatccagaaatatgtatcttttaatttcttggtttaaaaacatgtgaactatgtcatcccatactacatactaaataaactgaacctgctaagtttttttttcataaagagccagatagtaaatgttttaggttttataggccagatggtgtctgtagtgaatatttaactctgctgttgaagtgtgaaagcaaccacagacaaaatgtaaatgagtgaatacgtagctatcttctaataaaaccttatttataaaaatagatgggccaggcatgatg

SEQ ID NO: 3300 - DNA, 1065 bp, Homo sapiens
ctgggatttggagattctatctcacataatattgaaagatcatgttatttaaagcctatctaggtttttcctgctattttgcaggatatttgttcttaaattattatgtagtatgaaagtactatgatttttataatcatttgtagcctctgtttattcaactatttaagtgatggagccagtatataaatctggccaattcaacctcaaagctgagtttgtgattattgacaatatgttggtgcccaggagatacttgtttgtttaacatatacatttctttgttggcttgatattcctaggttatccggtgttggctcctgctgcttactatgaccaaactggtgcccttgtagtgaatgcaggcgcgagaaatggtcttggagctcctgttcgacttgtagctcctgccccagtcatcattagttcctcagctgcacaagcaggtgagcgcacatctgagtggactcctgccagagatctaaaagtggcgactgatagtgagattcttaaagtatgttgaaataaacttttggcaattctcagtatatcggttctaccctgtaatgtttcaaaaagagatcagaagcaataagtgaccttagtggattctcctttttgttggggggttggtgggttgggggaggggtggcatgtgccagctggttagaagcaaggtctgaaggtctggctccactgagaacatagaagttgcattactcacacaaaatggctttgttggcagaaatccaagtcattattttaagataattttagaggaggggttgttttttgccacaggggcaggagtggaggacgtgggaaagagtagtgagaagtgacaaaataatacatttggttgggaggagtaatagttttttactttaagtgtttatatttatttattttttaattaagaacaataacaggaacatctagaagacagcagtgtgctaaaataggaatttgaaggatgtgtatgtgcattacatggttctagaagaaaccctcaacatagatatttatggaatttaagattttaggaagtagttgtatttaatggat

SEQ ID NO: 3301 - DNA, 1067 bp, Homo sapiens
tcacttttgtgtgctttttgctgcttatagagataatgtgtttaaagtaagaatggtagaatgaaattccactctatgaaatgttattaattgaatttatacgctaacagctgtgacatataaaaaccattatagggaaacaatttacaattaagttttaaaagttgacccaacctgagcatagggtaggtcttctccaatgaaaagaaagtggttgagttatttctgtcttcctttcccaggttctccgtggaggagccagccaacgtcctttgaccccaaaccagaaccagcagggacagcaaacggatccccttgtggcagctgcagcagtgaattctgcccttgcatttggacaaggtctggcagcaggcatgccaggtgcggctgcattgttattcctaatactttggcagggaaaaaggctgcacgtttgaggtgattacagaggggaatgagcagtgctttcaccttgcttaggcttgtcatgatttggggactggcaaggatgatacacacttgccctcacttagactatagttcactgatgagagcattgttctgagccagtcttaagtcatattggaggtatctaaatgtccatgcagcttggaatatgtggtttttccttggtggattatctgttttctgtttcagaatcagggatagatggagtggccaagctagtttacaaggcttagtctttatgttgatgtttttgaacagcatgattagtgagaaatttctggtataccttgatagggtcatcccttacgtttttaaggtttctcttaaaccaatagtaggggtcctttttagctgtctacctctgagatacatgtttatatagatacatcttgaatatatgttgtttttggttcactgtcagctggtttggtgctttgcatgggattagatgtactttgatgttctacatgtgaaacaagtctttgagagatgtcagcgtatttttatggacctttactgatcatagagcatagccaatttaactgagccatttatgaattcaataaataactttaacctgtttcatttgttttttagtt

SEQ ID NO: 3302 - DNA, 1057 bp, Homo sapiens
tttgtatttttggtagtgacagggttttaccatgttgtccaggctgatctcgaactcctgacctccagtgttccacccaccttggcctcccagagtgctgggttacaggtgtgaaccactgcacctagcaaataaatttcttaataactgctctttgtggataagtctgtatttatttgtgtgatcatctttttgtttaaatggctgccaaattattatgcatttggaagactaaagtaattaccatgttttaaaattaggtctaatacagtgaacaagaataatactaattgctgtttattgaaagctttctgtgcagagttaagtgctgtacatgtaatttctatttctcttattatgatagttgtacaacttcttgttttatgaaatagaatttcataattgagaggaaatcgattgaggaaatacaatttgtgtgcccagggtcacacaaatacaaagttgttaagatttgaacataagcctctgtcttgacaacttttcttctgaccatattgtgatgtcttgacttaaagaaaatctgagatcttgtgtttcttctgccgttaactagcttacaactagggcaagttggatggcttctctaaatgcatatatttttgttataaaatggacataataatcattaacttttcagttttctgtcattccctacaggttctgtcaaaccctactaagaagtttttagcattagtttttaattagcagccattgttttagttccttttttttgggtgccagtttctgattttaagtatttgaggaaaatatgatttttttggtaaactgccttgtcatagtaattaaaatgagaggttctttttaaactttgctgttggccttttgggcccttgtattttatcagaaagtatatgttgcgttctagtcaagctgactgttctaggatagtttttataaattcagtcattttgtgatttattagactttaaaatgttacttgtgaaactgtatattttgtttccataaaatcatggatttgacagctattgatgaaatgaaaatatatgaattttgg

SEQ ID NO: 3303 - DNA, 1215 bp, Homo sapiens
ctagaatgacattatctcctaatgtctgaaacaatcaggtctctttatgaggacatctgtaattcaagatccatggtgtctgttaaacatcatccagcaatgtcagctgagctgttgaaaaatcctgtaggaagagcaggtaggttgaaggtcctatccagggaggtcacttcagtaagtgctttcagtctgattttagcaaacattgaagtcttcagtatgactccttggaaggaggcccattaaggtgatccacaaattaggttactggcatcccctttctttataccaatactattcatactaaaatgtaatctccatcagggcaggattatgtattgttttattgactgtcatatccctagttccttgcacagtgcctagcaggtatcatttgtttcataaatatttgttgaattaatgagtgaatgactggttttgtattaacgtagaatcgtaagacattcttagtgttgttaaggcctttgaactttcttttctttagaactaagaagtgtgctaggtgtgagctcataatccaagttttgttagtagctgctgtgtttctgctgttttatttttaacatataaagaatagtatcccagaagactctggagctcccgaaagttgggcaggtgtcttaatttactcattaggataagctactagttgaggaagttattcaataccattttcccaggaagaggcagctcagaggatgaagtgaacacttttcatattcttctccaaaatgtgagtaggtgaggattaattcagttatttgtggggtcttgaaagcactgaaaggagattcagcactagggacaatgtgacaaatcagttggtagtacatttgtctaatttttaactttgccttggatcaggcaggacctgtagacctgataatctttagggcttttgaatgcatatatatgagatatatagatagatatatagatatagatatagatatctcatatgtgtgtgtgtgtgtgtgagagagtgtgtatttgtggttcaggggacatataatctgtgaagcggtcagctcatggaaccaggacacagtaaattgaagtaaagaaagagagacagggagaacagaagtatgaaacattttaatcccatgggaatgaagtagagtgtgagaacatttattgttaaggtgtcacgcctaaacaagtgcttattaaaatttttagtcagagaggttt

SEQ ID NO: 3304 - DNA, 1661 bp, Homo sapiens
gtgagcagttcatgcataatgtgttcataccattttgtactgtgatgttggagcagtatttattttttacaaaatgctatacagttgcctgtttccttaaatgcagtttagaaaattattactaggttttggctaggcgcggtggctcacgcctgtaatctcagcactttgggaggccgaggcgggcagatcatgaggtcaggagttcgagagcagcctggccaatatggtgaaatcccctttctactaaaaatacaaaaattagccgggcgtggtagcacacgcctgtagtcccagctactcgggaggctgaggcaggagaatcacctgaacccaggaggcggaggttgcagtgagctgagatcacgccactgcactccagcctgggcgacagagtgagacgccgtcttaaaaaaaaaaaaaaaaaaatttgttactaggttgtattatgttacaaacatggcacaaaccaaagccaggattatatcagtgtagaattaattgtattgttgatctttatttagaattcagttaatctaaaaatagcctaatgtagtatgtttcacaaaattggacactgttgtactaaaactcatctgttaagcatgaattttaacaaagattcaatattctgaaaatgaaagttgaagtatggtattcattcctgcacgaccacagtcagaggggagtggaaatcggcatgtgttaaaagtgtggcagtgtgattaaatgtcattctcgtgaggccaagtgtgtatatacttttaatgtaggtatttaatatgctcaactttctctttaacttacaaatgattattctatcaagtgtcatgtgtatagtaactgacaaagagtgactagtaattgatcagttgaagcttaacttctattgttatttgacttcgttcaaattttacttatggtgaagtttttctcaaaaagtattaataatacttagtgaagggatgtgttttgttcttccctaggaccttagaaatcatttgttttggaatcagattcttcatctgccaaagaaatgcacagatgatgatgatgatgattttttttttttagtttagcagcatggtttaatttgtatgcgcctacgaaaaatcattgtaatcattagttgatcattgcagtagttcaaataacctggtataaactgggcttttatctagaagcttcaagcagtaacaagatttcacaaatttcatatgctgaggaatgactccaaaataaacctttttcttaaaattttagaatcccatcattgatatagtgcttttactgtttcgaagggattttctctgtgaaccctgaaaacaaccccacgaggtagggcagctattttatttttacacataagaggccaagcatggtggctcatgcctgtaatcccagcgctttgggaggctgaggctggcaggacacccaaggtcaggagtttgagatcagcctggccaacatggtgaaaccccgtctctagtaaaaatacaaaaattagccaggtgtggtggcgcaagcctgtaatcccagctactccagaggctgagacaggagaatcgcttgaacccaggaggcggaggttgcagtgagccaagatcgcaccactgcactccagccccggggacagagtctcactctgtctccaaaaaaaa

SEQ ID NO: 3305 - DNA, 1084 bp, Homo sapiens
tcgaactcctgacctcaggtgatctgcccgccttggcctcccaaagtgctgagattacaggcatgagccactgcgcccagccagaagaggtagttctttagctgtgccttgaaagacttttttatatacgaagaaaatgagaattctagtggaggaaatagtaaaacagatatgtgttcagtagataatgtagaagtagtcagtctggttggtggttaggttgaagaaaaataactagagaggttgaagagatggtgttgtgagtcttatgctgtgttgcctataggaaatgagaagacactttaaagcaggaattacttaattattatagtttgttttttttgtggttagtgtgagtttagcagcagtttgaggcattctcttactcttattattcagttaactgttgactgttgtgtccttctaggaaccttgggttctgaatgaaacagtagtggaatatttggggaactaagtgctaaattaatgggttctgaatcttatcagacaaggggagggctcaatgaggacaaaggttgcatgcaactgacttgaaggacaggtggaatacattttgttgcaggtcagagcagaggtatggagctgggaatgactgtggtgtagtcctaggctgaagagagtagaagacgagtgtacaagaggacaaggaggtacagatgcctttgaaaattgagtcccggaggccttgagaaccagctggaagtctcagacagtactgatgattgtgagggttggaccagaggtctagtgcagcacatacttttctgcacattctgctctttttatcttggctttctgaaataagcaacaaaggtgatcatttttcttggtttagagtttgctgcaaatggtaggtttgctttatttgtgattttttagaataggaatctggtttggaggttgacaaaataagtaattctctcttttgttatattttctttcaatcttggctttgatttggtgtaataagctggtttcatcaaacttattatcagcctataatgagatacatgacatggagcagcctgcaaatagggaaaaggtaattttcatttaattcatt

SEQ ID NO: 3306 - DNA, 1043 bp, Homo sapiens
atgggattttgtttgttttgatttagttttactttgattttcgttttcttcccctcttcatgttttctttttaagaatccaatctagtgtaggctatgctacaaagattgtaaattaactggtgaggtggaattttctaaaaggtgtcaatgcctgaagcgttgccaaaatgatagattttgcatttgcatagaactttaaaatctgaagaaagattccagagaagactatttcagtgattctcagatattaaaatcacctaggatagatgccttggaacctttcttaagtttctcccaaattaccgtattagagagctatggttactaatggaatatgtcatatccctctggtggtttagagggaaaaacagttgagaacttgtgcattatctcatttgagtctcatgagctctttttgaggtaggtggaccaggtatcattttccttattttgaagagccagagatgcagcttaaatgatttgttcttaatcatatctcttctgcagatgcctctcattccatctctggtcatgattaatgtacaggttttaccctattatttaagttacacagtattaaaataatgtatatttatcttccacaattggcacatattcttgaaaaatctataaaaatccttgtccagttatatatacaggtagaggatttttttttaatctccagtgtgatagtacaggtagagaatttaattttgagtaattttaatatcagtgtaaagctaatgtgtgtgcatgcacacactcacacccctctgcttattctaatgtctgccaaagtcaaaatgaaaatgtattttggaccatcgttgtaggacaagtgtcagttgttttgtatccctaatctaattattgttaatcttgcatgtgtaaataattacagtcttaaactttttaaaaattatttttatttatttattttttggagacagggtctcactctgttactcaggctggactgcagtggcatgaagttagctcactgcagccaccacctcctgagttcaagcagtcttcccactt

SEQ ID NO: 3307 - DNA, 1046 bp, Homo sapiens
acctcaggtgatccgcctgcctcggcctctcaaagtgctgggattacaggtgtgagccaccgcacctggcgggttcagtatttttttaaaagactgggctaggtgttatggctcacacttgtaatcacagagctttgggagaccaaggcaggaggatcacttgaagccaggtgtttgaatctagcctgtgaaacatagcaagaccccatctctacaaaaaatataaaaatcagccaggcatggtgtgtgcatctgtagtcatagctccttgggaggctaaggtggaaggatcacatgagccctagaggtcaaggctgcagtgagtcatcattgcagtactgcattctagtcagggtgaaagagcgagaccctgtctcaaaaacaaaaacaaaaacaaaaacaaaaacaccacacagctatgaatagtttatcttaaatatttttcagaagtgtaaaattttcataaaacttagcccatttatacctttcttctattgtctttagggtcttcatgtttttaagagaccattttaaggatcttgaacctgatactgctgtctattaatgaaataaactcagggtctcactttgtccccagactggagtgcattgccagtgcatattttgttctgagcattcactgtaaatttttggtagtattccccataggaatctcaaacttcaggagagcagctttcagaataacaggagagctcaaaatatcagtcaagtcttttatttttcttttcttttcgtatcctttattttatctattcttggagtagatcaagtgcccaccccacagctcactgcagctttgaacccctgagctcaagtggtcttcttgcctcagcctcctgagtagcaaggactacaggcgcatgccaccttgcccagctaatttttttaaaaactttttttttagagatggcgtctcctctgtgttgcccaggcttgtcttgaactctaggcctcaacctagatccttccgcttctgcctcaaagtgctaggattacaggcatgagccactgcgtgcagctgatac

SEQ ID NO: 3308 - DNA, 1049 bp, Homo sapiens
gtttagtaagatttcctagggcacttcaaagttgtccagtttagtgcttcccgaccctaatgctaccctcgatcggggctctttcccattttaccctgatcctcaccctcccccaaatgcccttagggtaataagtggtacaccaggaagactgctacttataactgttcattttcaaggaaacttaggtatctgtgcaattaaataccagacaaatgttttttttttttctcaatcttgtttaattagtaaacaacaaattaggtccttaagagcaaaatgtatggcaaactgctttggtccaggcagtaacccaagtccatgagatagattatagagccacttaaaggtagatgaaaattatgccgagaaacccagaaattagatttgggaagcagagatttattttagtgagagcagagtttaattatttttccattatcattgggttatgggttaaatgggaaagttaaacctttatcgtcaaggagaggaaatgttttgtgctttctggttttttattgtgttcttctgagaaattcaactctccaggtatttttgtgctcaaaaatggtggttaaatactatctcaaacatcttagtttcctgtgtaatagcagttgaaaacataattagaggaaataagagggggcattttagtcagtaaagctgatgaccagaaccaagaatgatagagttctgtggaattttactttgtaagcctggtcactggtgctttgatcttatgcaaaactgtactgtgtcttgcttgaagggtactttgcatttttttgttgaagctagtataaacttctcatgttggcttatggccagcgatccctgtttctctgaagcatggagtgatttgtgaagtcactttaatggcattaccaagtattgttaaaaaattaatggaggttagaagattttatttcccttccagtaatgaaggaatagcttttctgtccttccaaaatcttggaataggttagtgttgtggttgggaagtattttggttaatggagtctctgtgtataaaggaagtgaat

SEQ ID NO: 3309 - DNA, 1026 bp, Homo sapiens
ggaaggggattactcagggtatgagtacttgtaagtgaagatcattaagagtcatttcagatgctgctaaccacagcagttgagtatagacgcatatgttttggaggaaagggagaaagactgagtaagattcagagacttttaagagctttgctaattttgcttctgtctttgcccaagcaccttggttcagtcttttgctttcttttttttttgccatagtggcaaaaaccacacttttgcaccaacctaatagcactttgcttcatgtttgctgtattgttgtttccttttgagagaatttaccctgaaaatagcctcgcttatgtgttcacctgcttctcctggctttgcacattatgacagcctggtatactatcatgaaaggtgacaggatcccagaactgatttttgaagccttgagctgaaaggctgctgctttctgtaagcaattttacaaattatggataagactatatttacatatggaggctggtacttttggaaactgttccttgaggtgtttttttttgtttctgtttttgttttttttttttttttttttgagacagagtcttgctctcttgcccaggctggagtacagtggcgtgatcttggctcattgcaacctctgcgtccctggttcaagcaattcttgtgcctcagcctcccgagtagctgggactatagatgtacaccaccatacgcagctaatttttgagttttttagtagagacggggatcttgccatgttggccattctagtctcgaactcctgacctcaggtgattcacctgcctcagcctcccaaggtgctgggattacaggcgtgagccaccatgctgggccctgttccttgagttttaaataaacatttacaagtttctgtgaggaatgaactcttaaaacatttaaaggacaagaatggttttgatcaccttagcgttctttgcactgttatgtggagcataaaacaagtgagaccctccttaggctgacattctttcttctggaatacaaaagagt

SEQ ID NO: 3310 - DNA, 1035 bp, Homo sapiens
gaaggtggcttggtaagcagagttggagccagggagattacttgggtgtttttagtgtccagtgtaattaagctactatctaaccagatgcattaattgctttgataagaataggcttctttgtgcatcatatgccctgcccttaaatgtgtcacctggataatactggctacatctgattccttgggtctcttttgcttttgttggaccaattcctaattcctgttatcttcttttggaattgtcacatcatttaatcctcttactgctaagttattctttaaaacaaactctacatctctcttgtgatctgttacttttcgccttgtcaaaaaaactagtctttatttccagattcttgatggggtggataggaactatcttttcataggttggatgcatttacatttttggttattgtgtgttaagtgaagatttggcaactgctggtatttatgccagtgggttggcaaactaggatattttacccaacgctgtggatgatgttacctccagagagcttactgttgaatttgaaattgtacttggataacacattatcatttggttttataattcagtagtttctaactccttttaatatgatcagatttgaacagttaggtatcttttagctgactgttgaatataagtgattgctactaattctcagtaagctcaacatgtctaaattgatttgattttgccgagttaaaaaagccagtcttttactttttttcaattgaaaaggattttagtttcatcacttacatttaaatattagaaatggaacaagaagtgtttcttgaaaacagactcctaaagaagtgtttcaaatatacaaaaatacttccacatattcacaacagtgttattgctgcttaacaaatcaccctaaaatttagtggcttaaaacagcacagtgtgtgtgtgtgtgtgtgtgtgtgtgtgtgtgtgtgtgtattttaagagatagggtctcactctgttgcccaggcaggagtgcagtagtgtaatcgtagctcactgcagctt

SEQ ID NO: 3311 - DNA, 1040 bp, Homo sapiens
agatcgatggtactttctctgggccatctgttggagcatggaaatatatcctcattatatatacagtaaccagacataatgatgtttagaaaaatagaattacttttgttccattgctttctcaagctggtattaaactatgttgtgtgtaattccttcttggttactgtaaccttgctaataaggaaccataacatcaaagcaaatccattgtattttgattaattggtgcatgatgtggttctcattgaggtgaagcatgtagcaaaagtttattttctgtgttgtattccctatatacatagcaggcatatctatgaaatatttgtttcctataatgaaggaaaaggggaactcagggttgagatccttgtctttttcagatcaaaaatttaaaattccctgaggctaactgggtgtgggtttattagagtatttggtcccatcttgatgtggagtattctttgttatctcagtcgggctgtttgcttcctgctttgggggtgtgagggggtcatgaagcaatctagatgttttcatcattgtatttgtgaactttacagtatcctgaggggtctggagcttatcttttgtatactgggctcacaagtactgtaatatgtaattattaaagtgaatacctattataaaatgaatgtggttatgctatagatcaaaccatgtagtcaaaataaattgttataccaaaaagacacttgcgcttgcatgtttattgcagcactattcacaatagcacagacgtggaatcaacttaggtgcccagcaacagtgaattggataaggaacatgtggtacacctacacccataaaaaaagaatgaaattatgtcctttgcagcaacatgggtgcagctggagtccattatcctaagtgaattaatcactggaacagaaatccaaataccacatgttctcacttgtaagtgggaactaaacattgggtacacatagacataaagaagggaacagtagaccctgaggactccaaaaagggaaagggaaggagggaggcaagggttg

SEQ ID NO: 3312 - DNA, 1038 bp, Homo sapiens
aaggccacaaattatttaaaaattttgtctactttccttgttagcccctttcatttggcttaaagccctgagaagtttaaaggcacatactttagcagcttttatttatatatgaagagatcagtctgctaatcgatgattctagaaaaggatgtttgtagtagagaggaaggctcactgaccttgggcttctgggctctatttctaaattggtttggtttatgatcttgcataacctgtttgctccacctttaggttggcagcattgttactgttcatgacctagaaaaggatggatttttaaaaaagaagctgtagttggaaagtactttgagaggttgacagaaaggtactttgttcgcataattggttttttaacttttaaaaatcaaggacctttttttcccttaagattctttaatgttttatgtgtagtgaacttgacaacttccagggaagttaaaatagtagtgaatactagcttatttctacaacaaatggattgtatttagatatgtgactcttcacctttgtcttagaaagctgaagcatagaaaaacatacccttgattataacaagtttgtaaacctgacaaaggaaatctagaaagtgctcctatatacagagtgataacaaatcctaccttattcacaggaattaggataacctgagatatatttaaattgtagctttatattctcattagacattatatagtacttgatccataggtgtgggatagcagagtggcttatagagggaggaattggatagtgatttgggtgagctgttaatccaaagaaaggcaaaatttggtgggatagaggtagcattggattgggccagaactctgacgccacaacttcttagagcctaggttcaaacattcatcttctttgcacttacttttttctacccgtaagacaaagatgttggactagatagtttcctaggaccttttcaggtctaagattctgggagcttgcccttctttctctctttaaaaagatagaaaagaggaattgttctggcctttt

SEQ ID NO: 3313 - DNA, 1050 bp, Homo sapiens
cataagtgaagcatgttttgtgactgccttcttttacttagcataatgttttaagggttcatctatgttgtatgtagcatttatcagtacatcatttatttttattttttattttttagatggagtctcgctgtcgcccaggctggagtgcagtggcacgatctcagctcactgcaggctccgccccctggggttcccgccattctcttgcctcagcctcccgagtagctgggactacaggcgcccgccacctcgcctggctaattttttgtatttttagttgagacggggtttcacagtgttagccaggatggtctcgatctcctgacctcgtgatccacctgcctcggcctcccaaagtgctgggattacaggtgtgagccactgcgcccggccttctttttatttttgtataatatttcattgtatagatctgccacatttaatttatccatttatcagttgatgggcctttttttcttcttttttggctattatggataatgctgctatgaacatttgtgttcaagtttttttctgtagacatgctttcatttctcaggtttgagagtatataaatttgtaatgtataggtacaaaaataacaaatttcttcactaggggcaggtgctcattagaaatgggggatgggaggattagtttatctacaacttacactatggatttggaatttttccaagccacacattttactggggctaatgactactttcttttctctctgaaggaagtatttggaggctaacactgtaaataaacttgtttacaaacccgggaagaggagtgcttaaactgtagagaacaggtgttttcagtgagctccgtaaactctttagatgcaatgaatatgcagttgattgatctgctggtgacaatttttctttattaaagcaagttccctaagaattttaacaaggggacagttcattaacctagtcttggttattatatgtatttaaaatcaccaaattgggtgttaattattaagaaatgttctctgtaatcccagcaatttgggaggctgaggca

SEQ ID NO: 3314 - DNA, 1035 bp, Homo sapiens
acctctgcctcctttgtacaagcaatctggtgcctcagcctcctgagtagctgggattacaggggtgtaccaccatgcctggctaatttttgtatttttagtagagacagggtttcacaatgttgtccaggctggttttaaactcctggtctcaagcagtcctcgcaccttggcctcccaaagtactgagattaaaagtgtgagccacgtacctggcctgactataattttaacctagcctgattataactttaagaattaccttgttccagtgtaaacaaaagaagttcggctggttgcaattggctcacgcctgtaatcccagcactttgggaggctgaggtgggcggatcacctgaggtcaggagtttgagaccagcctggccaacatggtgaaaccccgtctctactaaaaaatacaaaaattagccaggtgtgttggcgggtgcctgtggtcccagctacttgggaggctgaggcaggagaatcacttgaacctgggaggcggagattgcagtgagctgagattgcaccactgcactccagcttgggcgacagagcaagactctgtctcaaaaaaaaaaaaaaaaaaaaaaaaggaagttcagtcagatgctcttctctaatgctgaatggtacttgattatatatgcctctgaaatggcaacttgtagagatatttatgatgtatctttaccttgtttaattttagaaggttttttaaatttaattttatttttttgagatggagtttcatcctttcacctaggctggagagaagtggcaggatctcagatcactgcaacctcttcctcctgggttcaagcagttctcctgcttcagcctcccaagcagttgggattatacgtgtccactaccatgcctggctaatttttttttttttttgagacggaatcttgctctgttgcccaggctggagtgcaatggcgcgatcttggctcactgcaacctctgcctcctgggttcaagcacttcttgtgccttaacttcctgagtagctgggattaccggcac

SEQ ID NO: 3315 - DNA, 1058 bp, Homo sapiens
tatgtatttgaaaatgttactcattttgggctgggcacggtggctcatgtctgtaatcccagcactttgggaggccgaggcaggcggatcacgagatcaggagatcgagaccatcctggctaacacggtgaaaccctgtctctactaaaaatatgaaaaattagccgggtgtggtggtgggcgcctgtagtcccagctactcgggagtctgaggcaggagaatggcatgaacccgggaggtggagcttgcagtgagccaagatcgcaccactgccctccagcctgggcgacagagcaagactccgtctccaaagaaaaaaaaaagttacttattttgacagtaatttttatacctttagatttttttctttcctgaataacattgaaaatttcattactaaaagcctaaggtcaagtctttgacttgagagtgttttattcttgtattgtgaaatctgttttctctgtaaactgctgtgggatagataaactggttgatgaaatagggcaaaaaaattaaagtcgattggttgaactgtagcctctgtactggattatgagggacagaggtagaagctttgccctgggggaagggaaatttggaggacagttccacagagcttacccactttgcttgcactcttttagcactaggatatatcagtatccatcatagattgacagcctataggagataattccagagaaccaggcaaaaaaaaaaaatcagtgggtgaggccaggtgcagtggctcatacctataatcccagcactttgggaggccaaggcaggcggatcacctgaggtcaggagttggagaccagcctgaccaacatggagaaaccccatctctacaaaaaatacaaaattagtggggcgtggtggcgcacgcctgtaatcccagctacttgggtggctgaggcaggagaattgcttgaacctgggaggcagagtttgcggtgagccgagattgtgccattgcactccactctgggcaacaagagcgaaatgccgtctcaaaaaaaaaaaaaaaaaattcagtggatgaatatatttt

SEQ ID NO: 3316 - DNA, 1056 bp, Homo sapiens
tcaggtaaaggagtgggtcttacagctcagtcatcctgctgggaaacacatggcaacaggtagaggccacttgataggcagctgtgctaagggtagcataattgaagagcaaaggggcacatctctaggtggagaatctctgcccttattagccactgttacggataggaggtgtaagagggtgcctgatctgtcatgtgggtcagagtgaaaaagaggttgagaaccactgatgataacggaaatatttatatgttctaggcattgggctattgtatttcctatatataatccttacagcaatcctatgaaggagataaatacccttttttgaaaagtgagaaactgaggctttgttaccaggtaatacctggtttttgaaatcagtctttgattccagtgtccacgttctagatctgtttctgcttccctaggcaagataaaccagacaaaactgtgcaaccaagtggcacattacagggccaaagaattgttttgccataattttgcttgaaatttagagactgtaaacttaataatgagatgaatacaaatgttgaccattctcctataattgcaggagtacttgcccccaactcccaaaagcagtaatggtaaagtccatttttcttcagttctgttttttattacatatgtgttctaagtggtaatgtggatggaaaattatctctgtagagacagaatgactcaatataaagtgatcctattgccagctcattctaccctaccactgggcctttttttttttttttttttttttagtggccctttggcataatggaacaaagtttgagatcgaattggcaggatgctttcactagtgaactagcgaagtaaagaatatcacaggctgtgatgccagtagcattggagggaggggaactctttgtcatgccaggtactttatttctctcgtaattactcccatttaagagcaattgcttttacacttttttctttttatttattgagacagggtttcactcctgttgccgaggctggagtgcaatgggcaccatctaggctcactgcaac

SEQ ID NO: 3317 - DNA, 1047 bp, Homo sapiens
gtatattggccaggctggtctggaattctgacctggagatgcgcctgcctccgcctcccaaagtgctgggattacaggcgtaagccaccgtgtccggacactttgtagcattttttaaaagcacccacaggctggcaagtgttctatcttaagtacagatgcagtttttggttttaaggaactttagtgtttcatagtaacatttgagggattctttgttggtcttccagaggagtagaggatacaaatgagacatattgttgagttactcctgcaaggggttagtagaaagaagtaagcttgggaacgattagggtttgaatcctttctctgctacttgctagttgaatggccttggaaacatcccattttcctcctgtaccttagtgttttcatttgtaaaatagaaataataatggctacctttcaatgcttttgtgatgagacaatgtctgcgatatattcattacactattaccgtgttgaagcttctgtttgtttgtttgtttttgagacaggaactcactctgtcgcccaagcgggtgtgcagcctcccgctcctgggctcaaatgatcctcccacctcagcctccctagtagctgggactataggcacatgccaccatgcctggctaattatttttagtagagataggtcttgctatgttgcccaggctggtcttgaactcctgggctcaagctgtctgcccacctcagcctcccaaagtgctgggattgtaggtatgagccaccacacccaactgaggcttctggtttgtatagtgaggctttcttttttttttataatttaaaaaaattattttatttatttatttattttgagacagagtctcgctctgtcgcccggctggagcacagtggtgcgacctctgcctccctggttcaagtgattctcctgcctcagcctcccaagtagctgggattacaggcgcgtgccaccaagcctggctaatttctgtgttttcagtagagtcggggtttcaccatgttagccaggatggtcttgatctcctgacctcatgatcc

SEQ ID NO: 3318 - DNA, 1043 bp, Homo sapiens
atgtgagccactgcgcccggccaagaatgatactttttaatatttagatataaatttcagcttaaaattttttggctggctaaaccaaataatttcagccttgaattaaaggagaaactgtaactttctccagggctaagtataacaagcagaagcacatttacaaaatgactggcacagccatagattcctctcttctagaatgactgggaaagtctttttcttggggtttgactgacaagggatgtcagtatttagtgtctgataatgtatttcccatagtacagtcatcctcatgatattagaggacttggattgaaaagccaggctacaatttcctgtggatggtgtttaggaggggaatttaagctaagtccaattgctcttttataccagaattggctcttgacacaagagcccttgagcaccaagtctccttgagccttcattatttctagttatctgttctttttacctcagttatctcagcatcgagtgacaagagactgtatatgggagagattcagtgaagatatggactggaagactccaaggccgcttgtctttgagacctcagactgcataagtgatgccaaatgttggatgtccaggctagcaccctcccttcagatgaccattgctagcaagaaacaggaggcggtggccatattccaaaaaccacttctgtcccatttcaccaggatgactaaggcaagctccctgtggcctctaaaaaccacctgccagatttcagggactgtttttttttttctttttcttttttcctgttttctaatgcaggcccaatgtgacaaatttgttggttgggattttttttttttttttgtaactggcttgtatgatattttctttctgtatttctctatatcattttgtattaaaagccaaatagatgcctttttacaagagccatgtggattggatttattgctgtcttttttttgaggcttgattgctataaatcagaatagagcatgatgtggccacagaatacaattcatttaaacttccaagaagctgct

SEQ ID NO: 3319 - DNA, 1050 bp, Homo sapiens
tatagtagcatgctcctgtagtcccagctactggggaggcttagatgggagaatcacctgagcccgggaagtcaaggctacagcgagccatgatagtgccactgcactgggcaacagagtgagacgctgtctcaaaaaaaaaatgaaaattaaaaaaaggtgtttttctctttgacagaaatcctgtgttttatagtagagtaatatcagtgtctctgggcaattgactcttgtctcttgtgtcattctctttctctgcttttattaatttgatttctgggggcacctttctgtttttgcaggtctgggacctgcgccagaacaagctaacctacaccatgagaggccatgcagattcagtgactggcctgagtttaagttctgaaggctcttatcttttgtccaatgcaatggacaatacaggtaactttggaaaggaaatctctcccaggatccaaggaaaaagtcaaagattgctcacagattccatcagacgattagaatgtgttgtaatggggaaagctttaggtgagatagtcaagaatctaggactgtagtctcagatctctgtcttgtccctgaacaactttgcacacagcatttcttctctctaggcatcagtttctacattgataagaagattggactttacctttaagacccatctcagctctggtatgctgtgtatccaacaggatattagaaactctaggtgatgagtttaatgaaaaagatgtgaatctagaagtctattcaaggcagttcttgtgcgttttcagagagcaccaagcttggatgatctcttctgctctttcctgccagtctgtcttccctccccactctgaaagcattggtgtgggaagaggtcttcattaaaacattctggatttacacgaacacactcttgctctttctctttacttgtttttgagttgtagggtgggaggatgggttactacagaaaaaaagtaaggtgacttgctggattatatgcttaatgttgagggagtttggaaatggccctggtatacaaaattataggcttgtcag

SEQ ID NO: 3320 - DNA, 1084 bp, Homo sapiens
tgcttgagcccgtgaggtggaggttgcagtgagccaagatcgcaccaccgcactccggcctgggtgacagagggagagtctgtccctagatagatagatagatagagattagatagatagatagacacatagatacatagatagatagatatagatgatagaaagatagatagatagatagatagatagatagatagatagatagatagatagatagatagcctaggcgacagagggagagtgtgtccccagattagatagatagatagatagatagatagatagatagatagatacatagatagatagatagccaggaatatgtcggtgcttttcgaagctcttattccccaaattgtctccttccccagcccttcctcccaaggtttttggtttgtatttttgccccaactgtttttccttgcccccaggaaccagaggctaataatgtcctttcctttaaatgttttcaagggaagttccaagttaggcaaaataaatgtaagtcctttgggctcatccttcagagagccaccagacaggtaaaaataaacaatttttattgtttattctttgacaataagaaataggccccctttgcttcctcagtactaggaaaccatactgggaatatgggttatcttcaaagctgttgctgagcaggagacagagccagcacaagttaaaacactacaaagcccttttactgggactcagggagttttttgtttcctttttcctcattaagggtttgccgggttactataaacttttgattagttttgagagttccaacagttgattctgacagattttgctggttaatttgctgctttcgtggagggacaagcttttgtcattgtttattatactattttcactgacataccctctatttttttaaatgtgggttgcagcctactaatgaattagtctctacggtttgaaaaaattgtctgatatccttgttgttctaaaaaatatatgaactaagtagttaggggaattccattctaagagtatgttgatttaactctgttcacttcaacaaagaagtctgaaaatataaccgaagttttgtttc

SEQ ID NO: 3321 - DNA, 1024 bp, Homo sapiens
tccacctcccgggttcaagtgattccccagcctcagcctcttgagtagctgggattacaggtgcacaccaccatacctgcctaatttttctatttttggtagagatggggtttcaccatgttgcccaggctggagtgcagtggcgcaatctcagctcactgcaacctctacctcctgggttcaagcagttcccctgcctcagcctccctagtagctgggactacagggacccataccacgcccagctagtttttgtattttcagtagaggcaggggttcatcatattggccaggctggtctcaaactcctgaccttgtgatccgcccccctcggcctcccaaagtgctgggattacaggcgtgagccaccacacttggctgagacgtttttctactgagtggttttcttatacctaatcacttggggccccttgatggttggatgggaggagagtctgttgtttaagattggtttctaaaccagagctctgacctagatgtcactgtagttggagagtcttaacagtagctgatttactaattgtcatttcagaagatagtaagaggtggaaatgccccagtgaattttgttaacattattattgagggcctgctgtaataaatatctaggaactatttaggtagtagaaaaagagtatatgtcctttctgtctgccttcttttggttttttgcttctcttctgccttaattaaacatgatttggaatagttatttttaccttattactcaagttaatactttttttaataagcagtatgtcacatcacctaaagatgactgctttttaaccagctcctatttttaatgtcagtatatttatatttaaggcatcattaaacagctttttgcaatgtacttttcagttacttgtgaagttggaatgctttgtgttcttgtatttttgttactaggttgcaagtacaggaattgaataacttcagtttaagaggaaaaaaagtcatgttgctttttacatgtcagagttcttaacagaaagcaaag

SEQ ID NO: 3322 - DNA, 1033 bp, Homo sapiens
tatcagccacgctggtctcgaactcctgacctcaagtgatccacccgtctcggcctcccaaagtgctgggattacaggtgtgagccaccgtgcctgacctgagaactgttgttctgataaatttataagtaccctttgcctagtaatgctcacagaacccatctccctaacagtactgtggaatgtctatggtgactgtgataactatgccacactgaagggacacagtggagcagtgatggaattgcattacaacacagatggcaggtgagtattctgcataatggaaggacagcttctcatactaattcttggcgtcctttcacctttcatcctttctcaggagaccctgctatcaaaaactactaattttgggtagctactttagtatccgatttatcactgtcaccccaagtgaggtgtttatagtctgtgtatgcaaatataaagatgttacatcggtcatttcaacaacccagacaaatttttctttttttaagacataaaataaatgtgatttttatatgtaggctggagtgcagtgacacaaacatggctcactgcagcctcaacctcttgctcgagggatcctcccacttcagcctcccaaatagctggggccacaagcccacgcctccatgcccagctaatttttaaaaatcatttgtggagacatggtcttgctatattgctcctgagctcaagcagtccacctgcctcagcctcccaaaaatgctgtgattacaataattaaccaccatgcctggcctgaaatcagctatttctattataaaaatcatttcttttgagaaaccaaaaaaagcagaaagatgaaaaaatagtctatatttctaccactccaaagataatcagtgttaattttttttttttgagacggaatttcactcttgttgcccaggctggagtgcaatggcacgatctcggctcactgcaacctccgcctcccaggttcacgtgtttctcttgcctcagcctccagaatagctgggattacagggatgcatcaccgtgc

SEQ ID NO: 3323 - DNA, 1077 bp, Homo sapiens
tccacactttcgaccgctaccgcagccagtccacggccaaggtgagggctcctcccgtggctgcccctgccctgaagctcagggcctgacctggtgcagtggcccctggggttggagcctgaccggtggcccccgttgcagagggagaagcggtggagtgtgtcctcgggtggggcagccgagcggagcgtgtgcaccgtgagtccccccgggctgggtggggtgaggtgggcctgagggacccgtgccctccctgccctcctgcccctcccaggcaaccccagcctgtctcaccaagggcctcccccacggcatgggcaacagtctggggccgcctgggggtggggaaggtgctgcagatggcgaacaggggtggaggtcctccaggattgggagggagagtggtcagcaggagacatgtcctgggggccactgagaacaggggtcaggagccccaccctggaaccaggcaggtctgtatttgaattctgcttgacacctgattgctccataactttgggcattaccagccctctctgggactcctcagtttgatcgtctgtacaatgggtaaggatattggcccatctccacggcccctcccgctccctccacaggataagcccagccctggggagcgccccagcttgtcccaacatcggcgccatcagagctggagcaccttcaaatctatgacactgggctcgctgccccccaagccccgagaacggctgactctgcaccgggcagcagcctgggagcccacagaaccaccggatggtgacttccagacagaggtgtgagtgccacgctggactgcccactgcatataaatatatatatctctctattttcacactccactttggaactacccaggagccagcgccctctcccctctcccgagggctgggcagggaggcgccgtggactcagccaggctgggggagccggacatggcttggcctggggtcccagggcccttccttgtttctcagaggcccctcagccactggaaccccatcttcagcccagcctgtccgtccctgtcccgggctggggaggggggaggggaac

SEQ ID NO: 3324 - DNA, 1069 bp, Homo sapiens
gggtgactggttaggatgagtcctcatttcaggagactgtggctcaggcaatgtgtgagcctgggcctctgcgtcatgcaggtctgagttccagtctggactctgattggcagtgagatcagtgagccttcattttctcgtgtgtaaagtggggataccgtagcagtctctttgtggagtcgttttgaggattgagtgatgtaaaacatttatgtggagcaagtagaaagtgctagataattggggattgctgctgttagcacccctgaaatcagctgcagatgctgcccacaggcctgtggtaactgaccctctcttccggagaaaagcaaacccctccgggtccctgcctgtgtgtgttctgtgaatccttcaccttcacgctggcctcctcaggtctgctccctgcagaggatcactgagaacagacagtagtggcctgctgtggaactctagaacattctgcaactttattggagtcatgaaggggatgtggttaaggaaagggacaggagtcgtggcttagccacaattggctgttcctgctcggcctcagaaacccactccccatccgccacaagacgaaaattaagttagtagctacggggctcacaagtttagtttttctcccaaagtgtttctggaacatttggtgcctgcttctgccacagatggcaaaaacaggaaggcgtaacaaagacaaaatgcaacgccagtgtcggagaagggcgcgcttggcgtcatggcgggttttgttctgtggacacctgcctgccggccactgttgagggcggacatcaggctccttgtgtgggaggcagtagtaaatgcagcagcgctttgaggggtcaaggatgacatccagaattcgggcgtgggcaaccgtgatgggcggaggaacaggtctgggtagggaattacaagtgtattccattggtgtgagctgcatgtgcagtgcctgtggggcatcagacagggagaggtgccctgttgcccccagaaagagagatgtggctgggttggggaggatacacgtgtgtgtggtaaaggcaggagaaggtgccggggc

SEQ ID NO: 3325 - DNA, 1048 bp, Homo sapiens
actctgaggaaacagaacgatggcaacaacaactactgtttcttcagggctcacaagattccaggcactctcgcgagtcctttcccttacttatttcacccttgtaggaaacttgtgcgataggtcctatcattggtccattttacaggtaaggaaactgaggctcagagaggtcaagtcccttgtctaagttcacacaggtggacccaggtgacacttcaaagaccagggtcttaacttatgaggcccactcccgcagctcaccatagaaggttcagagcccatgctggctgtgctgggggcccgctgaccactgtctctctccacagggcaagggacataggatgaccccagcctgtcccctcttactgtctgtgattctgtccctgcgcctggccaccgccttcgaccccgcccccagtgcctgctctgccctggcctcgggtgtgctctacggggccttctcgctgcaggacctctttcctaccatcgcctcgggctgctcctggaccctggagaaccctgaccccaccaagtactccctctacctgcgcttcaaccgccaggagcaggtgtgcgcacactttgccccccgcctgctgcccctggaccactacctggtcaactttacctgcctgcggcctagccccgaggaggcggtggcccaggcggagtcagaggtggggcggccagaagaggaggaggcagaggcggcagcggggttggagctgtgcagcggctcaggcccctttaccttcctgcacttcgacaagaacttcgtgcagctgtgcctgtcggctgagccctccgaggccccgcgcctgctggcgcccgctgccctagccttccgctttgtcgaggtcttgctcatcaacaacaacaactctagccaattcacctgtggtgtgctctgccgctggagtgaggagtgtggccgcgctgccggcagggcctgcggctttgctcagccaggctgcagctgccctggagaggcgggggccggctccaccaccaccacatctccaggccctcctgctgcccacaccct

SEQ ID NO: 3326 - DNA, 1707 bp, Homo sapiens
caaaaggtcttatgtcatagccggcacagtgagggttacgcatgtccaggacgaaatcccagaatgagcgtgaaggtgtctgaaggagactgaggggaggaggggggttggattgggttaaaagtgactccattctggagaagccagcctgtggctctgaaggatgtggaccttgtgcttcttgatggggcggggctgtggagtagggagcagcagcctaggagcagggtaggggagggagatccagcttcagacatgcaaaggaagaccccgcagaggatcctgcctgacacttagctgtcatatgctgagcctcagagggccagatactcatgtgtgttctcagtcgagaatgcgtgtgcacctctgtgcatgtgtacaagtgtaagcctctacacccctgtgtgtgcgtgttaactcctgagtgtgtgtgacagcatgaatctgtgggtttcacctgtgtgcatgtccgtgtacatatgtatccattcatatgcagaactcctgtgaacatctgtgccctcatgctttggtgtgtgtgtcctcagggcacaagggtgttcaaacccatgtgtgttggtgtgtatgtgaggggaggttccctgagctgctgtaagtgggggaggggaggccggttataatgagcccctacctcccctccactgagccgcagccatggcctgaattttgcggcttaaaaataattgggggcagcagggggattggatgtcactcatcatcagccgctggcttggctagtgccgcagcaggtggggcgagctgagcagtgtgggacaggcatgatgtagggtgggaaagaccaggggtctgatccctttttcagctctgaggaggagggtgggtggttggggggagaggcacagcctgtctggcttccgccgaataactccatgtgggtcttgggaggagggtggggtggctcctctgcagtgagtaggtctgcctggagctactccaccatctcccccagcccctgtatggctgggaggggaagatgcttgcttgggcctggcttggaggtgcagcatgaagggatgtgggatctggagcagtggggagctccatggatgctgcacagggactggaaagttggggttctaaattctgtcccccctctgcctgctgtttagactcctgaagacccaaggggaagtctgttccctgggagcaactgtgtcttgggagaatctagtcatacctgtgaattgtcctgtgtttctgattcagtccccagagctaatagctggtccatctggcctgaagcctgagcagcaagcctagggaaggagcagaggctactggtggagggagacaggcctgggctgggcctcagatcctgggcttgcgtcctctgtggccacctttgtgtgatctggagcgggttgtctcccttttcctagccccatcttttctcctctgatgaggaccagctgggctctagggggcccatgcagtgctgtgagctatcctgtggcatgcaggagggaggccgcttggattacttggggggtaggattggaagtggggctgattcagaccacgcgctaggttccattttctgggcagttgggtagaggttgcgcaggctgtgggcagtgacacagccctggcctggtgggtgggagggcacctgcagctccccccatcctcagcccttacccactctggcctgactgctctgtgtgt

SEQ ID NO: 3327 - DNA, 1519 bp, Homo sapiens
taaattagtggagaaatggcattttaagaggagtctcttctcaacttacctgagagtcgaattcttctcttccctaaccaatgaagctaagtggttatcccagaaacttgtcttctaaaagggaggactccaggccatcaataaagatgtccaggcagtgagcgtactttttacaccctgtagaattgtgggctgtagcgttactctgattttctgtctagtatcagagaatgctggtagcttaaaatttttattttaggacttgtactctgaattttcaggaaccgtcaaaggagcagcagcaaattcacatattttcgacttgagaaatgcttgtggtatgtgttttccaaactgccccctatatgtaaagttcagtttaaccactgattgccttgttattactaggttttttgagattaaaaaaaaaaaatccctggtttaaaaccaacaatgatgcctagtgagtatgtgtccacaggccataacagggtagaagagagacatcgtgcaacccaatgagtagtgaagggactgtgttgcttgtgaagcggtgtagtagcatttttgcagattcttggctgggtttagtgtactgatctagaaaagctgtttttctgctcctttgtggaaggcagttatgatcaggctgcatggacaaagcaggtagaggggcaccatcaggggctcttgcactattttcacctctaaatattacgtactcagtagtgccctgcttctagggctctgaatacgggcttaaagtcatcttgtcctgctggaatttgctgtgcagagccataagcctcccattttgttagcgtcagctaggccaataggaacagaccgggaccttgtctcacactgatgatacctcacatgttgaccggctatgtgaactgcctatttcctatgctggagttttgatttttaactaaacgcaaatctgtagattctctcctctcccatcccagaaaacaaaacaaaataatgcttttcgaaattgtttctaggactttaaaacataatggtatatccaaaattctttatttcagaatgcaacaatagattccattaatatagactcaagatcaaaacagcatacctgctaagctaagatagatggtgttgattccactgggttttgatcaatacaataacaaacctttttcctttgacatactctgaattttgttgtttggggggagggggtgtgtgtgtgtgtgtgtgtgtgtgtgtgtgtatgtgtgtgtgtgtgtgtgcacgcgcagtgtccatcagtatcagtgcctgcctgagttaggaaaattacattcctggttctgtattgaggagaaggatgtataaagcaacatgaaacattagccctccttttattttaaagactaatgttaattgttcttaaaactggattttttttccttaaagcaatttttttcttttcgatttaatgaagtattgctagctgaagccagtttgacatagagagatgtcagattgatttgaaaggtgtgcagcc

SEQ ID NO: 3328 - DNA, 1035 bp, Homo sapiens
ttatttttggcttattcactgacattttggatccttatttgtgtagaattgaattgatacctctttatcaccttcctaggactgtagttattgtgggtaaggagggatattaatattaatattatattgtatataattatattatgctatatattatattattatatttatatattataatatataaatatatgttataatatatatttgttatatataatataatattaatttaaatctaagtttcaaggactagattattttagtttgataaatggaacagtagagggataaacaaaggtaggtagtgcagaggatagatagaactgttgttctatctacttgatttgggagtaggttataagagatgaataaattttcagtttgagaccagttaatcagaagatgcgtgtttactaattaaacgctttactaattaaaggtgaggttttttagtttacaagttttcagacacttttttcccccaagtggtcaaaatacaataggtacagtagcattttacagaggactttccctactactttgatggttgagaagattttacaatctattgtctgaatagcctctgaatattaagttggactccacaagttctgtagttactcagagccttgactgtttttcataaactctatatccagtctgtggacaaatcccacgtcaaagtgtatcttgaaactgaccccttcttatcttccctactgctgttaccctggtctaagctaccattatatctacttgtctccttgcttccacccttaccatttttgtaatgtttccacatagcagatagagtgatcctttgtaaaacctaagttatcactctttttttctctcctttttcagcttttatgttaggttcagtgtgtacatgtgcaggtttgttacgtgggtaaattgaatgtcgctcgggtttggcgtacaaatgattttgtcacctcgtcaccagttagcaagcatagtacctgataagtagtttttcaagccccactctcctctcaccctccaccctca

SEQ ID NO: 3329 - DNA, 1034 bp, Homo sapiens
ggtgcgtggcagaggcaggagtgtggtagggtgtgccggcgtgtgtccagtgtgtgagcaggcatcctagaggcccttccccttggtctttgtgtgtggcgatagtgaaccctggtgtgttgggttggggagttctttccgggagcatcttgtccgtgggtcttcaggttcaagtatgaggaaagggggtataagtctcctccagcggcactatgatcttctggctctgggattttaatttttttcccccagaaaggatgtgatgtgtttttttgttgttgttctatacatttttttctcccacgtttcatgacttcaaagtaaattttcaaatttgtcaatgatgccatcctatcctagtctggggcccctgagagctaacgaaaagaagtttgtctgttgcccaaaatcctacactctggcctgtagagtgttcaggagcataaacttttgtaaagtactgctagtttttcaggtgaagagtattttattgttaggtaaattgaactgtagtctggtttattatttcctggaatttgtcaagaaattagcagtgactagcaattctagtgtcactgtaggcattcagcaaatgtttgtctgtccggagtcgccaaactacattacactgctgagttggaatatggtacttgctgtcatgctctgtaagagagagtagtttcagagggaagtgagtgaagttatgccttgctgagtgtgcaaaaggagattaaggatacagaatgacacattatcagggcttcagaatcacttgccagcacaccattgtattggtgaagatggtgagaagttgtttgctggtattctgatcttggcatttttaagtttcataatgaatggactaattattatcatggacttttcccattcttgtgttgtaaaagtagggattcttgaagagtagtaccttgatagggattttacacattgatataatcttaaaaatgatgttatcttaaaaataatgtctcctagaagttggtagtctttcacttgatcttagccaaaaggcc

SEQ ID NO: 3330 - DNA, 1051 bp, Homo sapiens
tgtacacaaagcacctaggccatggtatgtgcttaataaatggtggctgtgcttggtgttacctgactctctactcatcctttgggatttgggtgcctgcctgtccgtccagatgtccttgagatctcacgagttctctttgagtgcaaagacctcattctcattatcaaaccaggctggtcccagacctcagagttcaggtcttcatgctggaatcctgggaagcactgaacgtggagtcaggagatgtgggtttgagtcctgagatttgctgtgacttcatctggaagatggggttttgataccttttttaaaggtatgaaatgatgatgatggaagtgttttgtgcctagaaaggcatttgttgcatctcaggcattcttttcattctgaccacccagatctgaccctggctgtgcccatctgtaactctctggctatcatcttcacactgattgttgggaaggcccttggagaagatattggtggaaaacgtaagttagactactgcgagtgcgggacgcagctctgtggatctcgacatacctgtgttagttccttcccagaacccatctccccagagtgggtgaggacacggccttttcccatcctgccctttcctctgcagctgttttgcttccttgtggccatcagagttcccttcccctggacagtctggagaaagacagaggctggggtttgggattgaagaccagaccccatctgagcccttcctccagccctgtaccagctcctactggcatggctgagctcagaccctcctgatttctgcctattatcccaggagcagttgctggcatggtgctcaccgtgataggaatttcactctgcatcacaagctcagtgagtaagacccaggggcaacagtctaccctttgagtgggccgaacccacttccagctctgctgcctccaggaagcccctgggccatgaagtgctggcagtgagcggatggacctagcacttcccctctctggccttagcttcctcctctcttatggggataacagctacctcatggatcacaata

SEQ ID NO: 3331 - DNA, 1032 bp, Homo sapiens
ttgcagtgagctgagatcatgccactgcactccagtccctgggcaacagagcgagactctgtctcaaaaacagaaagaaagaaataatatgcacttatttaaagagtttgaaaacctctggcctcatgcattcactgctgtggaagaatgctgaacccttgaccagctgactacaggtagccattcaccaagttttaatcaaattgcagttttaggttctttttatctcattaccctttctgcctgtatcctttaatatccatcctttctaataaccagaacagtaataactatttatgaagcatccacttcagccagggactatccatgcattatcacagttcatcttacgacaacccaacaaaagaaatggtatactgtgacccctattttacatgcggggaaacaggttgagtgtttgaatatcctaaccaagattgcaagggaaactcagatctgcctcactccaatgccctcactttccactgcaccgtgctgcatccttcttccatctactgttgcaaaccagaccttagcagccatgacactccttgtaaggtatgtaaacttaagaaggcagctctgggcagggcacagtggctcaggcctataattccagcacttttggaggctgaggtgggcagataacctgagcctagagatcaccctaggcaacaacaacaacaaaaatacgaaaattaactgggcttggtggtgtgtgcctgtagtcctagctgctcaggaggctgaggtgggaggatcgcttgagctcaggaggttgaggctgcagtgagccttgacctcaccactgcactccagcctgagcaacagagagagaccctgtctcaaaacaacaacaacaaaaacgaaaaacaaccaaaaaagaaagcagctctttgtaagtggggttgtatcaatttcttagatgggtaatgcctccatgctggggcctcccaggggatgaggagcaggacagtttgctcctttgcctcacacaggcgagccctgggagtgctgggaaagaatttgctg

SEQ ID NO: 3332 - DNA, 2023 bp, Homo sapiens
gctgggggagggggagcccctgccctcattgctattccctctgccctgcaggagaatggccacgtgaaaagcaatggagacttatcccccaagggtgaaggggagtcgccccctgtgaacggaacagatgaggcagccggggccactggcgatgccatcgagccagcaccccctagccagggtgctgaggccaagggggaggtcccccccaaggagacccccaagaagaagaagaaattctctttcaagaagcctttcaaattgagcggcctgtccttcaagagaaatcggaaggagggtgggggtgattcttctgcctcctcacccacagaggaagagcaggagcagggggagatcggtgcctgcagcgacgagggcactgctcaggaagggaaggccgcagccacccctgagagccaggaaccccaggccaagggggcagaggctagtgcagcctcagaagaagaggcagggccccaggctacagagccatccactccctcggggccggagagtggccctacaccagccagcgctgagcagaatgagtagctaggtaggggcaggtgggtgatctctaagctgcaaaaactgtgctgtccttgtgaggtcactgcctggacctggtgccctggctgccttcctgtgcccagaaaggaaggggctattgcctcctcccagccacgttccctttcctcctctccctcctgtggattctcccatcagccatctggttctcctcttaaggccagttgaagatggtcccttacagcttcccaagttaggttagtgatgtgaaatgctcctgtccctggccctacctccttccctgtccccacccctgcataaggcagttgttggttttcttccccaattcttttccaagtaggttttgtttaccctactccccaaatccctgagccagaagtggggtgcttatactcccaaaccttgagtgtccagccttcccctgttgtttttagtctcttgtgctgtgcctagtggcacctgggctggggaggacactgccccgtctaggtttttataaatgtcttactcaagttcaaacctccagcctgtgaatcaactgtgtctcttttttgacttggtaagcaagtattaggctttggggtggggggaggtctgtaatgtgaaacaacttcttgtctttttttctcccactgttgtaaataacttttaatggccaaaccccagatttgtactttttttttttttctaactgctaaaaccattctcttccacctggttttactgtaacatttggaaaaggaataaatgtcgtccctttagtggtgctttaatgagtggtcttctgggggtagggtgagaagattggtggaaagtagtttacctcaaacctcaagggaggagttaaggcaggcaggtaagtttatggggttttcttgttcagggggttgccccaatactcatggacaccagaacggcagggaagtagagttgaaaccaacccagggacacataggaaacaagctcaggaggatatagaaatgtaccattttattacaaagaggctcacaaaaatgaaaatagtatctcaaaaaggaaactagactagcaacctccacctgcagaattaggagaagacagacagagggcaggcagtgtttcttggctcacttgaggccagtgggaaggtacgaaaacagaaccaatctaaaaatggctgatgttactttaggagcctgaaaaaaacaggagatccttgaagacccagccaccccttctagaatgttcaataagggcacctttccaaagctactaagcaggcacttggcatttcaggagtttgtcttatggttgcataaaagtatccctttcacccagacctggcaccctttatggttcaaagttaagaacgggaagaatgggtggcaaggtggctcctggaagagctcacccagcacagctgccctgagctcggggccttggtttctgtccctggggatatttatatttaataaatttttatataaatacacag

SEQ ID NO: 3333 - DNA, 1030 bp, Homo sapiens
atccttcacctcatgccactttcatcttgcattctgggggggtgtaatgttcctggactcccagaacccctctgttccccactgacccactccagagctgccatcgggcttgcttggttccaggccagcgggagcagggaatgatcgaatgatcgttctaacaaacaggaggaagcacccacccacctcagccagtcctccctccttccctccaaaggggccccggctcaccttctggccctcccatcttgtctataactttaattgccacttttctttggtgttttttggaaaatgcttctttgacttttgagtaggtcccttccccaatggtcttgcccagctggtacccattggagagcagaaagtcctccatgctgtctagcgccgccttcctatcaccctctcagctcatgctgcctctgagaggcagctctactccaccatcgcccttggcctgctccttttctccccaaggacttcatccgcagccgcccccagcgttagaacattctctgtctggacacagcggcgggtggtggggagggacagggccagacatttttaaactccggtgcaattgtgatgtagatgctgtgtgacccttggccaaaatgggcagtgcccctacctgccctcactaccaccaccaaactcagcccggattaagtcaccgccgagcccgcccccgtgccaggcattgagttgtagtcccgcctgggagggcgctccgccgcgtctgtgtggaccgggaatgcgcggctcctcggcgtggacgccgcctcgcggcgggttgccctggcctgctgcgcccccctcgggtgtccggggtctgcgcgaccccgtctccaggcgccatggccagaggcctccagtccccgattctggcccgcgctgagtgccaggggcggcagggggcaccgttgggggttctccagtgggaggaacgtgctctgtgaggtcagcgcgccgcggcccgggtcacaatgctgccctcctcgacgcccgggcccgggcacgccacagagac

SEQ ID NO: 3334 - DNA, 1032 bp, Homo sapiens
aaggactgaggctgacttggttcctgtaggcagccatcaccttgtggtgtctggtgttggttgggggaagtgtttcctttaggtctgaggtaatcagagcatcaggcccacccctcaggcagagggcagctctgcccctcagacacattccttaagactaggggttcactctcagtgggacctcagagtatggcctggggtaggggatgggaggtggctctgctcagcaagtggaggttaggtctgggcctgactcaggagtaactatgtgtttgtgatttccattaccccctcccatttgcagctggaagatgtagagtgggaggactgggagtgagggagccagagggagcagctcccccacccatggcatctctcgcctccctcgctcgtctcagcccagccctggaagactgagaatgttcccccaaatctcctctgccaaccagagctctgggcacagattctggtggctccctgctggccctcttgggcctctgctcacacctgggaaggggctctctaaatcccggccagaaactctgacttgtgccaacaataggatgacccaagggagaggaaacctatcctcctcaccagaagagcctgtgtttttctgctgaacacccactgttcctgaggactcctgctgggaagtcccaagggatagttctagcccttctgcctgtgtagacagaagctaaaccaccagtctctctcggaggaagctgagacaacatactctgtccatacataagcaggcagggagggccatgccacctacccttggctaaacagggacagtgaacacattttggttcctatcccagtgggtaagaggcacttatctctgggaaatttgcctctcttgggactctccccctcccaggcattttccattcctggaaaggctcctttggggttcagaatccagagaccaaaccctgacccacctccttcctttcctccagcccacgctggtctgtccccatgccttcccagggcttcttcatgtcggatgcacccaagtcc

SEQ ID NO: 3335 - DNA, 1039 bp, Homo sapiens
caagccctccagcctcaccccagagaggatcactgatgtcagcagcagcctgaggctgaatccaggttgaaagaagaataacttgaaaaaatatatttccacacacagaattttgtttttcttccaagttggttaagacatatattttgtttcttttttttttttttttttgagacggagtctcgctctgtagcccaggctgaagcgcagtggtgtgagctcggcttactgcaagctccacctcccgggttcacgccattctcctacctcagcctcccgagtagctgggactataggcacccgccaccatgcccggctaatttttgtatctttagtagagacggggtttcactgtgttagctaggatggtcttgatctcctgaccttgtgatccgcccaccttggcctcccaaggtactgcgattacaggcatgagctaccatgcccggccacaagacatagattttctatatgcacatcaagggaggtgctggtttaggttgctataggacagagctatcctgtattccagttggtttttgtagagaaacaattagacttctctagatagagccctgatttttctctcacgctttcagttttttaaaagcactaatgatatttcctgttttctcataagaaaaagtcaatactatgccttacaaagagacctttccttctaatatagaattttatttgaaagtgagtacatgtttataactagagaataaaaggagaatttttgaaaaatttctttattgttgtttttgtttaactacttaagctattcgtccttttttttgagacagggtcttgctctgtcccccaggctggaatgcagtggtgcaatcatagcttactgtggcctcgaactcctgggctcgagcagtccttccaactcagcttcccaaattgctggaactacaggaatgcaccaccatacctggctaatttttaaatttttttgtagagacagggtctcactatgttgtcttgaactggtcttgaactcctgggctcaagtgatccaccttggccc

SEQ ID NO: 3336 - DNA, 1889 bp, Homo sapiens
tacttatcaagtgcctccagtgtttcagacttttttttatgcactcgaggtagaaatgtaataggataagcgaagtctctgcccttactgagtttaaaatgtagtgggagaagtgagccagacaaacatgtaaacacataatataatttcagatagtgaacagtgccatcaggataaggtaagagtggttggaggaggggagggggtagtcagaaaatatatgtttattaacccattctcacgctgctgataaagacatacccgagactgggtaatttataaaggaaaggggcttaattgattcatagttcagcatggctggggagacctcaggaaacttacaatcatggtggagggggaagcaaacccttccttcttcacattgtggcaggaagagaagtgagtgctgagcgaagggggaagccccttagaaaaccatcagatctcctgaaaactcacgcactatcactagaacagcatggtggaaaccgcccccgtgattcaatgatctccacctgctccctccctcccacaacacgtggagattatgagcactacagttcaagatgagatttgggtggggacacagccaaaatatatcagtatgtttgagaaagtgatatttgagcagaggcaagagagatgaggagtgagcagaaataaggaagaactttctaggtgaagaaacaggtgtaaaggccctgaaatgaggtaagttcagggaacagcaagctggagctgagagtgaaggtgtaatagtaggagacaaggttgtagagatagggccacagcctctttggtaaaatttggtaaggggagtataggatcaagtactcacgtatgggagttggccttctgatgggagccagggacaagccattcattgcaatcaggctaaggtgagtacagatacagcatgatggtagatttggtggtaggaaaatgagtcagttcttactgagttgctcttactttctctaggaagcacagttgattgagagtgagaatgagggaggaatgatcactagaggagaagagaaagaattgtctcagagagtgaaaaagggaatttattggtaattgtaagattttactgcgagtactgaattcctgtttgagatgtgtggacatacactcagggtgataccagttagcatggtgtgtgctgccataagcagacagttgaacttgaattaggttgtggttttgccaggtgattgtggcagaggagaaaaagcagtggcagtgccacttatatccttctgtgaaatcttcctttttttgtgtggtgtagagctagcaaatgccatttacctattgcctggtacattttatggtgcacagaattattgtagattccttttggagctggaaagaacctaagagaacatctaattctgtggttttaaactggggcagggttgggcaatgtcatgtatcagagacgtgtggagagcttttgacctgggaaactatatcttattcttcagctagacttggaaagagaagagtcccaagaggtgaagtgagtgttgtcaactgaggaaaagagaataagttgaattcctagggcctaggtcagagtataaggaggtggttttgatttcagaaagagccctgagccaaatagtagaaaagcttgtgttctttgattcaacccattttctttttttttttttaatcatcctcaaaagttttttacttttttttctttccaacttttatttttaggttcatggggtacatatacgagtttgttacatgggtaaattgcatgttgtgggggtttagtgtacagataattttgtcacctaggtaatcagcataatacctgataggcagtttttcaatcctcaccctcccccaactctcaaatagacccggtgtct

SEQ ID NO: 3337 - DNA, 1049 bp, Homo sapiens
catgttttaatttgtattctcaaggtggggagaagaattttcattgtccaagcaccctcaggtatgttttaaaatccagccattaagaacatgaaaaatttccttaccataaagttcatatatgtgacaatcaacttcagttagttctaactggtgtaaagtgataagtttttctcaagcttctctgacctgtctggatatattttgttaaaatactgtgattatacacacctgatttagtggatgaggcgtcagcattgggttctagggtcaagtttgttcagattattgtggaatttgaaattctctttgcctttttgacctttatttcttctcctataataaagatgttggactagatgttctctattgtgccttctactttctgtgtgtctctagattctgtatttgccgacctgtatggcctcactctatggtaggaaaatctattggaacaggagttggcagtttttttctgtaaaatggacagataataaatgttttaagatttgtgggcccagaatgacagaagagcagctactcagtgcttctgttgtagcaccaaagtagccatagataatacttaaatgaatgagttcacttgtattctagtaaaacttatttatgcccattgaaatttgaatttcttatcattttcaaatgtaacaaaatgtcattgttttgatttttttccccaaccatttaaaaatgtaaaaatcagggcaggcatggtggctcagacctgtaatcccagcactttgggaggccaaggcaggcagatcgctttaggtcaggagtttgagaccagcctggccaacatagtgaaacctagcctctactaaaaatacaaaaattagctgggcgtggtggcacgcgcctgtaatcctagctgctcaggaggctgaggcaggagaatcactttaacctgggtggcagaggttgcagtgagccgagatcatgccactgcactccagcctgggtgacagagcgagactggtctcaaaaaaataaaataaaagtaaataaataaagatgtaaaaatcactctt

SEQ ID NO: 3338 - DNA, 1051 bp, Homo sapiens
tccttttgttccatgaaatttagtagccctgtcacattggcctaagttaaacaactgcagcttttagttttccttaacatgaaaaaaggaaaagccaaatggagattgcttgctgctgtcatcctttagaagggaacacatctgcaatgtcattgttatttaatagagatggcactctctgcttttataattcctccattctctgctttaccagcttcactacttatactcattctatcaactgagtcactcatcctacagaattcaagtgcctaccagtagtttattaggctcagagtgattgaaatcctatgtcgtcctcctccaccatatatctgttttcccccagcgttaaacaacagcttttattgaagtggcagtgtacagcagcggcagaggtactgcccctgtgtgcccagagtagttctctaccatatatcttgcagagaaattcttttgactcatatttttagatcttacatttttctagaatacctcccttgaatatgtaagaaaaaacttatttccttgaaatatatttaatactcagcttgggcaacatggcgaaactccctgtctcaaaaaaaacaaaaaaacaataattatctgggcgcagtggcacatgcctgtggtcccagctactccagaggctgaggtgggaggattgcttgagctcgggaggtgaaggttgcagtgagccaagatcatgccatggcactccagactgggcaacagagtgaaaccttgtctcaaacaaacaaacaaaaaaaactgcatacatatatatctcatttgttgtcctattttagctaacattttaattttctttgcttcacagaagttgtgtgctattgttttctagaaaaggttgtaaaggccaggcgcggtggcttacgcctgtaatcccagcactttgggaagccgaggcaggtggatcacctgaggtcaggagttcgagaccagtctgaccaataaggtgaaaccccgtctctactaaaaatacaaaaaaaattgattggccgggcgtggtggcaggcgcctgtagtcccag

SEQ ID NO: 3339 - DNA, 1024 bp, Homo sapiens
agcagtgggagtggagaaggaacaaagaaatgtataactggttatgatgaattaattgtaaacatcactgcacttggaccagcctagccacaattatttgaaaaagctattaaaatgctcctgtattttccttctgcatatttgtgaggttggattttatttatgcactccaagtaaatgactatattgccagacatttaaaatatttgaaaaaatgtaaaacagtgccagtcttcactaaattttttttaattaataacttttatttttttttagagttgggaccttactctgttgcccacactggaatgcagctcactgcactcttagctcactgcagcccaagctcctagggtcaggcagtcctccccatctcagcctcccaagtagctgggactacaggcatgcactaccacgcctggttttttaaaaactttttaagagatggagtcacactatgttgtccaggctagtcttgaactcctgacctcatgctgtcctcctgcctcagcctcttcagttgctggggttacaggaatgagccaccatgaccagttaaatcttttaacaatatagttactttttcataaaaatatgcaaggccaggatggtggtaagcacttgagcccaggaatactaggatatattgtactatggtcgtgcctgtgactagccactgcactccagcctgggcaacatagggaaactccatcttttttttttttattttttttgggggagtagagtcttgctctgttgcccaggctggagtgcagtggcatgatcttggctcactgcaacctctacctcccaggtccaagcagctcttctgcctcagcctcccgagtatctgggactacaggcacatgctaccacaccgggctaatttttgtatttttagtagagatggagtttcaccatgttggccaggctggtctcgaattcctgacctcaagtgatccacctacctcagcctcccaaagtattgggattacaggtgtaaaccaatgcgcctggccaggaa

SEQ ID NO: 3340 - DNA, 1055 bp, Homo sapiens
aaaaaaaaaaaaaaaaaaaaaaaacttgtgtaattgagttgtgagctgaactaggtccgtttttcatggaacactttttcttgaaagaatgaaagacatgcttttgttattcagacttcagtatttggcttgctctattgcccaggctggagagcagtggcacgatctcggcttactgcaacctccaccttctaggttcaagggattcttctgcctcggcctcccgattagctgggattacaggccccaccaccatgcccagctaatttttttttttttgtatttttagtagagacagggtttcaccgtgttggccaggctggtcttgaactcctgacctcaggtgatcggcccacctcggcctcccaaagtgttgggattacaggtgtgggcctccacacccttgaaagtgaacagtgatctgtcacatcaaggaaaatagctgacaatatttgttgataatggtaaaattcaagtccagttaaaattttcaggcctgatgagcttaatctcagcactttgggaggccaagggggacagatggcttgagcccataagttcgagaccagcctgggcaacgtggcaaaaccctgtctcttacaaaacattaactaggtgtggtggtgcgtgtctgtagtccttaccacttgggagacttgaggcagaagtatcacttggaccttggaggtctaagctgtagtgagctgtgattgtgccactgcacttcagcctggatgacggagtgagactccgtctcaaaaaagaaaacaaaaagattcattctaagtgcataatagatcaatggattttaattttacaatatggtaagttcattgtgatggttacagaatccacattgcaactaacgttgaaaaaactaccatgttttggccggtgcggtggctcatgcctgtaatcccagcactttgggaggccgagaggggtggattgcctgaggtcaggagttcgagaccagtctgactaacatggtgaaaccccgtctctactaaaaatacaaaaaaataattagccaggcgtggtggcgtgcgcctgta

SEQ ID NO: 3341 - DNA, 1077 bp, Homo sapiens
gcctccccgagccgacttccagcgattgcgcgcgccggcgttgacgggactgcgcccggtcagggtcacgtgagagaggtttggtccgcacactcccgcggcaagagggcagccattttcttgaaggctattaagcttacgaccctttcagagtactgagatgaaaaatctagaatgccttcgggtctagttatcaattttgggggtgaagcgggggaaagaacctcgccagtcagacccagacgggtttcattcaaggtgcccttcaacgtttttccttagtctttggaaagaactagtaatgaaggaatcgcagaagatggggttttggctttttaaatatgcgatccaagcggcagggtagggactaaagtaggtcaacagccaactccgagaaaggagtgtggtcctttaagggtgtgcgccaaggggcggagtctagagcggaagtagtaactccgggccgaagtccggtggatgaagggcggaagtagagtgtctaatcctgcagtcatggcgcaggaagaggaagatgttagagattacaatttgactgaagaacagaaggcgatcaaggccaagtatccgccagtcaataggaagtacgagtgtgagtaggtggcttacttctctctttacatgtaagcacacaggcatcccctctccttacccgcggcttcctgctgctctttctactgtgccccatgggtacttcaggcatgatcccatttgtgccggctgttgtagtcgcgttcgtacttctcctggggatgctgaaggaaaaagccacctggtttaatagtcgcgaaacctggcctccctcatttacagtctcttgaacttcttccacatgtgcctaatcacatttatcttcgtaaattctaaagataaccatattttcaggcgtttgcagggttgttacccccatgtatttcccaacggtgagattagagtgtgcgaggttagaggactcggaaagctaattaggggatttctaacttgatgtttcacctcgatcatattagcaaaaaacctggttttgccatttatgattgtgatttttaaaaatgattattt

SEQ ID NO: 3342 - DNA, 1013 bp, Homo sapiens
ttaaagtatgaatgatgttgggatgtaatttaattgtccatatattcgttaccaggctaggttctgagggaatactggagtgggcagaggtgttagaagtaagggtgggggcagacatgttgaactagaggaatacaacaaaatagatataagccacaagccttcccctgaagcagctgagatgctagctgggtatacaatagtgccactcatccaatttaagaataataccatacaataaagttcagaatatatggcaaaaactacaaatagtcatgcatgtgggctaggaatagtcatgcatgtgagctaggaatgctgtcaatgagtttgttgacatggatccttttccttatagagtttgtgatcctacgagatgagaaatggggtggaaacaaaacctacacagcttacgtggacctggaaaaggactttgctgctgaggtaacatgaaaggaaaaggaatcctttcatgaagatctgtattttgttattttttgctgactgttagaacttgtttagaacaacttgttctgtgtaaaagtgagctgcctgctatttttgctctacttttggtaatctcactagtgtccattttccttcaaaattgcagttttggttaaagtttcttgtcagttagcttttctgacttaggaattttgttaatacagatggatttctatccctcggggccctttccttacctggcagggactctgtctcacctcttctcaggaaacatttcttatcagtaaatgtctgtaatcttatacacacgagtggtccctttaggatgtacaaaagcagtactcattcagtagaaaccatacttcttcaagtacccatacaaccattctgtttttcactttctgtattcaataaattacatgagatactaaaaaaaaaaaaaaaaaagaaaatgggctgggtgcagcagctcacacctgtaatcccagcactttgggaggccgaggtgggtggatcacctgaggtcaggagttcgagaccagcct

SEQ ID NO: 3343 - DNA, 1023 bp, Homo sapiens
cccagctactagggaggctgaggcaggagaattgcttgaacccaggaggcagaggttgcagtgagccaagatcacactgttgcactccagcctgggcaacaagagcgagactccctctcaaaaaaaaaagggccaggcacagtggctcacacctgtaatcccagcactttgggaggccaaggcgggtggatcacctgaggtcaggagttccagaccagcctggccaacatggtgaaaccccttctctactaaatatataaaaattcagctgggtgtggtggcatgcacctgtaatcccagctactcgggaggctgagacaggagaattgcttgaacccaggagaaagaggttgcactgagtcaagattgcatcactgcactccagcctgggccacagagtgagactccgtcttaaaaaaaaaaaaaaaaaatgcctggcccaatcccaagagattttgattcattaggtttgggtggaacccagtaaaaggtgattcatatactgtcacatgtgagctagaatttggtaaccactgaactcaaatgaccatgaactcactctttccaaataagaaacaaagcctattacctaaaaaggaaaaatggctgtagataatatataatacttagtgtggctgattgctgtgaacaagtatcctcacacattgtcgacagcaatgttgattaggatacctttcaaaaaacaattttgaacctagcaattttcggcatcttaaggaaatgattctagagaagggaaaagactgcaaagatgtccaatgtagcattatatataatttgtaaaaattaggatagaatctaacagtttggagtttgctaaattatgtttccactaataattgggaatataatatggcataaaaactataagtaggccacacattgtggttcacacctgtaatcctagcactttgggaagccaaggtgggcagataggttgagtccaggagttcaagaccagccttggcaacatgataaaatcccatctctataaaaaatttt

SEQ ID NO: 3344 - DNA, 1027 bp, Homo sapiens
ctaaccttaggtgatccacccacctcagcctcccaaagtgctgggattacaggtgtgagccaccatgcccggcttgccctgttgttttatgtatttccagcttttattgttgtttatggtgacataagtccaatagcctcacaatgtaatactgatagaaaagcagtagggaaaaaaacttcgcttgaattacagtcactgtcaaagctacatatttagtataaaaagattggaagcaatataacaactactcagttgctggccaagtcagatgagatcagggcactgaggaggaacttagactaatatcggcttttgtgtgtttctctaatctctcagtacctccctgcacttggctattcaaaacgggtccatctgatgaatcctatggttccaggattaacaggcagcaaaatgagctcttcagaagaggtaagttgccagctgagacttgaatttagaaatcttcagcctcaatggagagattgaggactgaaaagaacagtgacctggctaactagaattctccaatatttgagttagaaggagccttacaccattcaattagtttagtggttcttgagtatcaaaggatccagagcagtcctgatgagatctaatcataacttaatggtttttgctgctgataaaaaaataaaagcaaaagtaatgtctttgttcatacgactgtgatgaaattcagccttattaatgagagcactatggttgcatttcactaattagcattttgattcctagggtaatacttgatatcactaatattatgatatcttttaatatttaagagtccctcttgagctcgtgtacttgagggaaagttcactttggttctgatcattagaacgtggaaatccaaagatgtgaaaggttgagttctgggttcccaaacatggcttaccttcagaatcatctagggaatttaaaaaaaaaaaaaaaagtgttgattagaccttgtccatagagattctgataaagtagttctgggaggaacttaggaatctgtatt

SEQ ID NO: 3345 - DNA, 2908 bp, Homo sapiens
ccatgttggccaggttggtctccatctcctgacctcgtaacccacctgcctcggcctcccaaagtgctgggattacaggcatgagtcaccgcacccagcctcaaaactcatttttgacataaattttaaatcccttggctgggcgcaatgggtcactcctgtaatcccagcactttgggaggccaagacaggcagatcacctgaggtcagaagcttgagaccagcctggccaacatgatgaaaccccgtctctagtaaaaatacaaaaattagccagacgcagtggtgtgcacctataatcccagctattcaagaggctgacacaggagaattgtttgagcctgggaggcagagattgcagtaaactgagatcgcaccattgcactccaggctgggcaacagagagagaccttgtctcaaaaataaaataaaataaatcttaaagactttactaccattttttttttaatttttctgagactgagtctccctctatcacccaggctgaagggcagcggcatgatctcggctcactgcaacatccgtctccctggttcaagggattctcgtgccccagcctactgagtagctgggattacaggtgcccgccaccacgcccggctaatttttgtatttttagtagagatggggtttcaccatgttggccaggctggtcttgaactcctgacctcaagctgtccacccaccttggcctcccaaagttctgggattacaggcgtaagccactgcgcccagcctgtaattgttttttaagtcacttttcatctatatctacccctacttcccctttctgatactcttgattcttgtctgcagttctttgcttctgtgtgagttcattttccttcaacctaaagagcccccacttagtatgtgtttgtagtgcagttctttcagtaatgagttctttcagctttcttttatctgaaaacatctttcaatttctttcactgggtatgaaattggaagtttgcaattatttttcttttggcacttttaaaggatcattgcattgccttctggcttccatagtttcgactgaaaagtcacctctaagtttattgtttctcctttacagataatatgtcttttctctgcttttaagattttttcttgtttctgattttcagcaattttactatgatgtttttgttgttgttttctttgagacagggtcttgcttgcattgcccaggctggagtgattgatcttggctcactgcagccttgacttcctgggctcagatgatcctcccacctcagcctcccaagtagctgggactatgggcatgtgccaccacacctggctaatttttgtatttttttttggagatggaatttcaccatgttggccaagctagtctcaaactcctgagctcaaacgctttgcctgccttggcctcccaaattgctaggattacaggtgtgaactgctgtgcctgaccagctatgatgttttcagctatagttttctttgtatttatcctgcttagattttgctgagcttcttgaatcagtggatttgttttcatcaaatttgggaaattgtctgccataatttcctcaaatactgcttctctcttattctctttctcctctagggactttataaaactcatgtctcatattctgttctgctgttttcctttctttgttccctctgtgctttactttggatatgttctattgaactttcttcaagtttatcaatcgtgtcttctgttaaatccagtattgtattgtgacattttagaacttccatttgattctttttatagattccaattgtcttttacaattctctttcatccattttgtctgccttttcttatttcctttttggtttgtttttcctgcctattctgcctatgtactcttattttcttttatttatttatttatttatttttatttttatttttttttgagatggagtctcgctttgtcacccaggctagagtgcagtggcgcaatctcagctcactgcaagctccgcctcctgggttcatgccattctcctgcctcagcctcccgagtaactgggactacaggcacccaccaccacgcccagctaattttttatatttttagtagagacggggtttcaccgtgttagccaggatggtctcgatctcctgacgcctgcctcggcctcccaaagtgctgggattacaggcatgagccaccatgccctgcttattttctttaacctaccaatcacagttattttggcatcatggtctatttattgcaatatctggattgtttctgaatctgcttctattggctattttaactgtcagccacttttctctgcttcccatttctagtatttttttgtatgtgtgtatcaaagggattatagatgcattgtagaccctccggattgtgtttgtaggatgctatgttttctgtagattgctaaattactgacttatcacctgggttctgtcaggggttggttttaggctttgttagaacgtctacttcagcttagcctttactcctgtggtgtggtccttgttcctagagcatggcctttctagagactcaaactgaaatatcatggtgttcacaaagccttctctactttgattggagctaaacttccatctctgtctccccaatactgtgcagcctccaaaatctctgcccaggtctccagcctcccagaacctgttctctgccagacttcctggtatctcactatgtgcatacacagctatgagtcagccaagaaatcagtggggaattttgacataggctgaggaacccatcccaatccctagcctcctccagccctgaactccaatagctgtttcctctgcttagtctttcgctgtctgcttggtctctttttatcagcacctggtttgcaaagaaatacc

SEQ ID NO: 3346 - DNA, 1095 bp, Homo sapiens
ggtctttacctacttttctaacctcatcagtcactacttcccacctcccttgaagttcgtacttttgcagactgaatcactcaaaatttccctaaacacttcacacctctgtgccttctcacattctatttcctctgcatggtgaaaaacatctatatgttgttcaaaaccaagcttagcccacaatctgattctaggaagacttctccacacccatcttactaaatagagataatttcttcttttatgtcaacactgttccttatatgaacatctgggttaacccttagcacgctgagttgaaatgatctgtttacatgtctctccccagctggataattgggcttcttgaagggagagtctgggtctgatttatctcaccatccacggagctggcagcaggcctggcatgtcataagtgacagtcactgttttatttatttattttaatttaattttattttttgagacagggcttcactctgtctcccaggctcgggtgcagtggcacgatcatggctcaccgcagccacgacctctctgggcttaggtgatcctcctacctcagcctcctgagtagctgggactatagatgcgcaccatcacacttggctaatttctttttgtttgtttgtttgttttttatttttggagagacacccgggctcaagtgatctttccacctcagcctcccaaagtgctgggattacaggcgtgagccatcgcacccagacagtcactgttttctagttcagtcttacctttttcccgaattctcacaggacttctttatgctacttatatttcatttgtcacaggccaccttattcagtagaatacctttggcatgactatggtttgttttcttcttctctccctccctgcaggattctgcatatcctgagggcagagactactcttatttttttatcccatgacatccacatagagtaatgttcaccgcaaacactcagcaactgtctttgcagcttttgaggccaagagggaagctgactgctgtttattttcttcttggctttaccttctgaaaaatctagtaatttcctaaagtttctgatttctcagacccatata

SEQ ID NO: 3347 - DNA, 1045 bp, Homo sapiens
catctgcactgagaacatggctggacctccttgatggctctgagcctggatctccactgacacatgctgttgttttccttgtcacatggtaaaggatgagcaaggtgaggcactgacattaaactaactcttctgcttccacaataggaggttctgggggaagagaagctgaaggagatactgaaggagcgggaacttaaaatttactggggaacggcaaccacgggcaaaccacatgtggcttactttgtgcccatgtcaaagattgcagacttcttaaaggcagggtgtgaggtaagaactaatgctataagcccttggggaatgacccaagggagacccaagagagacttaacaaggacagggtggggctggaggagacaggttggaggtaattggacaaattcacattttggtggccccttatctcttgtccaggtaacaattctgtttgcggacctccacgcatacctggataacatgaaagccccatgggaacttctagaactccgagtcagttactatgagaatgtgatcaaagcaatgctggagagcattggtgtgcccttggagaagctcaagttcatcaaaggcactgattaccagctcagcaagtaagtgcttgatcatccaccctccttgtggctctggtgcttctagctaattacaggcctgtggagtccaggcattctttacatttagattagaagctgtctggcgtgacctattaagaaccatttaaaactttgtccattaaaacctcattgtccttgtaattcatccatcagaagtgtactgactagtaaatgccttaatactgtcctatttgctggaaatataaacgtaaccaaaacaaagtccttggccttgcagaactcacagcatatgggagagtgatggtgaacaattcagcctccctttctcttccagcctcagcaaataataataaaagaaatgtgaaagaaaaatatttcacttatttctcaccgccccaacaattgttattgctttttatctttgtgagttttgttcatatttggaatgt

SEQ ID NO: 3348 - DNA, 1466 bp, Homo sapiens
agtgattctcctgcctcagcctcctgagtagctgggattacagacgtgcaccaccacgccgggctaatttttgtatttttagtagagacggggtttcaccatgctggccaggctggtctcaaattcctgacctcaagttatccgccaaattcggcgtcccaaagtgctgggattacagagtgagccacagtgcccggcctcactcaggttttaaaggctaagtaatgtgacatcttcttggatggtgagaaccctccaagtgtccacgttgtcaggggtgctcttgagcatgcgggatcagctgccaaaagacttggagcacaggagtttaacaagtcctggtaaaacatgattcaaaccagcagtctatcatggtttctgacagcctcccaaaaccgtaacttgaggaaacactacaacctcttatcggggtacactggcctgttagaatttttccaatactgtcataggacaaaaagaaatcattaaaggtttgtaaaaaggaaaatgagttttaaagaagtttttgagttttaaaagactgtctctggctaccttttagaacatggattggaggggccaagcgcagtggctcatgccggtaatcccaacactttgggaggcccacacgggcagatcacttgaggttgggagttcaagaccagcctggccaacatagtgaaaccccatctctactaaaaatacaaaaatttctctggcctggtggcgggcacctgtaattccagctatttgggagactgaagcaggagaatcgtttgaacccgggagcagaggttgcagtgactcaggattgcatcactgcactccagcttgggtgacagagcaagactccgtctcaaaaaaataaaaaagaacttggattggagggagtaagagtagatttgggagacctgttaggagaatgttacggtaatcctggtgtgatctgatagggcctggatttgggtggtgatgtagaggcagagagaaataggagggttgaagagcagttttggagtccttgaacaactctaaatgatggtaccatttactgtagtaggagtgaaactatcagtgaaaaagatggttggggagtgaagtaagaagtcaagagcatgagttttattttgaacacgttgagtttgaatgattgggttgataacaagaacacggttctgtgtatgggcgtaagcaggagatttgggagttactggctcatagtagtaattgaagcaactgaaggggatcagttaaggagactgtagagtaagaagacaaaagaccagagccccaaagattgctaatatttaatgactaggaaaaataagaacagttgcaaagaaagctaagcaggcagagacgaggaaaactaagaataaaataaaggagaccaaaagaggagaatgcttctgggagggagtgaggactaaaaaatactcactgaatttagcaacgtgaaggtcttc

SEQ ID NO: 3349 - DNA, 1022 bp, Homo sapiens
gcatgattttggcacactgcaacctcagcctcccgggttcaagtgattctcaagtctcagactcccaagtagctgggattacaggtgcatgccaccacacccggctaatttttgtatttttagtagagatggggttttgccattttggccaggctggtctagaactcctgactcaagtgattccccccacctcagcctcctaaagtgctgggattacaggcatgagccacctcgcccggccctcagattgcatttaaagagcttccagtgtcagacctctctcaccttagtcctgggcccagaggaaaaattgaaatcctcctttccctgaagaccagatgactttctgtttcctttcacagatgcacttttgtcttcctggccagtgttttactacaatgaggatggcaagtctggacaacagccagcttagaagattcttatctcttgggcactgcagccagacttcacacatttccctgcacctaggacaggaaatgctgttagtggactttggatttctggaagaatgttccctgaagggggcgtgtacttgtgtgaaaaagagaacttgttggaaaaagaggcagacagcctggagatctctgaaacgcaaattatcaactcaaaacttggaattctcttgaagcctcgagagaacaattcacttctttgataaaatcaaagaagtctgttggaggggcagtagtttatggctaaacctatatttcttatctgggttccacttactacagctgtgagatttgggcagtttactctgagtctgttttcacttagccaaaatggagatgatgatcctagttaaggggttgtgaagactgagatggtatactgaaaatgtttttggtaaaggcccatgttttttcctcctgcaggaagaagaagaaatgagttaaaggagattttagatatcatataagaaaggaagcctagacctctaggccagaggctatgaaaaatttaaatttattctaatccttagcgacactttagtagatgaa

SEQ ID NO: 3350 - DNA, 1108 bp, Homo sapiens
gcacctgaagctggagcagcaaagcaaaggctcaggcagtaggatggaagctgcttgaatgtgcagctgcaggctgctactgacccgtctgtgcatctcatgactctggttgtctcttatcaggggatcccgcccccacatgctggcatattcactgctgtgctttcttaaaaccaacacccctgtaaataagcagacagacataattggagactgacttgctgaaactgcagcttagccagtccagctgttctagttctgtgaaagcctttattttataggaagtgaatgagtcagatgggtttgactgtgaaacccattataaggaaatacttaactgtgcaacaaagtgatgttggagccaagaaaggcaatagttatgggctctgagacactattgggaaagtttgctgctccaagaggagggaagaggttggctcctgtatgtccttcagtctcattccctggaggtaatttgattgttaaatgtttgatttcctattatgtgcaaggcagggaaggtaaagtgtgtatgagttgtggtctctccttttgtggagttaacagacaagtgagagatgcataataataagtaggcagggcctgcgcacgcctgtaatcccagcaccttttttaggtgggtgatcacctgaggtttagagttcaagaccagcctggccaacatggtaaaaccccatctctactaaaaatacaaaaattagctgggtgtggtggtgggaacccataatcccagctacttgggaggctgaggcaggagaatcgcttgaacctgggaggcagaagttgcagtgagccaagatcgtgccactgcactccagcctgggtgacagagtgagactccctctaaaaacaaataataataaataagtaggcaggtgctgtgggagtacttagcaagaagtgaatggtttgctgggataatgaggggaagtgatagttcctttgttgttaaggactgagtataagtttgtctggtagagaaaggaaatttctagagagacagaatagcatgtgcaaagtcatggaagtataaaatgtataggtatttaaagaaagaaagaattcagagtgactatgatttcggatc

SEQ ID NO: 3351 - DNA, 1103 bp, Homo sapiens
cccggctaatttctttgtatttttagtagagatggggtttcaccatgttggctaggctggtctcgaactcctgacctcaggtgatcctcctgcctcggcctcccaaagtgctgggattacaggcgtgagccaccgctcccggccaaggtggggagtatctcttaatgagagtggggaggggatatttggccaaggagggaatgagaatattctgagggggcagcgcgtcggaggggtgtgtccacttggctagggacagacttagcattgcagaagaaggcgtgttctccctgacaaccaccgctgaaagttgggatggaggtgactggggaataggctctcgggtaccctgagcactatgtgttctgtgccacgctatcgggaggcactctgtcgttcttaccttgctgccttgggtagggtgaggggtagacagatatgttctttgtccagagtctcaatgggggcactgagaagaatgcccagaggttggtgtgataggagaaattgtgtttctgaacccctttgatcttgagttcttgatgacagtctttttaatgcaccatgtaggctgaattttaaagggcagtaaattaaaatatgcaatatctgcagagacataatacaccagattttgctatctgaagcattcagtggagaccttcctcgccctccccgcctttagaagtctaattgttactgtcagtatatcccatgaaggggttgcacgcaggaagaggggctcatttaagtagttgggagtcagacagccattacctgttctgtgaccttgggcagataattttattcttgtgtgtcatgttttggcgacaaaaagatgctggggagtccttgcagtgtgtaaacgtaatgctagtaaaaagttgtgtgatctttagcttcaaaggagttaaggacttttaattgtagcctatatatcaaggtggttttgaaatctccatgatgctgctggttgtctcctttcaaaaggagctgtcttagagtgtctaggagagtaagaagagttaacttctgtttttaattctgccaaacttgtttagaaatgggtgtgctatttaacctcactgagatggggtttctaa

SEQ ID NO: 3352 - DNA, 1030 bp, Homo sapiens
catttgttgaactcatattccatactgtgctttgctctgtgggcttcagattattacctcaggtttaaccaggttctaatcaagttggcaagaaggacactgtccacctgggggaccagcctcagagcccacagtccaatagagacactgctccaggtcttgctgtgtctgagggaagtggcctggccaccttcccaaattgctgaaggcctgacctttggcaggggcagccagagcctcgtgctgcctttggctgagagccgggccagaggggctgagccagagtggagtgatcagctgcatgggctgggcccctggggtctccagacaccctggctcaatgcctggacactgttcaaagctgctacagctagagctggggaccaagcaccaggacccctgagttccaggcccaactcggtggctgatgtgctgcgggagcttgggcaaatccctacccctccattggcctcagtttcctggaaggcagttgaataagattgctcctgtccgtgaccttcctccataatatcatctgtgacaggctggacatttgggataccacaaagtagtccctcctgcatggaacccaggccccaggttatttaggatctctccttggtaccaagcgctgctgggcactggggccacagagaggagctgagctgatccctgccttcaaatagctcccagttggttgtcagggggtgatgggggtggagggggggtgtggagcgagacagacaggaaaaccagccatcaacctagtgtgataagtgctgcactgcatagagagaaggaagtactgcactgcatagcgagaaggatgcccaaggagctgcagggctccatggagagagcaactgactgcctgcagtgtcctggatggcttccctataggaaggacgtggagctactacatcttccaggtagagaaggggatgtgcattcctattgagggaacaacctccacagtggtcgggagacagaaaagaccaggtgttgagaaaagggtgagctccatgtggca

SEQ ID NO: 3353 - DNA, 1026 bp, Homo sapiens
cctggcatgcaacagacattggataaatgttagttggatccagatatacacagaaagatatctgcttcctgccaggctggataactgttgaatggacacttgtccatagtctagaaagccagtgcttctaatccttaagccagatctttgactaccttttcagttgcttctttaacactctttgttgcttctctgtgtgtcctagtttaaattcatttcctctccagcaaaagtgagcttaaataatttctccaaactaaagctctcatgtttttggaagggctgcctttgcaagtgaggtttctgagaaatgactgttgttcccaaaacaagagggagctgggctggaagcaccactattcttctttaggcatcttgttacagagagaggcagggtcttcactgacatattaaatcctgttccctgaaccagcccctccctcttctgctccacttcctcacctgtgcagagtcattttcaggtgttagccttactgatttgcactgatctgtttgttccctgagctttttaaataccctgtgaaaattttctttcctcccttggtcatcatgcatctaattgtggggaaatgtttgtcaaaccaacctgcaaagcagcatggtgtagttgagaagaataaacagagaagactgggtgagctattgtttgtttgcttctttgggcctgggtttcctcatctaatctgcaaaccaagaatgcagactagtcctaccactcccggaagactgacgttgtgccaggtattatgcaaaggcttcatgtaaccctcgacttcacgtaaccctcacacagcaccctgtggagtcagaactgtccttcacttttataggtgaggaaaccagactcagagaggtgaagtggcattcctgaggtcatgcataagaggcagtcaggactgaaacacagtctctaacacttatccgtccccttgatcttgttgctgaagtgatttaattacttgcgtagctctgcacacaggaagggctgctctgaataagagctct

SEQ ID NO: 3354 - DNA, 1001 bp, Homo sapiens
tgttctctcttgtttcctctctatttcagcctagtatcagaaggccaggcgagactgcaacactgctcatcaccccgcggcgtgatccctgctcttaggtgctgggcagaggggaagggtggtcagggtgaggatggtgagggagggctggtgaggggctcagaggaatacttggaacaacagcagtgttattgtagtgtggcagtttcttttatacataggtgagagtttttaaagtgtaagggaaaaattaattttttaaaaaacaccatgcttggagggtgggggtagaaatagacacaatattatttctaaggaatcgggttttcatttactctggactggtgaaaatattttttaaagccagtgctctaagacctcagcttttatctcagaaccccatgggttccagaccaagagtacaggaaatcaaattgttgtcctgtctgtctatagcttggaacagggagctttgattactgactccggttccacacactgtaagatcaaaaaaccatctccacatttgaaagagatgtaaggtgtattcatagggatggtggctcaacaaatcaagcaaactggaatcaaggggagggggaagggaatgaaatggaaagggaggctgattcccttcccctgacttaccactaatttactaggctacctactttcatgagtaacctctcacagctacccagcacatgccacaatcctatgctcttgccttcttttatctgcactgtgtgaagggactcttttaaataaatgagcaagtgtcctaagctatgtcatccaaagattgtcctttccattctcaaatcctgtgactgggatcactcaacagcactgtgatgtattattttcaatgaggtgcctttcttaactgaccaaatgctgccttgtttggcccctaaatcaataaaatatgttaaaatttgtatcccctgttgtggcattttttttagataatctaagctagaaaaatgacattgaattct

SEQ ID NO: 3355 - DNA, 1039 bp, Homo sapiens
tggaataagaaaaccttgctaacagtcccagcctttcattgctgtcttcctgttctcagatcaccggggaacccttgatccgtcgatcagatgataatgaaaaggccttgaaaatccgcctgcaagcctaccacactcaaaccaccccactcatagagtactacaggaaacgggggatccactccgccatcgatgcatcccagacccccgatgtcgtgttcgcaagcatcctagcagccttctccaaagccacatgtaaagacttggttatgtttatctaatgttgggtccaagaaggaatttctttccatccctgtgaggcaatgggtgggaatgataggacaggcaaagagaagcttcctcaggctagcaaaaatatcatttgatgtattgattaaaaaagcacttgcttgatgtatctttggcgtgtgtgctactctcatctgtgtgtatgtgtgttgtgtgtgtgtgtgtgtgcatgcacatatgtgttcactctgctactttgtaagttttaggctaggttgctttaccagctgtttacttcttttttgttgttgttttgagacaaggtttcgctctgccaccctggctggagtgcagtggcgtgatcttggctcacggcaacctctgcctcctggggctcaagcaattatcccacctcagcctcctgagcagctgggactacaggtgcatgccacaacacctggctgatatttgtattttttgtagagacaggattttgccaagttgcccaggctggtcttgaactcctaggcttaagcaatccacccaccttggcctcctgaagtgccaggatcacagacgtgagccactacacccagcccagctgtttacttctttaaccatacttttgattttattttttgaccaaaatgaactaacccaggtaatcttccagggaccgcaattccagaacctcatagtatttcttccatttccagcagctgattagaagtccaggatcatgtgaagtcaggcagggtcacagttcctgatggcacattatggacagaga

SEQ ID NO: 3356 - DNA, 1028 bp, Homo sapiens
cctgtttatgatccacatgatgtggtggagatttctaactgaggttgggtgggagagaacagagagattctgaagaacaaacagcaggattgctgtaaagggtgaaagagagaagattcattccctccatttggaagtaggtggttagtgtgacttcctcacagagagaaggacccccgtcctcacagagcatgtcactgctgaaggtgtttttccaagtttacccaacagatgagtggcagggttagccctggaagcctgctttctgcctcgtagtccaaaatgttgatggttagaagaaaatgaggcaggaaccagtcagtttaatatggatctttttcttttctgtttttttttgttgttgtcattgttgttgtttttgagacagagtctcactctgttgcccaggttggtcacagatgtcggctgtttgaagatgctggggaatgcaccccggacctcacacaggatctttttcaagtctgagatgatatggacccattgtaacaatcttctgaattagctctgacctcacttctagtaattttgagtcattgttctgtttcttgaatatgaatagttggtggttgtggtttttgtttttaacttattcaatattggctctctcaaatcctaattatcctaccagttggctctccggtattatcttaatacctggtaccatcccaattttgtggatgagaaaacaagtgtttaaagtgtcgcactgaatgttgggcgcagtggttcatgcctgtgatcccagcatttggtagggacctaaacaggaggattacttgaggccaggagtttcagaccagcttgagcaacatagcaagacctcgtctctactataaagcaaaaaaaaagttagccaggtgtggcagtgtgcacctgcggtggtggtcccagctacttgggagtctgaggtgggaggcctgcttgagctagggaggtcgaggctgcactgagccatgattaggccactggactccagcctgggtgacaaagcaaaaccctatctcaaa

SEQ ID NO: 3357 - DNA, 1042 bp, Homo sapiens
agtgtttaagtcatgagggctccaccaccataaatggattaatgcccattataaaagggctcaaggctgtgagttcaacctcttgctctctcttgccctctccaccaccttccaccatgaaattatgcagcaagaaggcctccactagatgcagctcctcagtcttggacttcccagcctccagagccatgagccaattttctgttcattataacttacacagactcaggtattctgttgcagcagcacaaaatggactaagacaccagttcagaatgattatggaatttattccatagggagaagtagacagagaagtaaacaaacattatttgagcacctgttgtgtggcagacatcatactgaatgtttacaaacacatgattgcatttaatctttagataaccctgtaagacaggcattattagccccattttacaggtgagaaaattgggattaaatcctttgtctaaggttacccagctagtgagtatcagaacggaaacttcactctggtctgtctgactatgccagtgagatgggctctgagaataaggcatgaagctcagaacaaagaatgccaacaccaggccaagagcaaacagcaggagacctgagcagtggctggaacccaggttcagacaccagataaattggcagaaagggcaccaacccaaagtcaccactgcaaactctttgaaggcatcagtgaaatggagaccctgaagtaactagaaaccagaaacaaaaaagcagccttaggactttgcaaggtcagagctacttgcaaattaaggatggaaatgaatcgtaacagtggccacaatctattgtgcatccactatgctctaggcactaacagctaagaaccctagagaggttactatcatgcagccttgtattaagatttatataactctgggccaggcgcagtggctcatgcttgtaatcccagcactttgggaggctgaggcaggtggatcacctgaggtcaggaagttgagaccatcctggccaacatggtgaaaccctgtctctacta

SEQ ID NO: 3358 - DNA, 1024 bp, Homo sapiens
ctcacctctgcagcctcatccctccctcctcatctgctactacactccaccctgcagttccacagacattccaggagtgaggcttcctcacttttgcatactgttgtttcttttccatggacctctcttccccctccatgccttcttcacctgaagaacttctattaataattttttaggtcctaccttagaagtcaactcctcctccaggaggccccaactacctcctcatctacgaaggctcaggtgctactctccaatttgcctcatagcatctgatactgttcccaatcacagcattcattgtgccgtgttccacacatctgttttcagtgtgtcatgtgacccataccctcaccactgcccccccgcccaactacacccacatcttcctgactccgcaccctgaagacagggtctgtgtctcattcacctctgaatccctgacttagcacagtgcttgacgctgagcttgtgtccaataaatatacgttgaatgcacgacttaacagaaactgatgaacatcttgatgcataaacttttctcattctgaagattatctcctttgaacagattcccagaagcttggaattattgaatcaaagtggatgaatattgaacactttcaattcccatagctaagtagctttccaaatggctgtagcaatttacactcccaccagcaagtgtaagagcaccaatctcactgcattcttgcagcttggctattctcattatgccttttatttttaaaatcaagacagggtctacctctgccacccaggctggagtccagtggcatgatcatagcttactgtaacctgtaactcctgggctcaagcgatcctcctgcctcagcctcctgaatagctggaactacaggtgcataccatctggctaattttttttttttttttttttgagacagagtcttgctctgtcaccaggctggagtacagtggtgtgatctcagctcactgcaacctccgcctcccaagttcaagtgattctcctgcctcagcc

SEQ ID NO: 3359 - DNA, 1010 bp, Homo sapiens
cagaatggtgagaataaaccaccacaggccattgtgaaaccccaaatcctgacgcatgttatcgaagggtttgtgatccaggagggggcggagcctttcccggtacggactacttcttttccccttttttttttaagtatattttggatgtgtcttagaatatttttacatttccatgtaaaatttctgaaaatgtgaacaatttgctctttccttgctaacttcctcccccaaagaatatagagccatttctttctaggattatctttccaaggtccagaagaggggggtcagtgatcaggaataattgacaagacccttggttagaagtttcccacacaaactcaggtgtgtccctgcctgttgatgtgtgaacccttggttaaaagggagttcactgtgggatatttggtgagagatgatgggttttgggaaattagatttcattgagttttgaatgccaaaacctctgaatggcaaaacttcggccagttaggaacaaaaggaattgcacagaacagaattctccagatacgtgtatcagaaatgaatgtgaggaaacagggtcacaacctgaagcttgttttctggggacagagccttgaaaggggagttaatgagattgaggggcactcagaaaggtcacgatggaagcctaagactaacaagaaatatccacgagccacgaagatgggttattgaccaaagcacccagagctgcttctgtgcagtgtgcactggagacagtggtgctgccctgtgggtgtggaggagcccagagccagcggcacaccagcctctgttctgatgaaaagtatctggctgttggagaagacacctttctgggataccatctgccttttcctcattctttggttccatgagtggtttgattagtctgcagaagacgcggagcttgattaactgagatgggtgaactgctcctgtaaaatgccaaaagacacatagcttcttgtcttctttcccactggaggttgtccaaggccagt

SEQ ID NO: 3360 - DNA, 1028 bp, Homo sapiens
gattcagggatcctgcttagtcatccaggaatcccaatttgggaatcactcatctagatcatcctgtgcttcccaacccaaatgctccagcccacatgtgatatctggcctctgcctcagaaggtcccagaatacagtttacatgtcttgtcctcttttcccaagtgccctcgtgctatccacggctaatcagcgcagccctccctccacctgtgtggcccacccggaaaagtctaaagcactgggttctagtgtgggttctgccactgcctgtgtccaagctcagcctagtccagtgtgttgtgcctgcattacattatttaatcctcaccacagctatatgtaagacagatataagtaccccatttcatagatgaggaaacaggcctagagtaacttgcccagcattacaggatgggatttaagcctagagtctttttttgtgaccttttgtgaccttgggcaaatcacctcacctctgaggccaagttgcttcatctaggacatttaagatgttaaactcagggcctttctaactttaatcctctgggatctagtgccccgtgatccaaaacaatcactacccaccccctcccccaccccatccctaaattgggaggaaagcaatctgtttatctgagtcgagtaattcacagtaaagtgtgaatgactgtaagatgtatacttgcattttaaagaaattgttaaccaaatgaatctctaattgatggactctgtcagggtcccagatagagctcagcctgcctgttcccctccctcctccccgcaactccctctcagtcactttcctacccttcacttaccccgccctgggggaaggtgtcaacaaacaggtgtttgtgaaatctcttgccttcctcactttcagtggcattaatttctttgggggcccaaatataaccaaagaaattgtaaagcgtggccccagatctttccatgaggactgggcactctgtcctcagcttaccgcactgcagtacggcctgttgcttggaccaggtatgtgc

SEQ ID NO: 3361 - DNA, 1043 bp, Homo sapiens
gtggttctgatttgcagctggaggagagagtcactgaaggtttaacatttaactttagtttaaagaccttttggtgcctatgataagtgcaaaaagttgactttttttttactttgaaaactggctttctgttgctgttcccctttttcctttacttttttttttcttttgctgctataaagacttgatggtgttcttggattatttggacatcagagttcacttgagtcaaaagatctgctttttaatcccagttttgccactttgtaactgtataagtttgagcaagttactcatcagtgtccttttctgtaaaatatggtttctgttatgtattccaaggctatgaggataaaagtgcctgactcaaaaattttctgaaatttattataggacaggagtggaaatagagttatccattgccctccccaacccccaggatacatgagattccttaactctgcctttctgaacaaaggcagattgacagttcttttctttggttctataatatggctctggatgtgaggctgtgaatgtcagaggttggagagctgtcaccacttcctttaatgattcgagtataattacctcttgtcttacaagtatgtaaaactccaaatcagtaggatagggattttgaattggttttccattcctgatggtgatgtgggctgatccatctcttcgttgtccccatgtaacccacaacacatctttgcaagactgctgggtagagtttattcttgccttcattggctctggattactgagcatcaagtcaataacaacaatgacagcaaaatcaacctaccttctgaagcctagcctgctcactctgaggagacaggcttggagactatctcctgagtccacttcatatggttctggtccacacagactgcactggtccctgagcacagaaagttggtgtgtgtggctcctgacaagatttacatcaaatgctcagtacttgttggaagaaaaaaaaaaaaaaaaaaacctcttgaaaaggtcttataagtgatgtggcttctctcatt

SEQ ID NO: 3362 - DNA, 1032 bp, Homo sapiens
tgtatttatccaacaaatgcattctattcaccaccatttgttgtgtacctgacagatgccaaggccagttagacacgctattaaccatgagagtgtagtatcacagaagtcaagagaagaaaaagttttgagctgcagaaattcgtcagcagtttgaaattgtacagaaagagtgggaaacattcattatacttagtaaacagaaggtcattggtaactttttgaaaatgatagcttcagtagagtggcgggggtggccatggggatatgaaaagccacatgagagagaactgtggcatgagatgccgataagaagtggagacagcatgcggatcaccttttgtatgtttggcaatgaaaggaagaaaagaaatagaaaagtgattagtgaaggcagcacagtcaagcggaagattaattttccctgtctgcttcattattttcgttgacctaaaatattattctttttatttcatatccttaatagcaagtcagcagttcatttcttaaacttactgctttgataactacctgaatgtttcactgaacagtaatagtgtagctgtcgtttattgagtgctcactatgtgctaggcatcgtgctaagctctttgtatacattctgttcattatcccatttaatcttcccagcaccagattataaccacacaacctcttggcagcacggaaagactaagtaaattgccagaggtcacatagctaatgagtggcacagatgggatttggatccagctcagactctaaagctttcctgaaggatcatgctatactgtctctgaagtcagggccagctttgtgggtatgcagcctgtgcagtctcccagggccctgtgtttagaggggccccatgcttggtttaatactctcttgttgctgtcttgaaattcttaatgatttttaacaagggggttctacattttcattttgcaccaggccccacaaattatatacccagttctgcctgaaggtatctgtactacctcctgagggtatctgtactacctcctgaag

SEQ ID NO: 3363 - DNA, 1047 bp, Homo sapiens
tccagctccattggttacaccctttgtgacctcgggccagtcactgaacctctctaagcctcagcttccatgtttataaaatgagactaacaatagaacttaccttacagagttactgttaaaaggacataacaggagaatgcaggtaaactatgtggcacattttaaatgctcgtagatgatggattatccttataatccagtatggtagagggttgtggatgataactcccttacaggccctgcttcctggaggtggcaccactgtggctgagtcttacaggaagagggtcagtgaactaagggaaggatgaagaagtggagaggaagggattccagacagaaagaggaaagactgagcaaagactggaggccaaggcccacatagagtggtggaaagctgcatgtgattcagtctctgggaatagtatcagaaggcaaggaaggctctacagcagacagacctgtatgaatattaaggatctgaacattgtcctgtagacaatggagagccactgaagggctcttagaagcaaggaggtgacacaattagacatttcaaaagatcactctggctgctgaagggagaatggattgcaaggatgcaagactggaggctgggagcccacttaggaaaacattgccttggtccagataagagatgatgagacgtgagctaggataatggccatgggaatgggatgtaggggagagactagggttgagtcacataggagtgaaatcagcaggagttaatattttattaaatgtgggggagtgggggtaggaggaagcaataaggcaaaggaatgtgcagaatgtccaagaagtcagcagtttttggaaagaaactcctgatggatttaggagttaagcgctactatatgctagttaaccctccaggagggtgtgagatcactcagggagaggcagtttcagtggggagggcagtggttagcgagggagtcttgggagagacccagggcaggcagaggaagaggcttacatggagggaccatcactgaggtcccaggagagctgggagta

SEQ ID NO: 3364 - DNA, 1060 bp, Homo sapiens
ttctgtcacccaggctggagtgcagtggcgccatctcggttcactgcaacctccgcctcctgggttcacccgattctcctgcctcagcctcccgagtagctgggattacaggcgcacaccaccacgcccggctaattttttgtgtatttttagtagagacggggtttcactatgttggccagactggtcttgaactcctgacctcgtgatccgcccgccttggcctcccaaagtgctgagattacaggcatgagccaccgtgcctggctcatatatgtcttcttttggaaagtgtctgttcatgtcctttgcccactttttaatggagttgtttatttttttcttgtaaatttgtttaagttccttacagatgctgaatattagacctttgtcagatgcatagtttgcagatattttctccccttctttaggttgtctgtttactctgttgatagtttcttttgctgtgcagaagctctaaaagacttaaatgtaaaaccaaaaactgtaaaaactctgggggacaacgtaggcaataccattctggattggcaaaagtttcatgatgaagatgccaaatgtccattgaatgatgagcccctgctggcatctagactggtctgagctgagccagggccatactgaccccatcactaatttgcttgagcagagggagctgatttgagctctcccttttgataggaacaactttcaaatcaccatcagtgctcatacaattcaaacgtgtagttgggggcatcaaaacacaaaaccctttcctttatatgtaaaatgagcaacacgtctgctgaagattgggaaagcaaagtgaaattgcagatgacctttgaatgccttaatttaaagaatgatctggattgatcttgccctggatctgctgccactgtcttcatgagtgaaccttctggattcccagtagatgtccagtctgaagctgtcagaggaatgagggggttgggctgctatggagaaacaagaggatgcatccaacagctggtgaccacatgtcatgccctccttgatgctggccctcatgctt

SEQ ID NO: 3365 - DNA, 1032 bp, Homo sapiens
gcctgacagagtcctcatctgggctcaaagtggaccgaggtaaatgtgtgggattgatgttatgcgggagagttgggaaatgcctttcgcaggagggtaggtaggggctccataaacctatagatctgattctgtagacgagagccagacaatgcccaggagtaaatgctaagctagagcctggactcttccctgcaagaatcactaagcaagagttagggatcaatttcacgaggttgtatgcatgtgtgtgcctgtgtgcattttactggaggcatttccatcacttttattaataacagtatttactcagaacttactatgtgccaggcactgctctaagcactgatgcatttacatatattaactcatttaattcacatcacaccctatgagatagagactattgttatcctcactttattcttgaagaaagtaaggcacagggagattgagtaatatgaccaagatcacacagccagtaactttgaggcaggcggatcacgaggtcagaagatcgagacatcctggctaacacggtgaaaccccgtctctactaaaaatacagaaaaaattagccaggtatggtcgcaggcacctgtagtcccagctactctggaggctgaggcaggagaatggagtgaaccccggaggcagagcttgcagtgagctgagatcgtgccactgcactccagcctgggcgacagagtgagactccttctcaaaataaaaaataaataaataaaaataaaaagtagaaccagtatttcagcccagatctttgtgaatccacatctattctttgaacctctagttttgttattaaaatctcagagacatgtgtgacccaataaaggctgagagcgttcacacaaagagaggaagcttaaaaagtagaaaagaaccttcactgggtcaaacccggagcgagggagcattaaagaagtcagcctggactccgggactgtggtattgtagccacattctgctgtccaggcttgtgtaagctatttcatttcttccttctgagtg

SEQ ID NO: 3366 - DNA, 1063 bp, Homo sapiens
acggacgttgatgaggccatgaatgaggtgggctagggacaggggaccgggagactcacagaagggagaagggtagccatttggatggaccttcgccttacttgcgctcccattcctggactgcgctctagtgactgtcagggctaattcttccgccttctcaggcctcctgtgtccttgttagtagttcttgaatttgggactacggcttctggcctcgttgggcctccgggccctcgcactggggcaggtttcccagcagcccagttgacctttaccggatgcttttggcagacgtcctccatgccgggctggaaatatgcgtcacagtgtttttcagacacttttgcctctttcattgtgataccctgcctggggacgactatgatggagtctttaggtttttgtaatcagcaaaggcatctgttatgctcctgccaccttttgggggagagtgggtggaggatgttgtgattttacactagggagtttgggctgtcattcattcgttcagcagaccttttttgggcactctgccaggcagggtaggagaggtgcctggatggatagggcataattgggccagacagacacggttcttagccttttggagcttaaagtgtcttgagaaacgcagacagggtaagccagcatcgtgcctgacacagagtaagtggttataagtgtcgaataaaggaatgaattgacttatttgggaatgattagaatgtgagcaggacggtagcgagagactttatgctgcatgtgagagatagttgtgaactcatgcgcgatatgttttaagacaggtttggaaatctgaacggacagttgctatttagggaagcatttacttatacagaggacttgctttaaaggtggaagtaaaatggagaagtattaggtttgggattcttcagaggtgcctcttttaactattactatgtctctgaatttcataaatccctgagtacaatctcagagtttgggaaaaggaaagctcttctaggtaatgaaatgccaggctgatgggaaaaaactgtaggaagctctccctaagtcc

SEQ ID NO: 3367 - DNA, 1088 bp, Homo sapiens
atatggaataatgaaatcaagtgaattgacatacccatcacctcaaatacttaagtgatcttaggacactttaatttccttgacttcttcccttcttatgtggacttattgcccagtattttagttctaccttttaacctgtcaaattagtctctattattattgttactttttatattattagctcttgattgtatgtactcacatctctaccttttttactcctcactttacctccttacatctcattgtttcctcctaaagtatattctttagtaattttttcagtgaatatctgttagtagcaaacttggactttaacaaaaaatatattttacccatactgtttgatacagtttagcttattgtgggaattctagcttaacatttattttctctaagtgttttgaagatattcttttgtcatctgtctgttgttgccgttaaggagtctgctatcatcctgattgtctttgtaggtagttttaatttctctcaggttgctgttgagatcttgctttgattttattgttctgcagttttgctatgatatattcatgtgtgtgctccataggtctgtggattcatgtttttcatcaattctggaaaattctctcatggtatagtttgcatagtatatcttttccccattcttttactttcaactgtttgtgtttcagatttaaggtatgtctcctgtagacagcatctaatggttttttttttttttttgctttatcttatcactatgccttttgaatgagtgtttttgtccattcatgttttattttatttatttaatttgtttttgaggaagggtcttgctctgtcattaagctacaaggtagtggtgtgaacatggctcactgcagccttgacctcccaggctcaatcaatcctcccacctcagttccccaagtagctggaactagagacacataccaccatgcctggctaatttttgtatttcttgtagagatggggcttcactatgttgcccaggctggtctcaaaacttctgagctcaagtgatccacccaccttggcctcccaaagttctgggattacaggcatgagccaccatgcca

SEQ ID NO: 3368 - DNA, 1042 bp, Homo sapiens
tcgttttactcaattggtcccctactgatgggcatttgttgccattattttactgttataaacaatgcttcagtgaatgctcttgttaacaaatgtttgcatacttgtaaatctgtagaataaattcctggcaacgaaactgctgtcaaagaatatctgtgtgccaatgtttaatgacagcaaattgccttcaagaacgctgcaccaggccaggcacggtggctcatgcctgtaatcccagcactttgggaggccgaggtgggtagattacgaggtcaggagttcaagaccagcctggccaagatggtgaaacctcatctctactaaaagtacaaaaaaattacccgggcacggtggtaggcacctgtaatcccagctactcgggaggctggggtcgcttgaacccaggaggcagaggttgcagtgagccaagatcgtgtcactgcactctaacccgggcgacagagcaagactccgtctcaaaataaacaaacaaacaacaacaatagcaaaaaaaacactgcaccaaattatacacatcaaaagcatgtaatcgtccctcaccagcactgggcattatcacctgccccttcttgagtctggacttctgttggtgccctagttcctctagatgtatctgaatatatctgcattctaattgtgagcatggtcaatttgtttctttttcctagaagacttctcagtttcctccatagctatttgaaacctgactgggtcaaactaagatatcataccagccaaatcttagctgtcttgcttgttgaagggattaaatgaaaacccaaatgcaaactggtaggtccttaataattaattccctccccttcattgggaattaggctggctcatgccatgcagcactgaccagcatctcagcccaaggccaggaggcagcctgggcccacatcatgaattcatttgctgtggtggaatgagtcgctcagccccaggggccatgcaaggttgggtctttgagaaataacctggcatccacactagagccagctgaatctcctgaggc

SEQ ID NO: 3369 - DNA, 1030 bp, Homo sapiens
tggactgtagggcttggttcagtgaaagcctctctatccatgcaagtatctgaattttcaaacacctttcacatttcattgtcagccgagataaattagagggaaaagatatctcaggcaaagagacttatttaataattaatggttattgatttattacaattttataaattaatttactaatttacaaataactttctgagctcttacatgtgcaggcactgtgctaggcctgttacaaactctggagaactgagttatccccatatacagatgcagatactgaggccctttggggtgggtgacagctcagatcccacagctagtgtggcacaggcaggaacgaagcccggggtcttttgatggtagctgaaccgcacccagacacccacccgtgtctgccagcactccgtattggctgggaaacactccctgaatccaaaggtgcctgtttagtcagttaccagccagtggtcctcaagtgtccccacctgtaagatgggggcgccctgccccagtactgcagcctcgcgaccccctggagggtgggggacggtagctcaggcgagagtcttccggctgccccggggagggaggaaatgagccggcggcaggggcgggttttcggcggggccaacccacggtggggggagcgcggccatggcgctcctgctttcggtgctgcgtgtactgctgggcggcttcttcgcgctcgtggggttggccaagctctcggaggagatctcggctccagtttcggagcggatggtgagcggcgcgggcgggcggcaggggatcgggcccgcggcggcgtgtgctccgccctgccgctcctcgcccccggcccggcaggccgccttcgggcttccgaggctcagctggagctgggggaaagcgcctggctttcgactgaggcgcaggtcctgcctggggagttcctcgagttctctggatcttccctagacggaaggggacagaacctccccttcctgcagaatattggtggccccaggcaaatctagagccttag

SEQ ID NO: 3370 - DNA, 1024 bp, Homo sapiens
tatatatacacacatatatacatgtgtgtataggcttcggtatgatccatggtttcaggcaaccactgggggtcttggaacatattcccggcagataagggggaacaactgtataagaaactgggaacagtggttgtgttcaaggttgagtctgggtggacggcagtcattcatgtgtatattactttaattgcaaaaaccacaattatttttgtaccaacgcaatacttctgtacattttgaattttgcactgagttcatgtattacttttgtttaaattaaatttaaatataacctccaatggcttcccatcacatttaaaatacaatcctaattttgtttttgactgagaccttccagatcctatacaatttagtttctgcctacctctccaaatgtatcattctccccttgcttactgtctttcagccttgttcttgttgatgttcctaaagcatgccaagctttctcccacttcagggtttttgcacctatagtctgcctgcctggactcttcagaccttagacctttgcatggcttactcttttgaataattcaaaaggtctctgctcagatgtttacttcagaattgcccctcctccatgccatcactctccattcctgtacgctgctttattttcttcatcgcacttatcactacctagaattatatattatttgttttacttgtttattttttgtgtcttcctctagaatgtaaggctcatatgagcagaactttgtcttgttttctgcggtatctccacggcttagaacagtgcctggcttgtagtaaacattcaggaaataaatattgagtgaatacacatgttttaagtacattcctccactctgttgtttgccctataactttgttttataaagacctttgtttacagaagttttttttttttttggattaaaaaactttactttttggccgggcacggtggcttacgcctgtagtcccagcactttgggaggccaaggtgggtggatcacgaggtcaggagattgagacc

SEQ ID NO: 3371 - DNA, 1030 bp, Homo sapiens
gatccgcccacctcggcctcctaaaatgctgggattacaggcgtgatcccacaattaccgtgcctggccacagtttttatattatcttgatttagggcatctatataaaacaaataattaaataaaatcagtattttaaggtaagaaccttacattttgtagtctcaactgactcatatatcctgttttcgtagtccctctttttatgattaatgttatcttttcattattttatagttttaagcctatcttgtctaacatttctttttcagatggccaagtgtgatggttgtaaacgacagggtaaactaagcgagtccataaagtggcgaggcaacattaaacatttctgtaacctattttgtgtcttggagttttgtcatcagcaaattatgaatgactgtcttccacaaaataaaggtaaaattaaacttagctaatgggatttttatgtcagtgctaggacactatcagcatatacagttataaataatataataaaaacaaaatttcattggattcaaatagcctgaatttccttaaatttttctttaagaagtctttaagatttccccttgagggaaaagtaattctaatactttttgctctgatagtcaagcacaccaaaaggccaataatgtatatgcactaatttttataggaaacttagatttgattgctttttgattgaatgtatctgtacataaataacttaaactagggatatatactatttagttaataaaccagaaataaaaacagaaaatcagggcaaacaaagggagagtatagttaatatagttgctgtgactagtgtaaaatttgtttcagagcttgcttataggcaaggagaaaagaacaacacgttaattatctcagaaaatataaaatggaacagttcttcatgggtagcaaagtttatcctagctaagaataaaataattttgcaagtaggacagctaatatggtcagaatatccaggtgagtagatagatccatgatatattcataaagtagctctcctaagtat

SEQ ID NO: 3372 - DNA, 1359 bp, Homo sapiens
caagcaatcctcccacctcagcatcctgagtaactgagaccatgggcatgagccagcatgccctgctaattaaaaaattttttttatagagatcgggtcttgctctgttgcccaggctggagtgcagtggcatgatcatggctcactggagtcttgaactccctgggctcaagcaatccttctgccttggccttccaaagtgctaggattatgggggtgagccactgcactccatcatttttgtggtatttaaattgggtaatttgagtaaagagaataatgcttggcacatagtaattactcaacacacttattgtagtatatattattgccattattatttactttgtggcctgcactagtgtttataattagtgactatttcctttagtttttatacttgtcagaagaatggcaatacttaacctctgttttaccagggtattgctatttgtgcttattgcaataattagctcttacaaattggctctaggagtctcacagaaccacccaattatttttgttcttcctgtctcgttcttgtttccatctgtcctctgatacaaagccttaacagcccttttgtcatatatcatgcttattttttgtcttctgttagctcatttgtttctcaaaatcttgcacttttaatttttaaacattcatttattgtcttggctggacacggtggcttatgcctgtaatcccaacactttgggaggctgacgcaggcggatcgcgaggtcaggaatttgagaccagcgtggccaatatggcgaaaccccgtctgtactaaaaatacaaaaattagcctggcatggtggcacgtgctggtgtcccagctactcgaaccggaggctgagacaggaggatcgcttgaacccaggaggtggagattgcagtgagccgagatcgtgacactgcactccagcctgggcagcagagcgagactccgtctcacaaaaaaaaaaaaaaaaaagaaagaaaaaattcatttattgtctcatttcagttctactttgggcagcctctggctaatgagagaaccagtgtcttgtggtctggagttgtgggatggacactggtcccattggctatagcagatgaaacttggttggggctggaagccttcctatttttgtcttcagcatctggctggccacatatatatatatatatatttttttttttttttttttttgagatggagtctagctctgttgccaaggctggggtgcagtggcacaatctcggctcactgcaacctccacctcccgggttcaagtgattctcctgcctcagcctcccgagtagctgggattacaggcgcccaccaccacgcccatctagtttttgtat

SEQ ID NO: 3373 - DNA, 1050 bp, Homo sapiens
tactatggaaagaaataacaaatgacatgtgggaattgcaggactatcctgtaattgtagacacccaccatttaaatttatttaacagttatcttgaaagctattgggtatagcataaaataatatcactcttttaatagtatacaaaagctatttaattctttaaaaagtaaaaactctacatggtcgcaaaaatgtgtttatttctaatgtccttgtggggtcattgttgctttacaataatgcttagatgcagagagaggaaaaaacagcaacaaagtcacataaatctttccctgacttagtacatttgaaggatttggcatattttgcctatttctgtggtagtgtaatttgaggaatacagtgtgttgttaatagtcactacaggcaaaaaacagtaagagcttgcttttaaattgtggctctgtcatttatctctgtgacttcgggctagatgtttaactttctaagcctccatttctcatcagtaaataatagttgcttcctaggactttaatgagacagtgttagcaaatggcctagcacatagcaagtacttaaaaaatggaatcctgttattattaataataaaaattatatcgtgcgattatttataattaacataaataaatataataaatatatgtgtatataatacatattactatgtatacttaacatatcacttgtaggcccctattttgtctttggctgtgtttatctgctttgtgtcttgacttaaactatttaaaagtagatcctgctatatggaaatttccaagtaaagaggagagaggatttttttttttctttgttgcccatggtagagtgatcacagctcactgcagccttgaactccccgggctcagatgatcctcccacctcagcctttcaaatagctgggaccacaggcgcataccaccatgcccgactaatttttgtatttttttgtagagatggttttgctatgttgcccaggctggtctcaaactcctgggctcaagcaattagcctgcctcagcctcctaaagtgctgggactattggt

SEQ ID NO: 3374 - DNA, 2211 bp, Homo sapiens
acatgggcttcatgaaaacaccattgttactaacttgggcttagatgggaatctaatgtgaatagttcaagttatgggacttgtctaaatgtgtctatactctaaacctgggggaaggtggtgtggaacattgacttgactacagtcgaatacatgttgggaatcattcccaatcataagacatcgtcgtttctgtaggatgactgcatatgttcagagtagctttttgaatttggttcccttagctttagggatgtgatgttatagtccaaaatgtttacaagaaaacctaagtcttcaaaagcacaacttttgttgcttaggactttgcatcaactgttgttccagacctcacttcaacttcttggtctctgaactggttttagctagcatgcatgagagacagttttcatgtataatgtttctgctctgtaactggaaagtggtttactttgcataaatgctgatgaaaacttcatgactatgagacttttcttctgtgtatcaagaaaaagcttgctcgttggcaagcaattcacaaggtggggacagacttgtactttaacatgtagtccattcaagcaaacaactttggactctactgatagatgaaagagcaaatgatgactagtttagcctctgcatatcaacaatataatgcagatcaagtataatgctcaatattagtgacatgagtatcactaaattacatagaaccctgatggggtttcctgtgtcgtaatccattaaatcggtggccagtgcttgctgccgtggtttagtgattgggtgttagaaataaaaactcaggtctatttcttaccagtcagtaacaatttttagagaatgtacttggtatataatatatggacttcaggaactttattggggtggggggttaattttgccttaccctgttcactttcagatgattaggcttttgcactttagaatgagaaacttgtgacgttagtgtgttcttactagctttaatttgtatgtagcaatgaattgtgaatcttagtgcagtgggtttttttaaaaaactcaaaaagctgggaattaagtggtttcagtaataatgctataccgaggtgcttgcattgtatttcataattttgttacaaaccaaaattatttttaatgagaacagtcttgggttcagaggtgtgatgccagaatgtattttcgtactgttaggcccttggaacagataccggtgctttctgaaagatgaaagaaatgcaatgggtgctcttcatgcaaggttgcaaacctaccaagaatgcataatagtctcacttttccccaataaagagatgcgtgtgactagttttggacttttaaccttaatgggggttgcatgtctcctattgttaatcattgtcagctgcagtgacatgatccacagtcctgcatttactgcctttcacttaatgattttggacaggttttagagagccaggatgttggtctgggcctttatttggttttggctttagctgataatgttttagtgatgtcagctagtgcagttctcaaatggctgcctattagggaaagaattcagaggatttgactgctcctaatcatctgtcattgctgctagataatgattggcaatttttaagactcaactggaaatctcaacagttgctggtaaaccattaaccataaaaacgttgcttttgaacaccagtgctgaaaaaaatatttttttttttttttttgagagtgaaaagggcttggacttaagataggacaatgtggagaatggggggaagaatgcaaaacgatatagtatcccttatggatggtacatgtgcaacagggaactcttacttcatataccctttgcagtaatcattcagggaggaagaaaaacctggaacttgaatgaaggctgatctttgttttgtgcactgtggccctgccaggcatatagtgaaggtgaatgtcttctccctcagaaaaaaattggttccttgctgtcccagtaaggcatagcttttccagccctaactttaaaactcagtgaggacttagatgggaaagaatgaggtaaatacaaaggattgcaggacaacaactacagcgttgtgtactgtgggaaggggagttgggcactcttggaggactcctgctgaaggtggtcagcctgcctgacaatggaagacatacttgaatggggagcagggtatgtgctttcat

SEQ ID NO: 3375 - DNA, 6140 bp, Homo sapiens
ctaacttagttttcagaatattgatttcaaaaataattcacatgatgaacttttgaactttaccatgttttttatttaactcttgaaaatttctcagttcttaagaatgcttgctgtgggtatagtgcaggtatattgaaaggaatttttttcttgcagcgggaaagagacatgcgaatgggtggcggaggagcaatgaacatgggaggtaagtgtgaaatttaaattaatgatataagtagagagtagtatcctggtggagttgtaaccactatttttgttttctagatccctatggttcaggaggccagaaatttccacctctaggaggtggtggtggcataggttatgaagctaatcctggcgttccaccagcaaccatgagtggttccatgatgggaagtgacatggtaatgtatcctgtgggacgtagtaccaaggaaattctcattttcacaacttaggtgtgtttgttttgttttgttttgtttttttaagtaggtgactggacctcttttagtttcccctaccaatttcatacataaatatgtaatattgaggaatactttggcaacatagaagaactcggtgtgtggtaacctaaacagataacggttgccaacaaggagtcaatgctgttagtattatgtggaattacctttggcaataagtagatttaggtgcttttgaactctagtgcatggcaaatccaaattctagatgctagataatgtatctgattattctacatccaagtgagaataatcaaatggcaaactcattctttaagctggtatttgccataagtaggaatcagacttgtagtttgaagctttaggcacgttttagtgatgtgtaggactttgacctatatttggtgtggcttctatcctatgaaaagggaattgagtgttttgactcgtcgtttcccacctgttgggcctgtctgtaggtataccttctaaaatcaactgacatctccattttgctacagagtagcaaaaatcaacaatttttaagcatactaatggtgtgcatttgatctgaaccttcttgatgctatcatgtttcagctgtgaatatagcctgtcagatgcttagaacaatcagttgaactggtatgagtggctgcattagggctttacaaatcgttaggactgaattttggtgggtttagagagtgcatttttatagctgagttgaatgtgatgagttcactacaggcttttggcaaaggaggggagctgcagtgagtagctcataagattcattttataaatagaaacataaggattttgtataaggcctcacctgtttataatctacctaagactttttgggaattaaagttagaattataaatggctggttgggtaaaatgtaatactatgggctttctttagatttttcagagtatgtgggtaacattttggtttatattcttcctaaagacagattgttaggtaatgtgtaaaatctaatttgaccttatgttctcacaattaaaggtttatattctagataacaggtagctgatagctcctgggttctcagctggtgtaattaacataattatgaaagccccaactttttcttttttttaagttcttagaggtagaacacagaacaatgagccaaaaaccctgtaatttataagattttgaaaaacaaaggataaaagtttagtcatgttgagtagctcaatagtattttgtttaaaagaatgttgaaattgtgtataggaacagttaaaccctgatgcccttttagttttttatttggagtaatactcttagtaactggtctattataaatggaatgagaaaaagtgtaggctgctgtgtttgcatacctgaggggtctgctatttaggcacatatgtttctattgaaaacttctatctccagaattacctaaaactagatgggaatagtgaagtcactcactgctttattgcagttactttagcttcgtgtttcactgttcgggaagtgtctaaaacatggaattacagcaaagtgtctgcacttttcaaagacctaagggaaaagatggactgatgaaggtgggtggggtttgttcatttagtttgcaacaatatagaatagtactgagaacgtaattgtctctggttatatagtgatggctcggaaggtagtgtgcctgtgagaatttggcaacataagtttttttgatcaagttactgtgccggttaagtgactaaatctatagtcttatgctttttctttttgtagtctggtagcattttattaaaactttcaaccttttaagatttctgcaacttagcagatgtgtcttaagatcttgaaaagcacaaggtttcttaagcagcacatgccactaactggtgagtaggtctttgtcacttcattgagtgaattgaatctctggttgggcttgttaggcttacttggaaattaaatttccgttcagacgttgaaagtgagagtttgcaagtttttcagtgggttaatctgatgtgaaatttcttagaactcattttggaatggattttcacatctgcactaattcttaaattttttagcactacagggaagatctgttctttgaaacaggtgtatgagaatggctcaagtgggaacataccacaaggcatgtattaccgtaaactaattttcaaattacccttttttcctttctatgttcccggtacctgtggatcgactcattggtgattgtatcgacgaacgttgactacggaaccttctaaaatatttacttaacacacatggacatcaactacttataatgaactgttaattactgttccaatagcgtactgagcgctttgggcagggaggtgcggggcctgtgggtggacagggtcctagaggaatggggcctggaactccagcaggatatggtagagggagagaagagtacgaaggcccaaacaaaaaaccccgattttagatgtgatatttaggctttcattccagtttgttttgtttttttgtttagataccaatcttttaaattcttgcattttagtaagaaagctatctttttatggatgttagcagtttattgacctaatatttgtaaatggtctgtttgggcaggtaaaattatgtaatgcagtgtttggaacaggagaatttttttttcctttttatttctttattttttcttttttactgtataatgtccctcaagtttatggcagtgtaccttgtgccactgaatttccaaagtgtaccaatttttttttttttactgtgcttcaaataaatagaaaaatagttataatattgatcttcaactttgccattcatgcttctatgcatattaggctacgtattccacattgaaagcatgagagtgtctaggcctttgaatggcatatgccatttctgggaaatgcatctggaggctaagtattgctttctacaaataattgccccctttgttttaaaaagaagaaatgcatattgaagtagtttgatgatttgtttggcatataggaagcacgctggtgctaagtattttttaaatggttatgtaagcaaagctgaactgtaaatcttcaggaatatgtattaagattgtggaatgggtgtaagacaattggtagggggtgaaagtgggtttgattaaatggatcttttatggccctatgatctatcctttacttgaaagcttttgaaaagtggaaaggtcattttgttgcatttccccatttcttgtttttaaaagaccaacaaatctcaagccctataaatggcttgtattgaacttttacatttgaattaaagatgttaaacatgaagtcttttcatgtattcaagtgatttataaagatggggtgtagtctaaaaaacaaaacttgaaagtaagaaggtttagtaactgggccgggcgcggtggctcacgcctgtaatcccagcactttgggaggctgaggtgggcaaatcatgagatcaggagttcaagaccagcctggccaacatggtgaaaccccgtctctactaaaaatacaaaaaattagctgggcgtggtggcaggcgcctgtaatcccagctactcgggaggctgagccaggagaattgcttgaacctggagatggaggttgcagtgagctgagactgccactgcactccagcctggacaacagagcgagactctgtctcaaaaaaaaaaaaaggtttagtactgaagtaggtttagttatatatacatttgtactctgtaacttttacatctccttgtgctacttctgttgggcaaaatctataggactataaaaatctattggttctcttctaagagctagtggtgattgttaacaaatagggttgcagataatcattcttattgtaaatttaacttgttttcacatagtttcgttttcatgtagcactaaatctggagaaagttgctcatgctacacagtacaaatatcccttcctcccaccataaaggcttggaatgtttccatggtgttgtcagttaattgtcaacttcattgaacccccttccattagaacaagagactttgactattaaagtagattgtttattgttgcctgttagtataatgggagcctgatttcccagtgtaaatatgttagaggaacagcttcctaacagtaggtaaagtaattgaatggtttggctttgttctgagttacgttccattcaaatctgtacattgtagaattcttactatggaatgtgtcttcctccttttcacctcttttcttggtgctaattggcaaaagaaaaattctaagtcaaacctttattaacatgctgaagtttagtattgtgcctgtgtacaaaaggagacctattgttggaacaatctgagcactttctgcataggaaacaggataatgctgaaagtaaacactagtgtataaaagcatctcaccaaatactggttgtatgactgacaggtacatggtgtgctaagggagagaatctcattagaaagtaatgctcattatatcattcaccagcacactcggaaatatgagtagttttaccatgattatatcagtgaggaagttttgtccccaaacaggttattaattggtgatacataagagattttctgtacggaaacaagggtcttgattagaaaggaatccattacagtttggttgaattatatagtagggactctactaaagacaagaaaataaggggtgttccatgggacacccacagagggtgaactttgaatgtgtgtgggtgggggctggtcgggaaatgggaaaatctgcctataaaattaatgtttcagtttatttttcagattacatgcctttctttataagggatgctggcacagaccccctaaaataagcttttggtagtactgtacctttgaagagtggtgaaggatgctaatggataatctcctgaaagttgtggcttttgatacccttactgtggactgtagagttgctaaacgttgtttagcaaataatgttgcttagtttcaaatgacatttgactttcatcactaaaacagcaatgtactcagggttgtaagcttactcaaatagactttcaataagtcttcaatgtatatatgatagtttttagcctaatgtgaatttaaataatcttaatagtttcctaaaagtcgatctgaaacttggggtgggaaaggggaggtagcaatttttgaagtattttagccatttttttcatttaaagaaaccacttgtccccatttcctcttctccactttctcataattttgttttaagaggaacactggttgttttttatacttctcctaatctttaaaaactgcatattgttaagaccccagtgtatttaataggtattttataagcatagcccattggctcatgttagtgaaaccataatcctctttgcttagaacattaaactcataagaagtactacaaaccccaccactctttatagatgtattgtaccactaatataaacagctaaaaaatggggaaattgtaatgttacgcctgtgcaatttttaagtggcatattatggcagattaaaatttagatacttggcttttcttgggcaagccactaagttgtggcggaatgttttctggtgttcttggactgcaattatgcactattaaagtagtggcctg

SEQ ID NO: 3376 - DNA, 2007 bp, Homo sapiens
ctccagtgcctgcattcttttactgagtgttctgagtatttttgctgtgaagatatttatagatgaatcaggaaaatttttgccttttgtactctttacaagaaatagaacaggaaaaagatcagtactagggcaagtattttctggtatgcattcacaaatcggttcatgttaaaattttgtgtattgttagggagagagaaacccctcctcgttttgcccagcatggcacgtttgagtacgaatattctcagcgatggaagtctttggatgaaatggaaaaacagcaaagggaacaagttgaaaaaaacatgaaagatgcaaaagacaaattggaaagtgaaatggaagatgcctatcatgaacatcaggcaaatcttttgcgccaaggtaaaaagacctgtgcgtgaacatcattgctaaggtcaattgtttttcaccttattagaaccttgttaatgtgaatccaaatattttccaatgttcagatctgatgagacgacaggaagaattaagacgcatggaagaacttcacaatcaagaaatgcagaaacgtaaagaaatgcaattgaggtaaaattgtgtttaaggtttaagccttcatttatttttttctttgaaacgtatcattctgttgcccgggctggagtgcagtggtgcagtctcagctcaccacaacctccgcttcctgggttcaagcgattctcttgcctcagcctcccgatcagctgggattacaggcatgcgccacgacacctggctaattcttcctgtatttgtagtagataacggggtttcgccatgttggccaggctggccttgaactcctgagctcaagtgatccacctgtctctgcctcccaaagtgctaggattacaggcatgagccgccacgcttggccattttttttcttccttttttgagatgggcccaggctgaagtgcagtggcatgatcatagctcactgcagtctcaaactcctcagctctagcagtcctcctgagtagctgggactagaggcacaggccaccacccccagctaattttttaattttttttgtatttgtggagatggagtcttcctatattgcctaggctggtgtcaaactcctggcctcctaaagtactgagattacaggcatgaactaccaaccctggccttaatccttgacttatgcactaacatttatattctgacatttagggaaaagatgtacttagtttttcaggtcagtcaggcaaaatacaaaggttaaatatgtcagtgttggtttaacacttaaaatcgaatacagtgtaagattatccttaataaagcctacattatttgccagaatgtctttagtactatgcccctaggctcactctaagcctttgtgttttttagtgctaacctagttcttaggtcaactgctaggtttcttcacattgaattctaaaagatgtggataacacttcagttatgtacctgatgggtatttctaggcaagaggaggaacgacgtagaagagaggaagagatgatgattcgtcaacgtgagatggaagaacaaatgaggcgccaaagagaggaaagttacagccgaatgggctacatggatccagtaagtcagcctttactgccttccaattggagttgtctatagaacttgcaggtacctagaaggaattacaggaaattttaatatcaaattacagttattttctgctttttttctaacaaagtatattatgtttgatttccttgtatgggtcagaggatttaattgaataggaagtttttttgtgttttgtttcttggtttttttgttttgttttgtttttttgtttgtttggttttttttttggagagagttttgctcttgtcacccaggctggagtgcagtggcttgatcttggctcactgcagcatctgccttctgggttcaagtgattctcctgcctcagcctcttgagtaggtgggattacaagtgcctgccatcaggctcggctaatttttgtattttt

SEQ ID NO: 3377 - DNA, 1026 bp, Homo sapiens
gccgccgcatcgaggcggcggggagccccgcgggggccgccagcaccacccgccctaccaccagcagcatcaccaggggcccccgcccggcgggcccggcggccgcagcgaggagaagatctcggactcggaggtgagtgtctatgggagcgacgcgtcggctcccctaagatggcggcggccccctcctcgcccccgcccccgcgctgggcttccattttgtcggctgccggaaggggcgcttgcgcgcgccgctgcgggggcggggcggcctgcggggccgtcggtcggcgggggattggccgccgccgggccttgctctcccggcgggcggaaggctaggggaggtttcctttcggaaggaagcgcggggccgcggtggtcggccctgcagaaggtatcctgtccctgggactggcgtaatgcagagcatgcggcgtaggtttggagagaaccgggaagttccataaaagcgcaggcgcagatcgtgtaggttacagtggcatttggatttgtgttattttcctattttaattttcatactatttagatttttttagggacactcaacatatgtgggtgacagttgctgatggacgtctactctttggggaagtgtgtctattctcgaacattctggatgatggggctcctttttcaatgttaagatagtgctcatgttagaaatctcacatagtaaaaccttgattttgaccaaacggaacagaaaggcaactgataggtttcagataagcaaatactatcttggggattttcacttgcagaggtctctggtgtttgaaaacttctttcctttttcattaggggtttaaagccaatttgtctctcttgaggaggcctggagagaaaacttacacacagcgatgtcggttgtttgttgggaatctacctgctgatatcacggaggatgaattcaaaagactatttgctaaatatggagaaccaggagaagtttttatcaacaaaggcaaaggattcggatttattaagcttgtgagtgtaatt

SEQ ID NO: 3378 - DNA, 1032 bp, Homo sapiens
ctaataccatatgagtatcattattattattattattattttttgagacagagtctcactctgtcatcgagctagagtgcagtggcgcgatctgggctcactgcaagctccgcctcccgggttcacaccattcttctgcctcagcctcccgagtagctggaactacaggcacccgccaccatgcccggctaactttttgtatttttagtacagactgggtttcactgtgttagccaggagggtcttgatcccctgaccttgtgatccgcctgcctcggcctcccaaagtgctgggattacaggcgtgagccaccgcgcccggccattatcttttttttaaaaaaaaaaagttaaatcatatatcaacattttaaatgggatatttcacctacaagttcagtgctctgacttgtttcaaaaaaaaaaaaaaaaaaaaactagactataatggggctagtatcttgcaaatatcaaacagatttcttttaactttcttaagtcatcttctgtcatagactcttgcttgaaatgtagccttgagacttattttcccaatcaggagagaacagaatggagagaaaaagaatttgctaaattttcttagttccatttaatctatgaagctcagcacataataatttcatagagtttttacatactccacaggaaatgccttccacccaaatatccttccatccaggacagctaagccatgaggctgcatatagggaaataaaagaaaagtctgactcttttaataaaagggtagagagaagaagaacaaagagaaaagtaagagaggcatcattgagagacatgtgctcctgtcttcccattccagctcttcaaggcagagaggattcttactctgctcctgtttaagattccaagtagagatgacttgcagactatgcccataccaacaagcagacagccacatatgagcaaaagtcatgccctgatgtagttgggaaaaaagagcaggtctgcatttagctcctcagagtgtctctcagccagagatgaatccag

SEQ ID NO: 3379 - DNA, 1031 bp, Homo sapiens
aataagggcccacacccagagaaggggcattttagtgggtttctacaaacatttcaagacacttggggtctgataggctccacagattttctgtgtgcataattagtttgtggaatatcatcccctttaccttagtttacccacatccagacccaccgctgagaaggcttgatccagaaaatgaaagggacacattactgttaacagcagtgaaggtcattttccctgatgtgaggggcccatggcaaaagcttctgtccttcacatgattggcttggcagtgaaaatcaaaatcaatcaagaccacttcactatcttttttaaaaagttgagtatttttattgggtcttcaaatctgggtcccacagtcctcatttgatgtcactcttagctctgtactgatctctcctctgacttttacggagggcttgccaaagtagcctattgcagccaaagtttcactccaaagctacctctctaaggtctaaggttactatggtaaagttttatacaacagttttccttaaaaatattccacgatttgttactcccaaacaaaataagattatgcaccactcggagaaattagtcattctgaagatgtctaagaactatatcactgccaaagaacatttctcagttcatattctttccttcaattttcatttgcacatccacactgtggggttcacaagtcatctgttttccatgatcttatggtcaagtcaagaggacttagacttatacatcattttccaacagctggatgcattcacagtttggtgcataccaatatgtatgaaaataagaacctcacttccgttttaatctgataattcaacatcagagtcttcagatttggctttggcaagttcttcatgtacctccctcaccatgagaatacgtgttaacatggtgtccagggttccagggtctatcgggaatgtggagtaccacatggggctattcgggacacaggagcgctcaggttgaaggtaaaacacatcattcctttgcttcacactttcaga

SEQ ID NO: 3380 - DNA, 1007 bp, Homo sapiens
ctgaggcaggaggactgcttgagcccaggagttatagaggctgcagtgagccatgattatgccactgagctccagcctaggtgacagagcaacaccttgtctcaaaaaaaaaaaattctcagggacacaaggcttcagtaactttttcacaaaagggcccatttagaacatattcttgcaagaagtggtcaaatatagaaaaattaatctagacatgggaagagagatgggaagtgatggtgagcaaatacgctggcaaagtttgtagtctgaaacaggactaacaaaaaggaaaaaaaacctgtaagtatataataaaataatttacatagtaagtaagagtgggcaagaccaaaggaacataaaagtctaacaaagtcttactaggagaagatttagatggtaagttaaagaaaccaacaggggtaaacaaacatgattagtattaagagtaatatgttggtctgagtgttgtgggttattgttaagctgatttaccattgtctccccccacaaccacgcttgactagctttgcattttggcctggcgcagtggctcaggcttgtaatcccagcactttgaaaggatgaggcaggtgggtcacgatgtcaggagtttgagaccagtgtgaccaatatggtgaaaccccgtctctactaaaaatacaaaaattatccgggcatggtggcatgcgcctgtagtcccagctacttggcaggctgaggcaagagaatcgtttgaacccgggaggcggaggttgcagtgagctgagaccgcaccattgcactccagcctggtggacagagcgagactcttgtctcaaattaaaaaaaaagtaatatcaataaaagtagaaagtattactttcttaaacaagtagaagaaaatttgttactcagtgggaagcaaggggataaaccgaaaagttcagtaaacagaaattgtgaaaaaaaaaaaaaacccacaaaactaaacagcagaaataagttctattagccgtaattaa

SEQ ID NO: 3381 - DNA, 1029 bp, Homo sapiens
tttcctttgaaattcattcgggcttcttgtcatacattcgttcctcagagaggtatttggcaccttccacgtggaaggactgggctgggtccttagtcagcattagagagttctgacccacctaaggcatgcacgggcagctttgctcaccctgagactctcctgagggcagaggcacactccttcagtgagtggcagccactgcagtgatttggaacctgggaaacatggctgggcgggagcagggcaaggtgggggagtgagcgtgagggccaggggtacagacccggatcacatctgtaaggtgtgttttctttaatgcaccacactgtagcctcaccagcatagcccgcgagtttttaattctgccttctttctagttgggattcatgagtgtgcatgtttccacacatgcactttaggctagccaggctcaggcgtcctgtgttttttcatttgagtcttcctattgagtcttctaagatggaatggttacatttattttatgttttcattattaataatattatttctgtgtatactgtgtgccataatatttttataggtaatatcatttttaagacacataaccttttcccattttacagataaaaaaacttaggctcaggaaaggtacatcactgtctgaggaccagttgatagtgacagagctgagattcaactttcagtataacctcttataaaacttagaactaaaggaatttttaaaaattcccaccagtctaagacaaccaccattaccaactttgttagtgtaatgcctgtctcctcccacacccttcaagcagaggattttgttttctttacgtttttaaccaatctgtccttcattgcccctgtgggatggtgagtccgtgccaaggtggtcatagctcccttgcccttctccagaattgctgaggaacatttgaggaacaaatcacagttgccacctttcctggctgagaagtgaggagaggacacccctctcagtaggtgccccaccaaaatagggccctgcatgcacat

SEQ ID NO: 3382 - DNA, 1034 bp, Homo sapiens
ttgagatggtaagaaactgaaactatgcatgtaattagcatgattttagttgaaactcactggttttcagatttgcttagttggagttgcctttttcattcatggaaccaaagttccttccaatcatagcaaggtaagtaactgggaggcctgactgaggagcttttacccagccatcacttgcctaacgagattctcatcagccgcctcctggagacactcacagaatgcactccacaccctggtctgggcttcttaacattttactcttcagagtagtgtcatccagtgagtgacatgagaggattttgggtctttgcccttaattgtggctgtatggtgcaagaggtttcagacctatcctctcaccagtatttgcttggtttttggttttgttttgttttgttttgttttgattttttgagaccggttaaggtcctttaccctgactgtcttggcaccagcgatggtttttgggagaggcagtcacagctttagcagaggaccctctaacaaggttaagcgtttgatgttgatggtgctggcaagaagaggaggctaggaggatgatagtaggccaggagggaagagagggaacaggaagaagcccttgtgatagagagtggtagaaagggctcacgttgtactgttttattttacagttttgaataggtgaaagttaaataaatatgcaaatgtatacagtgaaaagaatcatactatccgtgtgtcctaagtgtccggttttcctccagacagtcaatggtgttattattttatgaatccttttagagatattttatacatatataagaaaatatatatatagtccttctgtcttgtgtttacacaaatgaaagcacattatatgtgctgttatgtgtgatgcttgtttttgtatgttggagaatttttcttttttttttgagacagagtttcgctcttcttgcccaggctggagtgcaatggcacaatcttggctcactgcaacctccacctcctgggttcaagcaattctcctgcctcagccacct

SEQ ID NO: 3383 - DNA, 1121 bp, Homo sapiens
tttaaaggaaaatgagatgacagttacttaacaaatagggaagtggctctaaccacatttggtcaatattgtagtagaggtcctagccaattataatgcaagaaaaagaaatgaaagaaatagagattggaaatgaagaagcaaaactgcctttattcacagatgattggattatttctagaaaattctaaagaatctgcataaaagccactggaactattaagtaaagttagcaagattgcaggatataagggcaatacacagaaatcacttgtgtttctatattagcaatgaataattgggaattgaagttttattatttatttattttagagataggggtcccactatgttgcctaggctggccttgaacttctgggttcaagcaatcctccttcagcctctcaagtagctggaactccaggtgtgcaccaccatacctagcttgaagttttaaaaaatgtgtaacacccaaagacatgaaacacttaggcataaacttaacaaaatatgtgcaaaaactgtatactgaaaactacaaaactctgctgagaggaatatgagaaataagtaatgatgtcctcccctccccgcattcatgtccatctggaacctcagcatgtgaccttatttgggaatagggtcttggcagatgtaattagttgagaatctccaggtgaaatcatcctgtatttagggtgggcccttaatataatgactggtgtctttatacgagagaaaggaaagggagctttggatccatctacacagacacggaagaaggccacgtgaagagtagagttaggttgccgcaagccaaggaatgctaagagcctccaggagctagaagaggcaaagaaagattctcctctagggccttcagaggcagtatggccctgccaacaccttgatttcagacttctggcctccagaactgtgagagaatgaatttctattgttttaagccacaaagtttatagtaattcattatggcagctctaggaaacaaatataaccatgttatacagattgggatctagaatgatcaaaatgattttgaaaaagaacaatagagttggaggacttaaactatctagctagaagacttactgtatagccac

SEQ ID NO: 3384 - DNA, 1058 bp, Homo sapiens
tttgaaagacagaatctacacaaggtgaacttcgtaagtttgctgctttttaaaattgaatgcattctccaaccatggggaaccaggtggcagatatatgaagtcttatggacttgaggtgtcagtggacgtaatcttaaggctgaaaagttagggaggaatccccagaaacaaagacagtacaatgagaacaggccccaaatctgagtaaaatctctggccaaattcttggtcaattatcagttacacaggcagacctgtagtggccaggctgggcgtggtgccttacgccagcactttgggaggccaaggcaggtggatcacttgaggccaggagttagagaccagcctggccaacatggcgaaaccccgtctctactaaaaatacaaaaattagctcggtgtggtggtgcatgcctttaattccagctactagggaggctgaggcacgagaatcacttgaagccaggaggcagaggttgcagtgagctgagaagatcacactgttgtactccagcctgagcaacagagcaagactgtcttaaaaaaaaaaaaaagttgtgagaactacacagagatatcagttgttgaacactgtaaggagcaaagtctacagttcagtccagggaggttatttgtctactaggaaaacctcccccagtaatcccaaggaaaatatagtagaatccagagtcactacatgtatcagaatgtccaacgttaaaccaaaaattaccagacatgcacaggaacaggaaagggtgatccatacgcagggaaaaaaaggcagtcaatagaaggtggctccaagttgactcagatgttggagatagtagtcagacttcaaagtagctatcatatgtatgttcagataattaaaggaaaatgtttgttttgtttttgtttttttgggtctcattctgttgcccaggctggagtgcagtagtgctatcttggcttactgcagcctcaaactcgtgggctcaagcgatcctgccaacccagcttcctatgtagctaggcctacaggggtgtgccaccactcccagctaattata

SEQ ID NO: 3385 - DNA, 1038 bp, Homo sapiens
cagacatgattatccatatcttcagtgttttgattctattgcatattttttctatgtaattctaacatatattttatgttataagcccagggccaggactagggtaaggagagaggtgcccagaacacagaatttaaagagacactcactatgaaggtcctgtgagccaaccctttgctggaatgactctgaaagtgagcacctccttaaattttgtgcctgaggcacctctcttgcctcaccctagttctgtttctatataaccctgacaatagctggtaatagacacctatagagccagtaccttaaaatgaactcacataatcacttccatttagaacaagttttgacttcatctaagaaaacagaggtgagatactatttcagaaaaatcaatgccatacctgaaataattaaaacagtccaaagtttatccatcagcaacattagccagaattttggatcatattatttaggttacccatagcatgtcactgttgtacttaggttccattatttcttatcatgacatgacttgtcattaggaagttctttctagcagaattgctctcgtggttaaaatttttggtaatcttgactaccactctggctgatactatgatatgcaaaaccatttgactttggcaaatgattggttaaagaatgaatgtgcctattaactgcatgaggttcagagtactcagtctgtgttgctgccagtttgctggggaaactgttcttctggtcccacagttctcacattgctacctgttcttctggtcccacagttctcacattgtccctgagaaataccttggaggtgagtgggaggtcatcaggtattgggactctgccctcttcctcccaacttgccacttccctgcatatgcttccaccagaatacctctttttttgtttttgtttttgtttttgttttcctgtttatgaagtgacattctgtgtaaaaggtctccatggcaggaactcattgagaaggagaacaattaatgaatgtggagcagtatttctagaacctaa

SEQ ID NO: 3386 - DNA, 1882 bp, Homo sapiens
tgggattacaggcgtgagccactgtgcctggccaattttttaacttttattttaggttcgggggcacatctgaaggtttgttatataagtaaactcgtgtcacaggggtttgttttacagattatttcatcacctaggtattaagcctagtacccaatagttatttttttctgctcctcttcctcctctcacctctaccctcaagtagattccagtgtctgttgttcccttctttgtgttcatgcgttctcatcatttagctcccatttataagtgagaatttggttttctgttcctgcgttagtttgctaaagataatagcctccaggtctatccatgttcctgcaaaagacatgatctctttttttatggctgcatagtattccgtggtatatatgtaccacattttctttatccagtctgtcactgatgaacatttaggttgattccatgtctttgctgttgtgaatagtgctgtaatgaacactcacatgcatgtgtcttatggtagaatgatttatttccctctgggtatatacccagtaataggattgttgaagtgatggtagttctgcttttagctctttgaggaattgccatactgctttccgcaatggttgaactaatttatactcccaccagcagtgtataaatgttccttttctccgcaatcttgccagcatctgttattttttggctttttgataatagccattctgactggtatgagatagtatctcattgtggttttgatttgcatttctctaatgatcagtgatattgaactttttaaaatatgcttattggttgcctgtatgtcttcttttgaaaagtgtgtgttaatgtcctttgcccactttttattgaggttgtttttctcttgtaaatttgtttagcttccttataaatgctggatattagacttttgtcagatgcatagtttgcaagtattttctcccattctgtagattgtctctttactctgttgatagtttcttttgctgtgcagaagctcttaagtttaattagatcccatttgtcaattttggcttttgttgtgattgcttttggtgtctttatcatgaaatctttgtctgtttctatgttcctaggatggtattgcctaggttgtcgttgtcttccagggtttttatagttttgggttttacatttaggtctttaatccatcttgatttgatttttgtatatggtataaggaaggggtccagctttaatcttctgcatatggctagccagttatcccagcaccatttattgagtaaggtgtcttttcctcattgcttgtttttgtcagctttgtcaaaactcagatgttcgtaggtgtgtggctttgtttctgggctctctattctgttccgttggtctatgtgccaatttttgtaccattaccatgctgttttggttgctgtagccctgtagtatagttagaagtcgggtaacgtggtaccaccagctttggtcttttggcttagcattgtatgggctatttgggctcttttttagttccataatgaattttaaaatagttttttttctagttctgtgaagaatgtcattggtagtttgataggtatagcattgagtctgtaaattgatttgggtagtatgaccattttaatgatattgattcttcctattcatgagcatggcatgtttttccatttatttgtgtcttctctgatttttttcagcagtgttttataattctcattgtagagctctttcacttctctctggaatacctgtattcctaggtattttattctttttgtggcaattgcaaatgggattgccttcctgatttggctcttggcttgggtggtgttggtgtgtaggaatgctagtgatttttgtacattga

SEQ ID NO: 3387 - DNA, 1060 bp, Homo sapiens
gaacatgaactatacatgaacaaacaggaaaacctagaggaaattgatgaatccgtggacacataaaacctaccaagattgaataaggaagaaatggaaaacctgaacagaccaataacaagtcacaagattgaatcaataataaaaagtctctcaaccaaaaaagcctaggacctgatggctttactgtcaaattctaccggactaataagcaggaactaatactggttcttctcaaactagtccaagaaatagaagacgcagaaactctctctaattcatagaattcttcataattctatgaagccagcattaccctgataccaaaactaggcagagacataacaaaaaaagaaaactacaggtcaatatccccagtgaacatagatgcagaaatcctcaacataatattagcaaaacaaattcaacagcacatcaagaagatacttcatgatcaagtgggatttatcccagggatgcaaggatggttcaacaaatgcaaatcaataaaatgatacatcatgtcaacagaatggaggacaaaaaccgtgtgattatctcaataggcagagaaaaagcaacttataaaattcaacaacctttgtttccacaaatgcttttggaatataaaattcagtatcccttcatgataaaaatgcccaacaagttaggcatagaaggaacagcctcaacctcctgggcttaagcagttctcccacctcagcctgctgagtagctgggactataggtgcatgctgccatgcctgaataattctttaaattttttgcagagacaggatcttgctatattgcccaggctggtctttaactcctggcctcatgtgaccctcctgcaatccttccgtcttgacctcccaaagtgttgagattacaggcatgatccactgtaccccacctctaaaatttttatggaaccacaaagactccaataaccaaagcaatttgaacaaaaagaataaagcaggaggcatcacacttcctgacttcaaaatatatgatagtctggacacagtggctcatgcctgagcaacttagtgag

SEQ ID NO: 3388 - DNA, 1027 bp, Homo sapiens
aagtgaccaaaaatctgagtcttgggtatcccagaaggtgaagagaagtttaatggcatagaaaactgattaaacaaaataatagctttaaacttcccaaatttaagaagagatttagacatacagatacaggaagctcagagattcccaaacagatacaacccacaaagatctccttggcacatgatagtcaaactgtcagaagtaaagacaaaaagaattctaaacacagcaagagaaaagcatctgttcacatctaaaggaatcctgatcagactaacagcagatttctcagcagaaaccttgcaagccaggagagaatgagatgatatattcaaagtgctgaagggaaaaaacaaacctgccagttaaggatactgtacctagtgaagttatctttcataaataaaggagaaatgaagactttcccagacagggaaaaacagataattcataaccactaaaccagtcctacaataaaagattaagggagtcctacattcggaagtgaaaggataatatctaccatcatgaaaactcgtgaaagtatacaactaactaatagagcaagcacacagatgagaaagagtaaggactcactcattttatcatcaaaccataacaataagaaaggaacaaaagatatgaaaataaccagaaggcagttaacaaaatgacagtagtaagttctcacatatcaataataaccttgaatgtaaacagattaaattttccacttaaaggatatggactggtccagtcatgtggacgcattcttttagtcccagtacttcaggaggccaaggtgggaaggattgcttgagcctgggagtttgagaccagcctgggcaacatagtgagacctcatctctaccaaataacaacaacaataacagactgtcagaatagataagaaaacttgacccaactatatgctgcctacaagaaactcactttacttgtaaagataactatagactgaaagtaaagggatggaaaaaaatactccgtgcaaatggaaaccaaa

SEQ ID NO: 3389 - DNA, 1027 bp, Homo sapiens
gtgagaccctgtaacaaaaaaataataaaaagttagctgtgcttgatagtgtgcatctgtggtcccagctacttgagagactgaggtaagaggatcgctcgagcccaggaagtcgaggcttcagtgagccatgatcacgctgttgcactccagcccgggccacagagtgagactgtctcaagaaaaaaaaaagggaaaattaatacattggtgagcaagacagatacggtttctgccctcatgaagcttgcagtctgttaatacctttgccattcttagggaacagaaattccctttgagagggatggcattgctgacatcaagattcccttcaaggagtttgaggcttccctagggtcccaaggtaatgccatgacaatagagacctagtcttctttgcagaatcctgggaatgtaggagactagacaatttgatgtctcaagctggtcttaatagaataaccttctgccaagaattatgtaagtgaagttcctgtccacaagatggtatatctccagttttcctttctatccagtgctctgtctctctcacctttaataatccacatttcctgaataagcagttagagtggttatttggaaatgtggaaagagtgctatagctgcagcctttgcccccaagttggaagtgtgttcctgtggtgatttcatgggcgttagatacacccagcccatcagcacttgaaagtcttctgcattagggtgctcctgcccttttggcatcaggtttgttactcaggatcttaggtgaaccattccaatgcttagcatgaagcaagcaccaattatataaatcttgaacttccctggccaatcacaaaaggaaactataaaatgccctaagaagagaaagaattatgaatgtccctgaatggtgagttagccatcacagacgctgtccaaagggaaacagaagcagggaggaatgccagccaaggcctatctggaactctacccactgcagactctgccctaaagatgggtgcccagtgcatctcacttcagt

SEQ ID NO: 3390 - DNA, 1050 bp, Homo sapiens
ctgacatttccctacctctgggaaggagattatacagttagttaatacgtattttgagtacagagataaattattcaattcagaaccattttttgagaacttactaggagtctgcttctagactaggcaccaggataataaagattagtacaatacaatcctttctctggaataactaccagtagcaagtgaaaaggtagaggccaggtgcattggcttatcctagcactttgagaggctgaggcaggaggatcacccgaggccaggagttcaagaccagcctggacaacatagtgaaacctcatctctacaaaaataaaaaaaattagctggtggtggtgggcacctgtagtcctagctactcgaaaggctgagatgagaggatcacctgagcccgggagttcaagactgcagtgaactgtgatcatgtcgctgtactccagtgtgggtgacagagggagaccctgtctcttaaaaaaaaaaaaaaaagatgcaacgcacagagtgctactggaaccgtaggagaagcatttagcttggaggcaaagagggtgctctaaggagttctttctagagaagcatcttctagagaagctgatgcctgaacagagttgtgaaggttgaatttgaaggattcaaagggtattcccatgcaatgggaatgcaagagcaaaggcacaaaagtgaaacagcctggtatatagaagaaactccacaagcagtttagcactactggaatataaagagcaaagctggtatggcagctccagaagaggtaggtggtggctaggtcacaaaggatcttgtatgctatgctaagaagcttcaattttaaactttttaggtagatggtctataaatttttttcatgatgcactttaatccattgaaaaattgagaatgtacccctgtatataaatttatacattataacacgtaattttatactaatgtcttatatatgtgtaagagatgccaaaaacaaaatgttaaagggattgacagaagcaaatatgaagagttctaatattttcttttcatgcccgaggg

SEQ ID NO: 3391 - DNA, 1779 bp, Homo sapiens
tggttgtaaaattcacatttattgggcacctactacttagcaagtcttcttccaggaactttaacacgagtgagcacttgaattcctcacagctctgtcaagcaagcagtactgtcctccacattacagatggggcactcaagactccaagtggcctatctcaagtaacacaactgtaaggtgataaagccacattcgattttcattgctttgtcacagaagtacatgcctatcttatatgacttatggcatttaaaagcagagtttatccaagtagtaatttaaaggatgtttttcttttaaagtttaaaatattggttgtaaatgcagcaacattcctgagcttaagttcaagaactcaaccgttatatgagtttttaccagtgtattaagcaaaaacatttgaacatgagctaattgttattaaaggaaaacaaagacaatttttatatttttattttggatctgccagcatcaaacaggtataccaaatatactttcggagaatgacctaaggcaaggaaaagaaaaaggaaaaaattgtttagacagtctcattttcagagcagtgtttcttttattttgtcttggtcctctggaagtgaaaggtttgctttgtttgaggcacacttgcctccttatttcccagtatagtatgagaatttataaacgtgggccagtttgttttttagtgctacaaaaaataaatgcatttggaacaggaaagaacaagaaagtcaggtgtttaactttttgtttgtgaagctcattatagtattctgattttgatcagtttacatttgtactttttttccgtcacaagattaagagaaaattgttttcaacttccaattccataccttctccactctgagtggcaactgtagataacaggaccctaaccggccctgggttctctctcgcacctctgcttttgtcattccagcactttgctagtcttcccccttgaatgcaccaacatcctaacgtggctcgctcttcagttccagttaaactcagcgtttatcagggaagttttttctgtatttgctcccccaccccccaccacatatgtcaccctcaatttcttatggcaacttaggtatacctttgccatagtgtcccgttgtaatcattttctttactttcttccatgtgcgagtgtgagactgtatgtgttcatatgaatgaaactcttcactggctggctcttcattcagtctcatgacctgggttatacactattttctcttcccatctgtctttggacaactgtgcttaagctcattaggtccaaattgagctcttttcagttggactgccactgtcccccttattgagagtcctcactcttctttctccctcacctcttctactgttatgaagttccatcatttctaccttctaaatatatctcatatttcatacctctctctccgccccctctactttttccttagtttggtcctcatcgtctgtctagagtagactattgtagatcctctaaccatccgcccttcctctcagtcctaatcccggtctatctttcatgtaactgtcaattaccatcctaaaatggcaatctgttttgtatttcctttctaaaagtcttctatttaagagaagcagggaaaatggctgggacatcagggttccttggcaccaattaaccaatgtgctatgtcatgaaaaaaggcttggatcagcagagggatggaagtggcaaatgttcactggttgctgtatggtttacatactaatgtaaatattctttaggag

SEQ ID NO: 3392 - DNA, 1036 bp, Homo sapiens
gattgaaatatcactaacaagggtaatttcacatgatttttggcaaacgtggttagcaggatgtgacatgacgcagcactgccttcttcctccatgtgccatctcccttgaggcctcatcttctctacttgcccccgtctcacccatgccgaggcttgccttcagctcacctgctccagatgggcagcacagtgggaggacactggcaaaggcagatgtgtttattttccggagacaaaatgttgtgctgctgcagatggcagtgccttggagcaagaggcagcctttgacactgctgccacacagcctgggcatcttgacagacagagccagcttacttttggtgatgcggaaattcaaaaataaaaaacgaaaaccaagatgttcattatgcagctcttggactgtcagtgcaagcagcagcccttttagacctggggagcagttttcttccctaccaaaccttagtcagctagtgagctaactgtggattgtcactgtaggccaagagttacgtgtctgttcattacttttgtctcccagccttaacaggacataaagtaaaaactggaaacaaatggctacatttagatggatactcagtttggttctgcaaaacatatgtgtatcccaggtcccatctcacaggagtctcttaggattgggggtggctcatgttggccccattggagataccgctgttctgtttttagtggtcattttgattatccaaagacccagagacagatgtgccttgaagttgaggtgtctcaattaatatgacaacactttgtgcttatagtgtttttctactaggaggagtaagcattctgacagctgcccttttaagcagtatgcgtatgcattagttaaagcttgactaagtccattaggaagacaaagactggctgttgaatcattacacttactaggatcctaaaaaaaataacttgggaagattatttgaaagttactggctttatcaggaaatttttttttctttttctttctttttttttttttttaaatgtgctgt

SEQ ID NO: 3393 - DNA, 1049 bp, Homo sapiens
gaactcctgggctcaagcaatcctcccgcttctgcttcccaaagtgctaggattacaggcatgagccaccatgcccagcccacttgtgtttttatgctgcgattgctgtttggtcaaagaagcaatttaatggctataagttagtttttcgtgagggatcatttgttgtgcttttttttttttttttttttttttgagatagggtctcgctctgtcacctaagaggtggcacagtcacagctcactgcagcctcaacctcccgggctcaaacaatactcccacttcagcctcccaaatagctggaactacaggcgccaagccaccatgctggtattgatagggaaaatagaagtaaaataacattgaacatatattatgtgctaggatttttctagatctacacagtccagtatggtagccaactagccacatggggctatttaaatttaagttaattaaaattaaataaaacttaaaattcagtttctggtggaaaatctcctggtagactttgcctgaatgctaaatcaacttttgttcttaaaaaaaaaaattctgttcctcagtcacagccacatttcaggtacccaatagccacaactattgtattagacatcacagatctggaacatatccatcatcatagaagttctcttggacagtgctattctaaatacttacatatgtatctgttattaagtatccttattatgacaccataagatgtgtgttatccccattttacttacaaggatgttaagtatttctcttagatatgtttccaaagcacatatatactatgttaaaggttaagattccagcttcaaatatcaaactctttcatggtgtcttctttattaattagtggactaatgtacaagtgtatttgtgcatttagggaaacatgaaatgttcagttttgttaaaatgtcgaaattgcacatagtattatatagataagtttgaatatatgtccattgtaggttttcaataagtgtttgctgaaaaagtgtcatccagctaggtctatatattctgctgagaatat

SEQ ID NO: 3394 - DNA, 1157 bp, Homo sapiens
tctctctctctctctgaacggggtggtttgccccattccccttctctctctctcaacatttactccatccagcctcacctgggccactgtgccttctcaccctcggcccagatttcctcacccttggccctctgctgcctgacttgtacccactccatgttggcccagggtcgtgggagggattcccacggcctttctgctgtcaaagggagactctctctcctcttttccacctcagctgctaaagaccttccccactctccctcctcaagcctctatctattctgctcttcctcatcccttcaaccaggtctattccctggctctaccaactccacagagccaggaatgtgaacttcctcatttgcacccccctactctaagtcaaatgatgtccgtgctcttctcatccttcttcttttcccctggattctgatttctccttctgggaaaggccagcaactcctttggggttgacccttgccatccctaggttttgcaggacatctcttcctttctgcatcttctgactcttcctgcatcttccctgcccgcagcccacagacacctccctgacccctgtcctgctgccaccagctcagcctcctttctacacagccacctgtcagaaggaggacctcccacctgtctctgtccatcacctcctttccactcttcagttaggcttctgtctcccaccactccacgaagcagctctcaccaaggtaatcgatgccctccacatcttcaaatttaacgatgtccattcagttcttttttgtttgtttgttggagtctcactctttccttcaggctggagtgcagcggcatgattttggctcactgcaacctctggctcccaggttcaagcgaatctcctgcctcagcttcccaagtagctgggactaccggtgtgcaccaccatgcctggctaattttttgtattttcagtagagatggagtttcatcatgttggtcaggctggtctcgaattcctgatgtcaagtgatccgcccgcttcttggccttccaaagtgctgggattataggcgtgagccactgcacctggtccacaatgcaatttttgatataattcagttgattccttttcttttttaaacaaaaaattttttttttagagacagcatgtctgtatt

SEQ ID NO: 3395 - DNA, 1037 bp, Homo sapiens
aaacaccttgatcttacccacccctttcttcctgagaatactgatattgagaaattatccacctatgaataacccttaggcctgtcctatttcctggatgagaaattcctctcatcttctctggtctccttgcctgacaccccaggccctgggacctggatctggctactcactgctagcctctcttggctctgacatctgtttgccaagaggcttacccgctgtccatcattgggtcttgatggcatggccttttgcaaagccctgttcaggctgatactggccatctctggaggtttctgtgtccttgccacttaagttcctggcatatatgtgggtaggtgaacccagccacagataccctttcacttgggggtgaattattctctggtgtcctcactggaaaagcctctggcaaatgaataacaggcatctctatagctgcttttttgtcttcctgtggacatggacatccctgcatttggagcttttttttcttcaggttttgagctctgaaaattatggagtgaccaggactgctgtgtgagcactgactgtattaattatacagtgctagaatattccatacaacactgcccttgattaacaaaactggctacaggctgggtgtggtggttcacgcctgtaatcccaacactttgggaggccgaggtgggcagatcacttgaggccaggaatttgagaccagcctgggcaacatagtgaaaccctgtctctattagaaatacaaaaattagccggtgcagtggcacacgcctgtagtctcagctactcaggaggctgaggcatgagaatcgcttgatcctgggaggcggacgttgcaatgaatggagattgcaccactgtactccagcctgggcaacagagtaagactccgtctcagggaaaaaaaaaagaaagagagagactacaatctgatttcctttaaatgaattcacttgacttagcaggtattgtattatttaggaataactagctttaggccaggtgtggtggctcacgcctgaaatcctagc

SEQ ID NO: 3396 - DNA, 1028 bp, Homo sapiens
attaggttctgggggcccagcaggaaaggcgtgtgtgtgtgtgtgtgtgtgtgtgtgtgtgtgtgtgtgtgtgtgtgtgtgtgtgtgtgtttgaggggagggtgaggttgagtgaatgtctctgtagttagacccagaaattgttccatgacttccaagcatactccctccttcattttccttcaagttctttatgattagaatctaaatgagaaaattaaaatcttcatgttggttgctggatgtcttaattgaccaaggattagaacccatcagggctatagaagaacagcagctgacagttttctctatctttccagccctcagtcccttacacagagtgggcaggttagtgagaggtgcagggtactgagagttttctgaaacagaaacctgtgcttcttgtcccttcaatgttattgttccaaagagttgcagcaaatatggaggttagacattagggaagaacttatcatcaactttctgatgatcaaatggctaaaagaacactgaggatccagggctgtctctccattgactatccagggaaggagctagcccagttttcttttgggcaatggtggcttgctctgtagctacaaccaggaatttgtaaaacttgtggttttgggccaggcatggtggcacatgcctgtaatcccagcactttgggaggttgaggtggggggtttgcttgaactcaggggtttgagaccagcctgggcaaaatggcgaaaccccatctctacaaaaaatacaaaaattagctgtgcatggtggcatgcacctgtggttccaactacttgggaggctgaggtaggaaatcacttgagcctggaggttgtggctgcaatgagccaaaactgcagcattgcattccagtctgggtgacagagtgagactgcctcaaaagaaaaaaaaaaaaaaaaaaaaagcttgtggttttgttaccttgagcagcaacatttttaggaaggaattaaagcaggaggctattgaggcatagctcttggctgccatagaggaaa

SEQ ID NO: 3397 - DNA, 1114 bp, Homo sapiens
ttttactcgagtcgtttctctttttctttaatataggtaaatttatcaatgtttttcttcatggcttttgagccacagacttgaagctctactccctacccaccttttctctcttttgaacaattattttataatccctgagtagtatactatctagggtgcagaagttctctttgatacttcaattcataataatactcttgtgttcaaataacaaaaaagcccagaatactagagtctcagattttccttttgggatgtgactagaatatttctggagttgcctaaaatgcatacctaattattgtattatgtctaaagcatttctacatatttctgttcaggtgaaaagcttcaggtgttaaaagctaaactgcaagaagcaatgaaactccgaaggtttgaggagcgccagaagcgccaagcactgtttaaattagataatgaagatgggtttgaggaagaggaggaggaagaggaagaaatgacagatgagtctgaggaagatggagaagagaaggtagagaaagaagagaaagaggaagaactagaggaagaggaggagaaagaagaggaggaggaagaagaaggaaatcaggaggtttctggcaattacgttgttttgttaccttgtcatggtgaatatgagagaaaaagtcagacttgaaaaagagtataataagcatgttcaattgtataagaggttttaggggcatgatgagggtaactacctcatatatccctaaatcttaggaacttcagttctgtcagtaccactgaatatctgtagatcatcattatatatctgaatacagatattcagtggtactgacagaataccattgcctgggcttccacctgtttatatattttaatataataatgctaatattaaaaatggctttgtattcgtaggaaattttatctttgttgtttatttaggtttctctagcagattaaaaagcagtcctaaccttggctagattgaggcctggagtaaattcttagggaggtagaggcctttctgagttattttcgttctttgtagaagaaggcatttgtagaagggcctcttgcccttgttccgtagtactgttttctgcctagggaaaac

SEQ ID NO: 3398 - DNA, 1237 bp, Homo sapiens
gcaattcttctgcctcaggctctcaagtagctgggattacaggtacccgccaccacacccagctaatttttgtatttttagtagagacagggtttcaccatgttggccaggctggtctcaaactcctgaccttaggtgatctgcctgcctcagcctcccaaagtgctgggattacaggtgtgagccactacactcagccaagactctttcattaaaccaagcatagtcagtggcttatgcctgtaattctagcactttaggaggctgaggtgggaggattgcttgagcccaggaggtcaaagctgcagtgagttgtgagctgaaattgcactcctgcactccagtctgggagacagaacgagaccctgtctcataaaaaaaaaaaaaacacaaaaaaattatctttcattaaacatcttattgttggcaggtgctatgtcagtgactatatctggtgtgtaaaatatgctcagtgagtctgttaattgaatgggttgactttggagatggagaggatagaaagagcaccttgtctcattaaaacaaaaagaaaaacaaaacacacacaaaaaagattctgtttcattaaacagcttattgttggcaagtgctatgtcagccactgtatctggtgtgtaaaatatgcttagtgagtctgataattgaatgggttgactttggagatggagagaaggacagaaagaactctgcatggtggtgcgtattgggaagatgtgaaagtcactttgaccagggctggaggttcaggtggcagagttgtataacagaactagcatagctccattagcaaagaagcatgagaataagctgttgtccggaacactgagggaaagtttttgttatatgggactaaaagttacctaaacagtcctagactgataggaaagggagaaacattttttgagtaccaactatattagacactggtacattctttgttagttgtctttcttaattctcacagtgccaggtattattttgcaaaatgaagagactgaggctcagagaggttaggtaatttttccagcattatacttggcttataaagggacctacacagtggctggcatataatgagcacttattttttaacttggaacatgttttcctttagaaataattgacacgaaatttgggtttccagaccagccataatatacatgaagttagaatcaacattcattcattcattcatgcaataaacttttatttagca

SEQ ID NO: 3399 - DNA, 1020 bp, Homo sapiens
cagcctgggtgagagagcgagactctgtctcaaaaaaaaaaaaaaaaaaaaaaggttgttgatagttaatataaaaaagaggtacattgctactgtgttatggtatttaggaatttattatttctgcctttccaatctgaaattaagttttttctgtaatcctgagtcaaatcttaagacattgatgaaaacatcatttagttttttactgctaaagagaaacattttggttcacttaaattatctgtgaaaccgaatttcttttgttttcactcattcaacaaatattaaagtatctactatgagtaagttgctgtggggcataccaagataaatctgacatttaaggtatacttaagatgcttttactctaatgggcgagataagaagtatgcaaataagaagtacaaaggagaaaatggtaaatgatgtctttgataatgaatatgtcattgataattggaaaataaataacatgaagaaaaaggaaaagtattttcttaaagaacatttagaataaagtactgtgggaattcagagaagcataaatttcttccaatgaatagttaaaagacagcctgaagaataggtggattaattacttgttcactgccttccctttatactgtgagttggtatcttctgccttgttccctactctatccctagtgcttcctcagtggacgacacattgtaggcacttgtatttatcaaatgaatgaatgatccctcaacactgaactcaagtattaccacattgaataaatttcctgactcttagatagagctggatgctccccactctgccttgaggcagtatggaatggtggttaagagcttagactttgtagcaagaccaggatttgaatctgaactagcatagtaattgtttaacattgtatacgccatttgacctcttcaagcatcttttgtttaaaaaagagaagaaagccagacacagtggtgcacacctgtagttccagctactcgggaggctgaggcacaagagggtcacttgaa

SEQ ID NO: 3400 - DNA, 1048 bp, Homo sapiens
tattagatgcaccaaaaaactattctgttattgtgatgcttactgctgctctccacgcgttcagttcatgtgtcatgtgcaaaggtgctgctgaagaatttcagatcttggcaaattcctatcaacgccctggtgcattcaccacaaaggtattttttgcaatggtggattatgatgaaagccctgaggtctttgaagcgctccaggtaacgtcagttccgagtttcttccacttttctgcccaatggaaatttacaacagatgacatttataatttgagaggaagggatattgttgctgaccaaatggctgaatgggtagcagaaagaacacatgtcagcgtcagaatcagacagcctacaaataaattatcatggtctcctcaagccagggatacttctggctctcattggtggacttgggtatttcttgaaatggaataggaaatctatttcttgcagaattttgtgcgaagttttaactctgtgctttgtgattgtgatgacgtctggtcaaatgtggacttatataagaggagaaccatatgtccaaagggaccctcacacaggacataaacattatatcagtaaatttagtcaggctcagtttgcagcagaaacattcattatttccctgtttaatatgtgtgttagcctgggaatggtgctgttagacaaggctgccacctctacgatgaacatcagaaagagaaagatgatgtgtctggctggtatgtgtcttgttgccatattcttcagtcggctgctttccctctttagatttaaagtacctgactatccatacagctttgtctgggattaaaaaggatcctacagacatagacaatgaagcaagaaatttgaaaaaaaaaatgtgaagcagaaaaatgcaaactcatagctttttaaagtaattgagatttcaccaaaagagaccataagtgctttaagtgctttcaaaatctgtcaagtattatggtatgtatcttctctgttcttaatttttctccccgagtgttatagattacctcaagtccaattattaaaat

SEQ ID NO: 3401 - DNA, 1021 bp, Homo sapiens
ttctgattggcagaaattaatcagctcccaatgggagcccacggaactaagtagggtcccaagaaaaaaaacgggagctatttcacagagctgagcttctgccaaatttcattcctcaaacctttcaggaggggtggttggcgtttctaaaatgtttatgggatttgagttgcaggtgtccacttaactgactagctttgataaacaatgtcagattttaactatgaaaacgacattaccttgtgcatttttatattgattcctattttttttttaagattaaagtttaaatgttttccactagtcatttcacttctaacttggtataggaagcttagctctctacatacctatcatgtgccctgtatcacagaagattcaggaaaaatgcacttgggaatcaaagaaaatggaacttctttttgaaaagacaagcaaccatgttaactgtattgacacatcctcaataaaacctgttgtataaaacagcactgtgctgaaactgatactgacacagaggtatctcaagcctctgggttctgtaaggtgtccaggaagctctctggggcttgtgtgcctgctcttaaggatcatgcactcctcaccagctccctaacctggatttctgtcaccaccacatcacaaatgcctgatgctcgtaagctgctgaggccatgcgccaggcaaatgccaggaggcattttaagaaaccaaaggcaggtagtggctggagctgggggcgatggctcaatctttactggaatattcctgcaagctctcagggctagtggagcatgacagctggctcagtagtccgagggccaagtttcaacatctgatacaaattatgaatgaaatcatgaatctttgctcctaagggctgggctagtgtcaggcccagtgctgaagacaggctgggggagctgtcctgggcggaaagcacctgctcacagcctgccatgctcagccacgaaagatctgtccctggcgctgggggtctgggtggcagacctgaagcaat

SEQ ID NO: 3402 - DNA, 1033 bp, Homo sapiens
tgtcatcagtgcaatgaacttggtctgggacttccttccttccccatggactgggcccctgggtcctctgttgcttctgggaggggccttgggagtacagtttactctaggccaggacattctaagacatgtggaaaccattggtcacacctgccagcaacagagattagtttgtaaatgtctgtttcaggtgtttcacagcatctagtgaatgaccgttgctcccataccagattctggtgacctgatcttaggcttgacagctgtggtggagacttgggttggcagaagcctaccttggtgtgttggaagagtgattgcttagtgcatgaggtgccttttacagcccattttgcagtagttctggctgcagccctgctgctttgaccttgcaggccaaatttcctggctcctccaaaggggatgatgttctttccctccagacacagttagagggaatcctgacagttgcatcaaggctggtccagactctcaccacgctttctcttttgtgctgcttggtcctgactgccttttgaatctcttttagagctctgagctcttcaccctgacctatggtgccctggtcacccagctatgtaaggactatgaaaatgatgaagatgtgaataaacagctggacaaaatgtgagtgagctccttcataggagagacagaaatggggcctcccagcacactgagtctacattgtcctttagagcttaaaacagggttctctctctttcttagccaacattttgggtacatttctcactaaactcatttactgggatgtttttgagattatccccattttccctttaccaccaacaaccttatgttcaaacataagacatttagactccatcatagtctcttctctaacttccttcccaggggctttaacattggagtccggctgattgaagatttcttggctcggtcaaatgttgggaggtgccatgactttcgggaaactgcggatgtcattgccaaggtcattattctgggccacctgtccatgctgaagaat

SEQ ID NO: 3403 - DNA, 1057 bp, Homo sapiens
gggtgtggtgcctggaagggtgactgcaggagccaggctgccagcactcttgcctgccctcctgtctgctgcgctgccttcatctgggtttatctttgtctccttcccaccctccccgcctcaaaggcgaaggtgacggaggagtgctcccagtacgagtttgagaactacatgcgtcagcagctgctgctggccgaggagaagagctccatccatgacgcccggagctgggtacccaagcggcagttcggcagcgcaccaccggtgcgacggctgggccacgacgcacagcccatgacctccttggacacggccatcctggcgcagcgctacctgcggaaataacagcctcagccggggccaccagcactgctgccacttcttccagccccagccaaaggcgtggctgtcagggctgggccctgtagtgctggactctcccgggccacaatagggacagggcagggacagggacagcccaggtcacacgtggggtcagcagaggtaccacgaagctaccttttgggatgattgctcgattgtttggtttttaaatctgagaagcctagataactaatctgcttttaatcacgatgttttaatctacctctgtctctttaaccatgctgtctctggactgagcaagagggaggagggagcctgctcaccccactccagggccttccccagcggccaccaactgacctggggcgctgctccccacagtccaaataagctgaaagtgcagctcgctgcaggccccagagcgagcttcccctcctccctgctctcccaggcccctgccacagcctctttccgtccctctctttctgatccaggcccctcagtccaagctttggaaaaccttcacctcatcttaaaccgaactcaaatatatttatttttttaccataccaacttctctcccatctctaggtggctcagtccatggccactccctgcccccagcctggctggacagcaaggaatccacagcccacacgtgagctccctcctcacccccaggcagggaagcccctcctgccagtccctgtcc

SEQ ID NO: 3404 - DNA, 1086 bp, Homo sapiens
cccaaggcccccatggagctctccttcctgttgtcctcccagcttctccccctagcttctccacccagccagccgacacaggagcagggcagttgggtagagaggcatccttcctcactgcctgccccagtgggccaggaaacctttcccaggcctcttagacagggcctgcccaccctcccagcccccagtgtggtgtaaggtgtaagggtcctctcggggcacttccttttgtccacatgtgagttttctccaaaggatcagagcccaaagctgccctgccccacgcctttcagagggagggtctgtgatgttctagccagggcagagtcacaagtacgaggtaagggatgagtcagctttgatggaacagaaggaaaagtcattcggggcctggggccctgcccagggacacatctgggcatgaggcagctgtcagttgtgtgtgcagctctggggccctgcagacctggtcttggatcctgctcttctgctcaccagctgcatgaccttggccaagtcctttcacttccctgtgcctttgttgtatcatctgaaacaggaccgtgagaaaatccccctcattggccactgtcagtttcttcctctgcagtggttgtggggccaagtgagaactgacatattccgtggttcggaggtggctcggggccagcccttgggtcaccttccaaggtggagtcactcacctctgctggacttccttttcctcatgtgtgaatgaggaaattgaactaaatctcaggtcactcccagtctagaatattacgtgaggctgtttttgagaaatctctgaaagttgttctaagccctaagctgtaccccgagattcagcccgggcagcaggtccagggatggcctgtgcaacactcagatacctgggagagaagccgatccctgctgggacagctcggctggtggccagaaaagtctggggcctgattcctctgctctgctccctggagagggggtcggggcagctgcttcaccctctgacgagaagcctacctcctactgttcaggattgggtgttggcccagtgaggtgtgtcctgcctgcgtgtcttgt

SEQ ID NO: 3405 - DNA, 1058 bp, Homo sapiens
ggagggcaggtctcactttgggaacagttgctcacctcagggctggggttcagctggatggggctggctctcctctctgtctctgtggtagtctcttggggctctgtttggcattagcatctgcacaaagcccagttttctcctctctgaatttaactggccacttggtggtggtgtgttggctccccgcctctgtaccctgtatatgctgccttaaaggatgtccacctttagcatctaattaatcccaagtaaaggagctgtggttctttgtcacttggagccttggatgctcccctggtagcaggaggagttggaggcagcagcggcagctgtgtgatgcatcccaagtcaaaggcctgcaggctgggttagcataaggaaactcgctgacttactcagtgagaaggggtctttctgtcttgtctagagctgagaatgaagcggagagcatcagacagaggagctggggaaacgtcggccagggccaaggctctaggaagtgggatttctggaaataatgcaaagagagctggaccattcatccttggtaagcctctgacctttgggaaaaatgggtgggctgggaggcaggggcagggcacattggctcgcatgatctgacctacagacatcagagtgaggtggcccacccacagcagtgtgtggtcctgccctgccccaggcttggtccctagcttcactacttgaaacagaatatgtttatatcagtggaagacccaagccttgggtcactctgtaccaggggctgtcagtgttttagccataccagccttagatcagccttagccaatagctaggctccgactctccccccagagaatcctatgtgtgcccctagaatggtgacgtgctcacaggaagcacacccattagaagtcattagctgcattagaacccaagctctggccaggtgcaatagctcacttatgtaatcccagcacttttcgaggctgaggtgagaggatcacttgtggctaagagttcaagactttgcaagcttgggcaacatagtgagatcccatctctactagaaa

SEQ ID NO: 3406 - DNA, 1035 bp, Homo sapiens
aagaatatgggattcagcattgaaaaagctgtgtttatatcccacctcttccaacagctagccaggtgacttcaggcagctctgagtctcaatttcttttttctttttctttctttctttttttttttttttttttttttttgagacaaggtctcactctgtcccccaggctagagtggtgctgtcatggctcacgcagcctcaaactcctgcgctcaagcagtcctccaaactaagcaagctaaaactcccaagtagctgggtctaccagctgtgccagctttgaactcctgggctcaagtgatcctcccacctcagcctcccaaaatgctggggtaacaggcatgagccaccgtgcccgggctcaatttctttttctagaaaattttgtgttgtgtgtgtgtgttgtggggaggtgatcagttatcattatgtaccagccctccacatccgtgggttctacgtctgtggattcaaccaactgcggatcaaaaatgttcaggaacaaagaaggatgcttgtgtctggactaaacatgtacagacatttttttctttctttctttttttgagacggagtcttgctctgtcacccaggctggagtgcagtggcgtgatctcggctcactgcaaccttcacctccaggttcaagcaattctcctgcctcagcctcccaagtagctgggactacaggcaaacactgccacgccctgctaatttttttgtatttttggtagagatggggtttcaccatgttggccaggctggtctcgaactcctgacctcaggtgatttgcccgcctcggcctcctaaagtgctgggattacaggtttgagccaccgcacgcagtcctttttttttttttttttttttttttttggagacagggtcttgctctgtcacgcaggctggagtacagtggcaggatcacatgatctgtgattacacaggcatgacccatggcacccagccagactgttttttcttgtcattatttcttttttttgagatggagtctcgctctgtcacccagg

SEQ ID NO: 3407 - DNA, 1025 bp, Homo sapiens
cgtgagctggcggggctgaggtggcagtgaggcaagatcgtgccactgcactccagcctgggtgacaaagtgagtccctatctcaaaaaaaaaaatagttctgtttgttaaaatacagttaactctgcaagtgtaattttttctcccttcttttttttatttttttatttttttgagatgaagtcttactctgtcgcccaggctggagtgcaatggcacgatcttggctcactgcaacctctgccttccaggttcaagcaattctcctgcctcagcctcctgagtagctgagactgcaggtgcccaccaccacgcccggctaattttttgtatttttagtagagacagggtttcaccgtgttagccaggatagtctctatctcctgacctcatgatccgcctgcctcagcctctcaaagtgctgggattacaggcatgatccactgcgcccagcctctcccttcttattgttataaactcataggtcatgttcccaaaccattacgcactttccaccctcagaatattgatgtctatgaaaatataccaagaaaaatgacaataaatgtatttttttccaggtatccatgtttctaaaggacaaagttcagaataataacggtcgctttgtgttgccggtgtccgggcctgttccttggggaactgaagttccaggactcatcaggtgaattcccaacaatgatcagagctatgtttggggtgctaggaaatcagcacatgggccgcacacggaatgccgcactgccaagccactcacagtctgcccagcccttctctttcttcagtaaaacagctattgaaaaagtcaggttctaatccccaccttgtcacttagtagagggacttgaggcaagttacccagttccccaggactaatttcctcatctgttaaatggttactgtgtggatgaataagataatagtgctctaacgtgcttacaaagcaattggcacatacatatgctcaataaatattattattgtattattattattattattac

SEQ ID NO: 3408 - DNA, 1046 bp, Homo sapiens
gttcatcttggcccagtgcagtggctcacacctgtaatccctgcactttggaatggagaggtgggaggattgcttgagcccacaagttcaagttcaagaccagcctagtcaacaaagcaagactctgtctctacaaaaaattaaaaaattagccaggcttggtggcatatgcctgtagtcccagctattagagaggctgaggtgagaggatcactttagcccaggaagttgaggctgcaatgagccatgatcgtgtcactgctccagcctgggtgacaaagtgagaccatgccaaaaaaaaaaaaaaaaaaaaaaaaaagaaatgctcatcctgtaaataggatgtacctgtatgttcttaagtataaaatggaaaatagtgctatttactctgtaaacgaattatatcttattttttatacataagccatacagtctaatttccagggatgggttatagatttgtgcatttatctttctgagtcagactcagtgtaaccatattggatgttctctctgtgtatttcatcaccttgaaatacgacctgttctcggtattactgtgtacttctttcagaaggtatatcttgttgttggatctagttcttttgttggcattggtacaatgatatgaggaaaagggattttagtagtttgggaattagaagtatttaattattatctctatgtacagatttctaaatttgtttctctgcccttaacctctttcctggctttacttctgcatttcgtctttttttttttttttaagacggagtctcgctctgttgcctaggctggagtgcagtggcacgattttgactcactgcaacctccgctttctaggggcctcccaaagtgctgggattacaggcatgagccactgcgcccggcctgaatcctgcatttccttctagacatttccactcataatcactcaaatatttgatctaaaacagaattgttctgtttccttcagaatttgtcttcacagattttttgtgatggtacttcacttctcccttattcagaactctgtagacgtc

SEQ ID NO: 3409 - DNA, 1105 bp, Homo sapiens
gggatcggtatctgaccaaccaaaagtgagtgtcgaaagcctgtagtgttcctattgtgccctagtaacgtttgtttttaggactgtatgctcttagtggcaactttgctggaggcagtagtaaagtagtggtgtgatctggacttgaactcttggactctggctcaggcactgcctcaccgaataatcttagacaaggctcacatctgtaaaatagcgaaagttgggcctatggcacagggttgtgtgaggcttaaatacagtatctttatacaatagcattctattaaattttttacacattttaatcagtcatgagttctaccctcacagtatttttcttttctttttttctttttcctcctgagtagctgggattacaggtgcgtgccaccatgcctggctaatttttttatttttagtagagacgaggtttctccatgttggcctggctggtctcgaactcctgacctcaggtgatctgctgccttggcctcccaaagtgttgggattacaggtgtgagccaccacgcctggccacttttcttttttctaagagacagggtctcacgctgttgtccaggctggagtgcagtagcacgaacttagctcactgcagcctcagactcctgggctgaagtgatcctcccacctcagcctcccaattagctgggactacaggcacaccatactgtacctgactaattaaaaacttttttttgtagaagtgggatctcactttgttgctcaggcaggcctggaactcctggtttcaagcagtcctcctgcctcagcttctcaaagtgttggaattaaaggggtgagccaccacgcccaactgaccctcacaatttttgccatacctgtgtgccagctgtaccactgcttacttagtaatattatttttaaaaaatttctaaacttttagaaaatcttcaaattataggaaaatgggaagaatagtatatgaacacttgataccctcctacctatattcacaaattgttaatgtgttgtgacatttgctttctcttactttctataatatatattaatataagcacacatctatatttacatttcacatttttaaattgtgaaataa

SEQ ID NO: 3410 - DNA, 1027 bp, Homo sapiens
tttttttttaactatggaagtaggatttaaaaacttactattatattttcacttttggcatgagagaaagctagtttctttctttacatatcttgtacctgactacttaactcttagttctattttctgtatattcttccctgtaagtttgcccatagttacctttgttctgaaaaggagggaattatttttccttctcctttctggactaaatagtctcttgtttttagggctgtggacctggacttgtgctattagggctatagttgaatagcagcatgggatatcatctttgtggccttgcgagggaacataaccaccagacataatcttatttctgtgggaaatgttgttctaaatgccaaagtccaaattacaagactttttgcatgcacttcgttcaaaaagaacaagatttgggctgcctttagattgtgcactgcgtttaaattacagaatctgtttgaattttaggagcgtgaggatcatccccggagaggacgggaggatcggcagcacagggaaccatcagaacaggaacacaggagagctaggaacagtgaccgggacagacaccggggccattcccaccaaaggagaacgtctaacgagaggcctgggagtgggcagggtcagggacgggatcgagacactcagaacctgcaggctcaggaagaagagcgggagttttataatgccaggcgacgggagcatcgccagaggaatgacgttggtggtggcggcagtgagtctcaggagttggttcctcggcctggtggcaacaacaaagaaaaagaggtgcccgctaaagaaaaaccaagctttgaactttctggggcacttcttgaggacaccaacactttccggggtgtagtcattaaatatagtgagcccccagaagcacgtatccccaaaaaacggtggcgtctctacccatttaaaaatgatgaggtgcttccagtcatgtacatacatcgacagagtgcgtacctactgggtcgacaccgccgcattgcagacattccaa

SEQ ID NO: 3411 - DNA, 1557 bp, Homo sapiens
aaaaatttgccatgagtaccagagccatatttttacatggggttattgccatttgtttgttcggttgggttttttgtttgtttgttttttgagacggcgtctcgctatgttgcctagactggcctcactctcctgggttcaagcaatgctgtcatctcagcctcctaagtagctgtgactacaggtgtgcaccaccacacttggctgttattgccatttttaaaaagtgaactgtaaattttgtaaaattcagctgcctgcagtatgagaagctttagaaacacccagggaggtacaaacatgttggatgttgacttcttccactggtgataactacttggataggagtggggtttctttagtctgtgagtttgtcgcaggtctccaggtcagtatgtgattcgggcgagtgagaggaggaatgttactttgcttttctgtttcagaatatccaagggactgagtgaaaagatatttgcaaaacctgaagaacaaagaaaaacactggaagaagatgtagatgacagaggtgaagttaaattatttcaatcatttagatgtaatttgcatatttagagttttgagaaacctaagttcagtctccaaattatctcagtcatccacataaatgtttgtcatatctggcagattactttaaatttacatagtgttatgcaaattgaattatctgcttttcattctgcacattttttaggattaaattggcaattcaggaaacttcctagaaagggttcattattaacctagaatccaagggtgggtccacagacaaagaggggggtgtgtttcctgcatttatccattcctccatttgaccatcagctttcacactgagagcatggcttagggcatccttttacctggcagcctccccttggcctgctttactcaccactgtgctcacctgctctgtccacattgggtgtcctcctcctgatacatcaagcttgttcccaccgttgggtttatagacaaattttcaatagaaaattcctgtttgtgtattgtttgtatccagcaccttccaaaaagggaaagaagcggaaggcacaaagggaagaggaacaggaacattcaaataaagctcccagggcgcttacatcaaaagaagtaagtgtcataggttttaagtatggcccaagtagagtaactagaactccagttgtcaagacccactgaaacaaatggtccagagctgaatcccaagaaccccagtcctcgttgacctagttgaggtcagataaatagggtcgggtctggcccactagatgcaggtccttgagtccatgtcatacgttttaggagtttctaatcaacgtctccacacgagtggactatcctctagaggagtcagtttctagtcccaagggaaacgacccaatgagcagatctgctttgggcagatcactgacttctgtgaaggacagctttggagctgagctgttcagagctagagtgggccctctggggaggggagtggttagcagcactcagccttgctgcaggggacttgtcaggagtgatgcagaacagatt

SEQ ID NO: 3412 - DNA, 1169 bp, Homo sapiens
tacaggtggatgcctccatgcctggctaattttttgtattttagtagagacaaggtttcaccgtgttgcccaggctagtcttgaactcgtgagctcaggcaatccacactccttggcctcccaaaatgctaggattacaggtgtgagccactgcacccggtcgaggtacagttttgaagttcatgcaaatctcatcatttgctcttctgcaacaaaacattttctttcaacttattttgcctgtgtgaagctcagtgctttaactcatatatggagttatcttcttccctcagactggagacgttggtgaaattggggctagactgaagatgtctaaggtggcttgattgacaaaggtctctcctcatccccaaaataaataacattttttcatttataatagtaatacaccagtcatagacaaattaggaaatatagttaagttggaaaatacaacaaaaagaacataactcatgatcccattgctgatattaagcattgttaatgcctctgtgaatatcggggcttccttaactggaggtctctgagttaatggatggcctgtaaggtttctttgactctttgaagaaaatgtggaaaatttgtgagcttacataaaggcagtagggttttgtgttttttgtttttgttttggggaggaggaggaggagaggaagtatctataattttaatcatattctcgtagggatccatactcaaaaggagaatcagtcaccggctggctgcagtggcttacctgtaatactagttttttgggaggctgaggcaggaagatcgcttgagcacaggagtttgagaccagcctgggcaacatagtgagaccttgtctctacaaaaaataaaaaattggctgggcatagagtcccagctactcagaaggctgaggtgggaggatcactggagcccaggaatttgaggctgcagtaagctgtgattattaggaatatatttctatgtcagtacataatcaacaataatataatatttattgtcagagtagtattttgtttgttatggccagtctcattgttggacatttatactgtgtatagtttttccttatggtgaacaacacaaggatgaagcatcaatgtgaccgcatctttttcatccttaattattccccaaagataagttcttacggagca

SEQ ID NO: 3413 - DNA, 1048 bp, Homo sapiens
ctaaaaatacaaaaaaaaattagccgggcgtggtggcgggcacctgtagtcccagctactcaggaggctgaggcaggagaatgatatgaacccgggaggcagagcttgcagtgagccgagattgcgccactgcgtgccagcccaggcgacagagcaagactccgtctcaaataaataaataaaaataaaatagttcaaagaaaactgtttacttgcagaacaaaataaaaaccaaggcctggttattgcctcaggttttgtcagttatgttttgttttatgatgcactagaagaatggcacctattagtagaatgactgttttctttcaggggaacacatgagtgtaattcatgaaccacagacaagttgctcatttcccttgttctctttgtctgttctccctaaagccatcttttaagcaactattgaatcctgtttatgagaagaacagagaggttctgtgatggatttattgcttcgttgcctgtacttgttgtcagtgcttctaaaattcagtgtttaaatatctggtatgtagaatgaagggtctgcagttgcaccagtcagcttctttgttgatgcagaaagctgctcagagtaattgatgagttttctgctttggccttgaaaaaccttaactattttattttagtgtaatatctattacttataaaatctaattctgagattattttgcacagtggagttagatcagatacgcatattcatctatatgtgttttagaactactgtatttctgtagcaatacagtaagagtactgtaactttgcatatgtgctttatatactgtatattactgtgttatacttactaatgtgtgttatacttactaatgtgtaggtttatagacataaagccttgggtactgtaacttacaggttaagagattttgaaggataattttggtcacacttgattttacccagtgacattagaccctatttcccatgtaaaatgagctgcttctgtttggagatgctcccgagtggaacgtagtgactaaaactaaactgagttgtgggttag

SEQ ID NO: 3414 - DNA, 1042 bp, Homo sapiens
ttgataagtacggcttgtgtggagtggggaagtttctggggaggaagtgatattaaaaacctaatggttgaaaagatgtaaacagagtcaagacgtgggtatgagtagtgtgcatagagaatagtatgactggcccggcacggtggcttatggctgtaatcccagcactttgggaggcagatcacttgaggtcaggagttcgagaccagcctggccaacatggtgaaacaccatctctactaaaaataaaaaaagttaactggctgtcgtggcacacacctgtagtcccagctaaaggggaggctgaggcaggagaatctcttggacctgggaggcagaggttgcagtgagccaagactgtcccactgcactccagcctgggtgacagagcaagactctgtctcaaaaaaagagagaaaagtatgacaggagcagaggcctggtaagagatgagatcagctgggtatggcagctcagcctgtaatcccagcacttagggaggctgaggcaggaggatcgcttgagcctagaagtttgagaccagcctgggcaacatagtgagatcccattctccatgaaaaggaaagcaaaacaaaaaaaagatgaggccaggtacggtgcctcactcctgtaatcccagcactttgagaggctaaggacaagaggatcatttgaacccaggagtgctgtgagtacctatgagtgctttacttaatattttgtcttttatttatttttattttatttttagagacagtctcaccctgttgcccaggctgaagtgcagcggtatgatcatagcttactgtagcctctaactcctcctgccagcctcctgagtagctgggattccaagagcatgccaccatacctagctaatttttaaaattttttgtggagatagtcttgccatattgcccaggctggtctcaaattcctggcttcaagctgtcctctggccttgccctcccaaactactgggattacaggcatgccactgcacctgtttttttttttaaatgttttaattaaaaaaaaatat

SEQ ID NO: 3415 - DNA, 1049 bp, Homo sapiens
agcttatagtagttaaaaatgttggtatagtttgtccttgaggaacttaaagtctagtactgtaagacataaccagaattctagtttctggactttctcaaatcctatctatatgacctggcttggtcttttcctttttcattttaattttatttatttattttttttctgtgcaatggggagagaaaaatttcccttctttaggtttattagctttttgaagaaaacctcttacacatatagaggcctctatctgctaaaggacaagcccactttatcttaatctgattgctttgattcaagctgttaggaaatttgactgccattcccatggctccatgatgcaacttacaaaccaatgcattgagtctgagcttatgcagcctcctccatgttgaacatgagagttttatagtattgctaacactaattttgagtttgggttttttgttgtcgtttttcctggtaaataaatatagcataggctagattttctgtgattatgtgcataatgaataaatatgatgggaagtatttgaacagagactgaatgattcaggaatgctgtgaaagagtggttagtggagtcaattacagcacttctgaagttgtaggttcttgggcctccccccaagcctgctgagtcagcttgtctgaccgtggcatctgaacctgcatttttatgtaagcacgacaaggcctaattctccttctggtagtggcagagttgctcttatgagaccaactctcccgcagaaaacagctaaaaattctagacaaaatataaaaaacaactgtggaaaggcactggtgagcaaccaatagcaagcagaggtaaccttggaagaagggattgcttggaagatggtaaaggcactgggtaggcttgcaagttttatggcttatccaccttgggcaagccccagttggcacccaacgaggcagccaaacttataaaaactcaatcttactggcttgaataaccagaggacagagttcagggtggccacagcacctggaaagtgaaggcaggtagcctggaaaggaaa

SEQ ID NO: 3416 - DNA, 1723 bp, Homo sapiens
tggtctcgaacttctgggctcaagtgagcctcccacctcagcctcccaaagtgctaggtgagcacttacaggcatgagccacctcactggcccatacaacagtgttttaaaatgagaacctgtctgtagtcccctgcaggcgttctgtggataccagctcttgccactcctctctcttatacttggcttcctttgacttagtatcaggccactgaaaattatttccatggtgggcatttggggcaccaggcagagctaagggctctcaaagaatgaggacttctattatgctggcaatggtggtggagagaggaagatggctggctgttgaatacctgatatgtaccgatcactatgttatgggctttaatatagttttgtatttaattttcttagcaatcctataacatagatactattagcccccattttacagatgacagactgacacttagaaacacacaactagcaactggtagaaccgagatttgaactgaggactttctggatgccaaagcctatgctttctaccatcacacaccacttttgcaaagatacaagaatcaggtattgagacctgttggctgtgaaaagggctaagaaatgaagggacagcagtacttgttctgtaagggtaaaggtttgaggtgtggggaacagctggatgaagtcagctctcatggtgggggatgggaggcctgtcgaaatgagatcttcagggttcttatatttctgagctttttggttgtccattatggagaagaaatgataccagtgccggtgtggggaatggagtcggacacagagagggaagggaagtcactagtgatggggaggaaaaggcagtttctatagccataacagccaggccagtcatttatttatgagaatgttcatgtgctaggtgcccagaagcaggaactctcttgtggaatagggggctgtaaatgtgtgtaaaatctgcttctcactttcactttcttttcctccaggaaaaacccagccttttttcttttttctttctttccacaggtgttgacttttttctttttctaatttttttaaatttttgccttctggggtcacagtgttttattttctcacttttgcttatcccattcacctttcttctctgattctgttatcttaacaaggcagtcatctttgttaaatatttctgtattctagaactgctcagaacactttgtaaatcagcatcaattctctgaaagctcctactttgtgcccattactagcatgagatgttatcctcagtgcacctaacctgtgctccctccatgttccctaacagggtaatcgacagctgtttgaggccactcaggaagattaaagttatgcttagagcctgaagctcttttggaggaaagcttttttttttttttttttttaaatggggtctcactccatcacccagctgctcatgtctttaaattcaggttggggatcaccaccttcaagaagcctttctaaggtcactgaagtctgttacatgtttctttggtatattcccatagtatgctgaatatctgttatcagtaaaacttctcaaaccatgttgttcttgtctgattttccttttgactttgagctctttgagagtagggacaatttttatatgtattcctagcacccaggacagtataatttctggaacataatttttaggatgtatgaatgataaaccttagttgtattgaaatgt

SEQ ID NO: 3417 - DNA, 1035 bp, Homo sapiens
agcaggagaaggtttttccaagagagaggaacagcatgaaacaaggaatgcaggtgggaaacaggccattttcagggaatagccagttgtcctgttacaacagagtcagcacacttttttctgcttagggctaaatagtaaatattctgggctttgcaggctataaggtctctgttggagctactccattcttccattgtagcacaaaagcagccatagacaatacataaagaatgaacatggccaagttctgataagactttacaaaaacaggcagtggggtggatttggttcactggctgtagtgtgctgacccttagactagaacatagtagtagaaggagataaggatggaaagatagcaaagatccaaacatggaaggcagtggtaaccttctatgggttttgaactgtactctcctagaaatggtgggaaaccattggaggtgtctaagccaaggctagagtggttagatagagaatgtggttagagtagcattttagaaggattggtctggcagcagaggtagcttggaggcagaggaaaactggagacttcttgcctagttaggagacagttgtagtttatgtttggggtttcatttaaatctgaagaaaggatagtggccttgttcatgggaagaatcaaggacttttgtagaagtacgagagaacttcgtacgtgttattggagtttgatgaatgagccatgagttgggcatgattcaaaggttttgaataggccaggcacagtggctcatgcctgtaatcccagcactttcggaggcagaggcaggtggatcagttgaggtctggagctctagaccagcctggccaacatggtgaaaccctgtctctactaaaaatacaaaaattagccggttgtggtggtgcatgcctgtagtcccagccacttgggaggctgaggcaggagaatcacttgaacccagagggcggagggtgcagtgagccatgattgtgccactgcattccagcctgggcaacaaaatgagaatctggttggaaaaaaaaaaa

SEQ ID NO: 3418 - DNA, 1060 bp, Homo sapiens
ctcgtgatccacccgcctctgcctcccaaagttctgggattacaggcataagccaacacgcctgatggctgccataattttatttgcccaaagcattgaggtgccttgttagcgttctcttatgctcttatgcactgtatattttcttcattttttttcccctgggtaatccctctataccactgcaggacacatagctgcttttacattttctccaatgttggatcttcttgtgtgatgtgtgccctacccatagttttataatagatgcctgaagacctattgtagaaacatgccagggaaggcctgcaagatgaattcgccacatcagcctaaatcagatcatctgtcaggtgattcagaggcctcaccacactgctcctttttgcattctgctattgatattgccaggtcaggaaatcattgatgattttctgagaaaataattattttgttactgtcttcccttttgcaggaagatctgtttcagcaaccaggcctgaggtcagaatttgaacatatcagggactgcttggatactggaatgattgataacctctgtatccttcagacattcagctctgtgtgtgtgtgtgtgtgtgtgtgtgtgtgagagagagagagagagagagaatatgagtgagaggggtgagaaaaagtaaagtattttatggctcaaaatctgatattgtatcctcagctaccatgttttacttaaagtttgcatagagaagactttacaactttatttatttattttttgagacagggtccatctctatcacccaggctggagcctgtggagcctcccacctcagcctcccgagtagctgggaccacaggtgcatactaccacacttggctaatttttgaacttttcgtagaggcagggtttcgccatgttgcccaggctaagaatttacaactttaagcaaccaatagagcaggaactcaggagggcctggctcacctgacaaacagtgtggtcccttcgagaagttaggctggcatcctagccctgagcagagagcctgacagggcaggcagcacttctggcatg

SEQ ID NO: 3419 - DNA, 1832 bp, Homo sapiens
caggttcaagcgattttcttgcctcaccttcctgagtagctgggattacaggcatgtgctaccacggctggctattttgtattttaagtagagacggggtttctccatgttggtcaggctggtctcgaactcccaacctcaggtgatttgcccacctcggcctcccaaagtggtgttgggattacaggtgtgagccactgcgtctggcctcagaattgttaatcaggacccccatggaacaccattatcaactagagtacaatgcttctgtacagttccacttgcctttagtctttttttttttttttttgacagtttcactcttgttgcccaggctggagtgcaatggcgcgatctcggctcactgcaacctccgcctctcgggttcaagcgattctcttgcctcagcctcccaagtagctgggattacaggcatgcgccaccacacctggctaattttgcatttttggtagagatggggtttctccatgttggtcaggttagtctcgacctcccgacctcaggggatccgcctgcctcagccttccagagtactgggattacagacgtgagccactgctcctggtgcctttagtcttatagataccactcatttctaaagttacttaggtaaacactttttcccctactcccttcaatgaggtggtttcatacctttgtgatataggttagacacttttgtcattttctgcattttactccagaatctcctgacgtcctaaatgattttttaaaattttgtatacattaaggttcattctttttttttttttgagacagagtctcacctttcgcccaggccagagtgcagtggcgcgatctcggctcactgcaagctccacctcctgggttcacaccattctcctgcctcagcctcccgagtagctgggactacaggtgcctgccaccgctcccggctaaatatttgtatttttagtagagatggggtttcaccgtgttagtcaggatagtctcgatttcctgacctcgtgatccacccgcctcggcctcccaaagtgctgggattacaggcgtgcgccaccgtgcccagcccagtttcattctttgtgttgtaaaaatctgtgggttttgaaagctatagatactaccatgtatcaccattatagtttcttttgagtatagttttgctgtcctaaaaagtcccctgttcttcatttatttgaccccaccctcacccccaaaacccctggcaaccattgatctgtttaccgtctctatagttttgtcttatccagaatgttgtgtaattggaatcatataataaatagccttttcagatggacttccttcactcagcaatatgcatttaagattcattcatgtattttcatggcttgataactaatttttctaattgcttaatattttattatatggatgtatcacagtttattcatctgttgaaatatatcttggttgcttccagtttttggtgattttaacgctgctataaacttttctgtgcaggtttttatgtgtacaaaaattatttttcttgccatattttttagaggtgggatctccctctgtcacccaggctggagtgcagtgacaagatcacacctcactgcagccttgaactcctgggctcaagtaaccatccctccccagcctcccaagtagctaggactatgggcatgtgccactacttttatcttattttatttttatttttatttaattttattttattattattattatcattatttttaattgatcattcttgggtgtttctcgcagagggggatttggcagggtcacaggacaatagtggagggaaggtcagc

SEQ ID NO: 3420 - DNA, 1058 bp, Homo sapiens
aaactgagaggaaacgaggtgagcagaggacttcctcggtgcttgtttctccttcattgcagccatcacaaggtgcgatcgaagcgcctgatggtgctgatagtttgcatcttccttgggcttatctcagagttcactatcactagagtttccatgacattctgggctatggtgctgggacgggtgagagtttaagagcacctcatctccttgccccttcacaagagactgccagaatccagacaattggcggaggacaaggccaatggcagcagaaagaggtgggtgctgtgttctcagccagtacaccagagccaggccatgcaggcacttcattcccttagtcttctatgacaagtcaggccagctagctctgaagccagttagctgccccgactgagaaatgtgcagggatctcaatctttcatttcctttcaaaaaacagagactagccatatgctggtgaggaattattgttacggtttcggttttatttttattttaaaataatttgaaagctgaacatggtggcgcgtacctgtagtcccagccacttgagaggctgaggtggaaggcttgagcccaggagtttgagggtgatgtgcactatgattgatcctgtgaattagttgctgcactccagcctaggcaacatagtgagactgtctctaaaataaataaataaatagttttaaaaattttgtcagccaggcgtggtgactcatgcctgtaatcccagcactgtgggaagctgaggcgggcggatcacctgaggtcaggagttcgagaccagcctggccaacatggcgaaactccgtcactactaaaaatacaaaaattagatgggcgtggtggcaggtgcctgtaatcccatgtactctggaggctgaggtaggagaattgcttgaacccaggaggcagaggttgcagtgagccgagatcgtgccattgcattccagcctgggagacggagcaagactccatctcgaaaaaaaaaaaaatttttctcttaaaatacctacagtaagtggggtgacactattaattgctaagttgct

SEQ ID NO: 3421 - DNA, 1082 bp, Homo sapiens
tttgtgtgttttagtagaggtggggtttcactttgttgcccgggctggtctccacctcctgagctcaggcaatccacccacctcagcttcccaaagtgctaggattacaggcgtgagccaccgcacccggccgcagtgattttttttttttttttaacttagagggttttacttataaatttattatgttagttattccattggtttagatttatgatttttttttaactgtacaaaagctaagaaagagccctctgaaattgccaccggaaatcgccatttaggtgattggtcgcactttattaatattctttttttttttttttttttttgagatggagtttcgctcttgttgcccagactggagtgcaatagcacgatctcggcccactgcaacctccacctcccgggttcaagcgattctcctgcctcagcctcccaagtagcagggattacaggcatgcaccaccatgcccagttaattttgcatttttattagagatggggtttctccatgttggtcaggttggtctcgaactcccaacctcaggtgatctgcccaccttagcctcccaaagtgttgggattacaggcgtgagccaccgcgcccagccttttttttttttttttttttttttttttttttttttgacagtctcgctctgtcacccaggctgaattcttggttagattcttgaagggctttggcaaagaacatgacagggtactgccctgtcacatagtaagcacataacttctccagtccttcctgatgtgcatattacctgggcttgaagacttcagctaatgtttttttttgtttgttttgttttgttttgttttgtttttttgagacggagtttcgctcttgttgcccaggctggagtgcagcggtgcgatctcggctcacccaacctccacctcctgggttcaagtgattctcctgcctcagcctcctgagtagcagggattacaggcatgcaccaccacacctggctaattttgtatttgtagtagagatggggtttctccatgttggtcaggctggtctcgaactcccaacctcaggtgatctgcccgcc

SEQ ID NO: 3422 - DNA, 2040 bp, Homo sapiens
ccattattattgtgtgggagtctaagtctctttgtaggtctctgaggacttgctttatgaatctgggtgctcctgtattgtgtgcatattttttttttttttttttgagaaggagtctcactctgtcgcccaggctggagtgcagtggcgggatcagagctcactgcatcctcaaactcctgggctcaagcagtcctcctaactcagcctcctaaagagctgggatcacaggtgcacacctccatgcctagccaatttgtaaatgttttgtagagatgagatcccattgtgttgcccaggctgatgtcaaactcctggcctcaagtgattctcccaccccagcctccaaaagtgatgggattacaggcgtgagccaccacacccagccaggaaatattttagagtcagaatagatgagactgttttctgttgttctataatagcctcagatgagtaattaggcaagtgatgtaaaacctttgactcttttctttgggatcaggtagagcctgctgataaggagttctgatatgaaggcaagattttcctttattctgtaagaaagaaccttatccttggaagtaaggggtcagcaaaagttacaggaaaacaggaaatttcccttcttattctgcactacttttttctgacttttcatttatggacctgctttaggaacagcgacatctcactcatgaaaatgtacagcgcaagcaagccaggacaggagaagagcgagaagaagaggaagaagagcagatcagtgagagtgagagtgaagatgaagagaacgagatcatttacaaccccaaaaacctgccacttggctgggatggcaaagtaagtctcagcactaccactttctccccattccccattttggaaacagatacagagtttagtaggctaacacttcttggttttgttttgtttttttcttttttagcctattccctactggctgtataagcttcatggcctaaatatcaactacaactgtgagatttgtggaaactacacctaccgagggcccaaagccttccagcgacactttgctgtaaggaattcagagccatttttcctgggaattgaagtaaaaacatgagacttttagagaaaagagtaggagcagcctatgtggaccactggtgtccagagctgaagggaatcagagaaggatggttttaaaatcaagcccatggcatttgacttttggcaccaatgttagtcttaaatacctgagatagtttctggaggaattctaccgcaccactctttgaaccttatttggttttctcttgcctgctcttaaacttctctgtttttgtctttctgctagcattttagaccaatttctgacttcttggttatttctctaccccattgctaatactcaagataaaaaatagggctgactgatctctttcagatcttaaatggatctttgcctcttgagaaaataaaaaatgaaggggctgatatttatcaagccattcttgagacagggtattgtccggatgatactgctgtaagtgggctcacctctaagtgggctctacttagagttcttagattttggaaggaaattttacagaaaggaaaacatttatgctagaccaaggatgacaaatttatatgaactcctctccccctctctgagtcatacatattactaattgataatgggtcttttttgctgagcccatgagtgagttctgaatccttctcagcacctcctacaatgattggagttggcatccaggataaagcccatgccatttaccatcccttagttaaaactgccatcatgtcagtgtataatctccctgctctctcctcaccacatcattgtgcctaataaaagtcttctcctttacctacaaagatgatgctgacctgccattagtaacccctattcatgcaggtgtttggagttgctggggctttggtaagttctcctgcaatatgggagatgtagtgagagttgtgatgtttttctgtgatcttgacccagaggttttatgtataagactactgggt

SEQ ID NO: 3423 - DNA, 1017 bp, Homo sapiens
cttctctgggtttggacagattgaaatctgctctcttagctttaggcttgaaatgtggcgggtaaggaatagtttttctatcaaaactatcgatttactgtgtgtttgcacagtcttctaagtagctctgattccattttttttgttgctccacactgcaaaaataagccagcctgtgtggtaaagtaaccctaaaatcctttgccgtcctgtctccttaggaccctagaagagcgagcccagagactattcagtaccaaaggaaagtccctggagtcacttgatacctctttgtttgccaaaaatcccaagtcaaagggcaccaagcggtgagtggctggggtagcactgctgcttgtggcttttaaatgttattcccatgcagaatttttaaccacagtggagactttaaagcctgctttatctccgttattggttgacagagatccagtctgctctttatctctgctaatagcagagagtactatcactgttaatataaaccaaggaccgtctgtattcatctgattgagagcacatcaagtttctaaatttgaaaccatattcatggcacctttaataggttatggaggctaaaaggctaaataggttcaaaacctatttttctaagcttatttttggtaaagttgaatctaattcttgagctacatacttatacaaggtattttcttttttctttttttttttttttgagacagtctcactctgttgcccaagctggagtgcagtggtgcaatctcagctcactggaacgtccacctcctgggttcaaaagattttcctgcctcagcctcctgagtagctgggactacaggcacgcaccaccacacatggctgattttttgtatttttagtagagatggggtttcatcatgttagccaggctggtctgcaactcctgagcttaagtgatccacctgccttggcctcccaaagtgctgcgattataggcgcgagccaccgtgcccgacccagggttgttttttttgtttgttt

SEQ ID NO: 3424 - DNA, 1034 bp, Homo sapiens
ctgaggcaggagaatcgcttgaacccatgaggtggaggttgtggtgagccgagatcatgccattgcactccagcctgggcaacaagagccaaactccgtctcaaaaaaaaaaaaaatagcttatcacaagagatgaggtttaatatgacaatctcaaaaggatcacaaggaaatccatgattagattcctcatggaattgtgaagaaatgtcccagagttgtagtgaccaaacttcaagttccatgcaggcaagtcagatcccttgtctgttttgttgttttctgtaccccgtacttggtacaaagatgcttaataagtagttacttgcgtgaacaaatggcacctttgagcaccttgttttagggtgtcagagtctttaaccaagaccctagcatgaggtaataatcgacaaacgtttcttttagtttaatgttcattaacttgatctttattttgtaaagttattatgtctgatattttccttcagtccagtgaaattaacactccagttgtagtaggattgaatgataggcaagcaaaaaaaaccaaaattagccagcccttgttacttctttagaaaacactcaattttgatctcacttattggagattatattgtaacttgttacagtataaatacctaactgaatttcttgtcatttctttcctcttttcagaagctggattatatcacatacctgtccatctttgaccaattatttgacattcctaaagaaaggaagaatgcagagtataagaggtaggcattaatagtttctaggcctctcctggatttgattagaagataatgtgaagtttttgagggtgaagttctgaatttgttgcctggaaggcatacatgaaggcatacttccaggtttattggaggatggggttatgaatgatgtggttttaaaacctttgcgatagtctggacgtggacaaaggtgtgtctgtgggcacatcttccatcttatgcccatagtgttcttaattttgtctcattatagaaggaactctcccactctgggat

SEQ ID NO: 3425 - DNA, 1028 bp, Homo sapiens
tgtagctcatgtggctcttggggcatggtggccaaggctcccccaggtctctgaacaaggactagctgatgtgcctgagaattgtccacctcaagacctaaagattatctaattgaactgccaagcccttgctacaatgccttagttatatgatcttttgtcttctgcttgaacatctagcagatattttttaagccccttatatgtgttgggtactgcaccagttatagggatgccatggtgacaagacaggtgtttcctgccttttctcagctcatgctctagtgtggaagacagacaatgaaacaagtaattacagtattgtggagagtatacaacaatgggggcaagtacagactactcagggacacacagcaaagcattgaaactagcctggatgggggccatcagggaaggcttcctggaggaggtgaggttggagatgatttctaaagaaagaataggtgtgtgttaggcaaagaaggggtagaggactgttctaggcaaaacctgaagtgagagacaatggagagctcctttcaagacagcccattctatctttgcatacacttgacttgcctaaggtcatacacctaggaagtaaggtggtctggttccatagatgatgctcctagcttccactctgttccctttcttctcttggacattatggctggatgtgatgcttggaactgctgccactgtcttggcaccatgagaacagccagcctgagggcagagctaatttcctgaggatgcagagtggagagacagaaagagtctgagttcttgatgacattgtgcagcttctgaatcagccagccctagagtcaagtgcacctctacttcttttttttttgagacggagtctcactctgtcgcccaggctggagtgcagtggtgcaatctcggctcactgcaaattctgcttcctgggttcatgccattctcctgcctcagcctcctgagtagctgggactacaggcgcccaccaccacgcctggctaattttttgtattttttagtag

SEQ ID NO: 3426 - DNA, 1019 bp, Homo sapiens
aacactgcctctcagatttcagttttggacattgcacaactaagaccttttaaatgcatttgcttgctaactcggaagacacatagtctgcagcaagacattcctatattgaagaaatgagagaaaattttatgctgcatcaggtggagagcaaggctcaacggtggttgcattagttccctcggaagtattgaaaaaactttgaaatggaagaaaatttttgcacctatgttctgagtaccagatgtctgggttctttcttctgcattagataaatgatcatgctcagtgtaacaaagggaattaaaagttttcccacagtccccttctaggggagaaactcattgtgtcactgaaatgtttagcttactttaatcttgatatcagcctctacagaccttttattctaagctatcgagcttcttgattgcatttggttgaccacgagtgaccctaaggcattgggggactgtccactgggagttggagtgagcacgtggtgctgcaacaggcattgttttacatactttgtctctagtattctgacaccaagtgtcaactgtggtactttctttgcctaggatatgaattcataattgttgcttttgttgatggttgataccctttccattgatttaaacctaacacattatttctattccacatgcccagtagacatatattccaaagccactggaccacttgagtacataagtgccactgtttaatgcaatatgtatattcaggtctgtaaagctaacagtgtgacttggagtgcttcctgcaggtgattctgacttgagtatttacatggaccatggtgatatccaaaagaaaaatgctttttatatttatagattatttcattgaactatatatgaaatgggtatcaataaatgtatttactccaaaatcagcgtttctccttgcctgaggtatggagggtggtggcggaacgttgggttgtcccactttgccgttttctcatccatttctttttcttttgctgcttcctgtgg

SEQ ID NO: 3427 - DNA, 1058 bp, Homo sapiens
aaaaaaaagacttttatttagtactagcagtcctatggatgaagctccttttcatttccagtttctagaaactcagtttactaaaatgccctgtgacttgcaggttctccctgtccccatttacctcaagcctcaaaggtgcgggacattctttctttgctcaccttttggcctacaggaaacactaaaatattcctttctccctagtatctatggggtcatcttggccttacctgttccagtgctcttacatctagattagacccctgtcttgctagattaggttcttaggtcagctccttgaaagtatttttttttttttttttgagatggagtttcactcttgttgcccaggctggagtgcaatgatgccatctcggctcaccgcaacctctgcctccctggttcaagcgattctcctgcctgagcctcccaagtagctgggattacaggcatgcgccaccacgcctggctaattttttgtatttttagtagacatggggtttctccatgttggtccggctgatctcgaactcccgacctcaagtggtccacctgccttggcctcccaaagtgctgggattacaggcgtgagccatcgcgcccagctgaaagtatctttaaattacctataaagttctgtgtctctgatgttatatatacgtataaatgtgtggtggatgcgactatataatgaagattgtactccctgagttataaagcagatagaattgttgacagtgtttaaattgttaaaggcttccctctcaaatacgtgttttattgaatctacatgtgttacttctccaccgtaagtccttttaggcctccagactcctgtagattcctccattctctgtagagtcccgactcccatcctgtttaatatgctctttacataaattgtaaacaccaattgtattcatttgtttattcagcagatacttatgagcactgttcagggaagtgggcttgctgctaggagcgagactgacaaagtctctttcccctggaacttaacattttcagtgacacagctcagaagcacctaaatgaat

SEQ ID NO: 3428 - DNA, 1060 bp, Homo sapiens
ggtttctataaaaaatttaaaaattagctgggtatggtggcgtgtgcctgtcatcccagcaactcgggctgaagtgggaggattgcttgagcccagcaggttgaggctgcagtgagccatgacactgccactgcactccagcctgggcgacaaagcaagaccatgtatgtctttaaaaaaaaaaaaaaaaaggcagccaggacctgatgccaggtcgacttggctccaaaacctgccctctccttttcacagcctcctttcctgtgaaataatagggaatttctctaaagcgcatcgcccggtccctatgtaaagacaaagaaacaggactttgcacgctcacctggcattagggccagcactgtgctgcagttgtgaagatggccactgggttgggggttgttctgcaccaaatggccccagactccctgtcagtggctacttgttgcagccagtgggcctgagctgaccacccttatttatgctcctgatgtgcagccttgaatgcatcctgggctgtgggaggcaaccaggccagaagatgaccttgatagctgagcactgacccttcatcagctgtgtgtccttacgacctcctccctttctgaggccttctgtatgtgatgtcatttggtgggtggctaaagttgctagaagtctggccaccaggaaggccacgactgtcacactttgtgctttgctgcataaaaagggagtctcatcatgatcctcaggcctgctgtgcacacctgatgggcatagcagcgtttgcgtcttgaaaacattcatttcacaaactcctagcacacccaaaccatgccaggttacacactgggcactgaagagaccacacatttgtcagtttccgaaactctactgcccagtattggaagaagagagctgttaaatcaggtcctgcaatggcagataggccccaagtcctatggcagcagggggctcaggccatgtctcaagctctgggagaaggtcatgggggcagatgggttctctgggttggaagagcctttggaattaaagagtcctatgtcctcatgttgca

SEQ ID NO: 3429 - DNA, 1131 bp, Homo sapiens
tgtagagatggggctctcacttcgttccccaggctggtcccaaactcctagcctcaagtgatccacccgcctcagcctcccaaagtactgggattacaggcgtgagccactgcgcccggccttttctttcattctataggttgtcttttcacttttttgatggcgtcgtttgaagcacaaaatattttaattttgataaagtctaatttatctttttttgtcacttgtacttttggtgtagtgattatgaagatttactcctacactttctattaagtattttatggttttctctcttacactgaagtctttactccatttgaagttaatttttgtgtatagtgtgaggaaagtggtccagcgttactcttttacatgtggattttcagtcgtcctagcaccatttgttgaaaaggctagtttttttcctgtttaattgtcttggtatccttggtgaatatagttgaccataaatgtaagggtttcttctggattctaaattatattttgttgatctgtatgtctgttattaggccattactactgtgtcttaaattccatagctttgtagtaaatttttaattctggaaatgcgagtcctccaactttgtttttcctttcaagattgttttggttatcctgagtctcttacatttcttaagaattttgggataagcttatcaactcgtatgaaaaaagccagctaggattttaatacagattgcactgaatgtgaagaatttaggagtatcatcatcttaacaatattaagtcttctgatccatgaacacaggatatcttttcatttgtttaggtcttcttcagtgtttttcagtaatgttctttggttttcttttttttttttttttaattgggatggggtcttgctatgttatctaggctggtctcgaactccagggctcaagcaatcctgccaccttgtcctcccaaaatgctgggattatagatgtaagccaccatgcctagcgagtcagaattctttaaatattttagatacaggtctcttatcagatgtataatttgcaaatagtttctctcattcttttttttttttttttagacagggtctcactgtattgcccaggctggagtgcagtggtgcaatcacag

SEQ ID NO: 3430 - DNA, 1083 bp, Homo sapiens
ggtcacagctactcgagaggctgaggtgggagaatcgcttgagcctgggaggttgaggctgcagtgagctatgattgggccacagcactccagcctggatgacagagtgagatcatgtctcaaaaaacaaacaaaaagagtagaataggacatggtcctcatatgaagggcgtacccagtctagaggcccagccatgaagaggggggtttcttattgccacaacgagatgtagctccttatcctacgccccctagtcccctggcaaacccaggctttttatttgtttgttttgttgttgttgaggcagagtcttgctctgtctcccaagctggagtgctgtgacatgatcttggctcacttgcagcctcaacctcctgggctcaagcaatcctcctgcctcagcctcccaagtagctgggacttatagatacatgccaccacacctggctagttttaaattttttgtagagatgggatttttctctgttgcccaggctggtcttgtattcctggactcaagtgatcctcctgccttggcctgccaaagtgctgggattacaggcgtgagccacggtgcctggccccaggccttttagactgaactcagacatcacctccttcagaaagccttcatgatgagtgtttgtgtgagtatctgtttctctttttcacaaacacttaggtgactctagtgctcccattctatgcacaaatgtctctgtcactgggctttgccattttgtagtgtaattatcttttttttttaacggctttagtaggatattatttacataccatccagtttgcccacttaaagtacacattttaatggtttttaatgtattcacagagttgtgcaaccatcaccacaaataattttagaacattttatcccccaaaaggaaacttcataccctttagcagttgctacttatcctgttggtcccctgccctgggaaacccgaatttactttctgtctttatggattttcccattctaggcatttaatataagtggaatcatacaatatgtaggcttttgtgagtgtcttctttcacttagcataatgttttcaaggttc

SEQ ID NO: 3431 - DNA, 1066 bp, Homo sapiens
tcagaccctgcagcttcagttctcagcttgggaagactgggggcaaacttggatgcccaggtgcagcagaaagtgggatctgctgcccccaggacccctctcgtcatgccttgactgtgactggaggctgcagtgggtatttgggaaagtagttagcaccagaagcctagggatcatctgtacagttggctttggtccaccactaggtctgggcactggggaggggtggagtagctctcctagattcactgaccacctgaagatttctcgcaggtggatgaagctgtagcagttctacaggctcatcatgccaagaaagaagctgcccagaaggtgggcgctgttgctgctgctacctcttagacaaggaaaaaccgtatgtgtggctattttcatttttgttcctatgagcattgttcctatgagcattgtctttgtggtttgacctgaggttgtatatatgctcactgcttagctctgggaatacaataagtacagttagttacacggagtgtgttgcaggtgacttcttatcatgaggactgtggactttgtctgcaggagcttgagtgaataataaaactagtactggttgatggttgtaggtgtctccagatagggaaagaagagacagtaaaataagctaaggaaaaagcacatggtaaggaccagagctggtgtgttgggagggttgacttggcatagtcatgaccctcttgtcaagggcctcaggagccttgtcatctagtggtaaagaccagagatgctgctaaatgttgtacagtacacaggaggacagacccaacagaatgtccaaagtgtcaatagcactgaggttgagaaactctcttctagaataccttcctttatccactatatgttaatgaatctaaattatttgattatgcatttatttgtgttggtgcttttctttacaggattcaaaagccaaataaccccttatggaattcaactcaaggtttgaagacttcctagcttgtcctatggacctcaacaccaaggattacaaattgcaaatttaataggtcattttgtatcaaaaggt

SEQ ID NO: 3432 - DNA, 1028 bp, Homo sapiens
tgttgctgctgctgctccccgggctgttgccccctacaaatacgcctccagtgtccgcagccctcatcctgccatacagcctctgcaggtgaggttcaccagacagaatgcttaaaaggatttcccccatttccacttgatgtaaaagaagctgtgcttttgattccttcaacaggtattaaatgcctgctctgtgttatgacgctatgttctgattcactgtccctgcccttcaggggctcactagtgggaaagaaggggcttaaaagtgctctgcctgatgccagttcactcagaaatgcctcagagcgggcagccagtgcttcctcttctgtttgtacgaaataatgtgctcattcagctgtttgagcctccaggtcacttccgcatccaatgacctattggatccttggctgctctgcaagatgattggtacattaatgcaggaaataacttcaacttacagatcggatgttcagcttcaaagatgtaaagtgtgtgtaggaggtgaaggggttgaacctagagcttagattttctaagctgtaacttgctgtctctagacctgtgctctagatgcaactagtttgtttcagagcctaatagcaatttgctgtggaggtgtcaccctaagccttcaggcccataagctgcttaggagattactctttaactgtcctgtctcatactctctaagttggggatttcctagaacttgatgctatgtaaaataccttttctttgcaaggctttgactagcattgacgttgcatgttgaccgtttttaagcatttgatacaaaaacatttggtagaattaaggtgatgtggaatgtaattataaatgtgttgatatttactccctttgatccaatctgcactgagatttaccctaaaggaaaactaattttcaggaaaaggttatatacaagtgtttacccttatttatatcaaggcttttcattcttgagtaactttgggtgtattaaggaaatgtcagaaaatgcttgcctagcactataggtttgt

SEQ ID NO: 3433 - DNA, 1895 bp, Homo sapiens
gtttggggtctggcctaagaatttcatttctttcttttttttttttttttcttgagacagtctcgctctgtcgcccaggttggagtgcagtggcacaatctcggctcactgcaaactccgcctcccgggttcgcaccattctcctgccttagcctcctgagtagctgggactacaggcacccgccaccatgcctggctaattttttgtatttttagtagagacggggtttcactgtgttagccaggatggtctcgatctcctgaccttgtgattcgcccgcctcggcctcccaaagtgctgggattacaggcgtgagccaccgcgtccggccgagaatttcatttctaacaagttcccaaagatgctggtgctcctggtctggggccacccttggggaaccactttcttagggaatatttgtgatatagaagtgtagttaacagtgatctttttccttcagggggtgaatctctacattaagaacttggatgacactattgatgatgagaaattaaggaaagaattttctccttttggatcaattaccagtgctaaggtattatactgcgatctggggattgaaagcagtggtattccattataggcttattggcatttgtcccattgaaggaatagcatttaaattatgttcatttctgaaagtagctactacgtttttctagcaaaatttctggatgcattctggagaatgacatttcattaggttaacattacactgtttcccaagcactggagtctggagaggaatttgacccagcccctccttgccaactcagagcacctgaatctttcccattccttgctgcctcgtgccggtgtggggacagatggtgctacagaatgagcagaggaaatccagacaggttgttttccatttgtcttggggcctgtctctacagctctgccacattttctccttgagaatgaaggtattttgaagattttggaggtgggcttgggaacttctaccctggtcttaaaaagagaggaaaggggagtggaaggtttttctatgtttcgtagtgtgcatcatttgcttgattttctttgataatcatatcaactaagttagcagggtaagtaggaacctcattttaaagataaggaattttagtccttgaacaagagaatgctgactacatggggatggtgtactgcttgtccttggcactttgggagcaggatggaaactggtgccatctgaacattttgagttatggccggatgcagacgccggtcttgctaaacaggtgtaccagatgccacaaaatcctttagttgatgagaagggaagccacgtgggctggtaagggcttagtggccctgccctggctcttagtggactttgctcccaacctgggaatgtggaaagcaatgttatcagttgtagtagggagttggccagaggccaactgtgggtttgcccagttcttaccctttcgtttttgctatgaccccccccttgactggccctcatcagtgtaaggagtgatcttctatccttgcttatctgcctagtagtcaagttggcatttgttaagagagcagaagagccataccttgaattgtccccattttcattatgatggtgtggcatttttattcacataccttactggcccatctcattggtagagagttatggagtgatgcacttctttacttccctatcctccacttcaggaggctctctgggccattaactaagacataaaacaatgacagtcacaccagagaagacagtgaataaccttgtctattaggaagaatgccatttgtgaatgatgaacttaatgtgggaaaagactgcctgaaccagtagacctgtggttttgtagctgtttggagtatttcttggaaattgagcctcagg

SEQ ID NO: 3434 - DNA, 1217 bp, Homo sapiens
ccctaaacataagtttgttcattttgtaaaatgtataatttcagctgtcccacctgagtcatggtgggtggtagtctgcaaagtctcttctaagtggtaaagcttagtcaaatgtgaggtattatcactggatcttggtgtcattaaggccatttagattatctttacttgtggcccctttatccaacaagggcacagacccagaagggtgtttagacttctgtcatgaagtagagtcattagctggaacttatgcttcccttactaacagtgcaggctggaggaatctgatgcccttttattttaatagagttgccttttatcaagagtgattaccttgaaaagtcctggagtaatctgttcttaggctgttggcctgtgggagctgacgttttctctccttattgaaatgtgtttctctcttacagctgagcgggctttggacaccatgaactttgatgtgattaagggaaagccaatccgcatcatgtggtctcagagggatccctctttgagaaaatctggtgtgggaaacgtcttcatcaagaacctggacaaatctatagataacaaggcactttatgatactttttctgcttttggaaacatactgtcctgcaaggtaaacattgattaaatgattttagcagaataattaattgattcttgaaaacaagataaataccaaacagagaactatcttggaattggggaacaagatatgggaattttcaaaatgctggacatggaatcctaaaagttcccataggtaatctcagggccatacccagcgtaaccagcacacgctttcatacccttgttctttactcagcctgaaatatccttcctattctttagctttggaaagcccacgtttttcttttgggatgggggaaagtagaggaccagagaagtgtctctagtcttgaggaaacttaatcactttagaagcataaattcactctattccttctacgtatctgttctatgctgagcactttaaaacttaaacggtggtggtgtatatgtttaatgccatactacactgaaaatctgttgtggccttggaaaatgttttgttttctgcatcaccgtggtttgcacccagatctcttaaaatgtgttgttgtgttttaaagagacagagtcttgctctgtctgtcacccagggtggagtgcagtggtctagtaatagctcattgtagcttcgacctcct

SEQ ID NO: 3435 - DNA, 1050 bp, Homo sapiens
gggctccccagggagtcacaggacagagctgcaagtggagccaggagggctgccctgggccccaggctgtccccatgggtcagccagtctgcagagtgacactccagtgcccgggctggtgaccaccaccaccccactcaggctgctctgttctctctccgttgtgacctcacttgtcttttcctctgtgccccagctctgttccttgtatttctgctgcttccccataaccttgactcaccgtgaaccaagccctgcccagtggattctctctgggcctccttcccatgttagcatctgcagctcacagcctccctgtctcagcagctcttgtccatgctcgtgagagggagggagcctctcctgccagtgcatttgtttgtggcggatgatgtcacgggtcaaaggttggtctctggattcactggttgttcagtcaagtggccaagggacaccagggctgaggcacagctgcttaagggctgacctttgagtgggactgagggtggggcaggcagtgtccttggcctgtagggtgtactggagaactacgtaggaataaatacatctgtgtgtgtgatgtctgtctgagcgtatgtgcatctgtgtgtttatgcaaacatatgcctgtgtgtacatacgtgtgtacatctgtgcttataacatggaggtgaaatgtactttcgtgtaaactgaacaactggcactgtttaaagagacatgaaaatgagctggtaatcatgcttctgccattcagtatcaggaaatttcacccatgcacggagtgaagaggctccattgcactcccatctttatcatgaaagccgggaaataacctacatgtctatgatgagccaatatcaagtcaattacggtatactgctccaagggattttataaatttgaaatgtttattgtggagacttatttaaacaaccagaaaaagttttgtgttttgttttttttttcttgaaacacactctcattctgtcgcccagctggagtgtggtgacacaatcacacctcactgcagcctcaacctcccaggct

SEQ ID NO: 3436 - DNA, 1021 bp, Homo sapiens
ctcactctgtcgccaggctggagtgcagtggcgtgatctcggctcactgcaactttcgcctcccaggttcaagggattcttctgcctcagcctcctgagtagcggggactacaggcacgcaccaccatgctcagctaatttttttatttttagtagagacggggtttcaccacgttggcctggatggtctcgatctcttgacctcgtgatccgcctgcctcggcctctcaaagtgctgggattacaggcgtgagtcacggcgcccagccaaaaggatagacttctaatcattgtctctagagcatggtatcctgttgataaggagcataactcatagtattatagggaaccaggagtccatgtatacactcgctgggactgtcctcttcacccagggaccaagcaagggaaacatgatccaagaggcagtgtcattgtcaataattatagaagattataggtgagccagaaagcaaccctcttccctaataaaaagatattccggtagggtgtagtggctcacgcctgtaatcccagcactgtgggaagctaaggcgggcagatcacttgaggtcaggagttcgagaccagcctggccaacatggtgaatccctgtctctactataaatacaaaaaaattagccgggtgtggtggcgcatgcctgtaatcccagctactcggaaggctgaggcaggaggcagggatgcctccaagtcccttgaacctgggaggcagaggttgcagtgaaccaagatttagccattgcacccagcctgggcaagagagcaagactccatctcaaaaaaaaaaaaaagaattggtgggggccgggcgcagtggctcacacctgtaatcccagcactttgggaggccgaggcaggtggaccacttggggtcaggagtttgagaccagcctgaccaacaaggtgaaaccccgtctctactaaaaatacaaaaattagctgggcataatggcctgtagtcccagctactcgggaggctgagacaggagaattgctt

SEQ ID NO: 3437 - DNA, 1074 bp, Homo sapiens
tgcttatcctgaggcccatcagccagtctggagatggattcctgaaaggacaggacagttcccatggaaaggatggagtggaggtggagtgattcccagaggagaagggtgagcgggttggtaggaggggagggcacctgggcagacaagcatttgtgtccactgtggagttgctgtctgctagtcagtaagacacttggttttctagcagcagggctgagcttaactaagtccatatgccttctgggtggtacttgccattatcttcatcatgagatatctgtagtagtcattccttagaaatttatggcccagtatggttttaacaaaactacatatcttgttagtatttgccaaaaacatttgaggtcgtttctacaaatgaagaaacagactcacagtatttcagtgacttaacacagggttggtgttagttcagttgtaagggattgaaagccagtttaaactaatttaggtataaaagacgatttgttggcttatggaatctaaaagtcaaacaactgagcttctcctgaaaggacaggcaaggtgcagctgggcctcaggaacaattgctcccaaggactcagacactaccagcactgcctcatctcttctcagcgtgccgatttcacgtttctctccatgcaaaccagctttcttcacgtggtcgtggtcattggaagctgccacacctcacatcttacagcttttcttcactgaaaagaagtggaccaaatcccaagtttaaaagccccaggaaaagacgcaattgagtagagctgaattctgttgtctacccttggattaagaaggacagcgtaccatctaagaacatggccctccctgtagaacagtatgatagaatgaagccagggaacacgagagttttcaggaagagggcagggatgggattggtgctgagtagaccaaataataggtgtccatagcagtgacacagagtaggtggcagatgagagaactccaggtcctctgactacaaccctgactagcgcaccgtaactaccgagtacttcccatgcaaaaggaaggccctatctctgcaagaaccgt

SEQ ID NO: 3438 - DNA, 1031 bp, Homo sapiens
aggttcatctgcttctgtcagtaaaaatcttgattaggctttagatacttctcacagttcaggcagtgctgttgtaagtgggtagaaagtactttgattctgaagagagatctagacttgaaaatactttgcttgattcttagggctaagcaagagaacagctcatctgtattccaggaatatggcttgatccttcctaactctcagtaattttttgtcctctcttagctctctttagttccaaagaggatttttttgcttaaaacaaaacaaaacacccagtataacattaaaaaataacagtccgggagtggtggctcacgcctgtaatcccaacgctttgggtaactgaggcagaaggatcactcaagcctaggagtttgagaccagcctaggcaacatggtgagacccagtcagcacaaatatatacatacatacatacttacatatatatatatgtatgcatgccgggtatggtgggtcatgcctatagtcccagctacgtggaaggctcaggtaggaggatggcttgggcctgggagattgaggcttcagtgaaacatgatcatgccactgcattccagcctgggtggcagagcaagaccatgttgctcaaaaagaaaataaaactaacaaccccctcccccaaacacacatgcatgaaatcaaccttttatgaatgcagtgacttgtcaatatccctagcacctagacacagtcaaatatttgttgaatcaattgcatgaaagcataaaaactaagtaggtctctacataagtgatctgcttcaattgttaaatactttttaaccaggatgaagaaattttgggatagccaccagcaggaatttctgtatttgattatcacctacttgggcagttaaggctgttttctaaaatgatggctaactggttatttgtaaagctactctgaatgcttacaaaggaagctgcatgtttgtattagttcaggtaaaaggctaagttgctataacaaagagactcaacaatacagtggcttaaagaacaaa

SEQ ID NO: 3439 - DNA, 1599 bp, Homo sapiens
tgaagaaccaggccttcttttccatagaataaagcagaagggctggctgctttttaatacctggagactgcttttctacttttacattcagaaaggttgttgctaaaatctgtatacagcccatctgctctctgggttgagaaaaaggaattttaggaaaatcccatttcccttaatagagaattatatccagatctctttgaattgaatactcccttccacccttgttcttttagggccacaagcctacagccactccaataaagatgccatacaatgaagctgagaacaagagaagttatcacctgtgtgacctctgtgatcgaatcatcattggggatcgcgaatgggcaggtagagtatggggaggggcatgaagaaatctataagggtgggttcacattgacttcatgaaatttagagtctttggcagattgaacctggagtctatttatttgtaaagggacagctagattcctctaagagcctgtgctcaaattccttggaggcttctgggaatttgtctctgtattctgagattcagaggaagatcagatgctctccatcttcagctggaattaatattttatactaagagatctgcagttaactttctagagctcctttgactttgtggtcctggcttggaggagtttcttggcctttcatgtttataattcagtgggggtgggatcaggaagtaagggtgtaagggaagccaggcagctcatccaggagactggaagaagcagaagcatagctgggagggggcaggaagtagagttactactcctgagtgtggtttttaaaagtggtatctcttcagtaacttttgaggtaattgttggcatagtggtagttgctaaaactgtgataaaaagaagttaagagaaactgtgtgaaagtaagcctgtcacacatgtataaagaaggttagttccccaccacctcagggccagccccaccctaaggctctatccctgcattagagcctggatctgcctctgccacagagtcacactgcacacacatcattggattttcagatttctgtagtcatccagtcaaagcccaggacttcttccccaagccttgagtttacatggtatttagaaataggtgtaaggtttgctgctttcaggcacagtggggcttgtcgtttactcagcagctgggatccttctgttcagagtactgttttgcatgggattctcagagaagtagatttttctccccaaagcaaccaataggatgattaggtctattaactggtaactggcaaaatgaactccattgtcagagactggggacggctgtgattgcccaaccagcagaagaagcctcgattgtcattggtttataatgatgaaaggggaagagaaagagagtgtctgattgtttttttctaaaggaaacttagtggttcgatttgttgaatgttcttcagggatagccttagagaagcaacatgtgtgagcctttgtgagcttagcttgtgtaagcccttctgtagtgccatctgtcaagtccttactcccatctcctgctgccatggagagccagcccagaagcccgttttttgccttaggctctagctgg

SEQ ID NO: 3440 - DNA, 1068 bp, Homo sapiens
ctgatttttagcttcagttttgtacctgaagagcagtcagatttctgtagggaagatttcctaattacagtgtttttggggggccagatgagttgtataaaaagacaccttcaccatttctcccagcgtctccacatggtgcttcagattgcttcaaatgaaactttagttgaacagcatttttgagggaaaagaaaggaaattctcattgatttggccctgtactgtgtctttggcactaaatttggtgttatacatatattattgagtcttcaaggtaggtgttattcttttatttttacagataagaaaatgaaggcctagtgaagttaaataacttgccaaaaatcacccagctagtcggcagtagataactgaatgcaggcctgacacagagtccacactcctttatactactcttacttcctttagctgtaactttagcaagacagcattagtattggaccatgggtaaaaactatgtggttatgagctaaaggagattaatttaagcataagtgaaacttcagttttatcttgtggacatgttttaaatatgcttctgaatcatcttgtgtttaccttttgctggtagacttctgctctcaattacagacagggccagctgaagcctctgccccactcggtgcctctgaaaatacataccttgatccctgctgttgaccactaaactgctaacattctttctcccagctcccactctctgcctgagctctccagtggagttctggtgtgaagaggcttgttgtgctttcctctacttatcctgttttctctgcatgtcctggtagatagaagtcttagtgtcatctgaagttgaagctcagtgctgtattacaaatttctaatgcagcttctcttatccccatgtctgacaataagcctttaacagaagacttttgggtaataatttagaacttcttcctgtagtaaaaccacaataattcctccatctctgtggtaggaggagttgatggcacagtgtgtcatatgcctgttcctcattcgtgtgtatgccggcatcgtcctggtgctggagtgaaaggc

SEQ ID NO: 3441 - DNA, 1053 bp, Homo sapiens
aatactccaaaatctgaaacttttggagtgctgagatgatgctcaaaggaaatgctcattggagcatttcagttttcagattttcaggtttgggatgctcaaccagtaagtataatgcaaataattcaaaatctgaaacatttccttggtcccaagtattttggataagggatatttaacttgtgtataattgacattttatcttactgtggaaattgtatgctccctatacttaatttaaagggggaaatagagaatttgttttctctttttaaagcaaacagtgttttttctttatgatccttgattggtaacatctttcttcccaccctgccttagccgcttaagggttagtgggattctagtagaaaagaggtggtctgtctctatgcctgcagattggctggcaaggagaaatgtgtaaatgattatttacctggatattgaaagtcttttaaaaaaagttattttcggccaggcacgatggctatcgcctgtaacctcagcactttgggatgctgcagtggatggattgcttgagctcaggagttcaagatcagcctgggcaagtaacatcgtgaaaccttacctctacaaaaaatacaaaaattagccagatgtggtggcatgtgcttgtagtcccagctacttggtggcgggagctgaggtgggaggatgactcgagccctgggaggttgaggctgcagtgaactgttttcgcgccactacactccagtcttggtgacagagtgagaccctgtctcaaaaaaaaaaattattctcaggagcaaaggccgccttaaagcagataattatctgttcaacggagattctaaagagaaaaatttaaagtagcagagatgaaaaaacaatagtggctatagtaaattgagtgcttactattttttaggcattgtgataggggatttctatgaattgtcacatttaaggctcatggggatttttacaggtgagaaaactgaaactcagacaggctgagtaattgtccaagagctgaacctggaaattgaagtctatttatcttcagaacct

SEQ ID NO: 3442 - DNA, 1026 bp, Homo sapiens
aggcacaaattaaatgagttaaaaaggcagagttgatgctttccttatggctcttatttacattattttttatttatatgctgttttactgtttaccgattttatttcattgaagatagcttatatccttgcttggtaaatgacctcagtcactaagagcatagagccttctgagtattaaacagtaacactaaaattatttccctttctcctttagttattgtgatagtagtagtgataatgatagcaattaggtaatagtgaccctcaatgtggcccttaaaatgtgccaggcaaaaactaagtgctttttagtagtaactcatttaatccccacaacaaccctatgaggtagatattattattttcattttactgatgagagattgaggcccagagaggttagtaactgacttcttcaactacgaataactagtaagtggtagagctaggaaatgagctgaggcagcctggcgccagggtctttcctcctaaccattacactgtactgtacttatttgacacccgtgtaagtaaagggaaacgtgagataaaaatgcttttaacatctttgtgggctctacggaacttattatttgttcattcagtgctccctgtagaatcagtgattacagagaacatttaatctcaaagtattcatccctattttcaaactggtattttcagatctgttcttggagaccttgcatttagaaaaagtacacttgaactttttagtcgaattggcagatcaagagctcacagacaggatattgcctttgagtatttagattgtccttgctgacccctgaagcagtaattttgatagatcacaatgtttccactagagtacagcagtattaggggttctgacttcaaagtgtgtatgtgtatgttttatatgtatttttgtagactccttctccacaaatggaaccaatcttacacaaattctgaaaaccttttagagctatttaaatccaagaaatacctaagcattttgaagtagaactatgagcaatgaat

SEQ ID NO: 3443 - DNA, 1088 bp, Homo sapiens
tgtggcatttagagcatggatgtgacctaaacctctggaccaaatgtgatacttacaaaattgattaatttctaagtttgtttagatatttatgcctggtacaaatgtgaaaaatgttgtgtttttgcttcttaactgtgcagtatgattttatttgataaataaaggatacccataaaaacacataattaataactgtacagctcaatacaataataaaaagttaaaatatctgtgtaaccacaactcaactgaatttcaattcaagaaacggaatatcacaagaaatagaacattaccagctcttaataattttgaaaattttatttcattgctgctattcactagtttcttattgtgcctaaaagctatcatccaagtctttttttttttttttttaaattgtgatataacattgaccattaaccatttcggtggccattttagccatttcagtatttcagtggcattaagtacaatagcattgttctgcaaccattactaccttccatctcaataggtttttattttcttaaaatgaaactctgtaccagttaaacaataaatccctattttcccctctccccagctcctcgtaactaatattctactttgtgtctctatgaatttgactactctaggtacttcatatacatgagatcgtacagtgtttgtccttttgtgattggcttatttaacttagcatagtatgttcaaggttatccatgttgtaggatgtgtgataatttcatgcctttctttttttctttttcttttttttttttttttgagacagagccttgctctcttgcccaggctggagcgcagtggtgcgatctcagctcactgcaacctctgcctcctaggttcaagcaattcttctgtctcagcctcctgagtagctgggattacaggtgcctgctaccacgcctggctaatttttatatttttagtagagatagggtttcaccatattggtcaggctggtctcgaactcctgacctcaggtgatccatccacctcagtctcccaaagtgctgggattataggcacgacccaccgcccggccaacttcctgcctttcttaa

SEQ ID NO: 3444 - DNA, 1065 bp, Homo sapiens
ctatcctgggttcccagatattctggttattttaaaaaatttgcatacagtggccagctgcagtggttcacacctctaatccaagcactttgggatgccaaggagggaagattgcttgagcctagaagtttgagatcagcttgggtaacatagtgagagcccatctctacaaaaaaaaaaaaaaaaaaaaaaattagtcaggcctggtagcacatacctgtagtcccaatttctcctggctcaagcaggaggatggcttgagccagggaggtcaaggctgcagtgagtcatgatggtgccactgcactctagcctggacaacaaagcaagactctgtcccaaaaaaacatttttaaaaattttttgcatacatatagtaaagtgtactctttatgatgtttagttctatgggttttgacagatgcatagagtcagatatataccccacagtaccatactgaacagttctatcaccctaaaaaatcccttatagtggcccctttgtagtcaacccctctatctccttcaatctctggcaacaacttacctgttttccatccctattgttttgccttttccagaatgtcttaaaatgtaatcatacaatatgtagcctttgaggtttggcttttttcacttagcaaaatacatttttttaaaaggtagattgattgattgattggagacagggtctcattctgttgcccagggtggggtgcagtggcgccatctcggctcactgcagcctcaacttcctgggctcaagcaatcctcctacctcagcaccccaagtagctgggactataggcctgtgccaccacacctggctcatttttgtattttttgtagagacggtttcaccacgttgcccaggctggtctggaactcctgagctcaagcaatccacctgcctcaggctccgattataggcgtgagccactgcacctggccagcaaaatacgtttaaaattcttccatgttgttgcatgcgtccaatgctctttattgctgagtagtattccactgtttggatgtaccatagtttgtctagtcaccttttttttt

SEQ ID NO: 3445 - DNA, 1053 bp, Homo sapiens
ctgggattacaggtgtgagccaccatgcctgaccttttttttttttttttttttttgagatggagtttcgctattgtggcccaggctggagtgcaatgacaccatcttggctcactgcaacctccacttcccaggttaagtgattctcctgcctcagcctccctagtagctgggactacaggcatgtaccactgcacctggctaattttgtattattagtagagtcggggtttcaccatgttggccaggctggtctggaattcctgacctcaggtgatccgcctgccttggcctcccaaaatgctggaattacaggtgtgagacactgcgcctggcactgctgtaactttgaactcctgagttcaagcagtcctcctgtctcaagtagctgggactataggcatggaacactgtgctggtgataaatatatatatatatatatttaaaatcctcacaatagtctcataaaatggatattatcacttcacagttaagaaaataggcctaaggtcttagaataagtagcagacctggagtctgaacatgaaagtgtctgctttccatccccagtggcatatctgctacacaaagccatttcctttaagatgaccaggggctgtggggttcaatcagtagggagttttttgtttgtttgtttgtttgtttgttttaagatggagtctcgctctgtcacccaggctcatgatcttggctcactgcaacctctgcctcccatgttcaagcgattctcctgcctcagcctcccgagtagctgggactataagcgtgtgccaccacgcctggctaattttttgtatttttaatagagacggggtttcactgtgttagctaggatggtctcgatctcttgacctcgggatccgccagcctcggcctcccaaaatgctgagattacaggcatgagccactgcgccaggccaggagtttttaacttgtatgccagttatccttcttaggagtgtgcaacattttgatcaggaaaaagatgtattttaggattcatattgtaaatcacagtgttaattcatagt

SEQ ID NO: 3446 - DNA, 1380 bp, Homo sapiens
tgaaacccgtatagttcacaatagagctcagggagcccctaactcttccaaaccacatgggagacagtttccttcatgcccaagcctgagctcagatccagcttgcaactaatccttctatcatctaacatgccctacttggaaagatctaagatctgaatcttatcctttgccatcttctgttaccatatggtgttgaatgcaagtttaattaccatggagattgttttacaaacttttgatgtggtcaagttcagttttagaaaagggagtctgttccagatcagtgccagaactgtgcccaggcccaaaggagacaactaactaaagtagtgagatagattctaagggcaaacatttttccaagtcttgccatatttcaagcaaagaggtgcccaggcctgaggtactcacataaatgctttgttttgctggtgatttaaccagtgcttggaaaaatcttgcttggctatttctgcatcatttcttaaggctgccttcctctctcagtacgttgccctctgtgctatcatcttatcatcaattattagacaaatcccactggcctacagtcttgcttctgcagcacccactttgtctcctcaggtagtgatgaattagttgctgtcacaaaaggagggaagtagcacccaaattaagttgcttaagagaggaaatgtacatcttgtataacttagggagcgaagaaaatgtaggcgcgaaagtgaaaagtgaggcagctagttcttcctattccattctcgaccaacctgccctttcttaatatgactagtggtcttgatgctagagtcaacttactctgttgctggctttagcagagaataggaggaaccatatgaaaaagatcaggctttctgacttccatccccaaaacacatttaccagcatactccaaactgtttctgatgtgttccatgagaaaaggattgtttgctcaaaaagcttggaaaatactacacactccctttctccttctggagatcaacccacattagagtgtctaaggactcctgagaattcctgttacagtaaacaaaactaacgtaatctaccatttcctacactatttgagcatggaaatcatagtccccactctgtgaaaacttaacgctttttggaagacatttctgtagcatgtcagtttggagaaatgatgagctacgccttgatgaaagaaccgtgttggtgctgctaagtttagccattatggtttttcctttctctctcttaagccttattcttcaactaaaagatgaggattaagagcaagaagttgggggggatgtgaaaataattttatgaggttgtctaaaataaagagtagtttcttatccttggtgttttcagtattttttgcat

SEQ ID NO: 3447 - DNA, 1029 bp, Homo sapiens
aaggttcttgcattcatgaaatatatatatatacacacacacatgtgcacatatatgcacatacatacatagacatatatatacacatatgcacctatatacacacatacatagacatatatagacatatatatacacacatatgcacttatatacacatatatacacacacacatatatatatatacacgataaaatggaggatagctgggcacatggtggtgtacacctgtagtccctgctacttgggaggctgaggctggaggatcatttgaagccaggagttcaagacactgtggtgtgctgtaattgtgcctgtgaatagccattgcactttagtctaggcaacatagcaagacccaatctcttggaaaaaaacaacaggatactgttcgaaggacacactagtggttgtagtgcttaaaggagtgggctctggggccaaactgcctgtgtctgaatcctggcttataccttattgtctaaccttggacaaggtatttaacctcatttttacagttttctatctgtgatatagggcaaataatgaaatctactccacagggtggttgtgaggattaaattaattattgccaatattttgcttagaactatttgtgttactcaaaacaatgttattgatgaggatgctaaggatgaagtataactgggggaggggaaggaaatgggggtgggtactatttgagataaggtggtcagatgtgacttgtgtaggaccaagacctgagagctgaaaatgcgtccagccatgtgatgcaacacatcctccagggatgagcaggtaaaaagatccttaggcaggaaagagtgtagcagcaccaggaggaagctggtgatagtattagttctctgcgctttattttcatgaggaataagtgaatgaaatcagagtttggtcctgttcattttgtttctcacagtgccttgtgcatagtgggtattcgatacatcattattgaaggagtggatatttgtcatctaccactgtaggtgtttttggactccctc

SEQ ID NO: 3448 - DNA, 1027 bp, Homo sapiens
aaacattttcacaactttatgacagacaataatttctgagaatataaaaagcactgaccctaaaataaaattaaaaagatatattggatatcataaatattaattttattccctttttgaaatataccatttaagactcataacaagatgacaataacaagacaactgaagtaaaaagatttgaacagacaatcacaagaggagatatacataagcacatgaaaggatactcatcatcattagccatcaggaaactgcatatccacagaatgcctaaaattaatgactggcaatattaagtgttggcaagtatatggagcagcatttttgatggaaatataaaattgtgcaacaattttgggaaaggattgacaatttcttataatggtaaacatgtacttgtcacatgacccagaagttccactcctaggtgtttattagaaaaatgaaaacatatttctgcacaaagacaagaatgtttatggcagcttctttataaatcatatagtcaagatttataaagaactcatacaactcaatagcaagaaaacatataacccttcattcacaatagccccaaattggaaacaatacaaatgtctaatacatctgttagggttcaatcagaatatagaaaccacacagtaatttgaagaaaattttaatataaaaattattaacaggattttcacaagcaatagaatgaaactggacctttatcttacaccaggcaaaaaattcaactcaaaatgagtaaaagccctaaatgtaagatctgaaaccgtaaaactcctagaagaaaacataagagaaagtctccttgacattagtcttggcagtgatttcttggatgtcacaccaaaagctcaggctacaaaagcaaaaacaaataaatgggactatttaaaactgaaagccttctgcacagcaaagtaaacaatcaacaaaaggaaatgacaacctacagattgagaaaaatatttggaaaccacatatcatataaagggttaatatccaagctttataa

SEQ ID NO: 3449 - DNA, 1024 bp, Homo sapiens
cctagattggcttggggcaggtgcttgttgaaaagcatgagtgtttctgctttgggaaacccttccagggctctggttggaaacttggccagtaaggacagggccttgggcctcccaaggagttcacaatgatgccaggaagggtccctgagcctgggttccagtcagcttggctaacagaatggggcttgggaattccaggggcaactgagcatccaccccattagccagtgatctggacagggacagctggctacagggaatcaaaggctgttctgtacagttttaccagaaactgtgaccttgggtaaggctcctcacttttctgggcctcaacttcctcatctgcaaaatcagagcattagctgctctccccatgattccctcccagttttaattaaaagtctctgatctggagcacatgagggttgcgagcctggtgcacctggttcctgtctccgtgggctggtttccttcagcccctgatgcccaggctgggtgcaggctctcatctggtccatgcccagatgctgcctcagacaagaactctgggaatcctaacagactctgctttcctctcttcgtggtttgtcctccctcttttattcttgtgtaatgatgagacataattaagggtcatctacaatggacaattttcaaggtgctgatgtgatgtcacaacctccgctacatcctgagtaagtcagtgtccccaacagcagatgaggctgggtctttcctcatttctgcttctgggatgacatcagtgggagagttgaagatctgagaattctaaaggaaatgttctctgatgggaggagagagggaacttatttcccttcaaagtagtttgcttcttaagaccactcctccctccagaatgtctttaaccagacatcatttcagaaggtggggcagctgcttccttaggaagagtgggcctgatagctcaaccaactcctttagcatgtaaactcacagaaggcaagaacccctttttttagactttccaaatgcatcctgc

SEQ ID NO: 3450 - DNA, 1045 bp, Homo sapiens
gttctgaaccaggagaggcagcctagacaaccaagtggcagcaggtgggggcattcttctaggaatgaggggcatcagcccaccccaggcacctcagtggggttccgggccacctcaggactccaagaggctgtgtggagccaccactcctagccacagctgccatgataagtccttccatgaaggactgaggagggagagtgggggtccagggctggtgctgctcttccctcagctctgccggggctctaaggtccctctatttatttctcaaccctggctggcctctcaccaggagtttaggctgaatgccttccacgtgatggaggaaaaggccaactctgtcctggtcttgctgtggcaccccatcgccccacagctcgtaccttctcaccagattcccctgaatccaaactcgtggtgcaaacctctaccttttttacaaaaagatcttattgttaatttattgtttctggcacttgggcaaaccctgtagttaatactcctcccacactagacactgggtttcaggaggagggagactgccctgctttggtcccagagaggccctctgcagataggcgtggcccctcttcagaggacactaccctagggcactttctctttgaggtggagagacccataaagccttgaccacatcactccatatggggaggagaaggatccctgtcaccttctcctctcttcacggggcccttttgcagccctaggcctcatctgtgggaagggagtccctggcttatactgcccccaccacagctccttgccctggccagaactgctgtcgaagaaaatcaggccggaaggccaagaaggcgctaagggggatgggagggcaggttttccaggctggagtcggttccacccactcgcctgtccacaggcttccttgtaagcaagtcagcagcacagctactcacgctgccatctggacttattttatgtcaatctgtttataaataaaaaccaatatagataccagtgtctttttaatcagttaacagccaaatcactacgcattcat

SEQ ID NO: 3451 - DNA, 1033 bp, Homo sapiens
tatctgggagccagcactctggcagtccttctaagctctaactctggttttactgtttttcaggtgaaacctttgtcctggggaatagtctggcccgctccttggaaccacactcagactcaatggactctgcctcaaatcccaccaaccttgtcagcacctcccaaaggcaccggcccttgctttcatcctgtggcctcccaccaagcactgcctcagctgtgcgcaggctatgctccaggggtaagcttaccagagtcctggccctccttccctccctcactctttccttcacttccttcctgagctctgggaggccagagaggacctagctctgttgccctctgcctggtggtgggactagggactggacttactcttgtgcctggccttgcacctgggaggtaattggagctccaggattggcttgagcataacagaaactaagagccaaagacctagacccaaaagggacagggaaggattcattcactcattcatccattaactatttatttgaactccatttgtgtttggcatggggaagcaaaaatcagtcactttttatcttcaaggtattatggtgagagagacacgtaaacagataattattaaacaatgtcttgagtgcagtgacagacatatgctttgggtaatatgaaaattacaagaaggaatacctaacccaagcttggtgttcaagggacactttcttaagggaatgatgccttgcctgagactgtataaatggccatatcagggctggtagaggagggagagctttccaggaagaggggcaacatgaataagggcaaaagaataagaaatagcactgattataccaggaactgcatgcaatttggaattgctcaaccataaaatgtaatactgagactcaaagagaaaagcctggaaaggtcaaggcatatatcatagaagaccttaaatgggcgtttaattagaggcaagacaggtttttgttttgaatagattattgactactgtgttgagcatggatttgaggagggacaaa

SEQ ID NO: 3452 - DNA, 1025 bp, Homo sapiens
tcgcttgagcctaggagtccgaggctgcaacgagttatgattgagccactgcacaccaggctaggtgacagagtcagaccctatccctaaaaaaataaaatatagttgagtttatttgttcctgtttgcattcagtttaaggttcagtttttgtccttatctttatggatttaattttattttttgaatatatagaaaattaacttgcttccaagagtcaaaagtcatacaaaacatttactaagagaagtatcgtccaccctttctcttctaccttattccttccaccaccactaccctctttaagcaatcactttcactattttctggtttatcctccaatgtttcattttacaaaagtaagcaaatttatgtgtgttttcctacccttcttacacaaaagttagcatgctctatattctcttttgtactttgctttcttcttttacttaacagtataccctgggagtcactcctttgcaagttcacaaagatctcccttattctaagctgtagactactccattgtgtatgtgtgtgtgtatacaatcaatatagtttctggtattttacaattacaaataatgctaccattgcataaataaatacacacacacacacacacacacacacaccagaaactatatatagtgtatagattattatatatagtatattgtacaataatatgtaatactgtatatgtattgcttaataaacttgtacacatgtattttcatatttggaggtgtatcttcagggtaaatgaccagaagcggtattcttgggtccaagggtaaaggcaaatatagttttgttagatactgccaaattcccttccacagagatgctaccagttttcattctcaccagcaatgtgcttgttttcccgtagcctcaccaacagagtatattatcaagcttttgacttttttgccaatctgatgggtgagaactggtttctcaatataattttaatttgcatttctctttttatgagtgaagtttaacatcttttcatatgt

SEQ ID NO: 3453 - DNA, 1217 bp, Homo sapiens
gtctcaaaaaaaaaaaaaaaaaaaaaagagacaacatggttagagtggaataatcaagggagagtggtaggaagtaggtcagaaaaataatgaggaatcagatcatatagggctccaaagttcagcataaggaccttggctttagttctgagtgaaaggggaagctattgaaggttttgagcaaaggaatggtgagatctgaagcatgttttaacaggctcactctggtagctgtgttcaaattagagtagaggagcagagacaaaccattcaaaaggcttattgtaaaaacccaggttagagatgatggtggcttaggccaaagaagtatgaaggggacttatgaaaaacgatcagattgttaatacattttcaagttatagctcatggactgctaataggacaggaatataagaagaagagaggggtcaaggacaactccaaggtttttagcttgtgccatttgaaaggagatagagaagtcttgggaagaacaagtctatggactgagataggtgagtcagaacttcagttgcagatatactatgcttagaatgtctaatagattttcaagtgggaaattgtattaaaaacaagaagtttaagggaaatttctaagctggtaatataaacttggaagttttaattataggtagaatttaaagccatgaggctagaggagatcctagggttgtgttctgaaaatgtggtccccagaccagcagcatcagcactgcccagaaaagcaaattcccagacctactaaagcagaaactcagaggctggggctcagcaatctgaattttaacaagccatgcagactaaagtttaagaaccacttacctaaggactagagtgtagacagagaagagaaatctgttcaatgacactcctgggacatgcccatcatttacaggttggtaaatattttacatctcccctttttctacagtatgaatcttagtttccgccaacatcctataatacacataaaataagtttcagaattctatatgcataccactatggaaaaactcttagaagagttcaagatttgtttacgtttttttcctccttagatggttaaagtacttaaagtactctgttcaaaaattacttgaattactttttttccttcagtgtaattatgttattcatttaaaacacagttgtgaattagccaggcatggggacacacatctgtagtcccagctagc

SEQ ID NO: 3454 - DNA, 1035 bp, Homo sapiens
aatttgattagctagctgtggtggcacatgcctgtagtcccaactacttgggagactgaggcaggaggattgcttgagcccaggagtttgaggctacagtgaactatgatcgtgccactgcactccagcctgggtgacagagtgacaccctgtttctaaaaaagaaaagaaatgaatttgagacattcgggagacagtttctctggaaaagacattcttttttgagccgcattcctttaagctttcagtactagaggatcctaaaactagaagcagactaagatcaaatgctagggaaaccgtggacttgatgccaaactaagcaaaaagaataaatgctgagttggaggtagaccgtgtcattagcagaatatgctagatctaaacatgaacaaccagaaagctaagtctgaaatcagtcagcagagttgcaaattaagaagactagttgtccagatgagtttccagtaaaagataacaatttctcctaaccttaaaggccaatactctgagccagtatctgacaaactaacttgatttctagatatacattttacttcaagaacactaaactaattatccatttattattttaggtaaagtatttttgcccttttgtatacttagacatattgcacattgccaaaactggagcagaactgaagggccccagagtgattaaaaactagcatgttctttgaactagtttgaaagactggaaattgctgctaatgtgtgtaatccctttagcagctggtcccatctaatagcccagttactgcctgtgaagtggtaagcattaggattgtttcatactaattattagcatgagaagaatgagaaaaaaggtagggaaaggagaaagaaaaagatactagcctgtctgcactttgtgtagtcatgttggtccactatggccatagaacaggattccctttgactgtatcctctacaggagcagagtttcagggtcccagaacaattagggtcaagagtatcattttgccgtagttgcctgatgagtgttttatttct

SEQ ID NO: 3455 - DNA, 1068 bp, Homo sapiens
taggtttccatctgtgattttggaaatgcatagtgagacctacaggaaattccagggcccttttttaaaccagcagctgggagtttggatgcgtttgaaatgtgtgttgggagtagaatgagaaggattaggagtggaagagagatccttcaaagcactaatgtaatataagatagaaagaactgttgctgatttgattttattctgcatcctgtttagatttgctatatttttatggtgaaaatatatacatttagaattagccagctggactcactttagataatcccagttttgttggcaacatccagagcatcataatcaggagccagtcaaacatctgccttcttctctccctcaggcctgatcagggtgttgaccacatcagtgtcatagagcttctttacaacctgtttgatctggtacttgttgattttgacatccacaagtgtgttgttgtcttctatcttcttcatggctgacccagtggtcaggagggacttaataatggcatagcggtcacgcttatttctttctcctgtgggtgcccttccaaggatatttgggctgcctccagagctgtagtgtcttgggctgccaggttggtgacatgtacatttgtgggctggcggggggtgggggtcggggggaggaagggggagggagggagtgcctgtggtcacttttcagtactgtctttttggccctcaaaggccttgctttggctttggctttgggagggacaggagcttccttctttgtcttcagtgccatcttgtgaaaaaagagctacatctgtatattttttcagaaccataaaattctcacagaattttcaaaatgacctttttagcaatttactgtcacttcacttaacctcccttagcaaattatttaacttccattagtctttgtttcttcatctataaattgaggcagtaacagtacctactcacagggttgttgtaaggagttaagaatttacatattagaacacctggcacatattaagcattcaaaaaatgtgagttattttctattttaatgctgttattttgtgaataagga

SEQ ID NO: 3456 - DNA, 1036 bp, Homo sapiens
acagattttcattttatcttctggtaactctgaacaaggtataattattttcagatacattttatttatgagaaaactgaagctcagataattaaatgacttggctctgttgatatctgagtctagagagtgaaaccatggagatcttttagtagagccacctgtcaggaccaatatatcactgaggcatattgttttcacacttgtctccctgatactcttcccattctcctttggcccttcttcaaagcttcatttgagaccctggattttggcttccaaatcctgataaaaaataggaaagaaaaagtatggtgtagtatcagagcactgaactgggttctagtcccagccaggccacaaacttggttacgtcattgagcaagtcattcttacatgtgagaggctgaactacatgatccctagtgggcacttttacctctgtaatactatctagtttaatgatcttgggaataggtagcaggtgactcctgtgcctctgtctcctacatgattttaggttcatcagctcacctatcacctatctctgcctttttgaagtaattcctgtgtgccagctgtctgctgcctctctttttctccttttctaagccaagtagtatcccttttagttgctaaactcctgtggccaagccaactctgatgggtagtaactaccaagcgtccaactaatccagagtacttggttataaaaggcagaagctttttacttttagcttattttttgtgacttaaaataaaactgaaacagatacatgctttagtttttaaatgtaaaaagcaaaatgaagaattcagtacatatggcatgactatgatgctaatcatacctttagccatcatgataatccacttgacttccccttgctctgatttcaggctgggaaagccagtttcagattataccttagctccctatgtggattgatagcagcgagacaacatgagacccaagctactttatatttttattataaattaatatattgctattctggattagtacattcgtctc

SEQ ID NO: 3457 - DNA, 2035 bp, Homo sapiens
gtaacacgcctgtaatctcagctactcaggaggctgagggaggagaattgcttgaacctgagaggcagaggttgcagtgagccaagatcgcaccaatacactgcagcctgggcgacagagcgagactctgtctcaaacaaaaacaagcagtgcaagatgatgttggagaagtggacaggtgccaaatcatgtaggaccttgtaaaccagagtgggaatattggattttattctaaacatattagggaaccattagaaggtactaagccagggaagtgacaagatttgatttactttaaaaaaatcacttggacttgtatccagaatataaaagaacacctataactcaataataaaaaagacaacccaatttaaaaataaggaaaggatttggatagatatttctccagataacatacacagatagccaataagcacttaagatgctcaatatcattcatcattagggaaatgcaaatcaaagccacagtgaaatacaacttcacacccatggatacagctataagcaaaagacagataataacaaatgttgctgagaatgtggaaaaactggaattctcgatcattgctggtgagattggaaaatgctgcaaccactttagaaaacagtttggatgttactcaaaatgttaaagagttaccatgtgacccagtaagtccactcatagatatatacccaaaagaatagaaacatatgttcacacaaaaacacataatgaacattcatggcagcattatttatagtagccaaaaagataaaacaacccaaatgttcatcatctgataaatggataaataaaatgtggtatagctagaggacaaaatactaattggcaataaaaaaggaataaagtactaatacatgctacagtatagatgcatcttaataacattatgctaaatgaaaagccagtcacaaaagataatcattgatgattacatttatatgaaatgtccagaattggcaaatacacatagacagaagtagattcgtggttgccagtgactaggggagggaaaatgggaaatgactgctattggggtttcttttgaggataatgaaaatgttttaaaattagggatgatgtttgcacaactctgaatatcttagaaaacacaaatgtagggtgaatttgtggtatgtaacttatgtcaataaagctattatctaaaaaaaattacttgagctggtctgtggagaatgagttgtacagtggtaattgtggacaaggaagaaatgaggttgcttggattaggatagttgcactgaggtggagagatcctcgggcagaatgaaagggaaacacacttcttggctcaggaaagtgccactcctctctgtgatgcaagaaacaagtaccctggggtcagtatggtaaatgcattgtgaggaagcactgtgaggtaatagctctgtggaagcagcaagaagcgaggtaccttggaactgatagcagagtcatttttgttacttgaggctaaaacaggataagccttggtgctctgggctttattcagttaataggttgattttctcattttcatgcctagggaattcactgttcttttgactgataaatctagagcagttaggcagttctccagagccaacagagctgacggtctttgtgtccaggttgctggatatgcattcctttttggctgcaaaccttgctgataagaaatatgactcactctgtggctgatgcttccagagaagtttgctgactgttttcctctcttctgtgtctctggagtccttagattttcaacagaagatggtcagaggaccaggctcagaaggtagagagagaccttccaggtgacatttccagaccaggtgcttcagtcatcattccagcagttaggttgttccctctaacaactgtctcctcccacactttacaccctcagtaagtcctacaaaagcgctttctataacagcagaagtttggccagcagtctccatgtcctggctaaggagcaagtgatgcaatgtggaaaaaatgtggtta

SEQ ID NO: 3458 - DNA, 1073 bp, Homo sapiens
agtgtggtggtgtgtgcctgtaatcccagctacttgggaggctgaggtaggaggatcacttgaccctgggaggcagaggttgcagtgagccaggattacaccactgcactccagcctgggtgacagaaccagaccctttctccaaaaaagaaagagagagagagagagagagagaaaggaaatcttaacaagtggaaaagactatcatgtttatggatgggaaggcttgatagtatataataaaggttatttccacccaaatttatctataaattcgttgtaattccagtcaaaatcctaatagggtttatatatggaactcgaaaaaactgattgaaatttatatgaaagacagagaatgaatagcaaaaacaatattgaagaatgacaaagtagggggacttttcctatcagatatccatttaataagactatgttattggtacaggatcagatagtaagattaagggaacagaatagaatgtacaacacattttttgaaacttgatctatgtaactgcattacaaattagcacccaggaactctctacacttccggtgaaagtatacaatgttacaaccactttggagtacaagttaaaaatatttgataaagcagaagatgtatatatctaccctataacccaggaattcaggaattctacacctagatgtataacctaaagaaaccttcctacacatatacaaagaagtgcaaggatggtggttaaaactcttttaaaatagtaaacaattggaaagatctttaagtgtccaaaggagaatgaataaatttcgatatatatatacaatgaaatactattacaagttaaaatgaatcagagctaaatttatcaacatgggcagatttcaaaaacatactgctaaacaaaaagcaaattgtacaatgatatatacagtataataccatttatataaaatttaaaagcaggcaaatgggtatgtatgtatatagtaaaatataaaacatgcatgggtagctgttacctccgtggtaggtagagggggaatggaatatgggaagggcagaaagggagattcaactttatctg

SEQ ID NO: 3459 - DNA, 1029 bp, Homo sapiens
aggagaaaaaagaactttggaaattcaaattaaatagaaacatagacaataaggtagttgtaataaattcagatacatcaattatcacaagaaatgagcttaagctcattataatcatacatagatcagatttttaaaaatctagctatatgctatgtataagagacactaaacataatgacaaaaatgttgaaagtaaaagaaatctacagagggtgggaatgatggaaaacaaattttttaatttttaaaaaagaaaataaaagaatatgaaagatgtgccagatgaacttttatcaaaataaagctggcataaactatacggaaatcacgcaagactttgatactaaaagtctaaatgatgctaaaagcactgagtccaggaatttgagaccagcctgggccacctgtagcaagaccccgtctctagaaaaaatttaaaaattagctaagagtggtggcacgtgcctgtagtcgcagctacttgggagaccgaggtggaagaatcgcttaagcccaggagattgaggctgcagggagctgtgtttgcaccattgcacaccagcctgggtgacagagcaagaccctgattctagaaataaataaataaaatgcattaaagaggtcactatctaattatcataaagtacagttcaccaggaagataaaacagtcataaatgtacatgctcctagaaaatgtaatctcaaagtataatagagcaaaatttgacaaaattacatggtaaaattggaaaatccacaaatcactagggaatatttgaagacttatctcttaacaattgataaatcaagcacacaagaattggtatgtcaatcagcataagctaataatcagtatcgaataagttggtcaatttttaaaaatcactttatttgcatttaacaacagttaaatttaaatgatttgaaaataaattttttaaatgccacttatgatagcaatggaattgtaatttgcctagaaaaaaagttagtaaaaaagcatgagatatttatagaggaaatt

SEQ ID NO: 3460 - DNA, 1050 bp, Homo sapiens
gaaattataacacatgctacaacataggtgaacctcgacgacatgctaagtgaaataagccagttataaaagcacaaatattgtatgatttcacttagatgagacatctagagaagtcaaatgtatagagacagaaagtacaatagtagttgccaggagctgagggaggaggaggtgaagaggttgataataggtacagagtttcagttggggaaaatgaaaatgtcctggagatggatggtggtgatagttgcctaataatgtgaatggacttaatgtcacagaactgtacactttaaaatgattaaaactgtaaatttgatatatattttaccacaaaaaaaattaccaggcatgcaaacaagcaagagaaaaactcacccattataattagaatccagaaataacacagattatagaattaatagacaaggacattaaagcagttgtttatattgcatatgttcaagaagatagaggaaatcatgagcgtcatgagtagagaaatgtaggatttagatttaaaagaaccaaattgaactttagaggtagaacatacaagataatatctcaagtgaagaataaactgaatggatccacaacatattactgttggaattgcttcaggaggaagatgagcagacttaaaaacagcagtataaactatccaaatgaaacacagagagaaaaagaactgaaaaagaaagcatcagtgagccatggaacaacttcacgtagcctataacatatataactggagtcctgaaggagagataaggagcacataagaaattattagaaaaataatgcttgaaaaatttttgaatactatgaaaactataacttcacaaatcagagaagctcaatgaaccccaagcaggagaaatatgaaataaaccacacaaggcacatcatcatcaaattgctgaaaacccacgataaagagaaaagtcttaagagcagccagagaaaaacaagcacatgatatatagaagaacaaagaatgacagcaacttctcgtcagaaacagtgcaagccagaatacagtgg

SEQ ID NO: 3461 - DNA, 1041 bp, Homo sapiens
caaaataagaaaaaattaaccctcaatagtctgtgtggtagatatacacaccaatatactgaaatattccacaaagagacactaagaatatggtagtttaataggacgtagtagtcctaaaaagactaaaaagggattaaaagtccctacctggaagggtagggagttagagaattatagaatgagaaaacatttaattaactggcctatataagacattcttgtcctttttttaactggtatgggtctatttgatgcttcgttggaaagtaattttttccccttcatcttatctttcattgtttcttttgcatgaaaccattcttaattattagggaataattcagttggttgtccctggcccagctataaccaatctgaatccaaaacatgaattttggggttttactcttaatctgtctatacctcatgccttgtttttcccagtcctacacacctccaagcaacgagttcaagatcagtatgaaattggaagcacaggaccccaggaacaccacatccacctgtattgccacagtagttggactgacaggtgcccgccttcgcctgcgccttgatgggagcgacaacaaaaatgacttctggcggctggttgactcagctgaaatccagcctattgggaactgtgaaaagaatgggggtatgctacagccacctcttggtgagtaagtaaacccaaactctttctagccaattattaatagttagcgtccaaaaactgaacatcctattatgggaaagcctagggtacccagcttatcccttatttttcatatagtctcctaaaaaggcccacccaaaatgaaacaagctgcacaatttggacatctccatctctacattagcttatgatatccaggcttcttccaaattctttctaacaagaaatcacaccctttgttcttcttggccagtgcccatttacctgagagagagaatggaaggaggtcttgccgtttaacctatctcaaaaagcataaagctttcaccaaatcctatcataatgacaagaaatgagag

SEQ ID NO: 3462 - DNA, 1035 bp, Homo sapiens
gctggttatccacataaaaaaaagtgaagttggactctacctctatgccatatacaaaaattaacttcaagtggatcatggacctaaatgtaagagttaaaactgcaaaactctttaaagaaaacatagaaggaaatcttcatgaccttggattagatattataacaccaaaaacataaacaacaaaagaaaaaatagataatttaaacttcatcaaaattaaaagatttttgtttccacaccatcaggaaagtgaaaagaacaacccacacaatgggagaaaatatttgagaattatatatctggtaaaggacttgtatccagaatatagaaagaactcttaaaactcggaaattaaaagacaacatgattttaaaatggacaaagaatttgaatagatatttctccaaatatatacaaatgaccagttaggcacattaaagatactcagtagtcattagagaaatgctaatcaaaactgcaatgagatatacatcacattgactagatgactctaacatcaaaaagacaaacaatggcaagtgttggtgagaatgtgtagaaattggaacccttgtacattggtggtaaaattatgaaatcctatagctacttgagaagacagttcagaggttacccaaagtgttaaacagagttaccacatgacccagcagtttcactcataagtatatacgtaagagaatagaaaacatgtccacagaaaaatataccataaatgtttatcacatcattattcataatagccaaaaagaggaaacaacccaaatgtccatcagctgatgaatgagtaagcaaaatgtatatccatacaatggaatattgttcatcaatgaaaaggaatgaagtactgatacactcattgacatgggtgaaccttgaatccattttgctaaatgaaagaaactattcacatattggccacacattatataattccatctatatgaaatgtccagaataggtaaatccatggaaacagaaagtagattaatggtttctagggactgggctgag

SEQ ID NO: 3463 - DNA, 1033 bp, Homo sapiens
caaagaatatcttacttaatggtgaaagactaaatgctttccccttaagatcaggaacaagacaaggatatctgctcttgccacttttattcagtattgtattaccaatgcaaatgggccagaaaaagaaataaaagggatctgggtcgaaagatttagaacaaacaccaaggaaaatgtatacagggcaaataagtacatgaatagagatgctcaataccattatttcattagggaaatacaaaataaaagtgattagtgagctatcactatacatttatttaaatggctctgattttcaaaagactgaccatattaaatagtggcaaagatgtagaacaaatggaactttcatatgctgctggtgaaaatgcagaatggttcaactactttgggtggggtgggggaggaactaacaaatacgaaaaatttatataaagaaaaccttagaagatgcctgaccaaaattttgattcattaaaaaaatagagtggactttgtcaaaattaagaacttctgctcttcaaaagatactggtaagagaacaaaaatacaggtcacagactatgagagaatagttttgcattgcttaacgatagggatatgctctgagaaatgaattgttaagcaatttcatcgtcgtgtgaacatagaatatacttgcacaaacctggatgctatagcctactacacacctagaccatagcctattcttcctaggctacaaaactgtccagcatattactatactgaatactgtaggtagttgtaacacaatggtattcgtctatgtaaacatatctaaacatggaaaaggtacagtaaaaaaaaaaatatggtataaaaggtatattaaaacttgtacacccgtatcaggcacttaccttgaatggagcttggaggactggaaattgctctgggtgagtcagtgagtaagtggtgaactgcgtaccactgtcaacgttataaacgctgtacacccaggctacactaaatttatttaaaaatttttcattcttcagtaaagagttaa

SEQ ID NO: 3464 - DNA, 2741 bp, Homo sapiens
aatatatatgttgtatcaaaatctaaactatgcatgctctttgtccactaatcccacccttaggacaaatcccaaatctgtgtctcatgcctgtaatcccagcactttgggaggccgaggcagttagatcacttgagctcaggagttcgagaacagcctgggcaatttggcatagccctgtctctacaaaaaatacaaaaattagctaggaatggtggcacacacctgtagtcccagctactagggaggctgagatgagaggatcgcttgagcccgggaggtcaaggctgcaattagctgtgttcacaccactgtactccagcctgacactgactcaaagcaagaccccgtctcaaaaaaaataaaataaagacacttaaattaccatcagtggcgtttaacaaatatattgttatttaaattttggtacatggaacactatttatacggtaatagtggagtggaatttctgatctaaagatgttgattatgcttaattgtttttaagaatttgggttcacatttaggttgaacaaagtagagttcttgtaaaggaatgtggccagaacagtagccagacatgagtagccagcctgtcaaattaggagcagttgagggatttgggacatagagattagatatatctaggaccagtagaggttagaaggcagatgttggctgactataaagagcggtctgtccatttgtactgttgagtaatagctaaatagctaaataatgagtgtcccatgactggaagtatttcagcagaggctggaaggaccattcaaatctcagctttttttttttttttttttttttgagacggagtcttactctgtcacctaggctagagtgcagtggtgcgatcttagctcattgcaacctccacctcccgggttcaagcagttctcctgccttagcctcccaagtagctgggattataggtgcctgccaccacgcccagctaatttttgtatttcttttagtagagacgaggtttcatcatgttggccaggctggtcttgaactcctgacctcaggtgatctgcccgcctcagcctcccaaagtgctgggattacaggagtgaactactgcgcccggcccaaatgtcaacttttgtatcaccttatcaagatgtcttttttgactgccctggctaaaatagcacaccttctttacctcttacttttatttttttaaatttcaaaatagccaggaattgtataattaatctggtgtctctgttaccctctggaccagctgacgtatttgtttgtttgtttgtttgtttgtttttgctccatgtggagcaaaatattgtttgtttgtttgtttgtttgtttttgctccatgtggagcaaaacattgtttgtttgtttgttgtaagctccatgtgggcaaactttggctgtattgtattttgctatatatcaccagtgcctagaaccaggcttaacatatactaggtatttagtaaatatttgctgaatgaatgaatattagagaaggtgattcatgcatttaactaggtgacctcttatgcccatattttatgggccaaggtactttaatgccatttttaagtctcttcagggcaggtacctttttttcttttttaataataaatgtaactatcacgtggtatgcatcagagtttataaaaacacttttataagcattatttactaaatgagatggctttttctcatctgtaaagtcttagcttagacatttcctctgaagagtatctgtccatgactttactaagatagctcccagtctctatcacatcacctcattttattcccttcaagttcttttcacttactgccttgtttatttattgtttatgtgttagttgtgtctcatcatataccagcatgtaaatgagggcagggacccctgtcatattgcctggcacatagaggatagttaataagtatctgttgaatgaataattgaaaacattcaaattatactgtttgaatattttgaattataatgttggaataattgaaaacactcacattatatatgtttaaattataaaacattatacctatgttagttaataatattaatcttcgtaataatctctgagcccaaggatgaatgagattttcatgttctgcaatctcaagacaacctgtactacctcgtaaactttatcattatcataacagattatttgtgttatgtttattaatgtctctgtttatctctagactgaaagctccatgaattgagaaatcatgtcttaccttgttcccctaacatttaacacagttctttgtacttggagaagtttaaatatttattgaatgaagaatctatatacaatcttgtaagacagatattgtcttcatctttcacatgagtaaacttaggcttggaaggattaagtaatttacccaagatagttagctgtagaaacaagacttttaccaacatcttcagactcccaatattacattatttaaactacaccagtagtagttcttagtcacagatgttaatccaaattacctagggagccttggaaaatacatattctcaggccacacttggagcctactgaataagaacttctgaaggtgaggcccagaactttgtttaaagaaatgagactataagtatcacttgagagtcaatgatttataccagaggtctggcaaactactattgggaggtcaaatccagccctctgcctgtttgtgtaaataaagtttgagtggaa

SEQ ID NO: 3465 - DNA, 1070 bp, Homo sapiens
aataccatcttaatttactgaatccagaactaaaacaaacccctgccatccataaatcagtgtttggtgggatttttcccccaaaaaaattacttgtaagataaattgaactgaaactaaacctaaacattttctaactttattgacaaataaaaactgaaatattaaaatattatcaagtaagaagtcagaccaataattgcatttggttttcctccctggttagtgtatttcaggactaagatttgagtaataaaactagttctaatacttctcaatcagagttcctgcataaacatcagtcttaacattttagaatcctttaaaatccttttatatgttacatagattttgatatccagatacctgtatcaatttttgttcaagtattttgatatattttgttacaacttgatatttatttagctctattattatcattgtctatttgcctcctcttgcctttctttcctgcaacatattactttccattgcccagtgacacagaagataacatgaagtagtagaacactagactaggagtcagaactcctaggctttttgagagccagttctgccacttagtaactttgtgactctgatccttagttttcttatttgtaaaatggggataataatcccattctgcctacttcacagggttgtaaagaagattacatgagctaatggatgtgaaaacatcttaaaaactctcaaatacttttcaactttggaggattattatgattttcattctgttcagcggctatactcagactttactctaaaagtcaaatcttctgacattctttgaagtgaagcattctatgaatgtgagctgaagaaatgaatgaaatgaaataatgcaggtaaaggtgcctggcacttgataaatgatagttattttttattattctttaaaactttcctcaagctttttaaggtactgatgtgtggtagaaaaaacatggacataggagtcagacaatttgaaccaaggttcaaattcctattcccacttaccagttttgtgacttcaggcaaattacttaatctttctaagcctattt

SEQ ID NO: 3466 - DNA, 1058 bp, Homo sapiens
ttacaaagctatagcaatcaaaaaagcatgatgctggcataaaaacagacaagtctaccaatgaaataggacagagagcccagaaataaacccatgcatctacagtcaattgctttttgacaggaacacacattgaggaaaggacaatctgttcaaaaggtggtattgggaaaactggatatccacatatagaagaatgaaagtggatctttatttcacccctcatatgagaatcaactcaaaatggaataaagacttgaaactatgaaactgaaactataaaactgctagaggtctggacagagatttctttgatatgaacccaaaagcataagcaataaaagcaaaaatagacaaatggaattgcattaaagtgaaaagctactgcatagaaaaggaaacaatgaaggaaagagacaacacacagattgggagaaaatatttgcaaatgatacactggagaagggactaatatccgaaatatactaggaactcaaactactcagcaacaagaaaacagccctgttaaaaataagcaaaggacttgaatagacatttttcaaaagaaaacatataaatgggccacagatatattaaaaaagtccaacatctctaatcatcagagaaatgcaaatgaaaaccacagtgagataccctatagccaacaccttttaggttggctcttatcaaaaagatgaaagataaatgttggcaaggattacaagaaaaaggaacctttatacactgttacggatatcacaaattagtacagccattttgaaaaacaggatggaggttcctcaaaatactgaaaatagaattaccatatgatgcatcaatcccactactggctatatccccaaaggaaatgaaatcagtatgttgaagggtagcttcatctgcatgcccgtattcattgcagcactattcacagtagccaagatatgggaataacttaagtgtccatcaatatatgaatggatttaaaaatgtggtatatatacacaatggaatacattctgccttaaaaaagaggaaattctgtcatttttgacaac

SEQ ID NO: 3467 - DNA, 1886 bp, Homo sapiens
atgcattattgatatgtcagaaaaagaagaaataaaatatattcaaagaaattatgtcagaaaacttcccaagccttatgtcagaaaacttcccaagcctggggaaggagatagaaagccaaatccaggaagcccaaagaacaccaaataagatgaacccgaaaagatccacaccaaagcaagttataatcaaattctaagttagagagagttgaaaacagcaagggaaaagtgaattgtcatatgtaagggaaccaccctaaggccagcagtggatttcacagcagaaaccttacagatcagaagagagtaggatgatacattcaaaaccctgaaaggaaaaaaaaaaaaaaaacaaaacactgccagcaaagcatactatacccagcaatcctgtctttcaaaaaacaaagggatgatcaagactttctcaaataaaaacagaatttatccccactagaccagccttacaagaaatgctaaagggaattcggaagagaacgttaatcagcaacgtgaaaacatgaaagtataaaactcactgaaagaggagatattacaactgacaacatagaaatacaaaggatcatgaaagactactatgaacagttataagccaacaaattggacaaccagaagaaatgaatacattgctagaaatatgtagcttaccaagactgaatcacaaagcagttggaaatctgaatagtccagttatgagtaatgagattcaatcagtaattaaaagtctccaatcaaaataaagcctaggacctaatggcatcatagccaaattgtaccagacacttaaagaagaaccaataccagtccttttcaaactcttccagaaagttgaagaggagggaattcttcaaaatttattttatgaggccagcagtaccttgataccaaagccagacaaagatacaacaagagaagaagactacatctcccttcatctgaatggtaagaagaaaaagaagactgcagaccaatctcactgatgaacatggatgcaaaaatcttcaacaaaatactaagaaaccatattccgtagtatattaaaaggatcattcaccatgattaagtgggatttgcccttgggatgtgatggaaatgaataaatgtgagtcaccatgtaacagaataaaggacaaaaatcacatgatcatctaaatagatggagaaaatgcatttgacaaaattcaacatcctttcatgatgaaaactctcaatatattagatatggaaggaatgttcctcaacacaataaaggccatatatgacaagctcatagctaacattgtactcagtggtaagaagttgaaggcttttcctataagacctagaacaagacaaggatgcccgctcttaccacttctgttcaacatagtaccagaagtcctagcccgagcaattaggcaagaaaaagaaataaaagacatccaaataggaaagagtgaaatgaaattgtctctgtttgctgacaacatgatcttacatattgaaaatctcaaagactgtaccaaaacaccatttgaattagacaaatccaggaaagttgcaggatacaaaatcaacttacaaaagtcagtagcatttctatacactaacagtgaactttctgaaaaagaaattaagaaaacaatcccatttacaataccacttacttctaagtaaaatacttagaagaaaatttaaccaaggaagtgaaagatctatacactgagaactgtaagacactgatgaaggaaattaaggacatcacaaataagtggaaagatacccagtgtttatggatggaaagaattaatattgtgaaaatatttataccaccagaagaaatctacagatctaatgcaactgccatcaaaattctaatgtca

SEQ ID NO: 3468 - DNA, 1259 bp, Homo sapiens
cagcagatttatacgggtgcagaagcacatcgctggactttattccccaggagaagtgcagagaaggggcttaaaatgtagccccctgtttttccccagaagggatttatgacatactcttctggtgactacttgccagcctggcttccaactaacttgcattgaggaattaaaggggtagacaaatattaacctgacaccaccctgataggcgtatgtccacacaacgagtgtcccaacttttacagctgtctcccaaaggattatatcctaaacatcttagctctgggagccaaggggactaggcatagatgagtttttctagatcacagaacaatgggggtggctttaaataggtatacaaataccttcagaggttatacctcctctgagcagtgagcagtgcagaaaggaagtaggaacatgtaggtcccatttgttctccagaaggggcttatagcacacacttccagcagctacttggcagcctggcttctaatgaacttacattcgggagctgatgggaaaacaaacagtagccctctagctaatctcagtgataaatccaaggctactcattcttcctggaaggagtttcgtcatgtctcaagtgccacaacttctataacttccacccaagggacaagctttgggagtcagtggagctttgcattcatgagtagccttagaccacagcaaacaaaaaggtggacgtacagtaggaccacttctacgagcttctcctcaggatcagagggtgcaacctgaatttgagtacaggtttttgccacagatcttctccttagcttagagcagacagagagtgggacataaatgctcaggctcagctgtgaagatagaaggaaatggaaaacccattcagcacctcaacatctccagctacatctagagattctggctcctactctacggtattgtgggggtattgatggaatgtggtacatcctaagctcgaggggaccatcaaaaaagagacagcagtctgaataaacacagagattagagagcaccttaaaatttttggctggatggattggtgagatccttctcctacatgaggccagtctgacaagtctgggagaggttatattcttatgtaatgcatagaagctaacacaaaaatcaaagaacagagaatctattcccaaaaaaaaaaaaaaaaaaagacaaatctccacaagtgaaatagagatatgtgatttacctgacagagaatctaagataatggttataaagat

SEQ ID NO: 3469 - DNA, 1922 bp, Homo sapiens
ggttcagtgctactgatttttatatgttgattttatgtcctgcagctttcctgaatttgtttatcagttctaagaattttttggtacagcgtttttttttttttttttgagatggagtctcgctctgtcgcccaggctggagtgcagtagtatgaacatggctcactgcagccttaacctctcaaaagatcctcccacctcagcctccaagtagttgggaccacaggcatgtgcctccatcctggctaactttttgtattttttgtagagatggggtcttgccatgttgcccaggttggtcttgaagtcctgggctcaagtgatacttctgtctcaccctcccaaagtgctgggattacaggcgtgagccaccgcgcccagccatctttcctcttaatattgcttttgctgtatcccataggtttgggtatgttacgtttctattttcatttgtttcaagaaactttaaaattttctccttaatttcttcattgacccattggttattcagaaacatgtttaatttgtttctttttctacaattttgaaagttcctcttgttattggtttctatttttattccattgtggtctgaaatgatacttgatatgatttcagttctcttaaatttggtgagatttacttatggtctaatttggagaatgcttcatgtgcttatgaaaataatgtatattatacagctgttggatgacagtaaaagtactgtcacctagctggcactgtaactgcatcttttttttttttaatttttaatgtagacagggttttaccacaaggccattccatagttctgtcaagccagctgcttcaggatgatgcatgttaagatcattaattccatgagcataagcttattgccacacttctttgtgtggcttcttggtcagaagcagtgctgtctgtaatggtggataagggattttgtgagtctgcagttggtagttttgacagtagaattgcatgcagggaaggcaaatcaatatccagagtaaatgtctattccagctggacaaaatgctgtcccttccatgaaggaagcagtccattgtaatcaaccagccactgggtagctggctgatcaccctgggaaatagtgccatatcaggggctcaatgttgatctctgctactggcagattgggcactcagcagtggccatcgccagattggccttggtaagtggaagtctatgctgctgaacttatgcataatttctatgcaaataagtgatggaggtgccatttactgggttggggaagacaaaaagtaacaagatgacagaggatggccttctgttttagtcatgttaagtttttaatatctgattgataaccatgtagtgatggcctataggtagttgtttatgtgaatgtgtgtgggattctaagaatccagttctggaaatgtgaatttggaagtaatcttaatggtgtggtgagcagacacaccctatttgaatgaggagatagtatggggtagtgaggaggcaataactgtgaggtagcaataactgtgaagtagtgaggaggcaataactgcagataactcttaaattttcctgtgaaggagagcaaagaaatagagggatataataggagggatatgtgtgggattaagagaaggatatgaggttttgtttattttaggttttcattgataggaaataatagagcaataagaatgctggtggcaaatgacctattagaaaggaggtacttgatagtagggtcagcaatgtggcagaataggaaactcctgactctccctccacccatgaatgcaccaaataaatatctattcatggatcagttctctctcagagaaagtcagagactagttgaaagattcctacccatggggcaactgaggaaacatcctcatcgaatgggtaggaaaaactga

SEQ ID NO: 3470 - DNA, 1033 bp, Homo sapiens
gaattgctggatcatatggtagtattcttttcagatttttgaggaaccttcatcctgttttccataatagctgtactaatttacaataccaccaacagtgaataagagttctcctttctccacatttttgtcagcatttatttttgtctttttactagtagccactgtaactagggtaagatgatatttcattgtggttttgatttgcatttccctgatgattagtgatgttgagcatttttcatatacctgttagccatttctatgtcttcttttgagagatacttattcagctcattttgtttatgtttaaatcagattatttgttgttttgtgttttgggggggagttttttgttttttgctgttgtttgagctccctgcatgttctggatattaatcccttattggattaatagcttacatatatttctcccattctgtactcttttccctctgttgattgtttcctttgctgtgcagaagctttttagtttgatataatctcgtgatgtctaattgtgtaattttgcttttgttgcctatgcttttgaagtcttctccataaaatctttgtgcagatcaatgtcttgaagcatttctcctacattttttttctagtagttttatagtttcaggccttcatttaagtcttgatctgtttttagttgatttttgtacatgatgagaggtagggatctagttttatttttctgcatatggatatccagttttcccagcactatttattgaggagactgtcccttccccagtgaatgctcttgatgcctttctcaaaaatcagttggctgtaaatacatggatttatttgtgggttctctattctgggttccattggtatatatgtgtgttcttatgccagtactgtggtgttttgtttaccttatctttgtaatatattttgaaatccagtaatgtgatgcctccagctttgttcttttttgctcaggtttgctttggctattcagagactttaatggttccgtacaaattttagggtttttttttctatt

SEQ ID NO: 3471 - DNA, 1040 bp, Homo sapiens
cagctttgttccattgctggtggggagctgtgttcctttggaggaggagaggcgctctgatttttagagtttccagtttttctgctctgttttttccccatctttgtggttttatctacctttagtctttgatgatggtgacgtacagatggggttttggtgtggatgtcctttctgtttgttagttttccttctaacagtcaggaccctcagctgcaggtctatcggagtttgctggaggtccactccagaccctgtttgcctgggtatcagcagcggaggctgcagaacagcggatattggtgaacagcaaatgttgctgcctgatcgttcctctggaagttttgtctcagagggccgtgtgaggtgtcagtctgcccctactggggggtgcctcccagttaggctacttgggggtcagggacccacttgaggaggcagtctgtccattctcagatttccatctgtgagctgggagaaccactactctcttcaaagctgtcagacggacatttaagtctgcagaggattctgctgccttttgtttggctatgccctgccctgagaggtggagtctacagaggcaggcaggcctccttgagctgcggtaggctccacccagttcgagcttcctggccactttttttacttactcaagcctcagcaatggcgggcgcccctcccccagcctcgctgccaccttgcagtttgatctcagactgctgtgctagcaatgagcgaggctccgtgggcataggaccctccgagccaggcgcgggatataatctcctggtgtgccgtttgctaagaccattggaaaagcgcagtattaggatgggagtgacccgattttccaggtgccgtctgtcacccctttctttgactaggaaagggaattccctgaccccttgcacttcccaggtgaggcgatgcctcgccctgcttcggctcatgctcagtgcgctgcacccactgtcttgcacccactgtccgacactcccctgtgagatgaacccggtacctcagttggaaatgcagaa

SEQ ID NO: 3472 - DNA, 1936 bp, Homo sapiens
atttttgtataaggtgtaaggaagggatccagtttcagctttctacatatggctagccagttttcccagcaccatttattaaatagggaatcgtttccccatttcttatttttgtcagatttgccaaagatcagatggttgtagatatgcggcgttatttctgagggctctattctgttccattggtctatacctctgttttggtatcactaccatgctgttttggttactgtagccttgtagtatagtttgaagtcaggtagcgtgatgcctctagctttgttcttttggcttaggattgacttggcaatgtgggctcttttttggttccatgtgaactttaaagtagttttttccaattctgtggagaaagtcattggtagcttgttggggatggcattgaatctataaattaccttgggcagtatggccattttcatgatattgattcttcctacccatgagcatggaatgttcttccatttgtttgtgtcctcttttatttccttgagcagtggtttgtagttctccttaaagagctccttcacgtcccttgtaagttggattcctaggtattttattctctttgaagcaattgtgaatgggagttcactcatgatttggctctctgtttgtctgttattggtgtataagaatgcttttgatttttgcacatcgattttctatcctgagactttgctgaagttgcctatcagcttaacgatggggttttctagatatacaatcatgtcctctgcaaacagggacaatttgacttcctcttttcctaattgaataccctttatttccttctcctgtctgattgccctggccagaacttccaacactatgttgaataggagtggtaagagagggcatccctgtcttgtgccagttttcaaagggaatgcttccagtgttggcccattcagtatgatattggctgtgggtttgtcatagatagctcttactattttgagatatgtcccatcaatacctaatttattgagagtttttagcatgaagtgttgttgaattttgtcaaaggccttttctgcatctattgagataatcatatggtttttgtcgttggttctgtttatatgctggattacatttattgatttgcatatgttgaaccagccttgcatcccagggatgaagcccacttgatcatggtggataagctttttgatgtgctgctggattcggtttgccagtgttttattgaggatttttgcatcaatgttcatcaaggatattggtctaaaattctctttttttgttgtgtctctgccagactttggtatcaggatgatgctggcctcataaaatgagttagggaggattccttctttttctgttgattggaatagtttcagaaggaatggtaccaggtcctccttgtacatctggtagaattcggctgtgaatccatctggtccaggactttttttcgttggtaagctattaattatcgcctcaatttcagagcctgttattggtctattcagagattcaacttcttcctggtttagtcttgggagggtgtatgtgtcgaggaatttatccatttcttctagatatcctagtttatttgcgtagaggtgtttatagtattctctgatggtagtttgtgtttctgcaggattggtggtgatatcccctttatcattttttattgcatctatttgattcttctctcttttcttattagtcttgctagcggtctgtcaattttgttgatcttttcaaaaaaccagctcctggattcattgattttttggaagggttttttgtgtctctatttccttcagttctgctctgatgttagttatttcttgccttctgctaacttttgaatgtgtttgctcttgctttctctagttcttttaattttggatctttcctgctttctcttgtgagcatttagtgc

SEQ ID NO: 3473 - DNA, 1077 bp, Homo sapiens
tattataatatactctgaaacatggccattattcttagaacactttgaaaaaatgataggtgactagctccttttttaatgtgtagaattctatcagatgctgtattctctttattttgggacagttgcctgattcagggacagttacctgattcactgagtagtttatggcagtacttaaaaattacacattttgtaatgcatttgtttctttttctttagtgctgctttccatgtttcagtagtttgtaccaagagtctatttcttcctagaagttcctttttcattgttttttttgtttttgtctttttttgtttttaagacagagtcttgctctgttccccaggctggagtgcaatgacgtaatcctggctcactgcagcttggacttcctgggctcaagcaatcctcccatcgcagccccttgagtagctgaaatcacaggttccacacctagctaattttttaatttttttgtagagacgaggtctcactgtgttgctgagactgttctcgaactcctgggctcaatgaatcttcctgccttggcctcccaaagtactgggataacaggcatgggccaccgaactttttgaactatttgatgcctttctgcccttaactgttattttgttcattttgctgcataattgagtatggattttgttttcttttttattattatactttaagttttagggtgtatgtgcacaacgtgcaggttagttacatatgtatacatgtgccatgttggtgtgctgcacccattaactcgtcattcaacattaggtatatctcctaatgctatccctcccctctccccgcatcccacaacaggccccggtgtgtgatgttccccttcctgtgtccatgtgttctcattgttcaattcccacctatgagtgagaacatgcggtgtttggttttttgtccttgcgatagtttgttgaggatgatggtttccagcttcatccatgtccctacaaaggacatgaactcatcattttttatgactgcatagtattccatggtgtatatgtgccacattttcttaatccagtctatcattgatggac

SEQ ID NO: 3474 - DNA, 1029 bp, Homo sapiens
ctgctatgaacattggtgtacaggtgtgtttgaatccctgctttcagttcttttaggtatataactaggggtagaattgctggatcatatgataattccacatttgactttttgaagaactgccaaccattttccacagcagctataccattttacattcccaccagcaatgcatgatggttgcaattttcccatatcctcaccagcatttgttatttttcttttttcataacagccatactaataagtgtgaagtagtatatcattgtaggtattttttgcatttctttagtgattattgatgctgagcatcttttcatgtggttattggccatctgtatatcttctttggagaattgtcttttgcccatttttgaattgggttgtttaggtttttagttcttcttgttgttgaattataggggttccgtgtatattttggatatcgacagactacaaacatgatttgcaagtattgtctccgattctgtggactgtcttttcactctgatgataggatcttttgatgcacaacagtttttcattttggtgaagtccagtttatctgttttctgttttgttgcctgtgttttatctgtcatatcctatagtcattgccaaatctaaaatgttaaagattttcccctatgttttcttctaagagttttatagttttagctcttacatttatttaggtcattgataaattttgagttaatttttttgtatatggtataaggtaagtattcaacttcattctcctgcatctggatattcagttttcccagacctgtttgttgaagagtgtccttttcccattaaatggtcttgggacttttattgaaaattaactatttttgagctctctgttctattacattggtctgcttatctatccttatgccaatactgtactattttgattactgtagctttgtagtacattctggaattagaaagtgtaagttttctaactttgttctttttttcaagattgtttgagctatttggaatcctttaagattcttt

SEQ ID NO: 3475 - DNA, 1133 bp, Homo sapiens
aatgcaatccaattatagtgtggtgggctttgaaatggtcactgtcacaccctgtagcaccttacagtttttccttgggttcttgttgctaaaagagaaccatgcttattgtttttatcttaactatttttgtactacaagggtagaagtagacttatatactagaaaatttatgaaagctcctgttataaaaaacaattcttgaaaattcaaattttaaaaactgaggaagttacttcttctgctaagcactgctagacaatgtgtaggatataaaataagcctatgacaatctctgccctcacagagggtggactcctgctataaagacaggcttctgctttgtgggggtagatagaaaatgagtttgtccacacttactttttgtcttttggatattggctttgagagaaagtctctgatggagatgctagcaagcccctctaaaccccagagaactgtggtgatgatcatatggattcagttggagccaagagacaaagaatggactgtgacttcatcagcgatcagtaatatgacaaagtgttggggggctgaggcagcaccctctatatatcagacacttacttacattaattcatgaaaatagatcatgacattgaacgtttcctaaccttggggtaggcactattacttccattttaaagatgtagaaattgaggtccagagacacttagtaacctgtccaagtttacatagctagtgacaaagttagtattcaagcccaaagcccatctgtactgcatgctatgtatagatagtaacattatccagaaaaggaatatgtttattagaagatgaacagtttggaaacatgttaaacaggaagtcataaagaaagttgatagaggactacatctaggactacccaggaaaaggaattctgtggctcaagattggatttcttgaaagtccccatgaagctctttgtgttccttttgcaagacagttgaatgaggctttcaaacactgatgcacatccacctgttgcctgtttttttttaattgtggcaaaatatacataaacttaaagtttaccatcttaagacattaagtacatttatagtgtgtgtagcctgcaccattatccatccctagaattttttttaatc

SEQ ID NO: 3476 - DNA, 1032 bp, Homo sapiens
aagttttatgtgacacagagggcttcataaagaaatgaaaacctgaagaaacagttaaacttgtatatttttatgctagatgtgataatgaagtagataattggggagcaatagaattggacaaagcgggtatgatctaatggtaataaatggggggtaatttagacttgtttgttcagattcttcttggtctctctgtgtctttggctcctttcctctaggaacctgtcacatgagggtcttatgacttgcttctggaagagttcagaaaacccataaaacctgggaaggttttatgtcctgctacagaggaggagatggaggaaggtgaaggttaccttcctgcttctgttgttttcccacattccttcagcttaaaatatttggggattaccatgtcctgaagcccatcacaaacatacaacaaaagtgaaagggtttataatgaaaaacattatagccacaagctaaattttaccaatacttgtaaatatcacatatctatgtgtcttccctttacccaccagctgtattcaaatttctctattgattctttgggacttttctgtaaaaggtttgtaactaatttggaggctgggaatgcaagtatgtttcaaatatttgtaattaaattgtactttaacaacttacattgctttttacctctgatgaattttatttaccaagttatttattatttggatctatctgtactattcgtgttcctacactcttatttgtagcatggattcatttactggcatacagatcatccattgcattttccagagaatacctttagttaatcttttttaatgtcaaatttatagtaggttctttatattagtccttgtctttttctcctgttaaaatatgtatctttttttttccctccagacagagtctcactttgttgcccaagctggaataaagtatgtatttttaaaaattaatttaaaaaaatgatgctgcatattttgtgcctagtggcaaacactgcagctaaaaagctctgtgtgtacagagtgggtt

SEQ ID NO: 3477 - DNA, 1953 bp, Homo sapiens
atattaaggtattaactaggccatgctccctcagagactctgggtagaatcttttcttgccttttcctagctcagtccttggtgttcctgggcttgcagttgtattactccagtctctggctttgatgtcatattgtgttctccctgtgtatctctgttttcatatggtctttaactcttaaggacaccatcacattggatcatggcctaccctaatgacgtcatcttaacttgtttatatctgcaaagaccctatttccaagtaagggcaattcacaggtaccaggggtacacaattttagggacacaatttaacacagttcacaattctggccccctaaaatttatgttcttctcatgtgcaaaatatatccaccccatcccaacatctccaaaagtttcaactccttccagcatcaactctaagtccaaaatcccatctaaatataatcaactcaaaaagttcctaatttcattttttatataatctaaatcagatatgagtgagcctctgggtatagtccttcctgaaacaaaatttattcccatctgctttgaagcctagaaaacaagttgctatttgcttccaagatacaatggtaagataggcataggaaagacattgccattatgaaagggagaaaatggaaagaataaaggagtcactggtctaaagtaagttcacaacccagcagggaaaactgcattagatttcagagcctgagaataattctctctggcttgattctctgtcctctggactgctggggtggccctaccactttagcctgagaatgtctcattggcccagacctctccatctgtggctttgccctcagagccagtcgtcctgcatatcattccatctctgtccatttcagttatggctggtagtacttttgctggtatgaaattctcaaaaaccttgtcagtctcctgtgcaatgcaggtccaatccatctaacaagaatgttctccacatatctttgctacataactgtatctctattcctggcttttgcagagatgattgactgggtttgtgaatcacatgcaaatgctatacccttgccctggccctgtttccagagcacactatctggataggcagagaattttctaaattaccaagtgctgttccttttttgcttaatattaatagttcattcctcaatttatttctttcctctcacattttactgtaagcaccaaggagaacccaggccatacttccacactttgcttagaaatcgcctcagctaaatgtccaagtttatcacttgtaagttctacttttcacctagtggctcaacataattcggacaagttttctgctgctacataacaaggattgcctttccccaggtgtccaataacatattgatcatttcctttgaaggctctaccagaagcatctttagtgctcatatttctaccaactatctcttcaaggaaatttagactttttctatcaagcatctcaaaattctttcagtccctacccgttaccccattccaaagccacttatttatttttaagtatttgttagagtagtgcaccactcttggtaccaaaatctgtattagtttcctggcagctactagaagatagaagagacagggaaggatcttcagagagagcatgactctaccaacaccttgattttggacttctggcctccacaactatgagagaataaatttctgttgttttaagatactcagtttagagtactttgttacagcagccctgggaaactgaaatagagatgtttcctggaggtactatagtcatcggtgcaaaacagtgagtacaaagtatcttcctccatcctcagattttcctgccatttgtctttctctcatttagagcatatttgtgtctagttgtactgtaaagtttacttttgctatgttaacagcttatgatttggctttatctcaagagatcag

SEQ ID NO: 3478 - DNA, 1027 bp, Homo sapiens
ccatgttggccaggctggtcttgaactcctggcctcaagtggtccgcccagcttggcttcccaaagtgctgggattataggcatgagccaccgcgcctgggccctagccttttttttttttgctatgagcgtttggccatgccctattgaattttgtgtctgtgtgttatatatatataacaaaatttattatttcatcctcttttttttttgtttttgtagaaatggtatcttgctatgttgcctaggctagtcttgaactcctgggccaaagtgatcttcttacctcagccacccaaagtgctgggcctattttaaccatttttaaatgtacagttctgtggcattaagtacattcacattgttatgcaaccatcaccaccatccacttccaggatgctttcatcttccccaattaaaactgtacccactaaacaataactcctcattttccacttcctccagcccctgcaaccactactcttactttgtatctctgaatttgactacactaggaacctcatataagaggaattatataacattcgtcattttgtgactgcatgcactcttgaaatttgaaatacggtattgatgatgatggtggtaataatagtgataatggttaccatttagtattgttcttttggccaggcatgctatttgtttaatcttttcaatctatgccaataaatgactttattcatcctcatttgacaattaaaaaagatgagactaaagagattaagtaattaatccaggataaaggatataatctgtgttctctctaagatttctgctttccattacaccaaaagttgatggtattagtcctggttccaacctgtgtcaagatggcattggaaaaggactgagtatgcttcatggttttcttctcctcttatacaccagtttaccttgttcagatttcaaaaacatagcacaagatatgttccattaaaaagatatgaactttattttcagactcctttagattatgcgcttttgtcaaaaacaaggaccacgt

SEQ ID NO: 3479 - DNA, 1096 bp, Homo sapiens
ttcgtctgtgttatagcgtgtgtcagaatttcctttcttttaaaattaaaggctcaataatataatttttacattaaatttaaacagagtgactatggaagggcagttgtttagtgctctacgaggaggtgattttttagctgagaaagaataaaccaaaagtcagaggaagacactcccaggcagagcaaacagcatgtgctaagtctcagagacaggaaagactgtcatatattcaagactcagaaagggagccaatgtgactggaacttagctaggggattatggcaccatatgaggctcagaaggtaggctccatgtcatgtagaccacaagggaaaatgtcatttgtatatcagtgcaatggaaagccactgaaggattttaaatcagcagagctaacatgatccgtggtgagagtgttggtgggggatggggatgcagaactatctgctttctatgcaccaccctttcttctgtgggctagtcatggcccatcccacctcagggttttttcttatgattgttccctctgcctagaatgctctctccccttccttgtctattcattgtttagatttcaacggagacataacttccttagggaatccttccttgatctcccagaatctattcaaaataatctccatgttgcacatttcatagtaccttgtgactttgctttgtagtacttataatagttttttaaatgaagccatatttgtattttttggttgattaatatatgtcagaatagcagggaccatgtcttctgttcaatattgtatcctgagcacctagtatttaagtaggtatttcagtaaataatgtaacatatataataaataatattaatatttgttgactaaatgaatttaggtctggaccttgatggcttaatgtctttctaaaaatctacttccatatctaagcctttcttgactactttcgcctttttctgtgaacttaaaagtctttattcattgtttgccggatgctaaacatttacaaaagtaatccttatgtcatctgaaattttctatttttttcatattgcttatgctttatatttgctagttggtcttttccctctaaa

SEQ ID NO: 3480 - DNA, 1034 bp, Homo sapiens
gtcttgccatcttgcccaagctagtcttgaactcctgggctccagtgatcctcccgcctcagcctcctgaagtgctgggatggtgcctggctgggaatcatttgttaaattatcttttctccatttttagttcattgctgataccccttaggactacatcctaaatatctaaagaatctttctacccctccctcaccacttccttcattctagtctaagccaccatagttcttcttttggaccattatatcaaccccctatatggctttcgtgtgtctacttttgtaccctatcctccaccaatgcggtcaccacagatcagatcatatctctgcctaaaatccttcagtggctttccattgcattggatatacaaatgatattttcccttgtggtctacatgatatggagactaccttcttagcctcacatagtgccaccatcccctagctaagttctagttacattggctcccatttcatttcttgaagatgtgaagctctttcctgtctctcagacttggcacatactgtttcatctgcctgggagagtcttcccctgactcttgattcattcttaaacattacctcctcatagaggccatactgactgcccttccacagtcactctgttaattctgttatagcacttaatcacaacatgtaattatttatttgcttacttgttaagttccatgaggacatgagggcaggggtcttgccaatcttattttttttttaattatactttaatttctagggtacatgtgcacaatgtgcaggtttgttacataggtatacatgtgccatgttggtttgctgcacctattaacttgtcatttacattaggtatttctcctaatgctatccctcccccagccctctaccctccgacaggccctggtgtgtgctgttcccctccctgtgtccaagtgttctcattgttcacttcccacctgtgagtgagaacatgcagtgtttggttttctgtccttgtgatagtttgctcagaatgatggtttccagcttcatcca

SEQ ID NO: 3481 - DNA, 2728 bp, Homo sapiens
tgtcacttactagctttatgactgtaaacaaattatttagcctctgtgagcttcagtgtccttatctgtaaaaaatttatacttcataggatatcacaaatattacatgaaaaaatatatacacacataccacataaaatcacaagcgattggtgattcatagatacaaagtaaatattagttcctttcttccttcatttaaggggcttatgctctgctagctgaaatgaaccttttacatgcttacctaagttataaaatagaacatagtgagtactctaagggaggtagtagcaaagtggtaaagcagttcagaggagggagctgtcatttctaagcatttggaaacaaggttgggcttcatttcaaaatgaattttacttgggccatgaacaaatttcaatagagtaaataatttaggtagatatataaaatagggaaagcatagggtatggtatctttgttaaaaatagctaccacaggtttgagtattgtatttgtaaaagctaatagtaggaaatatggctagagagatgggctggggcattggtattaaagatccgaaactgtgatgcagtttggagttgattctggatacattagggagccacacattggatgtcttctttctctacctcagtttactatctgtaaaatgtataggcatcaattcagaaacttcaaatttttgtttgcaataaacgaaataagaaattccacacttgaaaagaagttcctgtgtaggccaattttaggttaaaaaaatctaagatttgttttgtagttgtaggttaatctttgcagtaatcttatttgattgataggcttcgtgaggttaagaaacatacaagatctcactggtagaaagtgaccgaagaagctctaatttcaaattctgtcttttttattccgccatactgattaggattttaaaggaaacctgagttcctcaatgtcactaaaaattaaccgcacaacccctggcagatcacttttactttgtcatttataaaatgaaggaagatgtagctgtaaggtttaactaagataaagtgcaaagtactttagataatgttggtcacatatcaggcactcaaatgttgggtctttctctccccatctgtgaatgagggaatttaaccacagcattccaagaccttagtgttaactctctagccaccgtaaactgctagaactaattacatttggccttctgtatccatgggttctgcatctgtgtattcaaccaattatggattgaaaatatggaaaaaggatggttgcatctgtactgaacatgtacagacttttttcttgtcattattccctaaacaatagtataacaactatttacatagcacttgtattgtgttaggttttataatctagagatgttaaaatacataggaggatgtgtgtagatcatatgcaaatatgattttatgtagggatccgatcatccctggaatttggtatccaaagggcagaggggggccctgaaaccttttgataaccttatcgccagataaacccagcaagacttatcacctgttatctttgtcccagaatcaaacggtctgtcttccatactgttattcttattttgacctggcttccttttactctcttccagccctgcttttttgctccttccacttgctctctcaaactcctgtttcctacattgttaaccattttattggatgtctttttgtgtgtcctggccttaagtggaagccaggctatctcctgagtcatggagaacatactacttcctctgtagctcttttaaatggatgcagcacattctcctgcacccctcccatcccaaagaagagaggtgaagataactgtatttttttattctccactatatctggaccattacttcttcatcttcttaaaacccctgtgctctttggctatacacacccttggtttctgatataatatattcttatacaatatctattaagatgaaaatacacataaactacaatctagcaattccactcctaggtatataccctttggaaactctccaatgtatgcataaagggatgttcaaaaatattcatgcaacactgctacagcaaaaaatttgaactagtctaaatgcctgtcagtaaaagaatgaaaatattgtggtatatttacttaatagaattccatacaatagtgaaatgagtgatctagatctatatagtaacatgagcaaatctcacaaataacaggttgaatgaaaaaggtgaattgcagaacacatttatataaagcttgacatgcacgtattatttagggaggcatacttatgtaataaagaaatacatgataattataaataccaaattaaggatagtaggtatctccaaagggtaagctggggagaaaagaccaagaataatgcaaagaagggcacacacagagcttaaattgaataagtaaatatttttcaactgagttgtggatatataggtatctattaattattctttatgccttttatatatctgaacttttctttttttttttttttttttttttttttagacggagtctcattctgactcccaggctggagtgcagtggtgcgatctcggctcactgcaacctgcacttcctgggttcaagcgattctcctgcctcagccttctgagtagctgggattacagacatgcaccaccacgcctggctaaattttgtatttttagtagagacggggtttcac

SEQ ID NO: 3482 - DNA, 1085 bp, Homo sapiens
gtgagggcacttagactagcctaggagttaaaggaaggctttgggaagagatgatatctgacccaaatcttaaatggtaggtaggagtaagtgaggcaaacatgagcagaaagcgtccttcaaacagagaaaacagcttgagcaaaggcatcaatgtgagaaaaggaatggcttgcgtagagaaccacaaacagtttgggactgctaggaatataacaataagtgatgagttgtaaggctggaaatacagtcagaggccatgtcgtggtggaccttgtatgcataagtatcctaaaatcaattcagtaggtgttttttttttatttttatttaatcactggaaggtgtctatcagacatggttgaagtaacatttttaaaatgtggtcatagggatgaagagaaagaaatgaatctgagaaaatgtataaggctttaatgattgattgtatgtgcaggtgagagggtgaggagtcccgtgtgatgctcaggtttttgccttggatgactaaggaggatatgttggtaattttaactgagacaggaaacgatgatgagttcaattctggacttgaagattttcaatttcttgagttagatcagtgagcaaatatagtggaagtaagctgagaaaaaaaagaggtgtggtcagaaagtggaatatcggagttaagttgtctgatattgggactgttctaggtgacagcgaggtctctgtgtatgggtagctaaaatacagcagaggcgaaggtcagtaaagctgagtatgacaaggaatttggaggctagtgtattgaatgagtcatctgtgtagagagtgaagtgattgaggatgatgggatgtggggaagagagaaagatgtgacccaggtgcagtaaagataggggattaatcaggagggtggtagatgacagatgaggaggtggggtagagagttatatagccagatggtgcaaaccttgaaggaggaggggtttttaaacacaagagtgagaaggtaatagtttttttacttttccttcctggaagcagagttctgatctctatctttattcaggactcatattaatcattctgtttgctct

SEQ ID NO: 3483 - DNA, 1059 bp, Homo sapiens
ttgaagaatgaatctgactgtaatgagtgctatcaaggcagagtgccagatacagcaaatactgattgagccccactcggtgctaggcactcttccaagcacataacctatattaactaagtaaaatgtgcaacacctcttggagcatatgctattattttgtagtaattttctaattgaaacagatcatacatacaaaaaacaatccaagtcataagtatacaaccatgagttattacagagtgaacatacctatggaattgtgcccagttacccacaggtcaagaaataggacattatccctattttacagatgaagaaactgaggcacagagaggttaagtaacctgcccaaggtcacacagctaataagggacagaggctggtttccgcctcaggagttctgtctggtaagcccagctctgttttctactgcccatagaaaaggtggacctggagagcatgacccatctcagggtcaggggaagcttctgagaagctggggttggatctgagctcaggggagaactggagcttcatcagaaagagggaaggagagcattccaggcagggtgatctgctgagaggcctgcagatctgctgtggggattcaggagggaggcgatgtggacagcctgtcacggccacaacacacagactcaccagtcactggagggcagccatggggctcacaaagggattcttccttccacaaaaggactcacaacaggcatccctaaatagctcgctgcaaggaaaacccactttgagttgggaaagtcacatttccatagagtggattagagaaatagggctttcattggaagaggtggctcagtctgagaataacagctgggaggtgtaatagtaaaaccatcccacagccacagccatagctggtctcctctgggcagcatcagcacaccctccatgggcgggtgcttgctcaggatcacacagctggtcggaggaggcaggatttgaactcggcagtctgatgcatcaacaccccatgcctaaccactgcactcgcagcgtcctaatcagacaggccacctc

SEQ ID NO: 3484 - DNA, 1034 bp, Homo sapiens
tccagatttagaattatgtctttgggaatatgtgttacctctgtgtatttattggggaacaaattgattaaactatgaattaaataagtggtaataagttggagccttttggataggtgtgtaaaaaataaagtcagtaagccactctaagaacctaaacagtagcaaaaccacataccacaggagggttggtggcgtggaggttgggaaatgtataacataggtagacaaactgtgcccattacccacacttgctttatatctctttaaagtcttttaagtggtcaaagatgggtatagtagtcagttcttgcattgctataaagaaatactgaagactgggaaatttataaagaaaagaggtttaattggctcatggttctgcaggctatacaggaagcatgctcctggcatctgctcggcttctggggaggcctcaggaaactttcaatcatggcaggaggtgaaggggaagcaggtgcttcttacatggctggagcaggagcaagagcgggagggatgtgtcacacaagttttaaacaaccagatctcagaactcactatagtgacgacagtatgaagaggggatggtgttaaaccataagacactgcccccatgatccagtcacctcccaccaggccccatctccattactggggattacaatttgacatgagatttgggcagggacacagatccaaaccatatcagtggggaaaggcatcttctgaaggagagcggcaaagtcactcattcagttaagcaagatggacattctgcataggcagtttcatttttctagatgcttggaccgaaagccactctgtcttacatcattagcaaatcctggcagcttggccctgaaaccgtatctagaatctgcccatttttcccaacctctgggtcaggccactggtagctcacacctgggtgatcacagtgtcctacagtcacctgctcccaccttccccactgtggtccgttctcagcccaacaagagtgatcctgttaaggtccacacaccctgccgctc

SEQ ID NO: 3485 - DNA, 1031 bp, Homo sapiens
tgtggtcccagcgatgcctttcagcagacatcaccttcctgggactctcaggcccctctgtttaagaatgccgtggggcttcttggtggggatgggtgatgctgggtatttgttgaggatctggagaggtctgggtctttctccagcccctcattttctcagatcctggccaggtttctagttcctgcattggagttgccatcccagtatcccagcaaatgtccagacttctgtctctcttgacatgtattctccaaaagtcatctctgtactgcccaatggccatcttggcatgtctggtttcccatggggcacttgggctcagccgactaggctgtttgcagggctgactgcacactgtatgcaccaggtgtttccactggtccctatcctgactggctggggcccagggctcaatggttggtgaatattttgaatctcattcatagttattcacctttgatgcttgactttgggaaacgaatggtctaaacgtttcagagctcacagcttcagggactgtctgggctctggaagggtgccgtgtttcagacgtgctttgtggaagttttgtgccagctgtgttttgtgtggccacatgtttgcttcctgggatttgggtgtctgtgagcaggtcccatggcgttctgtctcagggtcctgtgtctgtgtccctggtgtgatcagggtggcctggtcctgcacagccctgaaggacaacaacgtagaggaaaatgcgcttcctgtgcaggacagtccccatgagctggggccaacatggctgtcactgggggcctctgatcctctagcacctgcaagcgcctaactcacagggtcagcgtgggaggcacgggagtcctccataaggttgggggacaacagagactgccaccctccccagggccaccagttggcatcttctggtggcactgaccagcaggggctctcaggagagagggtgcttggaaatgtgggcagcagggtagtcaatgatgggaagggggccaggggtagcaaatgcccctgaaacc

SEQ ID NO: 3486 - DNA, 1049 bp, Homo sapiens
ctgtgctgcaaaccatgtctaccatgtctgatttttagaaggctcagcacttctgcccgccttagcttaggtaagcaagacctggggtaaggctgccaggacgagttccccgacctttgctgggctcccctttcttctgtccagcagctgcagtgtggttaggacataggttgaaagggcaactctattgttcagatgctagacaattccttactccctcttgccgtggatacagcgatgtcccctggggccatgccggtgcttccataggactaggggccatagactgcagtgcgcatcatgccacagaagccacagagaacttctattaattgaggtgggagacagtcctggctggggggtcaagaggcacaggatggtccagtcctgccaccattcccgtgtgattttcagggaaaatcatatcacctttctagccttcagtctcttctgtcaagtgagaggaatggactagacagtcagtctctaagaatctatcagaagatcacggtgtaactttagtctccatagaagagatcaaaagtatgtatgagacacccagagacagttggcacttatgcctagttttggccgtaaggcaaatattaattgtaagggtaaccattttgtcctggtttgcctgggactgtctttgtttattcctgttgttcctcgatgactgttagtagttcccatttcattctccaagtgtcccagtttggatggtatcttatatggccaccctgttgactgagatgtaatctaatgaaatgagatttgtctgtcttccccacactcagcctgctttggtacaagtcacaggaggcctttgactgctcataggagaatctctgctgatacacagtctttcattgacaaatatcaatcactgtatttgcaccatatccaatgactagagggatgtcattgaatccgtcactgtattcaatgaccagaggggtgtcattgaagacataaatgatctcctgcatcattcactgctcctgactgaagtgctacatgaaaaagttttgcaagaaacttagatg

SEQ ID NO: 3487 - DNA, 1034 bp, Homo sapiens
agatctggaggtcagatcaggacctagagtgcgaatgcctcacaagaaattgcgctcggaattcagtaagtatttattgaattaaaccgggctccctgggtggagctggagaagctggacaggtggtaccatggcctgtggggtcctctcctcaccagagctgaagaaggctgtgggccactgccccaccagtgactgatattcaggagcagtgctgttagcctgctttgcaggaaccgtccctctctggcctgtcttaccagatgcctttcaagaggctcaatgggaatgcccctcccaccatccagtaggattcccctaggccatcagcctcagtactctcttgttctcacaaattcacccacctagggatgtaatggtgaatgagactggctccttggcctaaaagaaccctgtcctgtaggaggagaaaagcttgtaaacaaatacattaccacaaggtgtaagacatgtgatagcagcaaagtgtctaaggtacagaggtgactggctgagtgtaagggggccatagaaagctcgctgaaggatttgatgtctgaagttgtgtattagggttctccagagaaacagaaccaattgtgtatgtgtgtggtgtgtgtgtgtatacagagagagagattttaaggaattggctcatgcagttgtggaggcttttcaagtccaaaatctgcaggatgggccagcaggctggagatccaggaaggaggagccaaggctaaaggtagtctgcagacatcattcccctgtcctctggggagggcactctttttctgttaaggcgttcaaccgagtggatgaggctcactcatattgtggaaagcggtctgctttactcagagtttaccaattcaaatgttaatcttgtctaaaaaatgccttcacagaaacatctagaataatgtttgaccaagcgtcttggcctatggcatagccaacttgacacaaaattaaccatcactggtgggtttaaaggacattgaggagtttgccacatgtctaggagggaaagggca

SEQ ID NO: 3488 - DNA, 1024 bp, Homo sapiens
tggggagagttaacctcctggcccggcattgcataaccgcagagtctgctgagcgcaaggagactcttctgtgtggcagccagagtggcaagcctggtggctccgggctctggcaccatcccgcagcggaacaaacagccctcccttcccagataatggccctcattgagcattgtgtccatggccagcacccagcacagggcagctcagcctgggtaagtttcctctcttggctgcttagcaaaatatttacactacgcctttctagtaagatggttcctaggaaccagcaggcagagagagctggggaaatgcacccaccagtgaccctggtctcagcttagggaaatgctgccacacacccaatgacatgtgagcctggtgcggtcattgccctccagggctcttttgtaaaagaagacactgaactaaaagatgcttagaagcctgtccagttccaaagccattggcatcttctctaattaaagagtgaactccagtttcttatgatgtgggagtagaatttggctggtctttaatatctcacaaagggtctctttctcaggaaggcatgtgtgtgatttgggagaggtgaagatgagaagtctgaatcctacctacttggttctctcccgtgcatcatggatgtcaggaaacactgttgatatctcctgtgcactgtcaatgtccctctctgtgtgtctttgaatggggagcaaggggcataagccagatcaccccaggcggtgccgcactttaagaggtatctggaccagccctcaggagcatgcagcccttgtcagaggaacttttgaagaaactgggtaacagaatacttgagagacagacttgctgtcctcaaccaccccaggggttgtctggagaaaaagggtcagagatgttctgtgtggtcctcgggacagaatcaaaaccagtgagtgaaaatgacatggctcattattaggacgatggcccaaacaataggccccataggtattttaaccaaaaacacacacattgatcc

SEQ ID NO: 3489 - DNA, 1047 bp, Homo sapiens
gaggttgcagtgagccgagatcgcgccactgcactccagcctgggcgacagagtaagactccatctcaaaaaaacaaaaaaacaaaaacacaaacaaacaaacaaaaaacactccttccatcctcttagagccttgaggtgatctgaaagaagaatgcaaggctgtttttggcaactcaggagttttgtttagattctgaagccaacagctctgctagaaagaacagcatagtgtctgaagtccctcttaagggagtatattgccattcaaatttatatgctccgcagaaatgtcttcttccacaaagactaagaggagagacttttgatgtttgtcttgtatccagaatatgatggacgaatggatggagggagggagggagtttgtttcaaaatattcatgtttcaacaccagaaaacagaatgtgatgtggctattcagtttaccaaaaatagtaaataaggatacttgtggctgggtgcggtgggtcacgcctgtaattccagcactttgggagaccgaggagggaggattgcttgagcccaggatttcaagaccagcctgggcaacatcgtgaaaccccatctcaacaaaaaatacaaaaagaaaaaattagccagttgtggtggcacatgcctgtagtcccagctacttaggaagctgaggtgggaggatcacttgagtccaggagatcgaggctgcagtgagccaaggtcatgccactgcactccagcctagtgacagagtgaggcccagtctcaaaaaataaataaataaataaataaataaataaataaataaaataaaagatgcttgtgaaaacttaagtgaaaattcacacatgactttaattagaagcagtgatcctaagatctcatcttactctaaaatgtattatttaatcatcctgtgaattgagcaactccttttattgggaaagatgtgatttattttctatttctgagtaatctgcacagatagccctaggagttccataatatgtatggcccaggatttattgattacaagcctttctgaaatatgtg

SEQ ID NO: 3490 - DNA, 1030 bp, Homo sapiens
tgaaccgagatcctgccactgtactccagcttgtgcaacagagtgagaccccatctcaaaaaaaaaaaaaaagaaagaaaattacatgtgtagcttatattatacattttttggacagtgttggcctagaacaggggtcggcaagctttcctggtaagagaccaggtagtagtaaatatttcaggctttgctggctatacagtctcacaactacttaatgcagccgctgtagggctgaagcagccagggacagtacataaatgaatgggtgtatctgcgttgccataaaactttatttacagaaacaggcagcatctcagatttggcttgtgggctgtagtttgcagactcttagtctagagtaatggcagccaaccagtaatggactgtaaaatcagaagtgatgaggaagagatgagcagcctcagggctaggctgagaagtggggcaggccctgagcagaggatagggtaagaaaggccctctagaaagatcacaagacaagaaactcatctctactgagtgcctggtgtgtgccaggcatttttcacatgcttcacctctgttgactcctgtcatcgtcaacaagcctgtattagggtggatgcaagtatcattaatgttcccattttttagatgagaacattgaggcaatgtggggccaggtgacctgcctaggaccacagtgtaagctgagccaggatccatgcccaggcagccggctgtgactctgcatgcagtgccacctctcgcatgctgtctttttttccctcactacatctcccaacacccttatgaggtggggtttagtaacctaattttttttttgagacagagtttcactcttgttgcccaggctggagtgcaatggcacggtcttggctcgctgcaacctccctgcctcccgggttgaagcgattcttcttcctcagcctcctgagtaactgggattacaggcacctgccaccatgcccagctaattttgtatttttagtagagatgggatttcaccgtgttggccaggctggtc

SEQ ID NO: 3491 - DNA, 1090 bp, Homo sapiens
gcaagatcagtctatacaccaatgtggggaagaaaatggtacaggggttgggagtcagtatggatgcatcttgtccatggggccatgagggagcatgggatatgctaggacaagtgttagggaccaaggagataaagttggcttgatgggaaggggccacattgttgaggcctgcagatttgcagtggtaagaaacagggagtggctgaaggttttgtagtcagagagtgatgggtgaactcacagatagataaagagcttcctacgtaaggattctcccatatctttggcgggaggtacttgctcttgctcttagaggaagaagaaaggaaactcacatttaatcctcacattctgtgcactagatttaccacctcttatctcagtttgtacatctgaaaacagaagcacagagagattaagcaacatttccaaggttacatggtgtgttaatctgtttgtattgctataaagtaatatgcgaggctgggtaatttatacagaaaagcggtttatttggctcatggttctgcaggctatacaagaaacatggtactagcactggctactggtgagggcttcaggctgcttccactcatggtagagggcaaagaggagctggcatgttcagagatcccatggtgtgagagggagcaagagagagaggggaggtgccaagctccttttgacaaccagctcttgagggataggttaccaagccattcatgagggatccaccccatgatccaaacacctcccactaggccttacctccaccactgggatccaatttcagcatgagatttgggggaatgaacatccaaatcatagcacgcagttaagaagtggcagagccagagaagccagttccaccagcctctctgaccctggagtcagaaagtagcacctgaccctgttttgtaaaggagttgcttttactccatgggattatcttgtttgacatggcagaggatttgacctgggtgttacgtgtgatcctgtctgatgacaagctgtctatgcataagctgcttttgtgtgtacttatttaaatgtgaccttgatgagtctgttgagggggcagaatgac

SEQ ID NO: 3492 - DNA, 1050 bp, Homo sapiens
aattattgaaagggtggagggagatgaagctgaagagaagggcaaggcccaatcctataggctcttgtaggctttggtaaggattggtattgggaagctcctagaaggttctaagtagggacatgatctgctgtgtaggggatggattttagagcagcaacagtggaaaaaagaccatgatgtgccacttcaatagttcatgcaagaagatagttgtatgatttgagttttggcaatgggatggagagagttgttgggttatagggatgctttggaagtagagccactgcagactcactaggggtttagacatgggtgggtgaaatgagaaaagccaggatgcctcttaggtttgccagtcgcatcctaccacaactaactccaaaggactggttgcattcttgtgaatttccttcaaggggaaaacatgagaaataaatgagaattgagctgagacccagtaagtttggagtagtgtgggaatccacatgaccagtttcattgatctgcttcttagctcttgctgtgggaactgagaacatgctcagattgtcttgttgatgggattactcgtaaggagatcaaggagatgaggacgttctgaaacatcctggaagttgccctgtgacgcccaaggagaactgcagcatgtcccttgtcaccctcagcagctctggagaccaggcatcttcccatgccagccactaacccaggctgaacctgacccagctgtgctctctgcctgtccttctcctgcagccatgcctcccttgttcttctctctctgggtctcacactcccagctgctcagcagggacagtctgcttggattggctggttcaccagagggcaagtctgcggggcagagggctcagccaggccccgactgaggcagctggagtccttgacgtctctcctgaaggtcattgtctttggcatgtgcacatattcttggcctagtcatggccagaggatcatgggactcaaaacatgcacgaaagctcaggtgctgagagctgcctgtaatctctgaagacatagcagccacag

SEQ ID NO: 3493 - DNA, 1050 bp, Homo sapiens
gaccccatttttgtttaaaatattgaagacatgacattacttttataattagaaaaaattgtttacgaaaatctattttttaatatttagccaaattctgattttccttagccattacccatttttaaaacccattcatttaccaaattttcattgagttctttctataggctgggcatggtgccagctactctggttcggcagggtagaaaactggccaggcccagcttccatgccacaggggagactaatgataaataagtaaacagaccctaggggcagtcatttgttgatgccaactgtgtgctgggcattcttctaactgatgttgatgtttcatagatttactctttcaatcctttacataattcctttaataaccctgggcagcatatagcattaatacccaaggccacccagccagtaagcagtggggtcaggactctccagcctgagctgccaacctctccagcttctccagcctctcttcttactgatgtattataatccagccacaatggccttctttcctgcctcggaagctttgcacttgacattctgtctgcccaggcaccccctctcccactagaccccctcctcatgcaggtcacagaggcctttgctgagctgctggtctggtccatcgtgacttccctcttacccctgtagacattctccatcacttaacatcacatcatcttgttttactttcttgtggctgttttctctctctgacattatctgacactgtttcacccgctggattgtaagctctatggaaaacatgatccttgtccatgtggttcacccactatccccagcacctagcatagtacccagcatagggtaggtgttactggagacagtgggaaatgaataaatgagggatgatgagcacatatcctaggagagtggtctccaaagtgggatgtcggtgttggagaccatggaaggtgagatggtccattgtggggcaggaagaaattatgattgagaagtagatagacacataggaagatgacccacacacatctcatcctttttcccatt

SEQ ID NO: 3494 - DNA, 1033 bp, Homo sapiens
tggaggaggtgtgcatttgagactgttcaagtccatttcaccttaagcattgctcttgtgtgtgtgtgcattcattgtttccttccctcccgctgccattcagaataactgcagctgtgagccactgcacttggggttaccatctgaaagggaacctgcttatcttccgtctatatctgccaagtgagaaaacttgtctctacgtcagtaaagctgggcagtgatgatatcccttgttttcagggatctttatctgattcccttgcctgactcctaaaacctaagtctctgacctgccctccaattctcttttcacaacaagctgcctgtctttgtcaagatctgtggtccacagtcctgttgaatctgtagttcatttcttagactcccagtgtgtctaaagaaataggaggcaggaggcaagcttggagggaatgggaaatgttgacagccatgcagaaatggatggggagagatgcatgccaggatgtttgcagtggcttgggggtggaggcagaggaggtgctgggtggcaaagaggagggaaagagaggggagaggggaggagaaaagaaaacaatgactcagttcttacacactgaagcatatgcataagtgtgaaaataactaagccctacagtatttcagcagaaggaaggattagagttctggatttctgaggatttctatcttgttctcatgactgctcttagcttatggtcagataaatgttaggggagcatcaacggaaggagcaagagaggtggagaggagtgcagagcccacacttgttgcttatttgtttggacagacagccatttcattggtggataaaacttcacttaacttgttaactcccctttgaaatgaggaagcattgtccgtagcctcgtgcttccagtcagtgccacctttgggtggtctggcctttttaagttcttgtaaagctgctcgaacctgtgtctttatgtctgacgatgccacctccacctcacatcccccaagttttaaaattcagaactgcccctgactc

SEQ ID NO: 3495 - DNA, 1030 bp, Homo sapiens
caaaaattctaaaacctgttgatgcaaaatactctacccccaagggaggattgctccctcctcttccctccactggatgtgagaataacttttgggagtctaccaagtaatagcagcaataactgtcatttactgaccacccagtaccaggcactttgttagctatgttaggattctcatcacattaaatccttatagcagccctgtaggacagggcttgtgggacccactttaaaggtgaggaaactgagattaaagagtaaagccggcacaggcacatcttgaattgctggccaggaaaccctgcccatgggcagctattcttaagcagggagctggctgcattggcctgggcagagaaggctttctgagatatatatatgtattttatttttttttcccttcagaataactctcacaagcactggacttccaataaatctgctttagggcagggctttgtaattcaacatgaaccctgagatgctccagattctgctgacaggggagaagatcatggcctgagaatgttttggttcagggacaataatgtagatttggagaaagatcaggctgggcttgaattctagacctactacttacaggatcttgggcagattattctcagagcctcagtttcctatcttataagctggggggtaataatagtacttcatagagctactaggagagttaaatgattcaatgaaggtgacactttcatgagcgtgctcattaggtgattagactctataatgcttattaagctcatggcagattaaatgatgtataatggatgagtgacaatcagctgacatcaggagttcaagaccagcccggccaacgtggtgaaaccccgtctctactaaaaacacaaaaaattagctggacctagtggcgggcacttgtaatcccagctactcgggaggctgaggcaggagaattgcttaaacccgggcagcagaggctgcagtgagccgagattgcaccattgcactccagcctgggcaacaagaacgaaactccatct

SEQ ID NO: 3496 - DNA, 1038 bp, Homo sapiens
tggcagtggatcaagatgtgctcaactggcactattgttgagctgtctccgcccattgtgtttagtggcagccaccctccttggagtggagaagtgtgtgctgcctttgggtccttgccaagtgagctgttgagacatttagtgtgtgaaaggtacaggcaagaagaagatgcatttagtctgaagtcctggcaggttctaggacatgatttgatgaaagataacattaagaaagctgtgtgacaactggatagcatttaacttgtctctcactccctactctgtgaattccctaatgtctttaaggctcttttttgccctccatcctgcccatcaaggagtccctgacatgctgttctccatcctgtttcctgtggagtcaaagtgtatttacaaatctgcagatgcactaggcgggcagggctggaaaacactggctgtatcaacaggcagcactagcattctgggtcagacttggccaaagcccgtgaccaattttcttccttatctgtaaagtaggtgtaaccatcataaccttaccaagaccactgaactatcttgagaagaaaaatgagatacgtttagtaacatgctatgtagttgataggtattaggataataccacaacaatctggaactcacatttacataatttcacttatccagttgggacctagatggcaaatcaagagaaaggtcataagtccatgagctacagtttatgaattttgatcattggaggaaattttataccctctttcaggcctctgcatttacttcaagttttaagaggcttggttattagtttgtcaaatgcacctagcaaattggaagcaactgatactgtactgtgcaaggattattaaagctcttttatcaagtatcagtaagaagtaagagtaaaaaacagaaaaactaaaaaaaaatttaaaaggcacaagaattcaaggcatggaattctaaagctgatatgagcatttaatgtaagcaattcagtgaaattttatgtattttgatggatctttggtactctgtttt

SEQ ID NO: 3497 - DNA, 1049 bp, Homo sapiens
tgtcctttgggtggaaaaggactggcttcctggcagtgccaaaatgaagatctttctctgctgaaaacaaaacaaaacccctttatctgtgaaacttcctgtttcctccactgaaagccgtgcttctccaacatggggcattatgccaggggcacatgaaatcataggacagactgggtgcatcttcccggatgctgcttgaaactttggggggaaatagttttgactttttcttcctcgtaaaagctgttgccatacatgggtagaggaatattatggagggcaatgtaaaattcatgtggcatttaaggattaaacaggagatgtaaaaatttcttgtttctggtaagctgctttgggttatgtcttcaaaattcctggggtgtctttctgcttctctgctgttgggaaggactaaaatggagacttctgagcagcacctaaagtattccttgtaagtggaagactgctatgggtttgacccagcacatttggcagcttgggctgatttaatgaagttgtacaaaattttgaaatattaatagagatgtcttccttccccagcccttaaaatttccccatggccctccccttattctgttattaattcattgctggaagcatttggactgttataataggaatgtaaagataaataaacaggtagggctcctgttgagattttaaatatctgtattttcaaattcatagcagagacaaagcaagacttttcatatggaagagtttgggcttgaacatcaaaagcaaatctttgaagaaactgaggtgttatgggttgaattgtgtctccccaaaaatcagatgttgaaatcttaacttctagtatctcagaatgtgactgtattaaggagagaaggtctattacagtggtaatcaaactaaaatgaggtcattagtgtgggctctaatccaatatgactgatatgcttataaaaagtagaaatttggacacagagccatgcatacagagaagatagtatgaagagacatagggagaagacagccacctacaagccaaggagagaggc

SEQ ID NO: 3498 - DNA, 1021 bp, Homo sapiens
taaaataaggatcataagagccactttttgaaggcttatggttgaattagtgagataatgtgtgcctggcatataggaagtacacagtaggggttagtttatttcttactttcttctctacccaagtcgctgctattattgcctctttccttccaggccatcacagagccatgaaccagcagcacatgatgccttcccaagccttccagatgcggcgttccctgcctccagatgacatccaggatgactttgattgggattcaattgtgtagggcttgtttctgcaagacaccagaccctaacgttacctttctgtgcagtgaagggaaaggtttaagagaatccagttgagaaaacaaacttgctaatcactttaccaatgttatcaaaattacttttgaagacaatcagaaggattttagctggataacttactgcttttatctgacccaagcaagtactacatgtttgtctccctgccagctgccctatgtagctcctaactgttgtgtgatttggacggctttttgcatatttgtgtcagtttgatgttaaccacaagtgccagactgatttttcagacggagcctattttgctgcaagcagtttatataaagatacatatgtgtaaatatatgtacaaaaattactgaaaggcttcagttttttctaattggattattatgtcttgaaagttattgtcagtttttattccttgttaggctattttctgcaggatgcttttaactgatgtaggaaactgaaaggaaatagattttttccaaaacccagttccccttatttaatcttttttagaaatgtgggtaatgaattctatctaataagtcaaggaaaccagaatttgacacactccaacaatccgaaggggcatgttgctcctgagcagcatgaagaactgaccaaattggttttgatgcttgggggatcatagagtatttatgtctgcttttctaaatctgcattataatagctctaaaatttgttgattggtaagaaattg

SEQ ID NO: 3499 - DNA, 1075 bp, Homo sapiens
ggtaagaagtacaggtgggcataattgaagaccgtttaaattattgtgaagaacttaggctggagtgtggatatttagataaggggtggacagatttggttagataaactaaagttatgagatcaggacttttactttgatttgacagcccatagtgttgagaagtgaatcaaaacagttaaggtacatagtcttcacataacccattgcaagaggaagatgctgagtagatacagatggtgttgcaatagtaatggcctgagctagggatatatacataaatgaggttctctggaaaactagcatgctttctgaatgctgtatatacctgtaattatatgtagtgtcattttatcagtttgacagatctttattctgtagatactgtgtgccaggcattgtactagggtactgtggtgcataccaagaagaataagacgtaagacacataattttaggacaagggtaaagtatagaaggtattttaagaaagataaactattgtgtgcagaggaaggagagattatttcttactagtactgtctgagaaggcttcataggttatgtggcttagctttcaggtggtgataggcagagcaaagtagagagaataccattcagggtatatgtctaataaatgagggttaagtgtctatcattaaaaggtattgttctagatcctgaggaaacagcaatgaacaaaacacaaaacctacttcctgtcctcatgaagtttatgttctgattgaggggagggaatttagagtgagaaaggtaggagtaaacacaagataagaggtctttattaaaggtattgggtagaaaagtattaggatttgagtgggaacacagtagttaattttgtctggataagattttcctttttgaagttaatttgcattataaaaattcatgcttatcagaccacaccttttgtattctaagcactaagtgttgagggaacagttggtaaacaagacagtcataccctctcctcactcaagcagggaagataaactgataaggtaggatgaatgtacattcctggtgttgcttattgtctcagcataactac

SEQ ID NO: 3500 - DNA, 1033 bp, Homo sapiens
agtttgtctttaaaaatgtttcactaaccatgtagatttgtgaggtcctgggctatagaaactacagtatctttatacattaaattcttttattgtcatataattatcatctgttcaattgagaattactataaaaaatgtgttttgttgatcattttctttctaaattttggtgtggcagaagttcttggatttggattcttcagtttatgaaagttttcttttaataatgtaattataagtggatatattttcttatataatctttttctcagttcaaaacaagtgtttcttgtgctatttttccattgtatttgcagaatgtttgcttttgatgcaaaggattataaaaatccattttaatatcataggtttgctgtaatatactgttaatataatttctttacctctaggggtcctactgggcaatagacaccaatccgaaggaagatgtgctgcctactcggccaaagaagagggcacgatctgtagaacgggtaaaggctctttatcataaatttagtgtaatgcattgaatatgtctgaaatacagattttgaaagttcttttccagtctagcacatgtaactataatgatggtaagattttatttgtgtagcattttacatttttcagaacacttttcagactcattttatttgatcttaactctgagggacagtttaggaattaagtaaaaggttttgtcataattagggcgcaggtgtcgtttgagacttgaatccagctctcttgagttttaatttggtattcttttctctacaacatttaggaatagttttatgtaacacaactattcccttctattatagaggatcagtttggttgcattgaattttccccattgtcctcaaaataccttttcctggttctgtccatttaatagtcactttgtacacaacatttctaagttgggtgcgtgtgtattgcttgtaagataattcttacttgtgaattaatggttaaaattaatttgcaagagtgaaagtaaaaaggaactatagttaatatc

SEQ ID NO: 3501 - DNA, 1030 bp, Homo sapiens
aggatgtactttttaagtatctttaacatttaggggaattgtttactataccacagtcaatatgccaattacatattttaatccattaagagtaaatttcttaacactctaggcttaatttgatgatcaatgtatttaaaagtaataaaaacttgtatttgttcaaaaagggtatttcaaggacctaagcaggcattggaatagttgttatccacatgttcattcggtcaactagccagacaagcagactgcctttgagtacttactgtgtgttgtggtctcagtagctatttaacctattgtccaagctagaaacttctgagaatgaaagtggtgctattcttaactatgtttggggaacagttataaagcaggattgaaactccaagtatggttgctctagatctgtggtgcatgcaaatgctgtgcctgagcagttaccaggaacagcatcctaagaagttgggagaaaacaaggcaaacaaatcttttgaagttggattgccaaaataaactgggagaggttaaaaaaataaaagatgaaggcatggtataaagccaaagaagtcagggacaagaggaatccagctcctgagatgaatatgcattgaaagctaaggaagagcagagaattgtctatgatgattccctttaccaacgggcatatacttggcaatagtaatagatttcaccatttggaatgtttagctatttatgacagggactgctctccccaggagtctgaaattaatattagcatttttggtttatttgtacttaatcaggtaatggcttttttgttaggctattttcaacctaagataaatatgcagggtactttgtgttgacataaaattttagctagaaataaagttttggaatagttaaaatgcactttatttgaagtaataaatactttttaatgatgggaataacaacatttaagtttattgttgatctttgacacatcttcatttctgatgcattttcttttctttctttttttttttttgagacagagtctcactcc

SEQ ID NO: 3502 - DNA, 1040 bp, Homo sapiens
tttctcagttacttctctgacctcttgcctccaccttactttttggtaatttgtttttatgactctcctaaaatttgtgtaaaagaaatgccagaggtacattttaagcttttaacggcttgtggtggtggtgagtaaaagagttgggctgcagctgggtttttcttaccaagatcctgttgccctcttaaagaaacaggcagtgatttttagaaagattggcatcggaaccactttgtttgtctatattctgtattttaaacaattttaaaaccaagtttgttatgttttggtgaggaaaaaattaagaaaaaagattggaatgttgatcccttaaatatttggtttgctcattaacatactcaatctttttcctccagatgtaactcaggctttccctcactttggaactcctagatttgtgaatattggatattttgagaagcaggggttctttccttgatattgactaaggagtctatttaccttcaggatgacatctgaactggagagcagcctaacgtctatggactggttaccacagctcaccatgagagcagccatccaaaaatctgatgctacacaaaatgcacatggaacaggaatttctaagaagaatgcactccttgacccaaatacaactctggaccaggaagaagtccaacagcacaaagatgggaaacctccatacagttatgccagcctcattacatttgcaattaatagctcacccaaaaagaaaatgactttaagtgaaatttatcagtggatttgtgataacttcccatattatagagaggctggcagtggttggaaggtaaggattttatttaaattattacttttatgaagtaagcaatgatgttgatttctactgaaaataaagctttgtgaatgctcatgtaattgaatatgaaattttgatctctagtgatttttaggatgtcaaaaagtttttagcttaggtgaataactttatttttggtagattattagtgtgttgaagcttgattatgttataggactgatgtagcataaag

SEQ ID NO: 3503 - DNA, 1073 bp, Homo sapiens
tattaagacacatgtctaaatataagaagagaccaaaagactgaagatcagtgttgcttatttttcgtcccttaaaaaattagtgcttaaagagcttttgtttatgtgggttatatctgtcaatatttattgtattacaaattaaaattaagaaaaatttaaaatattcacataaaaaataacaaaagtctccgtagtgtacagcatataacaaatataattgaattcagttctacattgtggatctttaaaaaaccctttgccaacatagataacaagttttatgtaaagtaactgtatgttccaaaacaaaatttagtgagaaaattggcattacattatatttttgcagatcttttaaatatctgacttaatagaagacagctggattctcatctctctctgcattaaatctgttgtgatatcacacaccacatagtatctgaaaagctctactatacactgtatgagaggataagagtgaaaaaaggcaaataatgttttatgaaaatagttttgactcttcagactgcctgaagggtctctggaccacactttgagaactgctgatccataaacaccacatatagcagcttaaactgtttctttagcattttctgtacatcatacttaacactaaaagacaagacaggatcactttccaccgtgttagccctctgccagcattgatgccatacttacttgtataatgccatggaagcagaagtagagaaaaaaactgatgaaagaatatccagtaaatgttggctggtgagctgaagtagtatggttgcaaacagaggtcaggataaccactttaatgaaacaaaattagtggacatatgttacttgaaggatgtgtgtgtgtgttctaaactggatataagaaacattctggagcagattctgagtttttaaattacggctgcaaagatgatgttgaatcttcttatgcgaaagactggttgtgttcatcaatctttacaactactcagagacatagacattttaatagggtgagatttaaatgcaaaatacaatatttacttgatgacagaataaacatttggtta

SEQ ID NO: 3504 - DNA, 1047 bp, Homo sapiens
ttaagccctgcacaagtcctttttaagatatatgctttgcaaatggtttctgccagtctgtggcttgccttttcattctcctaacactgtctttgaagaacaaaagttttaaattttgataaagtccagtttattagttgttttatgaactgtgattgcttttggtgtcatatctaagaaatatttgcctaaccagattttctcttatgatttctcctgcaggttttatagatttagcttttacatctaggtttgttgttcatttttcagatttttatgtatgatgtgatgtaagggtcattgttaatttttctcccatgcagacaattgtttcaacataattttttgaaaagtctttcctttccccactgacttgtctgatgccttcatcaaaaattaagtgactgtggatctatctgtctgtctgtctgtctatctatctatctatctatctatctatctatctatctatctatctatctatctatctatatgggtcttttcttggactctgttctgttgatctatgtctgtcctttctccaaaacttggtcattggaattttacagtaaaccttgaaatctgacggtctaagtcctttatgcttttgaaattgagaaaagagcctgatatcccatatctgcttagtggagggttgaaaattagggtattcatatttacaaattaccaaataaaaatttaaaagatagtaaataactgtggcttctttgagcacatgggaggggttgagtagttccatcaagtaaagattgtgatgtttgaaggaagaaattgctgtacttcataagaagaaaaagataaagtctgtgataaagacagcacagttcagatgttttaaagtgatggcaagaaataaaaaatagaaacaaaaaatgtgggatcttttaaaaggagccagtataatagaataaagaagaataagaaggattttaggcagagagattcttagagtctgggtaagtataagctgcagcatctttacacgtggattattagtgaacaacccaaatagtgctgggattttca

SEQ ID NO: 3505 - DNA, 1010 bp, Homo sapiens
taccattattatccttacttcacaagtgaggaaactgaggtaaagttaagtaactcaaagatatataggtaattagggatagagctgggattcatacataggtccttatccagtgcccatgctttaaccatttaactctactgcctcttggctataagtatttattgtaatttcaggcttttttcttaaatgaagtctgccaaacaatattcttcttaattgagggtactataaaaaataagtaaaaaagagaaatgtcagtgtaggagactgtggaaaaaggtaatagaaaaccagcactttaattttggaatactaaaattgaaaaaaaaatcttgtttaaaattgataaaatattttgctcttttgttagcaaaagacaggaggtttttttttttatttcagggagatggagaaattttgagtttttatgagggggaatcatatatcagaggtaatagggaataaagaacatcactgaatatactaagagttaaatataaaacacatgcctactaacagtgcatatatagtgcaaaataatactactgaaaaataaaaaaattaaatgatttgatataataagcttatcataggcaagctttatggttcagtggcacttagtgcagagatgtatctttaggcatttggagcacccacttttctagattagggtttaggctgtactctacttgccatacagagaacttggggcagtggagatttcccagctccatgcctaggcatacctctgggtaactggtggttgcccattggaccccagctctcccctgccccccatacctggtgcttgtgccctgctattgggagacctgtaggtgggcctgcctggtctggacccacctgtcttggtctcctgctccagggctgggcagggagctcagacacctgtgcattctgcagatcagccccattgcttgaggcaacagagagcttctctgtaaacaaggatcacatatatacccatctacaatggcttcagctggctc

SEQ ID NO: 3506 - DNA, 1082 bp, Homo sapiens
tgtctccaaaaaaaaaaaaaaaaaaaaaaagaaaaaagttcagagagtgatggatgtaatttctgttaaacagtacaatcttaaaagtttagcagaatctttttgtttcctgagtttggataagatggatttgaatcctcagatgtacctgtattttatttccaagtacagatgcagtaagagcaacagcttactgaaaaagcaaaggctttccttgatcgtttgctttatgtagacaagtgaatatgtatgtatctcatatgacatacttcttttacatattgtaacaatagactattttttgtaacttccttttgtttcagtttttaatttttgtgggtaaaatgtatatttatggggtacatgagatattttgatacaggcatgcagtgcataatcacatccgtaagtggggtatattcatcacctcaagtgtttatcttttgtgttacaaagaatccaattacactcttttagttatttaaaaatgtacaattaaattattactgactgtagtcaccctgttgtgcaatcaaacacaaggtcttagtcactccttttatttttttgtacccgttaaccattctcactctccctgataccccgcttacccttcccagcctctggtaaccaacgatccttctactctctatctccgagttgttttcatttttagctctcacaaataagtgaggacatgcagtttatatttttgtgcctggcttatttcacttagcataatgacccccagttccatccatgttgaaaacgacaggatctcgtgtatatatgtaccacattttatctgttcatctgttgatggacacttaggatgcttccaaatcttggctattgtgaacagtattgcaaacaatatgggagtacaggtatctctttaatatactgatttgccttcttttgggtatatacccagcagtgggattgttggatcttatggtagctctacttttagttttttttgaggaacttccaaactgttcaccatagtggttgtactaatacacattcccaccaacagtgtacaaaatccagtgttcccttttccccacatcctctccagc

SEQ ID NO: 3507 - DNA, 1046 bp, Homo sapiens
ataataataaatgagtttaggattggtgagggggtattgatggaggatctttcaaggatagagggtttagtttgatagggtaccacaatgggttctaaagaatgagagtaagatgatgcatcttgttcctgaggaaggtttttgtttcagctgagtgtcctgggagtggagagactgattagagtgcttatggagaattttaggaataagctgatgagggtctgatataagatagtggttgtaggaataaaataatagctaacatttacttactgtatgacaggtattctaagcgcctacgtttgtttaattcattaaatcttcataataaggtattaaaatcagaagggactttgggcaagttgcttaaccttatgcatgtaattattcccatatacaatgaacggttagatgaaaggtagattttgcactgaccagggatatagatgctagtaaaacacatcagtagatgtgtgttgggagggtagtagtataatgaagaaagagctttgaggtttggaattttgggtcttgaaataggctaatagcattctgagaagaaccagaaagtgcatcatttccaggataggaagattttctacaagggcagggtgttgacagtttcaaatgcggtgtagaagttcagaaacagtgactacaatgaaaagacaattgaattaaagcagaagagataatttgtaaacttagagagaaaattgaaaggaggggtaagaatagatgccagatttgtttttcacaggatttgtagagacattagtatctgatatggtaattattagtatttccttaaaaaaagaaacaaacttatgttccaaagccagtgattttatactttaacgcttctctccttaaacttttattcttttttttttttaaaaaagctttcttgaagtataattcacataccatttcattcacacatttaaagtatacaagtcagtggtttttagtgtattcacagagttgtgcaaccatcaccacagtcatttttaggacagcatttcaaaaaaaagccttgtacccat

SEQ ID NO: 3508 - DNA, 1042 bp, Homo sapiens
ctgggactgggaatctcatctttcagctctatgttctgtcctctggactattctacctttgaaaatgacctagcgggagattttgctggtgaaaaggaaacagctggaatttctatttgtgacgaggaggcaatatccaatggagagtctttggtctagctgctgctagatttagctagagttttgtcattgctttgcaggtggccccctgctgtatgaaggcatcagtctcaccatgaactccaaactcctgaatggttcccagcgggtggtgatggacggcgtaatctctgaccacgagtgtcaggagctgcagagactgaccaatgtaagggaagcccagtgactgcaccttcccccaagggtccagcatccccccaccaagtgccccttgggtggtagccttcgccttcctcttcctggccacagttgaccacctcttctcaagccctcagctgccctggctaacatcaccttgtgttttgggccttgtaggtggcagcaacctcaggagatggctaccggggtcagacctccccacatactcccaatgaaaagttctatggtgtcactgtcttcaaagccctcaaggtaagatcaacactgggcattctagagtgtggagaaaggggtggggaagggggaagctcaggctttgaggaagagttggggctggtggcaggaaaggtgaagagggtccacctgccaacattcttgttgccaggaagcgaggatgagttatgttgcgtgaggttcacttttgaatcctgttagaccgagtgtaatcaaaacaaagtgagcaggataagactgttcgccaaagctatgagaatgctttctttagaaaggctgattctagagggctgtgcttctgtgcaggatgcacagtgtgctcataaagagagataagaaggacaggaggaagaggaatatagtaggggtattgggcgtgggcagcagaggctgcagcttcagtgggggtgtggggacgtgggatgggcctggtactcattgtctctggcccctaaagaggggcgttgtg

SEQ ID NO: 3509 - DNA, 1094 bp, Homo sapiens
aactcctgacctcatgatccgctggtctcaaactcctgacctcatgatccgcccgcctcagcctcccaaagtgctgggattataggcgtgaacccccgtgcctggccacggctggtctctttgataccagtgtccacatagttaattactagatcatcagtgatttatttggttggattctatatatgaaacctgtgttactttgacatgctggagtccattgctgtgggcattgtggtctgtagcctatttctccccccttggatttcttttttttttttttttttttttttttttgagacaagagtctcgctctgtcacccaggctggagtatggtgctgtgatctcggctcgctgtaacctccgcctcccgggttcaagcgattctcctgcttcagcctcccaagaagctgggattacgggtgtgcgccacaacgcccagctaatttttgtatttttagtagagacggggtttcaccatgttggccaggctggtctcaaactcctgacctcaagagatctgcccccttcggcctcccaaagtgctgggattacaggcatgagctaccgcccccgaccaccccctcagatttcttagagctatttgtttgaacctcatgagccctgagctttgagtcagaaaatactatgtctggacttagtaaaggaccttagaatttttagccatccaccttttccctaaatgtctcaaaaattcttcattttattttatgcaaaaaaaaatttttttctaggaaaattcttaggcatagtctgttagctgctcttttttctctacccctaaatccttgaagccacagaatttcttcagctcaggcattacatttgattcatgaaatatatatatgtatttttttttttttgagtcagggtcctgctgtgtcacccaagctggagtgctgtggcaccatcttggctcactgcaacctctgcttcccaggcccaagcgtcctcccacctcagcctgcagagtagctgggactacaggcatatagtaccatgtaatttttgtatttttcgtaaagacagggtttcaccatgttgcccagactggtcttgaactcctgagctc

SEQ ID NO: 3510 - DNA, 1034 bp, Homo sapiens
cccaccagcagtaccctctttgctgtattttatgctaatcattcttgctgttctacgttaatttactgtctgtgtacctctaaatattttgttgtgtaacaatatattgttttgaatgtttctgaccttttatatatgttaccgtgactggctgtcttcactcagcctttttttaaccattcaagtttatttatttttattatggtaaaatatacataaaatttactagtttcatcagccgcattctgtgtttcaagaatcatttgcggtagtgttagtaactattttcatcactgtgtagaattccatttttcttaaagatgacaggaatattcaagctttctagtcagtttggatcattttacttttcctaggaacttgtttcatttaggttgtcaaatgtgttggcacggagttcataatgtttcattttcatttctgttatgtcagtagttaagtcttctttctagttcctaataatgtttatttgtgcccactcccttttatgttgatctgtcatgtcagaggtttgcaaggttttttttagtattttcaaggaaccatctggcagtcttggtgatcctctctattgtaggtttggttgctttttcattcgtttctgctctttattttgtattttctatttgtcccacttctaagtttcattttttcccccttccttgtcttttcaattaatcaagttatagctcctctacacacacacacactctgtctttcatttttttcttctacaaattaggaagttttgtgatctgtttctgttcttagtgggtggattaattaagaataaagaaagatgatgaggaataaggtgtagttaccctgcctttcacctgaggatgtctcttgccatcttctttccatcaccactgcctgctgtagacgatattcccacgacctcctgtctggactgttgtaacagatgcctcctaaagcacagaaagaatcaacgttgcttatggctgggcacagtggctcacgcctgtaatcccagcactttgggaggccgaggc

SEQ ID NO: 3511 - DNA, 1487 bp, Homo sapiens
gggcacctcacacgccttagaacctgaatccaccccacccccaggaatgttctgcatcctgccacaggcggactgtgctgcaggcacagacaggggaccatggggcctcttagcaccgtccacatgcacaccacattaccactcccagcgggtggactcaacacttgcagccaccctgcaggacttaaatcattttgttcggatgaggaaacttaggcccaatgctggatacacaacaaatccaggaccatccccaggcttcctgccttctcgcatagctctgctctggcctctgtagcttctgtttcccctgaggatccatcacaacccagtctaacttttccccctctccgtcatcctcaacaggagcagctaccctggatgtcctatctgagcatcgtggccatctttggctttgtggccttctttgaagtgggtcctggccccatcccatggttcatcgtggctgaactcttcagccagggtccacgtccagctgccattgccgttgcaggcttctccaactggacctcaaatttcattgtgggcatgtgcttccagtatgtggaggtgagaacccccactgtctctatactcacccgcacgcatgaccccacagtgctgtgcaaagtgctggcccagcattctcattaggaatcatgctgaggaggaaactgagggtaggaagcccaggtcacatgaccaagaatgctgacctcaactccagggttctccccttagccttgaatggtgctcctggagcctgttacattctaggtacaagcgtggtctcagttaattatgatagcatccctgggtaggtggatgttcccttttcagctcaaaggcccaaaggtaaagtgacttatccaaagtcctacagccaggatgtagggtcatgactccaaccaagtgtgtctgtgtgtctttcagcaactgtgtggtccctacgtcttcatcatcttcactgtgctcctggttctgttcttcatcttcacctacttcaaagttcctgagactaaaggccggaccttcgatgagatcgcttccggcttccggcaggggggagccagccaaagtgacaagacacccgaggagctgttccatcccctgggggctgattcccaagtgtgagtcgccccagatcaccagcccggcctgctcccagcagccctaaggatctctcaggagcacaggcagctggatgagacttccaaacctgacagatgtcagccgagccgggcctggggctcctttctccagccagcaatgatgtccagaagaatattcaggacttaacggctccaggattttaacaaaagcaagactgttgctcaaatctattcagacaagcaacaggttttataatttttttattactgattttgttatttttatatcagcctgagtctcctgtgcccacatcccaggcttcaccctgaatggttccatgcctgagggtggagactaagccctgtcgagacact

SEQ ID NO: 3512 - DNA, 1045 bp, Homo sapiens
taagtagaagaacaagagctggtatctctaaaaccaggagaggataccctcccaagacagagggataatgtaagccatcgaagggccagggtatttgtctggtttgtccacggccgtgtccttagtgcctagaacggtgcctgtcatagtaatagacactggtggatagtgagtggaggaaggccatcgggtaccccaggggttgaactgggcaagcctctccacattgctgaatgcagaagaggcgatggtggccttgtggccactcgggctgactgggtggcacagcgtggatagaagcctcactacgattgggtgaagagtgagaggcagatgagaaagggtggagacggctcttccaaaagagttggtgggagagggagaaaagaggaggtttggaatgatggtatggctaggaatttatttatttattttaatgaaggttatttttaaacatgttggaaggaatcagcaggagagggtgaagataaggaagtgagggcggaggtcttccaggagggagggtggtgtcggagcagaagggaggggctgcctttggccaggagggactgagatacctttttttttttttttttttttgagacggagtcttgctctgctgcccaggccagagtacagtggcatgatcttggctcactgcaacctccgcttcctgggttcaagtggttctcgtgcctcagctttccaagtagctgggctactggtacaggtgtgtaccaccacgcccagctaatttttgtgtttttagtagagatggggtttcaccaggttggtgaggctggtctcaaactcctgacctcaggcgatccacctgccttggcctcccaaagtgctgggattacaggtatgagccaccatgcccagccagggactgagagacttctgaagatgtagacaaatctgagatgaacttctgtgatccccggggcctcccatctaatcagaaataggcaagaggttataactgtcatggaatatgggcagaacctctgaccagggcatcacggggctggtcagcagcaca

SEQ ID NO: 3513 - DNA, 1308 bp, Homo sapiens
ctgggttacagacgtgcctaaggggctttgcttatagaaaggaaactgagagcattgctgggccatcaggttcatcaggctttacagtgctgtagtgatgtctaggaccattcttttccaggcccagtgctaaacgacggtataaaaaccagaagtttggttttggtggaaagaagaaaggctcaaagtggaacactcgggagagctatgatgatgtatctagcttccgggccaagacagctcatggcagaggcctcaagaggcctggcaagaaagggtcaaatgtaagtgagcccaggtgcccgggtgaggagcaggctcagcctcccctcccactcccaaccctgccctctcccttcagttctgttcgtcctcaccctggggcagaaggcaagctgctatgtgaccagatgtggtatgtctttttctgtagaagagacctggaaaacgaacaagagagaagatgaagaacagaacacactaaatagcatctttgaatacaaagaaccaagaaaaaggaatgaagactcgcaatttcacgacacactttgatcccttctgttggtgtcatgttgtaaacatttctttcaataaactaaagaaaaattattaaaggaacacatacctttggttaaatagtctagactaaaagattgagaagttactttccattgctatctattgataatttagacattgagttcaaattgccttcattttatgataaataatgatttaactgacaccttctcatttcctttgtctcatccttctaaatagttatattacgatcaatccctgtaaagctcaatgcccatattttacaggtgtgagccaccgtgattttctttgtggtacagcttttggtttttcctccagttaaccttcaccttacattcttctgcttgcctaattttccttctatattcttagttctttccagatgctttgtcattttacccactttataatttttctcctacaacctagttatgccacacaactgtcaccttttttctagaccgtttaagttggcaccattatttccagaatcccatgttttcccatcttagcatatgccttcttttgctgtgtaccattttttggtatcttactaagaaagggaagatgagaggtaaactttttatctccttgcatttctgaaattgcctttaatttgggctgataggaatttcctccttagaattttagaatttcgcaggcactgtttttaagttttatttcagttctacttttggggggagatatatttttgttttttaaaatctttttttttttttttttttt

SEQ ID NO: 3514 - DNA, 1079 bp, Homo sapiens
cctccatagccatgggttcagcatctgtggattcaaccaaccttggatcaaaaatattggggaaaaaaatttgaaaatattgcaaaaggaaaactgaattttccgtgtgccgagaactacattgaatccatgagaatgaggtgatgcatagcattgtattcggtattataagtaatctagagactatttaaagaagcggtctggcactagagactagtttcgtggatgacaattttttcatgaacttggggaggggatagttttgggatgaaaccgttccatctcagatcatcaggcattagattctcataaggagcaggcaacctagatcctttgcatgcatagttccatgcatagttcacagtagagttcgcactcctatgagaatttaacgccaccaccaatctgacaggaggtggagctcaggtggtaatgcttgcttgcctgtcactcactttctgctgtgcggcctggttcctaacaggccacagattcatagtgggttcgtagcggtctgtggcctgggagttgaggtcctctgactttaaaggatactggaggcgagtgtaggttatatgcaaatgctgcaccatttttatataaaggacttgagcatctgtggattttgatatctgtagtgggtcctagaactaatcctctatggatactgagggataagtatatttaaatagtaccctggggtctcaagctggattttagggagcttttgtcgtggtagtagttcaccttcttactgtgaactctgtacaaattctcactgacaacttctcatcctttaactaaaatgtgtatgtttgactgaaaaggctaggcacctggtatctgcctgggtttttattgtgtatgtggtatactagaaaaggacactgaggccgcatactggtttccagcctcagtctactgacagtagaaatggggagaagtttgtcttctttcctgggctacaaataggcagtttgtataatgaaacagacagcacactgggagcgggaaggtgactttcaatctctggcttcactctggcacttttggtaaagtgctcagcctgtgggccccat

SEQ ID NO: 3515 - DNA, 1051 bp, Homo sapiens
tcagagtggagagcaccgccccgctccgaccccgcccccggcccggactcgccctccccgccctttgctcctccccttgtctctcccctttctcctccccttgtccctcccctttcccctccccttgtccctcccctttcccctcccccggggtcctcctccgcgccaccccacccccgcggctcctttttctgccttttcctttgtaccctcactgctaccagctccttctggcgacccccaggtaccccctcccacctttcgtttctctctgggtcagcagaccacgcatgtatccagaggcgctacctgtagggatcctaagcaacccggacactttcaaacgccgtagcggttcctatagcaacgacaaaccggaagtatggtttgccgccggaagcggaagtcccaatcaaaagttgagcagtagctgtgagttgctggcgctggagcgattcggtggcacgtggagccacggcgtgggagtagggggctgaaggcaggcagcagcggccagggccgccctctgctagccgcttgggtctcgggataccccgtttcttcctgtaggtgtgggacgtgcgtgcggcgagatggacactcccccgctctcggattcggagtcggaatccgatgaatcccttgtcacagacagagaggtaggtgtcagccgagctcgtggggctgggcgtgggagagggggccttacacccctgggagtgaccgtgattgtgtcctgcagttgcaggatgcgttttcccgagggcttctgaagccaggcctcaatgtcgtgctagaggggccgaagaaggccgtgaacgacgtggtgagcgtgggcacagggtcgggggtactcggacatgggatgcgcttcaggcgctgttgggcttgggagaccgattcttgtcccaggaaagatgcaccctgcgcctcgccaagagggtcaattacctgtctgggtattggggattagcactttgtcccttcgcctaacagcctgtgcttgggaaagacaaactcagagttcccttcttgtgagctcagtgtctgg

SEQ ID NO: 3516 - DNA, 1010 bp, Homo sapiens
acagggagaaaaacccactgaccctgtggagctggcccctacaaaaatagaacctgcattttaccaaaatccctagatggtttgaatgtaacttaaagttggagaagcaatggtcttcagtacttttatcctgtttgctctgaatcagtggatggggctgggtgcagtggctcacacctataataccagcactttgggaggccgagctgggtggatcatctgaggtcaggagtttgagaccagcctggccagtatggtgaaaccctgtctctactaaaaatacaaaaaaattagctaggcgtggtagtgcttgcctgtagtcccagcgactcagaaggctgaggcatgagaatctcttaaacccagggggcagaggttgcagtgacccaagattgcaccacggtacgccagcctgggtgacagggcaagactctgtctcaaaaaaaaaaaaaaaaaaattcagtggatggctggtctcagctcttcagcctgtgctcatctcctgtcactgaaccccaagcctcctcctgggactgctctgtatgtggattttatgccaattctaggaggcttgactcttgtgtgggtggaggtggggacaggaggtgagttgtggggagggtgcatagccacatcaactcccatttttagcccctcaggcctcagctagggctcccattgctggctgtacagactaagtatcctcagtatcaaggaggagatggaacaccttcagctctcctgtgaagtcttagtttctctggcaccatttctctgcaagcagtccctgactcagatttgtctttagctgtacctggctctcacattacgaggactgatggtaatgactttggatgccttccccagtccccaggcaagggctacccaaacttctgtgagatcaagtgagagggaaaacacaacttcagtgttcatgcagtcccatggctttgatgctctgtgtatgctgatgacttcaaatggtatctctagctgtgacttcttccctg

SEQ ID NO: 3517 - DNA, 1026 bp, Homo sapiens
gaggaaaatcccagcttcacaatctaggtctgcctgtcagctgagagagcctccaacccttatatttgcacagcatctctgtggagaggagctcagctccttgctggatagatatgcacacagaccaggggctaagttggtgggtttcaggtggtgttcagggttttgttgcgaaatctccattaatttggaggcctgaaagcctttgcttttgtcagtgggaatgacccaaagtaggaagcccctaagtaggcgtggctcatatctgagcctatactaactctccaaggacgaacctaggtctggaatccccaaagtatggtctgtcctttcctggggcaagattgaaggtaggagataagaggtggggcagaagaaggtcagcatacttctctacttggggaggtctgctttggtccatcttgccagggcattgtgggctgagcacatggagactggtccagagcagaggctgagtgaggcctctgcagagcagggcagcaggtttctgtggcaatcagctgtatgaccgtgggaccagtggagttcttgggatctctggggccatagcggagttcgtacctcaggaaatcactgatttctggagctggctcctcccagctgatctgaagttcccctggctggctcccacccatggccttgatgatactggggggagccggcaggcctgagggcaagacagggcacatcagaactctgagtaccacagtctatggctcagcctctggactgcagagaggggtgctgggggctgaattggggcagcttctggattcaaaaattgtaggctgtcattctcctggagggcaggctagggaggctcctgattctgttcttctctcatgagaacagtgacttctttgcagtatgatggcttgctagactcagtgcttcttgtaagcagggatccctttttctctccatatccccatcacctagcccagtgtctggcacacagtaggtattctgtaactcttgaatggatgaataaatgatttgttgacg

SEQ ID NO: 3518 - DNA, 1038 bp, Homo sapiens
agatttaggatttgcaaaaggtgactattggcctactctggtaacattcctctgtttttgactgtcctgttttgcttggagatcgtgctttctcctattcttgggtcccctggagaaagagattaggccattgtctcctaggtttgtgtctaggatggagaaagaagcagcagctgtgaaacgtcaagagcttactacaggacagagttcatcctgctgaaggcggaagcttatccaatcaatgtcagcataaggcccattgcctaggatctctccctctccagctctgccctgagcctgggattcagtcattgctgaacctctcttttgctcattgtgccagtcaccccattctgttccccttctggtgtttattgctgccctacttagctggtgtacctcattcaaccctgtcgttttttgggaaacagccaagatagataggttgtagccaagtgctccttagaactccataatgggtcccagcattaggattgagctggagggggtgtaattgcccacctcctgttgtgctgccacagagaagaagctgaactctgcaggaatgccccagtgcaaggctggtcccttttcccacccccctctcacctcccccaggcagctggaaacaacctctccctttgtctgagcttcttgtacagaataatcctccttatggacaatgtattctctgtgccctgtggacacaggagctgtgtaagctgatcccagcaccaggcaggacggaggctgagtccttccaaacgcccaccctgggtcagctcctgattactgtccagatgaactacgaaggagtgtacattctcttccatctgcctttcctatctgctccagaattaggggaatagcctactgaagtttagcattgggccaggagtaggaacaggggatgtggtccttttctgttcagtcttgagggttcacagtgcctgcttatggaggctcgatgtggctcttgcctggaaacctcaaacacatggggactaacccttggaaagggcttgccactgtgcagat

SEQ ID NO: 3519 - DNA, 1033 bp, Homo sapiens
gtactcttttacctgtgacgttaaatgggagtcacacaggtttagctatctgttctaggagtggatgaacagactattctcccatgtcacttctttcctcctggacaccttcagggagacagctgggtgaagaatcatacttctgacctctgtcaaacagggtcagatgccgcagaggttctgagatgataaaggaagtgacagagggaacctgaggtaccacatttctgatttgtcatgaaagtcttaccttgcttaagatgacttttttaatgttcctttcagggaaaatgccaagtggaataaaaaccaacatcaagtcggcttccatgcatccctaccagcggtgagtgtggctggcaacctcgactccctggtgctctttgcagagttgggcagtgaaattaccttttgctcaaggctcacctagatgggtacaataaaaagaacatgggctttcagcagcagacaaatcccacttccaccactgactagctgtgtgaccttggacaagtgacctaatttttctgagcctgtttctcatttgtaaatggtgataatacctacctcatagggttgttgtgaggattaaaatgaggaaatgaatgtaaagcacttagtacagtatatgaaataatgggtattcaataaatgatagtttctacagatccttctccccaccaccctccacagtccttgatccagaacttaccctaatctgatactgcctcacgtcaatggtgagctgatggacacaagatcaaataaggctatgcttattttgtgctgccagaaactgtagcaacctctgtgttcttagaggcacactgtttttgcaggccctcctgcctgggtttcattctggctatccctctaaggcgcaaggtgaagaagcttctgggccaggaaggaaaaaaaaatgcccacctgcagctctggtgaagcttgggcctgctctcctttccatcctctaaggagccaacttggcttttacctgtcaaatagtcataaagtcccctatcctttaccccac

SEQ ID NO: 3520 - DNA, 1026 bp, Homo sapiens
accatttgtgaccatcctcttcagctctccctgcctccctagcccagccctcactcctgttctctaggccagaggaacaaccgcctgctggacatggcttcctttcttccctcttcctacaaagctcttctctttcatctccctgaaaactgctcctcatactacaacacgcagatcaaaccactttctccaggaagctttgcctgtccccaggctaggcaggtgtttcctctgggtttcagtagccctcatgggctgataatctctatcacaagtggcggtggaagtgcccagcccgtgactggaatctcctgcatggagccaggtgcaacccaccagtgggctagggccctctgccaagcagggacagatccctctctcctaccatcaccttacctgggcccaccacctctcatctggaatatctcctgttctggcaaatcacacctgggctcctccaaggcaaagtgcaggaccctggggctatactggacccaagcttgggcctggtccctgcagaaggtgcacaggaaggaagctgagaggctcctttctggaaaccacagaaaaggcaaccctggctccttgttaggggcagcgctagcccacctggtatctagggaaagggcccaggcctgaggctcccacctgccctcacagatggctttgtggcggagaccctggagcaactgccggagctcctggcgcaagaggtcctttaggagaggcggtggtgccagaagagaagaggggtcagagatggggcgggagctgggggcttgagaggatcgagcctcttggagcagtgcccgtaacatcgccacctgcaaggagagctgggataccttgcgactggggaggggagtgtccggaatggtgggggctgggggagtgagggagagggcggagtcaaaggggagaccaggataggatctcgggagttacccggcagggccagggacccgcagaggtgggaaatcacccgagtcgtggggcaggccaggggcgtggcccaccttccctctc

SEQ ID NO: 3521 - DNA, 1031 bp, Homo sapiens
ctcgggttcagtctgtcttccaggcctgcttgcacctcactgggctgctccggggtctctgcccctcattccaggcctggctgtcaggcccagccagcaggggcccgtgacccagcagcctgcccaaagcatttgtttctgggggatggggtgggggctgctccacaggaggtttgagcccagcaccctggggaaggggaccctgcacgacacccccttgccctccctccatgaggctaaaggcccagtcttcccaaatgtgctgccctcgttcatgtgccaaatggccccagcccacatgcccctcccctctctggagtgggagccccttctgaagtgtctgaatccctgaagtgttcatttgtccgtcctctgtgcagtgacagccccggccaagccacctctaatcctctgtagcaataacggtgcgccgcccatccctgcccattgtgcaccactaggattttaaagtccatagattttaatgaaatttctattcctgtctctgagcggctgctgtgctttgtctgggtcccccaggggacaagagtcaggctggaatgagacctctgtctgccaggcctttgtggaggcctgggaggagaaaggccaaaggctttgatgcttgggaccgatgcccggccactcagctccagacaccagggatctggcaagggggtggggcaagggccagacagaccaacagccttggggtcctggcgagagctcgccaagaccagatctgaagctggctgggccaaagcagctgaggcggcagcggcagacaggtgcgctgtggcagaagccagagcctactcggtgaccagcccttcaggctggggcttggggtgctgcactggacatgggtgtggaagctggcccttccctggggctgcactgaagctgccgtccccagcggtgggtagccgactggcctcgaggtcgaaggtagggctccagaggaggtgcaggcaggcagcactggagaggtgcaaccccgcagaggggaagcgggggtctgaggccctgtg

SEQ ID NO: 3522 - DNA, 1035 bp, Homo sapiens
tgaggagactcgaaagctacacttctcccctgtaggacatcctgacttgaccttcaaaaggcaagagagggaatgtcctctgaggcgatgtgggatgggtctgggaggaacagtacgcagggctgccctcaagcctcagtactgctagggtcaagaaccaaagccactttccagagtgcctgcctgctgctagccagtgagggtagacgccgcccccagccgctgcagcacaggacatgaccattgcctccagtcttccctcctgggcttgtctggggtgggaagcgaggagctggccagggtccacccagggtcctccatcactcaccccagggcctggagtggagcccggcatgcctgggggtgccagtcatctgtctgcagcccacaatattggcaggtcccttgctgccagtcagggctctgcaatggataagcacaaggcgtattcttgcctctctcatctgctatatgaaggcctggactctgaaggcacctggagtcctgagaggtgcccagagatggctctgaggtttgccttgaggcaggaggcatgaatggccactgggggctgctcggcccgggggagattttcccatgttctgcccctccaccccggccccagactctcccatatccaggtaactgaggccagagatcagagctgcagctgggtctctctgcccctactcagtgccatgtaggtgaaggacagaagattctgtcattgcagggtaggtgctgcctgtgggccaggctgggccctgcactgataggagagaacaaaaactgaggggtgcctggccggaaggaggtcgtggggtcttctgaggcagccacaatttactgtaatggctgttctgtctagattccccattggggcttagagaaagttgccagtgatctgatttggctcaaagtcagtctgggatgtgaggtcttgcccattctcctccataaagtttgtcttggatgggacttcatcccatgagcaaaccctggggctggagagtcctaaacacaaagcctgctggg

SEQ ID NO: 3523 - DNA, 1027 bp, Homo sapiens
tccctgagggtttgggcacctcctgtctgtagcatccgtcataggacctggcacatagtggggactcacccagcccaagtgttggcatgtagcaagagctcaactagtgcaggcttggtgcattattgggaggtcaccaagcacagggtttggcacaccttggacactcccttggtagagggcctgtccctgcctgggcactcacctaaccgaagtcttagcgtgtggcaaatgctcaactagtgcagacttggcacacattaaacactcccttagaagacagcctgtcaccctgtaggcattcatctagcacactgccaggtacacagtgggtgctcacccagctcagagctgggcgcacattgggtccttacctggcacagaattcgacatacccggggtactcccctagtacaggacctagcacaccacaggggctccccacctggggctgacacacaatgagtgctgtctcagcatcggacttggcacacaagaggcactctgctgatcagcatcggatttggcacacggtgggcactctgctgatgcaggttctcacacacagcaggtgcttccagcacaagatttgacatccagtaagtgctatcccggctcagggcctggcacacagtgggcattctccttagataaggcctagtacagtggaggtgctcttctagccaggacagcctaagcaatgaccttccgctgatcctagattagcagctaccccatcctccgtgaaatgggcaatatctagatccagaggaaaagttccagccttcctcagcttcctctctggtcgggggccctgccctccctccccctccccacttcctgtctagcccacctactcaaccctgtagcccggcctcccacacagcctccctgcagccctcccccatccccggcacttctcagtcccagctcagcgggaccttccctccagagtcacaggggacaacaaagaccctagcctccttgcccctctggaagcatgcccactcttattaggcaaagtcag

SEQ ID NO: 3524 - DNA, 1048 bp, Homo sapiens
cgtcccatctgacattaatccagtgtgcaccagcattgccatgagactgttccttccacgtggctgctgccccccagctcgccagccccaccttgccactcatgcttcccacaagatcctgggctggcctggacccctcatttcagaggtcccgacttcgctatttccctccatttcaattcaaataacaaacacatcttgcaagtccagtgctgtgctacatgctgggcacagagggtaaaagaaacacagtcccaagccctcggggaactcactgactcatagttgacgaacttataagcaaataagtgtcatatgaaataagagtactcgtagagatttgcacaaaacagaaaggaggaagcaactttttcattcttttgagagagagggtcagaaaaggctgcagagaagaggtgacatttagcccggtgcagtgccgaagatttgtagaatttcacctggtgaactgctgtggaggggacagctgggagtgcaaggaggtgcggctgcacatgggtgtgtggcaggcccagaactcggttcaagtgaatgacatgacaacaaacccagctgccctggagcccacactgagtgccacccagataggaaaggaccatcctggctgcctggctggggtgaggatggggagagtgtgctgatctgagctgattcccctcctggggaaaggctgaagccattcacacagaccatgaaggaattggactccatcccagtttggtattcattttttatcttttataggattgggcatctggaaagtcaaaaatagacctttgcccattgggacaggaagcctggagatcaagagatccaggggaaaggttggggggactgggaaggagctggatctgagggtcttccagaaaggagcaggatatggacatggcctggcagagggcctgggcaggctggtggtgggtggctcggcactacctgtctggagagccctgtgggccacacggccaagtcctcacctcaccctctgctctctccacagctcttgagatctgtggcctgaaaggcg

SEQ ID NO: 3525 - DNA, 1079 bp, Homo sapiens
aataataactaaccgagctactgttttaagcacttcacaaataactcatctttttaacaacactttgagggaagttattgctataattattattattcccattttagagaagaagaaaccaaaacaaagataagttaaataaaattcaggaacttgctcaagttcacatggttattaagtggtggagtttggattcaaacccagaagcaggatatactggggccatctgctgtgtcagtcctaaactcactgccttggccctcatcttccttctaagctaacatttgatgctaaaccttaaactgcacccagctgttgggtccccatcacagagttgccagataatacagggttacaaataatacaggacactagttaaatctgaatttcagataaataatttttagtataaaaaatatagtataagtatgtcctgtatggagctggtggggctgcatttaatctggcagtcctgtgtcaagcaggcctaggcactggcactttgctctcagggcattactgctgccaggatgtctggacagacagatgtggcaacagttgaggttctagaacgtggacacacccaaggatcctgctgtgtcacccttaccatgcatggttccttctccttgcactgttctccacacctacctcccaactaccctaccctacctcttctggtccctgttccatggactcttgccccattcctcaccatgtcctgaagatcagtaataaagtgtgttaccaagctaagcattctgcaggcaggaggcctgtggagactccagcagacctcaggatgtgtctgcatgttcctttaggccacactccctcttagtcccataagatcagcagcttgccaccctactgtccctcctgttcccccagtttgattggcttctttgatcatttcacatacattcactcctgcctccaacagacacatgtatgggaattgtatatgtgatagagctgtcgtttcaaaagggtggggaaagtgttgacagttcaatcaatggtggtaggacaattggctattagggggaaaaaagttagagtttttatttcttaccaca

SEQ ID NO: 3526 - DNA, 1793 bp, Homo sapiens
tgacctcgtgatttgcccacctcagcctcccaaagtgctgggattatagcgtgagccaccacgcccagcccgggttttaagacagggagtgaaatgaccagattggtggtttaaaaggacaccatggaagaaagattggcaggggcactgccgttacctagatgggagatgatggtggcctggaccaggatgttggtaatgggaacatgggcttagaaattattgaaaaatatatggtaattaaagctcctagaaattattggaaaatatatggtaattaaagctccaggaggggataagtttgcccacggagagagagtgagaagggaagagaccaatgacagttctgagcaacatccatatctaagaggtgatcaaaagaaagggagtgttcaaaggaaccaaggagaattgcatgaaaagtgagagtgggtcactgaagcctagggaagagagcttcaaggagtggattgttcaccaattgtctatcaatcaaaacctgaaaagcttcatcctcatgagtcatagggatcattagagaaagcagtgttggtagagcagtgatcagatcgcaaggtgggagatgaggaaataagatcttgagtgtaaacaactctgaagtttgcctctaaaagggaggagagattgggtactagccaatggaaaagggagttaaagggagacttgtttactcccaagatgggagagaattaatatatttacatgcttatgtgaaggaaccaatgcagaagaaaaaagtgaagctgtatcagtggaaataggagtactcaataatgtgtggaccctgaaaaggcctggattctgggttggaccctacccagctggagtggagggatgggcttagaaagtgacatcaggcaattagctgggcgtggtggcaagagcctgtagtcccagctactctggaggctaaggcaggagaatcgcttgaacccgggaggcagaggttgcagtgagccgagaccgtaccattgcactccagcctggacgacagagtgagactccatctcaaaaaaaaaaaaaaaagaacgtgacatcaggcttggccctctcttgtgacaggaggagaggactggggcaaactcaggagagtggcttctgtgtggctcctgtggagtaggagataagattgtttgcatgggtgaggggtttggggtgatgttgagggcaggggatttgagatttgtggaaagtagagaaacttgaaattgtcactatgggtgaagggagagagagtgcacactgatcaggaacactggagattggctgggcagttttatatacccagctgaggctgatgactctgattttgtaagtggcactagtctatatggttgtgattttctctagtcatacgctccaggtggcaggcacagagaaggcagagtctgggtttttccaggcaagggtgacaaggaaaagggaataagagagttgaggattggcaagaaaaagactgaaatgatggaccatgcaatccaggctccaaaggcagacatgtcagttacgttgctaggacagaaactatgacttttcccttctttttcactaaatagaacccctgtataattatagaaccgctgtataataatcagtgtgtacctagttaaaagactacgtttttagttttccagacagctaggtacagccatgtctctgagctctggccggtgaaacaaaaggaaatgtgttgtctgggacttgcaggaatgatacctaaagggaaacagctcatctgggaaatacgctattcttgccttttcccgtcttcc

SEQ ID NO: 3527 - DNA, 1053 bp, Homo sapiens
tggtattttggaggaggctggggtctgggctttgggtgagtcacagatggccttggactcaggccaaggtcctccttcactggctgcatctctagtgggcaatgtcctcagtgggtggggacatgtcagcttacccaccccccatggagctggaggaggctgtttaatattgtttgaagtctgtggccactaaactggacgatcaatgggagttaaggagatgaattatttaaacctcaccagcttttaattagtcggggtccttctgaccgatgactccgtccacagggtattgactcccccgcaggagcagcagcctccattgagcggtgcctgggttgagggggtccacttggggtaccaaatgggggtataccctcaaggggattcttgtttggaaggaaactggagtggctatgattccaggcagttggaggttttgttagtttctgatctatcagtatgaatatgttatctgtctgtatctgtgtgtctgcatatgtgtgacacctttagctgtatgtctctgtgtcagactcagagtataatgtatccatgattatacatgtctgttggggagcgtgtaacagtatatctgtatttttctgagggcatgagtctgtgtggaagcagctaccaatctgtgtgtgtatctgtcaggtgtgtctgttcagttctgtatatcttattttgtttgcatatgcacatgtgtgcatgcagatgctctcaggtgaggcacctgaccaagcataggccttgttccaagtggggaggagccagagtatctctgggcagtgtgctgacattaccacaacctgtgagcctttggggtcgcatcattgtggggggggactggagagagaataccaggaccaaaggacccagtcacctccttcagagtagatcctttatccattccagacattcactggtaccttgtggatgctgggcatgctaagtagaagtttctgttctcagtgagctcacatcctgggaagagacagggactgaaataggtgcttgccacccagggtactaagggctgtgacagaa

SEQ ID NO: 3528 - DNA, 1029 bp, Homo sapiens
acagaactgccatctggggttagggaggatgggcttgtgtcacctgatgcaagtgtccatccctttgctgctttagctgtgcgggtcaagcctctgctggacccgaggaatgggttgggggatatacataggctgagagtacagaaaaggaggagacagcaacagttccctcttccttaaaacaggcaactgagcccccagttccaagaatggctgtggggtgggctgttgctgttctgctgggcaagaacagctatggttcctgaaggagactgggtaggattggcaggagtagcagctccggaaaccaggcctccaggcttggtagaattatacccaaagaggtgtcttttcttcctctccccttctcctctcgcttctccttttctcagtggagaccactcagagacagcaaatacaaccccccaaccccctcaggaacctctcagcataatgggagacaaaatccatgttacaggtgccattcacagtatgggggatttaaaggagggatgagccaggaaagactataaaggaaggtactttttgaattgaatgttgaaagaggagtgtgtgttcaaattaggacaaaatgtgggagaaggcagagggcgttctaggcaggctgaaggaactgcttcatcaaaggcttgaaggcatgaaacagcaatcccaggacttggtgggcagtaaggaagaggaaggaatcaagattgactcccacatttctggcctggtagaccaggtagatggtaatagctttcactgcaatttgggagcccaggagaagaagcagtttgaagaggagatgttgaaatgagctttaaacatatggagaatgaagcgtctgtgtgaaatccagggggtgattcgaggtaggcaatagaatatatatgtctgacactcaagtaggggtaagaaatacagatttggaaattagaaaggttgaagacaatggacttgaggaaatcacccaaggaacccaaggagagtggtagcatgtagaaaaaaataggaagagagagtgca

SEQ ID NO: 3529 - DNA, 1085 bp, Homo sapiens
ggtctccagccccttcccaggaggcttggctttagggtcctcctcacactcctgcccctgctcaatccgcagtctgtgtgggtcatgctgtcccagccaaccaattgctgcctgtgcagtgaggcaggatcagaagcaacacacaccattctgggctccagaggccactggtcctgagaacttccctcctctcaatccctactgtgggtctctccactcactgtatcacagttatgggccattactggtttctgtgtctgtttcccgtcaaaggactatgagttctttgagcgcaggtctacatgtgattctgtttgagttgctgggttctggcaggccttcagtgaatgtgtgaatattcagtgaatgaatgcttgtgtactttcttcctctccttctagatggaaaatctagaaggatctattatcttggttctctattagtttttcccaggcctggctacccttaggaataaggaggggtagatgtgcaaaggaactactgtctgtctgtctgtctgtctgtctgtctatctatctatctatctatctatctatctatctatctatctatctagagggttttcctctgtcactcaggctggagttcagtggcacaaatacagctcactgcagcctcaaccccctgggcttaagggattctcccactcaccttagcctccctagtaactaggatcacaggtgcacgtcaccatgcctggctaatttgtgtgtgtgtgtgtgtgtgtgtgtgtgtgtgtgtctgtgtgttttgtagagataggattttgccacgttgcctaggctggtctcgaactcctgggttcaattagtcctccccactcagcctcccacagtgctgggattataggcatgagccactgtgcctggctggaactaccttttcatattggtagagcaccccaagatcacatagcgtggtagtggagggcccctgaatggccttaggaaacagtacaaagcccttaccgtgtcctttgaggtcctgcatgggctgcatctcctgccttcctcatcagccacatttcatgcttgattttctgtgctcagggactctggcgttga

SEQ ID NO: 3530 - DNA, 1024 bp, Homo sapiens
tttctgatgaagatttagcatcccaattgagatgtacagtaagtgtaagttacacgtcagatttcagagacttggtatgaaaaaatgcaaaatgtctcgtaattttctgtattgattacatgtgaaataatacttggatatactaaaataaaatatattattaaaataattttgtctgtttcattttactttttagtgcggctgctagaaaattctaagtttcatatgtggctcacattatatttctattggacagtgctgtgctagacgctatggttatgtacctacattgtctagtcctcgcaggacccagtgcagtggttgctattatttttcacattttaaggttgagaaaaccaaggcatggagcgatgatgaaacttgctcaatggtttcacagtagtacatggcagagccagaacttaaattcagttttgctaaatgctgaagagacagagagtaaaaaagtgatagaagaagaaagactgtaagagtgtggtattgcagaaaccaagaaaaagtgtttcagaagaagaggagtggtcagttcagagagggctacacaagatgaagactaaaatttgagccctgaacttgttaataacaagggcctcagtgaccttggtcctgagtggcatgataggaacaggagccaaattggagtgaactaaagagtaaatgagaaatgaggaggtggagaaacttcaactttttcagaaatgttgctttgaaggtgagagaaaggacaagagctgtggtggggcaagtaggggttaaagcgggttttgtttttaaggtagaaggcatgtgtttttctgtaggatctattagagaaggaaatcctgttgaaggtgcaggagggagaagaagccagtaagggaggcctctgaggaggtgagaggagaaggggtggagaacctaggctcttgaaattggctctctttaggcggaaggtccctgcttctattgtgacaggagggaaggagaggaagatgggcacaaatggaggtaggtaggcttgtag

SEQ ID NO: 3531 - DNA, 1119 bp, Homo sapiens
actgtgctggggactatggggactgccaagtgatcaggacagaaagaccagcacacatatacctaactatagggtaagtaaggtagagtatgaaaacactacaatgaaggcacaacacaaatgctgtgagaatccagaggagcactgtagagagatggaatggtagtattttttttagtactaaacttttttttcttttgaacagaattttaaagcccaatgtgaatctggttgaagatggggaaaagccctgcccattcttcctctcccattcttcctccttttcccccagtccatgaagtagcctgatgttcctccttagaaccctagaactccatggagcacactttaaaaatcactagcctattctaatgcccgcccagaagtcttactctgtataggacaagtgcttatacctcttgaaggtgtcaggggagctggaatcagggcagaggagaccagctagaaggttaagggtacagctgtgtcttgagtacctatatgagagcggaggtcagactgcaacccagatcctgaacgctaggaggatgcctctctgcggagcctccagagggcatcataggccacacaacggcagttcaggcatagggtcaagatggccacaggccaggggaagactgtagtgggatgagtgagttatcttggagacagctcaatctgctaaggagctcctggtttccctggccaaaaagagaatagctcattagctgaggcactgaccacagtgtcttggaaacctcccatcacttgctcagcctcctctccatagccactccctactggggcttctgccattccatctaggaaagagagctctggccaggccctggtggcagctccagcacttctacagtcatgacagatggggcactgtgcctttccctgatgagttgccatggaaaggacaccggagaggcacttgtcttattatttccctagagaggggctggggagatacaagttacagaattttaaggactatttgtggcactggggaggtgcttgtcatatggttccacagcgtgtttgtggcacttgtatgcttcatatggtctccatagggaagaaatgagagacagttggcagataggataaaga

SEQ ID NO: 3532 - DNA, 1046 bp, Homo sapiens
ctcataggagaggtacccagtcctgctttttggttcatctggacagaggaaggtttttttctggagggctgagacaatagtgtgctgagcactctgagggtagctgatgccctggtcttgacagtattcctaaaggaagcaggcactgccatgacaagaagactttttgctagctccctgacagagatgtgccagtctactctgtgaagttcttggatgtgacaggcctgtttttctgccctagctcttggcagcaaggaggatgaaatgtctggtgataagagctagcgatggttagcagacttagagggcttgactcgggtgcttaaagtgggtcaagtaagggtttgctctgagaagggagctgagagccatgggctctgattctcatttggtcagtacctcagcgataaggagttagtcacataaatgttctagactacacctttgctgtttaaattgtggtctgagaaccagcagcatcctcatcacctgggagcttgttagaaatgcagaatgtcatgccggccctactgaaatagaatatactgaaatataatctgaatatactaaatatactgaaatagaacctgcaatctgacacattcctcaggtcatttgaagtctgagaaacactgctgtagtctggaccagcggttctcaaacttcagacttcagcgagcgtcagagtcacctggagggctgttaaaaccaaggctgttggccccatccccagggcttctgattctgaaaggcaagggtggaggccagaaatttgcatttctaacaagttctcaagtgatgggactggtttgacaacagctgaccctcttagctttctcatctgcaaaacaggggagtgattcctgcctgcttacggagatgtgggatcatatgggacagtgtgtgagaaatgtgttcagtgcattgcgggggtggggggcgggtatccgtttgtgtattgcttgcttactagtcagtgaatttttaaaaatctattgtcatgccagcacaactgtttaccttcctggctgctggccatcatt

SEQ ID NO: 3533 - DNA, 1693 bp, Homo sapiens
agctagaaggtgtcattgtgatgctataagtggaagtacaaaggctagaagaggcttaagagcattttacccaataaagtgtgggtaaaaggggtgtgggtgaaagtggatatggtgtaagctaaggctctgaggtattgtcaagaaggctaaggctctgaggcattatcaggaggctgatacctcagcatagcatttgggtgggctgctaggtctctagggagagtcaaaggctggggaatgacatgacgcctccccttcaccttccccctgcttaaaaaaaaaaaaaaattgggaatttggatctggatctgctaggacctaccttcaatagaccagggaggtttagacccttcaaaaagataaatagctggctgactaacattgagattagtgtggaaggaatgactgatgaagaggcaggaaggtctgggtaatgtggagattggtgggatcagaagcgactggagggcatgggggtggaggctgagcttcctctgagcattggcaacaggtacagccatagaaagcaaagccagcaggttggaaagcggggacagtgggggaagtgaaatccaagagtgtttaggttaagtccataggcttcacttctccctacctccatcctgccctgcttttcctctcccctcttgattatatttcttttgtagactgatctccattgtttgacatgaggaaactgatatcaggagaccctttctgcatctctgtatctcattgggaaaaaggatcttgcatcattttgattaagatgccattgggatgattattttttatcctcttatcctgggtgttcacgatacttaaaaaacccccacattcttacatttatgtgatgagttttgagctctagctgtgaaaattgagccatagcctaaaagcctgaaacaagagtgtacccacattgacaccagctacccccacccccagcaaaggctggcaggtctgcagcagaagggtgaacaggctggcacaggcagaaaagcgtttatatgtattgatgctcctgccacggacaaaaccctgttaggtgttgggagagtcagaaaggaagtaaatcagaaagaagaaatctggagggagagacaaacatcagggcagcttttatttggatgtagaggtgccttgggataggctgctgtttgggtcctgtccctgcatgtagttggccagtaaggagatctggaaggcctgtgggtggcaaaacaggtctgatacacaagtggctctacttctgttgtagtgtatagtcagtgtctagtcctggaaggccattccagccaagggctgatctgagggttaggtgctggcagaggcacttatttggagatgccgacgttgctgaaagtaaaggagtgttcatactctacaatgggggtacagttggggagccggaaaaggaaatttgaatgtattactgagtggaaaagaagaaacagaaatagatgttataagccagagtccatgggaatggaaaggaagttgttccaagaggttaaaaatgtatgttgggagactggtacggatgcagtacttgagagagatgctagtgggttggactaggatgttagttggttggcgatggtgagaatggggagaagttacatgttgtaacccttaggtgtgctaggaaggaaacaggcttgagaaccatgttcttatgtagctcata

SEQ ID NO: 3534 - DNA, 1058 bp, Homo sapiens
ttctttggtctctcaggtaaatacagattgagtctttttataaaggcatattatttccctcattaaatgtgtgttttggcacatgtgttatttacctgatagacagtaatggctgcagaggagccattggtgtctgttgtgtaaatactctgcacagagaccatcctccaggggctctggcgcaggcctgcttctccaaatcgggctggccccgtggcagtcccatttacccctcccctgtccccactggggacctgggcccttcatattgaggagagaatcattcattttcctccttgccatgggctacttaatacctttaatttgctaggagacggaaaaggatgtctgagaataaatgtgtataaatcttagtctctgatgaaagatagtttgcagaaataggcagaatcataaactttcttttgagttctggccctcatttagatactcaaagtcccagttgatattataagctatagacttatagcctgcaaatttgtgactaaaacataaagacatcaatagaaaagagaaatccctaagacaccggagggtgcaagggcaagtgggatgctgctgcagggagcaggtgtgtttcctgagaaggctgtatggtagcaggagtgccagtgaagtgggcattgagtaggggctcttctgatggaaactcggctggatagagatactgtttgggctgagagatgctttgagcctctctaccagagagaacatgcagcctaccttctgtgggcattacagggagatctgtctcttcaaatactgtctgtgtgatatttttaattttaaaattgtaaccacattgcacatggattttaaaaaacaattttatttatttatttatttatttatttatttatttatttatttattgagatggagtctctgtcacccaggctggagtgtagtgatgtgatctcagttcactgcaaaccctgcctcctaggttcaagcgattctcctgcctcagccccctgagtcactggattacaggggtgtgctaccatgcctggctaatttttgtatttttagtagag

SEQ ID NO: 3535 - DNA, 1924 bp, Homo sapiens
gaggctgaggcaggataattgcttgaacccgggaggtggaggttgcaatgagctgagatcgagccactgcactccagcctgggtgacagagtgagactccatctcaagacaaaacaacaaaaaacaatcccagaacttttttcagtgtggaccttagtcccaacaccatcagtaaagcaaatcgagtgagcagcttcccgatagaaattcaccaaagtgtgaccagcattcctccctgtctgtctggggtcatttattagtgttgataccctgtggccttacatctttgtaaagtgcctctcaaattttttaaaattacttttcaccagcactctgggaagtgggtcaggtggtcagcattcttgtccttgataccatatgaagaaactgaggcctagaaaggttaaatgagttgcctgaggtcctgctgcgaggtactgtcaaagctagggcagatttgccatccagatgaaagtgtgttagtttattgctgtgatttcactttccttgagtgagaggtgcatagtcattgcagaactgcagtctgatgcatgccgtgtccagatctactaggtttgatttgggtcccacattatccatttggttctgttgggttttaattaatgattgctagaaccagaactgttgggaagcagactcccttttggatcattgtttttaggctttcctctttggggacattccttgaggagccttgggttaccagggattgctttgatgtgttcaaaattgtgccttgtgccccacagctacaggtaaaatcaaaaggcggataatttatgggagtgtcagagctggccgctggcacctcaggaggccattagtatgcctgttcagaccctctgtgtccttgcaattgattcctctttgcatgagcctgatttgggaagctgtagatctgtgggtagtgattggatgtgacagtccaaacactggtccctaaattaatccttttaatggtattccggcaccaaggcaattctctctctccctgtctgtctctctgtgtctctcactctttctttcactctttttcgctctttttaactagggaggacagaatggggtgggctaggaggaaggataaagaaaggaagagaagaagctttgtttgctgcttaggccctgctctgttctaattagcatgttctaattccagagcagttggcatcatgactgtgggcatattaattcatttagcaaacatttactcttgcttactttgtgcctggtcctgtgctgggtgctgggaatacagaggaataaaatgtggtccttacccttagggatctagctcagtgtttctcaggctttaaaaactctgagacttagcacagtttagattaaaacacacacacacacacacacacacacaacaaaacaatctcatgctcttctttaatgctatttgaaattttgaaatgcattagtctaacaagcaagtcaaagaattatgtcaaatatgctttttttttttttaacacatgcacacattcacctatactgctgtcttctatccttcttccttaactctttgaaaattactggtagtagaagaaacatacctaatatcttacaacatagtgagataaaagttatgaagtaggaataaactgtgccactggatcatacttaaacaattagctttatgatggagtgtcagagaaagccaccaaaaggggggagatttgagctggattttaaggaaggagtcataatttgtctggcaaaaaatggaagtgcattccaaaatagggagcagcgtttgccaaagcacaaatttgtaaaaggaaacgtcacatttgggtacttgagtaagaattggttataaccctgcctcctgccagtttccactctgtaagatggaaagatttgctcctgtggaattttgtttgagaagaga

SEQ ID NO: 3536 - DNA, 1115 bp, Homo sapiens
gcagagctttgcaagacaggatgggtgagtttattaagggggttgacttactgggattactagagaagaaaaaggtttgactagagaggctagaaatggagcatggagattgtgggtagaacattcccttgaccctctcgccaacacatgcccacacaccaggttagcagtttacctctttgtaaatctgaagcggtggtagtagtgatggtggaaggagtgaataagggcctaacctggctagctttctgtttgcctgtcttgcaaatggtccagcaacaggtgttttcttaaaaaaagcatgaacttggattgaggcttgactgcgagttcttgcaaaatataactgctccttgttgacttggaagatgctggatgtggggcccctcaatgggggtttggattttgtccttagagctggattttgcaacaaatagtgcccatcgttgtgtctgcgagaggtctctggccacttcaatggcatttactcttgtcagacatttaatcagtctcccagcggaagggcagcaaaacatgaatcctattggctaaaagagtgtacgctattcaaactatagtaggttgtgagtggctaaatgagttttgattgtagagtttcttccagaaattggcttcatcaaattctgctttattctgactttatcatatacagcatgccttgttttagtgggttcttgcttggagcttagtttattatacctgaatctcctaccatttaaaagccaatttataaacagggacttggagtgtgactccactaatgtgtgtctgtgatcctggttagaaacccacttggctgccttttcctcaggaggtgggggttgggggaagggagctgccgggaagtgattgataaggtttcctttatagattctgtggtgcttcactggagctcagagcactttggcaacttaagcactccaaattaaaagctcattaacaattcctgcccaaagatcctgtaaataatcagctagctaggtcatagagcttggctaagagcttttcttccaacttgaaatttccaaataaaagtgcttttattccctttcattttaaaaagtgttttctttgtggtggggtaaattggtgag

SEQ ID NO: 3537 - DNA, 1032 bp, Homo sapiens
tcagacttcccaccgagagcagaatctcagtgccttctctttcttttgccctttttttgttttgttttgttttgagatggagtttcactctgtcacccaggctggagtacagtggtacgatctcggctcactgcagcttccacctcctgggttcaagggattctcctgcctcagcctcccgagtagctgggattacaggtgcgcaccaccacgcctggctaatttttgtattttttagtagagacagggtttcactatgttggccaggctggtcttgaactcctgacctcaagtgatccacctgccttggcctccgaaagtgctgggattacaggtgtgagccaccacgcccggcctgagaagtcttctttatctggctattgctactcattcttctaggctcagctgagaaatcaactttcaggaagctgcccctggcctgctctcctctgccttcactcttcactcaggagtagatgtcctatgtctctgaacccgtagcaccgtatagaattcttgctatagaattctagtactatccactaaatggtctcctcactagtgtgtgaactccaatgaacatatctgacacatctcacttctgtttacctagagcctgaaaccattccatgtacacaatgcatgctccatacatcttgttgaaaagacctcattggattctgcattccaacaggcgaggcttgggtcatggcagcctaggaccacgcttagaaaccaccagcctggtggtggatgaccccagaggaggctctgcagtggccactgtggtcctcattcacacagctacagaactttcctagcttgaatcttggacaggctggagagccagaactgtggcagctgtctccccgtataccccatggccaactttttttttttttttttttttttgagacagagttttgctcttgttgcccaggctggagtgcaatggcacgatcttggctcactgcaacctctgcctcatggattcaagcaattctcctgcctcagcctcccaagtagctagga

SEQ ID NO: 3538 - DNA, 1071 bp, Homo sapiens
gtcttgaactcctgggctcaagcgatcctcctacctctgcctccttaagtgcagggattacaggtgtgagtcactgtgcaccgggcactgctactctgaacacatgtggctacatggaagacaggacttggccatgtgctctccccagctcagtagtcaagtgcctctctccatttactggtaagagagagagggtttagaggaactcttgttccggcgctcagctcatttgcatcccagaatgcattgtagatacgagaattattaccagggttatctgtttgaataataatatttaaactttttttctttgtcaggagattttacccagtgagaacatgtttaggacacttttctacagtggaagaaaagcttctgtctgcaggtccaaaggcaccgtaagtagagggagaccagtcaatagctgggaagccaggcaaaaggctaacaggcagatctctggtttctcttcataacgaataaatctttcgccttttactaaagatttccgtggagaaaaacaactatgagtttatggttaaattttttgaagtcttgcctaggcaaggctgaatgttctgttactaaagagagacgtgtgggtggggtgtttcatgctttgggaggttggggtagctccacaaatgtcacccaggttgtagcggagtggtgtggtcgcggctcactacaacctccatctcccatgctcaagcaatcctcccacctcagcctcataagcctgtctaattttgtgtactttttgtagtgcccggcctactgtcatgtttttttagcttcttgtaaacatttaggaagctaaatgtttataagatttttttttttaaaagaaaacctagtttttgacagtctgtatctaataatttggctgaagtcttgtgagtctttctagtgtgctagttccaatttatagtgatgactttgtgtgcatgattatcttatactttggactggtctcatatttgaaaaattaagtgtaggaaaaacttaagagttaggatgatgatactttcttccagagatagttttcttttgtttttatcaggtacctgg

SEQ ID NO: 3539 - DNA, 1089 bp, Homo sapiens
aaaataaaataaaaaaataaggccaggcgtggtggctcacgcctgtaatcccagcactttgggaggccgatgcgggtggatcacaaggtcaggagttcaagaccagcctggccaacatggtgaaaccccatctctactaaaaatacaaaaattagccgggcgtggtagcgcatgcctgtaatcccagctacttgggaggctgaggcaggagaatctcttgaacccgggaggcggaggttgcagtgagccgagactgcgtcactgcactccagcctggcaaaagagcgagactccgtctcaaaaataaataaataaataaataaataaataaaatcagcaaaaataaaataggaaatccatttagctttaaagaaaacataacaacaaaacataaatatattttgttaacttttctctcctttgtaggtacaaaaagaggaaagctgaggctcaaaataagtggggaaagcagaactgccttagaccaacaatgtcagggctggtgatgccctcttgtggcatcctggagaattactgccatctgacttcatttcctccgacttggagggactattccctcacaatacctcagtcactgattcatgcatgccaggtattgtcctaacagtatccctgtcctcgtggagtttacagtcagatggaggacatactattaataaacataataaggtaatgctatggaaaaaaatagcagagtaaggtgggaggggaggtggtgagtatagagaatggtagtgtgcattgcaattttaaaaagagtaggccttcttgtagagttgaagggagatgggggagtgagccctgtggatatatgggatgaagttctaggcagagtgaacagtcagtacaatagcgttgagacaagagcttgtttgccaatttctttttttctttttctttttttgagacggcgtcttgctctgtcgcccaggctggatggagtgcagtggcgcgatctcggctcactgcaagctccgcctcccgggttcacgccattctcctacctcagcctcctgagtagctgggactacaggtgcccgccaccacgcccggctaagtttttgtatt

SEQ ID NO: 3540 - DNA, 1098 bp, Homo sapiens
cgcccgcctcggcctcccaaagtgctgggattacaggcgtgagccaccgcgccaggcctatgaatacaattattttaaagcttttaattttttttttttttactttaagtgccaattataaaataaagtcactgtctagttggaccaggcatctacagttctgtaaatctggcttccgctctgccccctggtggtggcctaacgcctagaaaaagtaacgaactatttaaggtatttctggaaaccgagggggtggtgactcagcgtcatttacatacccacaatgcactgcacacagaccacgtcctactttaaaaggagattctcccttttttccccctcttttcctttaccataataacgaagctcctttcacacaatcgtctgagacaaaaacagaagtcactcttttgggttaatagtaaccattgctaatctagtagtgaccgtcccccgaggactgtgtgcaaccattccaacacatgctctggtttctcttcaaatcgtataaatctttcgccttttactaaagatttccgtggagagaaaccgttttgagtttcaagcaaattttttgaagccctatgttggtggggttcatcaacggtgtttaaaaatcagatagaaagttgtgtgtttgttgcgaggtgtgagacaacattttgtttgaacatttattttgggctgttgtaatggtgtgagtgtgcgttttttatttttttggaagtggggttttagactagactgtagtgagcaatctttgcctgccggcttcaagggattttcctgcttcagtctctcaagtagctggggctacaggtggcaacaccattccctgttagtttttgtattttaatagagatggggatttcccacattggccaggctgatctgcccgccttggcctcccaaagtgctgggattacaagcatgagccaccgtgcgaaaatttggttttgttttgtggttttgttttgttttgtttttaattaatttattctagaaacggtctcactgtgtcactcagtctggagtgcagtggcacgattatagctcactgcggccttaaactcctggcctcaagtgatccacccacct

SEQ ID NO: 3541 - DNA, 1045 bp, Homo sapiens
gtccctctctctaagcccggaggcttactgcgggtaaggacggcgggacaggaccttaacccctgggacgaacaccagctccgcaaaggactccgcacccggcgccgcccacggggtgcgggtcccaggaggaccagcagagaggagcataggagagcaaaggagatcagtgacccatggcttccccggtggcgcggaacagcccggagccgcctgtgatttgcatacccatggtgcaccacgaaaagataccctcaagatgcttgcactccctctgtgcgcgcatttctgcactgttttagagcatgatgcctcttacacgcatctgtgtgcataaactacatatagggagtgcgtaccacgcaggcatccaacaaccataagtgtgttaagtgttagttctccctgcgaggttcgaagcggaagtcacgaatatactcgggtttctcttcaaagcgcataaatctttcgccttttactaaagatttccgtggagagaaagttgtgagtttttattcaattttttgaggcctcttatttcctgaggctacatttttaagtattaaaagttaggcaactacaaccaaggaacttggtcatttgttatttgtaccaaatgttcacaaacttattcgggcgtggtggtgcctgtttgcaatcccacctattggagaagctggggcgggagagtctcttgactctagaagacggaggttgtagtgatccgagatcgcgccactgccctctagtcagagtggcagagactcctggggcgggagagtctcttgactctagaagacggaggttgtagtgatccgagatcgcgccactgccctctagtcagagtgacagagattcagtgtaaaacaaaaaaaaatcagaagtttgcgtgacaccttgttttgagctacatttggggtttattggcttctgcagtgtgcagtaagactggcttctattgtttatttcttgcgtttttgttgcatttcgttgcagatttaagagataaacagtggaaggcgctttcaagtcgtccggtcattaa

SEQ ID NO: 3542 - DNA, 1088 bp, Homo sapiens
ttaaactaatcaagtttcacctcctgatgctggggaggagcccagctgtccctaatcactgggcctttccgatgacggccacggaaatcagggtctgttagaaaggaggaaggtgctgacagcctcaccttcaaatctgcctccacagcaccaccctgtggccaatctccatctggccaagtcagtccccttcttagtgcccttccaccgatttccaccagattctgtaaaatcaaatataaactccatagcacacactctaggccctccataattggacttgattgcttctccagcattgccgctggctcctccctggctcactcttagcagtaccgaaacacggagtctttgacagttccctgcgcacacctggtccaggacacgtttcctgacttcttctcgtgggcacctcatcattcacaactcacaatagtgtattcacaaaaatacattgttaggtgatgaaaacgtcagatcccctctgcccaaaatctaccatgactcccatttcacctagagaaagcttaagtccctacaatagtatataggcctttacacgtgaaacttctggaccaaagattatggagcatatatattgcaatgttgctttcccccgaagagtgtaccatattacactctcatggtgggttagagtgtactcttgtaaaccagcaacgagtgccatcaattttaaaatttttgctaaattgttagatagtaacttattgatgtttgtatttgcatttacattattatttataaggtagagtctttttccatattggttaaccagttatattttcccgttggtaaagacataaaagtttggccgagcacagtgactcatgcctgtaatcccagcactttcagaggctgaggtgggaggatcacttgagcccaggagttcgagaccagcctgggcaacatagggagaccctgtctctacaaaaaatacaaacattaactgggcatggtggcacacacctgtagttccagctacttgagaggattgcttgagccgggaggtcaaggctgcggtgagctgtgattgcaccactgcactccagcctgggtgacaaagcgag

SEQ ID NO: 3543 - DNA, 1022 bp, Homo sapiens
ctggcatcactgtcaaatttttttactttgacttaacagtttcatttctagaaattaatcttatagataagcttatacatgtatgcacccttaatctcaaaaccttgaaaacatatcaatagatctaatggcccaggttggcaccaatactgtacagtgattcttgaagcctaggcacagtggttcatgccaataatcccaacactttgggaggctgaaatgtgaggatcgcttgagcctagacaacatagcaggaacccatctctacaaaaaaattaaaaattagccaggcacagtggcacacacgtgttgtcccagctactcaagaggctgaggcaggaggattgcttgagcctgagaggtcaaggctgcagtgagctgagatcgcaccactgcactctagcctgggtgacagagggagaccctgtcttaaaaataataataaaaattaaaatgactgattgcttttggtattattcctaaacctaaaataaggtggggaggggagttgctgaaggaattaaccccaccaactctgtagacgccacatcatttccttcttcagtttcttcccccttcccttttttaaagtcatatgccttccttttgggctttagaatcaaacagacctcagttcacatctcaactcaacttagtggctgtgcaccaagtgaaatttttaatcattaagccctcagattttccttttttttttttttttttttaattttaattttttgagacagagtcttgctctgtcgcctaggctggagtacagtagtgctatctcagctcactgcagcctcctcctcctggatccaggtggttcttgtgcctcagcctcccgggcagctgagactacaggggcacaccaccacccttggctaatttttgtgtttttagtagagacagggttttgcaatgtcacccaggctggtcttgaactcctggcctcaagcaagccacccacctcactttcccaaagtgctgagattacaggtatgagccactgcgcccagccc

SEQ ID NO: 3544 - DNA, 1031 bp, Homo sapiens
tcttgcctagcttcagagcatacattctttggctcttacgactgagtaggaagcatacccctactaccaccttggaaaaagaaataagacttttccattataaactagtagccaactgaaaggcagctctgtcccaggagcctctgtatctaaagctttctatacttccctattaccccttttggaggaatttcccccaaaaagcaggaaccaccctaactgaccctaactgcttactggactgctttgcaagttaggcaagttggaaagttatggaagctctcttaaaagcccacccactgagtgtatcccaagtctgccaaagggcaaactagtgctgtctctgcccatctctagcctacaccacagaggtgctgtggttttggccttttgctactttccaaaaggctttaacctcctaggagaacagagataaagaagactctgaaatgccttaaagtgctagtatttctttttgcattttactaagttttggcatttgggaagaatcttttttaatggtctgtgtatcagtgtttttagtccttggaatgtcctctttcccaccccctcatgcctcttgggttgggaatttttccttagttttgttttgttaaaagggtgcttacaccctctctatcctcctccttctcccttccagctgcccattttttctcttcccatttctgactcgggtactgaatatccccttgttaggaaagagcttcttccactgagccatatcagctcagaataaggcagttctaggtctcttctagtcttttcttaatttctttgtattgcattatgattaaattatggattctgaagtcaggcagacctagatttaaatctgttactagcagttatatggttttgagtgaatggtttaacttctctaaatctgttacctcatctgcaaaatgtggttgctcttttttagtgcatcagagataaaaatagtactcccagaatcatctaggaggggtttgcttctagttaaatacatttagctcctatccgagacctac

SEQ ID NO: 3545 - DNA, 1033 bp, Homo sapiens
gctgaggcgggtagatcacctgagtcaggagttcgagaccagcctgaccaacatggagaaaccccatacaaaattactcgggcgtggtggcgcatgcctgtaatcccagctacttggttggctgaggcaggagaatcacttgaaccccggaaggtggaggttgcagtgagcccagttcgcgccattgcactccagcctgagcaacaagagcaaaactccatcttggaaaaaaaaaaaaagttggtaccaatgttacaaatacagaagaaaatttgtggatgagtgcttcattccttaaagctcaccaaattgaaaaaacaaaaccacagaaggaagctttatctataataaaatgaaataacctactcatacctatgcacagactacagaatatctgccagatacagtgaaatttagattaaatccaaagagaacaccaagattcaacataaagagaagaaggaatgggaacatgggtgaaccaaagaaaagacatcaaacatccttttttcaaaataccaaggcatgcagaactgaaagaaaaacatcaggccacatagaagggagaaaatcaggctggcttcacacatttctttttttttttttaagatggagtctcgctctgttgcccaggctggagtgcagtgacaatttcagctcactgcaacctccacctcccaggttcaagcaattctcctgcctcagcctcccaagtagctgggattataggcgtgcgccaccacacccagctaatttttgtatttttagtagagacagggtttcaccatgttggatcaggctggtcttgaactcttgacctcaagtgatccccctgccttggcctcccaaagtgctgggattacaggtgtaagccgccacgcccagcctggcttcagacttttctatgataacatttcaggccagaagacagtgaaacaacatttagagaatttagaagggaaacatttgtgacctaagaatcttataacctcccatatttcatccctacaaggaaagaaaacacaaaagaatc

SEQ ID NO: 3546 - DNA, 1031 bp, Homo sapiens
atatgtgtctgttgttttattttgttttcttggcaagagaggagggcccatgcttcaaataggtttgagttggtctcagaggtgttgtatgaccttgtggccctgagaaatactgatcatggtccctcttgctgaagtgtctctatggaaagatcccattagatcccagcttgagggatctggagggtggtttgcagttggttgagatgggtggacagagttttatattttgccttttacaggttggagttgacagcctcattgggccagagacacagattggagagaagtcatccattaagcgctcagtcattggctcatcctgtctcataaaagatagagtgactattaccaattgccttctcatgaactcagtcactgtggaggaagggtatgtttccccctgtacccacttgaggcaaagataatggaaaaatgccttcaaaattctgaaggaaggttaattttaacctaaaattgtatacccaggcaaagtgctaatcaagagggcaatagaataaaaacattttcagatatcaaaagtctcaaaaactttactaggaaatttattcctctaaaatggaaaataaaccaaacagagaaagatcagaaacaagagattcaactcagaaaaagggcaaaaagaatccatgggataacagtgaacagagataagaatgacagctctaaatggggcataaagggattagttaatccaaactggaacaaaaccaaagaatccaggaaagatttattcagcaagatgcaactgataaaataccagatacatacaaacatttgaaagtcgatttaggcaactggctaaaagtttgaagttgaatcggggataacatagaaaaaacaacactatttaacaaaaacaagactgttattaactctgggaaaatgaagaagttgtacaagttgaatatccctaatccaaaaacccaaaatcaaatgctccaaaatccgaaacttttgagcaccaacttgacactcaaaggaaattctcactggaacatttgagagtt

SEQ ID NO: 3547 - DNA, 1031 bp, Homo sapiens
gccttgggtggagtgtggaagaagagaacctagggctgggggcttggaattagccttcacattccagtgtagccgtgctgacaaggcctccgtcagctagtgtggctgccacgcacagtgctctgaccagcattctgtctatgctggagaatcatagacaggcgcactacctgtgccttcctaatagactggtagccaaagccccccatacctctaacctttccaggtttctcacactggagagggaatagtgtgaacttccccttcatgttttcttttggctgggggatagatgccttctcagggtctgtccttgatttcgaatttgtctaaaatggatctcatcctcacctcatgcgtggtcacagtggtccaggaggtgaccaggaacccaggatgcttatgatcaggatgcggggtgttccttgacctgatcaggcctcctttcccaagaggtggtatgtgggtatctcaaagactggtctcagtgcctcccagccaagggacatggcattactttcaaggaggagcattcaaagctaagagactgacaataaggccatctagaagctgctgcataaataatcttggtcctagggggaatgcagcagcctcctgctccccctcactcagacaggaagctatggctgagaactccctgtatctctgattgagcactgggttctacctaaggtgttttttttttttttttttttttttttttttattgatcattcttgggtgtttctcgcagagggggatttggcagggtcataggacaatagtggagggaatgtcagcagataaacaagtgaacaaaggtctctggttttcctaggcagaggaccctgtggccttccgcagcgtttgtgtccctgggtacttaagatcagggagtggtgatgactcttaacgagcatgctgccttcaagcatctgtttaacaaagcacatcttgcaccgcccttaatccatttaaccctgagtggacacagcacatgtttcagagagcacagggttgggggtaaggtc

SEQ ID NO: 3548 - DNA, 1050 bp, Homo sapiens
tgtttatgctttgttctgtattagagatagcagccctagacattaagttcttaaaagcactattcacaatagcaaagacttggaaccaacccaaatgtccaacaatgatagactggattaagaaaatgtggcacatatacaccatggaatactatgcagccataaaaaatgatgagttcatgtcctttgtagggacatggatgaaattggaaatcatcattctcagtaaactatcgcaagaacaaaaaaccaaacaccgcatgttctcactcataggtgggaattgaacaatgagaacacatggacacaggaaggggaacatcacactctggggactgttgtgggttgggggaggggggagggatagcattgggagatatacctaatgctagatgacgagttagtgggtgcagcgcaccagcatggcacatgtatacatatgtaactaacctgcacattgtgcacatgtaccctaaaacttaaagtataataaaaaaacaaaacaaaacaaaacaaacaaacaaaaaagcaagactcatacgtttctctggttacaactaaagggtgggtggaggttgttttctgttttctttttaacctctgtgggaactagtttatggctccatacaatggagtgttagtaactgccttaattgtaattacatttgacaatgagagcaaggcttgggcatgatgggagcaaagaagatggacctagtcagaggtgaggtgataatgaagagcaggtggatgtgtctttttccttcatagatgtcaagctcagggccttgactaagcactggggtcattgagagcagatcttctatcagtttcctaagactaggctgcatttttagttgttggcagatttttttccttgttcttctgatttataatccacaccccagtgattcaggatctttggtgtgtagttataaaagggttgcaggctggataaatatgcataaaaatattctctcattcctatgaccctctggggtgttgtgctcctcctgcctcaagtgagatgctggttaaaagctaattaga

SEQ ID NO: 3549 - DNA, 1021 bp, Homo sapiens
ctgcgacctctgcctcctgggttcaagtgattctcctgcctcagcctcctgagtagctgggattacaggtatgcgccaccacgcccagctaatttttgtatttttagtagagacggagtttcaccatgttggccaggctggtctctagctcctgacctcaagtgatccgcccacctcggccccccaaagtgctaggattacaggcgtgagccaccgtgcggcccattctaagtggcctttttttttggagagggagtcttgctctgttgcccaggctggaatgcaatggtgcaatcttggctcactgtaacctccgcctcccaggttcaagcgattctcctgcctcagcctcccaagcagctgggactacaggcatgtgccaccacacccagctaatttttgtatttttagtagatacggggtttcaccatattggctgggctggtattgaactcctgacccgtagtccacccgcctcagcccccaaagtgctggggattacaggagtgagccaccgtgcccagccctaagtggccatttttaagtgaacagttgagtagtgttaaatgtgttcacattgtggtgaaacagatctcgagaactttcatcttgcaaatctgaaattctatacctatcaaacaacagctcccctccccatttttttctccccgcaaggccttgctacccacgattctactttaaatatctaagtgaaatcatacaatattggtctttttgtgactggctaattttacttagcataatgtcctcaaggtttgtccatgccgtagcatataacggatttcgttttttttaaggctgaataatactccgttgtatgtatgtagccacattttgtcatccatttatcttctgacagacatttgagttgctgccacctcttggctattgtgaatagtgctgcagtgaacgtgggtgtacagacatctcttcaagaccttgctttcagttcttttggatatatatttagaagtgggattactggatcatatggtagaga

SEQ ID NO: 3550 - DNA, 1079 bp, Homo sapiens
tatagggagagcctcagccttgacagctggatttttcttttcatctagtctcttaccatccagggggttagcccaggcttgtttacaaggtagcagcagcaggttctaagcatgacagcagaggctacaaagtctcttgaagtctaaactcaaaacacacactgtcacttcagctgctgcgctctgttagttcaaagctagttatggagcaagcccagatataaaggatagggaactaaccttacctttggataggaggagctccaacaagtttgtgaccctttttaatctactcgacatactattttgacttgctaatgagtaaatttgcctgttcctttctcataatatccttgcctggttttggcatcaggatcatgctggccttataaaatgagttggaattcctaactctagacatagcacctaccatagggtaggtgtacaaagatatttattggtagaatgaatgaatcaatgaatgaatggataagcaaaatgcctgtagatgagacagaagaatcagtcagaaaagtaaaaatcaactagggaaaaaaacgtgaatacttgaatatgacggactttttttttaatagaagttcagttttgtctgctttcttaagtttgtgtagcctttcttcttaggaagacattctacaattacctgctctgctcccaaagtgaaattcctattttgctaaagcagaacagaaagaaacctttccaagtttctataatttgtatcacattctgaagtcccagttactgtaatagctgcaaagaagcaatacaaggtggagggtctgagagggagagaaaaatgactaaagtgcaacatagctgaaaaattggctggctggaaattattgctcccaggacatcagtgattcaaggtttctgtgagccttaggacttgagtaggggaagcattccaaattatatccaaaaataacatctccgtgtttcttttgttaaatggctggctcataatgagacccttacagactttgttacattctcaagtttccatgtaatgtataagttgatatatgtctaagctgctatgtggcatttgaaat

SEQ ID NO: 3551 - DNA, 1051 bp, Homo sapiens
aattttttggcatttaactccatatctccaaataacgtgcttttattttctgtgtcttaatttttttagctttaagaattatctgttcacttcttactatagaatgtaaagatttggttctattttaccacatgctctgcccccactacatgtatgcaaccttgtatttggcccaatttcctaatatagttattcatattgtattattaattaactgaatattttatgtttatattatcatgactgtataaatagtattcacagttgagccttgtagtatatgattacttttctctttcctccttttgttttcctaaagattgtcttgttttttcatttgcttgttttttatgtatttgtcactaattcaacccaagctccaattgtgtgaatttcctctccttacattgcaacacactagatgtcctctcaatttcaaattcttcaaggtacctctcctaaagcttttctaacctgagttagttgccctgctgtagagctgtcattttaggttcacccttcactgtcatatcttgaacctcacgttttcttctttcttactttatacccacattttctgtaggacacatcctctggaagcctcctgaggtacagattgtgagaagtaaatttttgagcttttgtatccctgaaagtgtctttattctgcccacatatttgtttcatattttggctggatataaacttctcttggaaatcatatcccctcaaaattttgaaggttttttgttttgttttgttttgttttgttttactgtcttctagcttttcttttaagaagtccaacatcattctgattcttgattctttgcatgaaacacttttttcctctttttcttgggatgggagggggagcttataggatctttttgtttccgaagttcttcaagtgagaacacttaaaatctactctcttaggaattttcaagaatacaatacattgttactaactagtcaccaggttgtattaggtctctttatgagcttattcctcctaagtgaaattttgtattctttgacaaaggtctca

SEQ ID NO: 3552 - DNA, 1045 bp, Homo sapiens
tattcctttttaaatgtctatctttatatatattatataaagagcatatcatattatagtgatctatatatttttttaaaaattttaaggtaagtggcaataagttcaacttttttgatgtttggaaaacactgttttagggtgtctttgagcagggaaaagacatatgcagtagaaattagagtatggattagaataagggaaaactggagcaagagagacaccagccaagagactggaagaagattttgagacctgaactaaggcagtgcaataggggaagagtaggggacagggcaggagaggaaggacttccatcctggactatgggcggatttctggcatcagattctggatggtagcaacagcatgattaaactaaggaatatagtaaggatatttagctgtgagcccaaggattatcacatttcttacttactgactgagttggtcatttcccttcctagagctactgccccaacctcagtgaaaacaatgtggcagttggcccttggccttgcactttgaggactatagactggaatcttttccaagcattttaaaccaaaactgaggtctccattgcagttagcctttggtgtttattcaagcacacaaactatgccaggtgcagtggctcatgcatgtaatcccagcattttgggaggctgaggcaggaggattgcttgagtccaggagtttgagaccagcctgggcaatatagggagaccccttgtctaaaaaaaaagaaaagaaaagaaaaagcacacaaactactcttggggatttgactgggattggaccacataggaaaatgtaaaatgtgaccttcatagtcacaccaagtagctgaattcatgagttccatatgggcaggggtggcatgcaggctggtgatttggatcatagccattatttgtggaagcactgggtgagtagagaagcatggtagttaccttgccctgacagtttttttccaagggagtaaatgtgtttttctttctccttgtcataagaaatcggttgccagattgtgttatttata

SEQ ID NO: 3553 - DNA, 1049 bp, Homo sapiens
gttctgtaccttgttctttcaccacacacaagatccctctccaatccatccactcccatggcttcaactactgtctgtagactcgtgacccctaaaatcctgacctctagccccagcctctcctaagcctggggccatatatgtatctgtaccctcgacgtttgccccaagatggcatctcaggctcagtgtgttctttatcttctccgaagactactcccctctagggctcctgcctcagaagggcaccatgtcccactcctccccatcccaaagcccacagggccatccttcaccccttcttctccctcgccaccatattcttaagtcttcctctgtaatctgtttgcttttcctgtctcactactgtctccctgcctggttgaggacacctttcctccttagctaatcacttactaaaaagctggtgtccctgtctccgttcttacccgtttggtctccatgcagccacagtaattcatttcactctccttatttaaactcattgatggctcggccctgggcttaggatagaatgcagaatctgtaaaggccttacgtgaaccctgtgtctccagccacttggttcacattcaggctccagccacacagtttccttaggccttttgctctttccagctttctccaagatgttctctctcctaacttcccttatgtcccagccatcatttgggtctcagctgagacaccattttccacaggatgcctcctctggcctccaaggctggttaggtgttgtcttgatgcttttacagctcttgtactgacaccctcattccctgctgcctccatggggactgccttgcctggctgtctctgcttccctgtgagcatcttgtggaaagacagggactatctccacagtgaaaaggttacctccctgcctctctccaacccctaggtgaagctcctggaagtgatggaaggaatggacaaggagacgtttgagttcaagtttgggaaggaactaacattcaccactgtactgagtgaccaacaggtggtggagctgatccctgggggtgcag

SEQ ID NO: 3554 - DNA, 1038 bp, Homo sapiens
tcaggaatgtctttccctgtttgtctacctgtttgaaatcttacttgtccttcaaagcacagctcaaatattattttctctctgtatatatttctatcatgttacttctttttagctgctttataattacatttatgtatcatttgtgagctctttgagggcaatgaccatttcctattcatctttgtactttctttgcccagcatactccctggcatttaataggttttcaggaaatgtaggattaattaaatgaatgagacttttcccattaggcagttagttgctacctccattggtttcccatagtataatatatgtttgcaaagagaaactacattttattatcctacttgtgtgtccctttctacaccatagaccacgctgaggctgcaaggtagctctttcaagatatcacctgtgatttattcaactttttatatccttaaagataaagacacagttcctggtatacagtaggtgtcaggttgaatttgaggaactggactgaatacaaactctctttgtcaggtataaattttcctgacttgaaattttaactagaccaaaatatcttcttcttacttggtagagcatgtgcctacagcctgtgctcgagttgacgccctgcgttcccatggttatccaaaagaggccctcagactcacagtggccattattaatactctgaggttgcagcagcagcggcaactggaaatctacaagcatcagaagaaaggtatagtaattaggagccatctaacccccttaggcccaaagctgatgaggatcctcaggggatacaaggcccagaagaactagggaattccgggtcattctccttgctgtgtggaatgcctcactttatctttatgaatgtcagttttctcatctgttcatttgggaataatacctgtttgcctccctcataaggcagttagaaggctcattaagatctggtatgagaagaccatttttaaactctaaagctgtggacaggcatggtgattcacacctataatcccagcactttgggag

SEQ ID NO: 3555 - DNA, 1261 bp, Homo sapiens
gccccctagacttggacaagtgttcctgctttgttctaccacttgctgagttttgctataacatttacttcctcaattataaatgtttacttgtctgtctctcccactagacaacattccttctcatcttagtatcctgtatacccagcttaaagggtactgtactgtaagggcttaaatgtttgatgaatgagtaaatgaatcaatcagtcagtcaccagatcgatatcttgggattgctgttggaatattacattcatcctgagcttaaaagtcaatgtttttctccatcagggtacagaaattaagataaagagctctctgtggccaccataaaaaatatgagtcctaacttgctgatcagagatttatccctttcagcattcattctctcaaatgattattaaattttagcactatttccgtagagacttgcttggttatttttctttttcttgtcgattttgcatgagaaaatgctttacctggcataatattttggcacagggaataggattctactgtgtggtccaagacttttgagcgaaagaaacttacttggctcttgatctacatgaattctttagatttttatctttcagctgccttgaaggtaagagtattttcattcaccctccaggactctgcatattcatttctgcaaaaacatcccagagctctcttcttcaccagcattcttagtcttgaaagcctcttcatgaactatagatgaactcttgaatctagacctgaattagatgggagaaggcttcctctagactttttgtttatcctacagactcccccagtgagtttgatttttataactcacagaagaaggcttttctttttcttgatgtctgtatactttctgagctatagtctgctttaattctgagaacagaccagggtaaattgagcttcagctcagaatatgactgttttataaacaaatttaaacattgtttaaatacaagggcaggtgtggtggctcacatctataatcccagcactttgggaggccaaggtgggaggattgtttgagcccagaagttcaagaccagcctgggcaacatagtgatatcccatctctgccaaaaaaaattaaaaattagccaggtgtggtggtgtgcatctgtggtcccagcttgctgggaggctgaggcgggaggatcgcttgagcttgggagattgagagtgcagtgagctgtcttcatgccactgcactctagcctgtgtaacacagcgagaccttgcctaa

SEQ ID NO: 3556 - DNA, 1086 bp, Homo sapiens
tctcaaaaaaaaaaaagatgaaaagtgataggatccagagcagaggtggaagaattacccttaactaggagcgaaacatctattttgacaagaagaaaagtgaaaggagggctggggatgaagaatagtgtataggtttagaagctttgggggaggttggaagttcgagagtagtggagaatgaaatagcccctgtgggctgggcatggcgactcacacttacaatcccagcactttgagaggccaaggcaggaggatcacttgagcccaggagttcgacaccagcctgggcaacatagggagacccccatgtctacaaaaaaaaaaagaaagaaaaactagccaggcatggtagcatgtacctgtggtcccagctactcaggaaggatgctgaggcaggaggactgcttgagcccaggaggtcaaggctgcactgagccatggtcacaccattgcactctccagcctgggcaacagagcaataccttgaaagaagaagtagcccctgtggagtaagatagagaactgaatatggaaaccattggaatgatatgagaaattgagagtgtgtttgaggttgatagctataattaatgtattagtgtcaatttgcagtgttgtgtggtttttgttgttgttgttgttttttcgccctgtcacccaggctggagtgtggtggcggctcactgcgacctccccctccggggttcaagtgattctcctgcctcagcctctcgagtagctgagactacaagcatgtgccaccacgcccagttaatttttgtagttttagtagagatggggtttcaccatgttggccaggctagtctagaatgcctgacctcaagtgatccacccacctcggcctcccatagtgctgggattacaggtgtgagcagttgcgcctggcttgtatgggttttgatagcaatgttcagcaactgtggttgaatttagaaagaacaggcaattgggttcatctagacttagggttttgccattgggtaaaatgaaaggatggttgtgcaaagtagaactgaagtgagtaaaagagagtggatgtgataaagataattttgtcggtag

SEQ ID NO: 3557 - DNA, 1028 bp, Homo sapiens
agaagtttaactatgatgtatcttgacgtggatttctttgggtataatcctctttggggtttattcagcttcttgaatctgtagctttatgtcttttgccaaatttggggagttttcagacattatttcaagtattttttcagctctgccctcttttttctgcttctgggattccagtgagattagatcttttgttgtagtctgacaggtccctgagactctggtgtggttttctgttttgttttgttttagtctattctctgtttttcagattaggtaatttctgttattctgtcttcaagtttaccgatttctctgtttcgtccatctgctgctgagtccatacatttttttatttcagttattgtattcttctgttttaaaatttccactttgttcttctttgtatcttctgtttctctgctgagagattctattttttcatttctttcacatacagttgtcattgctcattgaaaatgtttttataatggatactttaaaatctttgtgacaaaattctatatccctgtcactttggtgttgatatctacttattgtctttttttattcaagttgagattttctttgttcttggtgtatcgagtgattttaaacctggacatttggggcattatattataagactctggattttatttaaacttccgttttagctggtttcctctgatactcttgtggcagaggtaggaagggagcagcctcattattgctaggtggaggtagaagtcctggttctccactcaggcccctccatgcttagagaattaggaatccttcattactgttccttgcatggcctctactgacaccagaggtggaagggtggtggcctcgttaccactgggtagtgaaagtcctgattttccactgggcttcatctgacaccactgcagcagggagaggaggacatagggggcaccttgttatagcctgacagatatagaaggctccccactcagccttggtgggggtttggtttcagtgttctctgtgctgtttgtctg

SEQ ID NO: 3558 - DNA, 1050 bp, Homo sapiens
tatctttttagcccatcaaactcagcatgtccaagactgaactcttttcccatcaaagtcctcctcctccagagtcccctgtcttggaaatgacatcacattcaactaattgtacagccagaaaactgagaattatctttgacttctccattttctttgtttcttttttttttttaaataatttcaacttttattttagattcaggggtacatatgtagacttgttacatgggtatattgtgtggtgctgatgtttggggtatgattgatcctgtcacccatatagtgaggatagtactcaatagttagtttttcagtctttgccccctccctcctttctctctctggtaatccccagtgtctaatattgccatctttgtgtccatgtgtatccagtgtttagttcccacttgtaagtgagaacatgtggtgtttggttttctgtttctgcattaattcacttaggatagtggtctccaggtgcatccatgatttcattctttttttatggctgtgtagtattccatggtgtatatataccatgttttctttttttctgagttttaattttttttccttcttttaacaaatttttatttccataggtttttggggaacagatggtatttgattacatgggtaagttccttagtggtgatttgtgagatgttggtgtacccatcacctgagcagtatacactgaacccaatttgtagtcttgtattcctcacccacttcccactctttccccccaagtccccaaagttcatcgaatccttcttatccctttgcatcctcatagtttagctcccgcttatgagtgagaacataacgatgtttggttttccattcctgagttaattcggttagaatactagtgtccaatcccatccaggttgctgcgagtgccattaattcattcctttttatggctgcgtgtattccatcttatgtatatactacagtttctttatccactcattgattgatgggcagggcatttgggctggttccacatttttgcagttgcaggtttatagcgctgccgta

SEQ ID NO: 3559 - DNA, 1033 bp, Homo sapiens
gtattctctgatggtaggttgtatttctgtgggatcggtgatgatatcccctttatcattttttattgtgcctatttgattcttctctctttttttctttattagtcttgctagcggtgtatcaattttgttgatcctttcaaaaaaccagctcctggattcattaattttttgaagggtttttttggtctctatttccttcaggtctgctctgattttagttatttcttgccttctgctagtttttgaatgtgtttgctcttgcttttctagttcttttaattgtgatgttagggtgtcaattttggatctttcctgctttctcttgtgggcatttagtgctataaatttccctctacacactgctttgaatgtgtcccagagattctggtatgttgtgtctttgttctcgttggtttcaaagaacatctttatttctgccttcatttcgttatgtacccagtagtcattcaggagcaggttgttcagtttccatgtagttgagcggacttgagtgagtttcttaatcctgagttctagtttgattgcactgtggtctgagagacagtttgttataatttctgttcttttacatttgctgaggagagctttacttccaactatgtggtcaattttggaataggtgtggtgtggtgctgaaaaaaatgtatattctgttgatttggggtggagagttctgtagatgtctattaggtctgcttggtgcagagctgagttcaattcctgggtatccttgttaactttctgtcttgttgatctgtctaatgttgacagtggggtgttaaagtctcccttattattgtgtgggagtctaagtctctttgtaggtcactcaggacttgctttatgaatctgggtgctcctgtattgggtgcatatatatttaggatagttagctcttcttgttgaattgatccctttaccattatgtaatggacttctttgtctcttttgatctttgttggtttaaagtctgttttatccgagactaggattgcaacccctgcctttt

SEQ ID NO: 3560 - DNA, 1026 bp, Homo sapiens
atttaggggagtataacatagttaccttatttaaaagtagactattgaggccaggcgtggtggctcactcccagcactttggtaggccgaggcgggtggatcatgaggtcaggagatcaagaccatcctggccaacatggtgaaaccacgtctctactaaaaatacaaaaatattagccaggtgtggtggcgtatgcctgtagtcccagctactcaggaggttgaggcaggagaattgcttgaagccgggaggcagaggttgcagtgagccaagatcgtgccactgcactccagcctgggcgacagagtgagactccgtctcaaaaagaaaaaaaaaaaaaaaagactattgaagcaaaagctgaagtacccttctgcctagtggttttcttgccttaacagcagttgtttgcatactttgtatactttagtccttagagaaatacaaattaaaattcaaggaaatacctacattacacacacactaaaatggttaaagaaaaaaaaaagactgtaccaaatgctgacaagtatatggagtaactggaactctcatacattgctggtatgtaatgtatggcatgaatgcaaaatggtgcagctacattggaaaacaatgtcctttatagctaatcatatacttaagcaaaagattcagcaatcctactcttaggtatttacctgagataaatgaaagtgtataaggggatttcaaaagctcatggaaaaatggaattaaaggataaaaattaaaagtataaactttatttctcaacataaactccatcaagttcaagaacttttgtaagcaatgatacaagccacttagcacatccctaaagaaatgaaggtcctaggaattcaaccatgtcaatgcagtcttctttacattattgactgaagaaaaattggtgccttttgaagatttttttaaagattagggaacaaaaagaagtcagaaggagccaaatcaggactgttaggtggatgcctaatgatttctcatcaaaactcttatagaattgc

SEQ ID NO: 3561 - DNA, 1037 bp, Homo sapiens
gcaaaattccaatctctgattttgtggtcacgtggcattctccctgtgtgtgtctgttttcacatggccttcttataaggacaccggtcatattggattaggggctcaccctactccagtatgacctcatctcaatcacatacacaacaaccctattcccaaagtcacatcatgagggactgaggttatgttctgaggtattgggggttaggacttcagcatattttttggggggtgacataattcagcccataacagcttctcatacttgtttcttgttgcatatctgagtttcatgtgaattttaaactttattacattaagtatggcttaagttaggaaatcaccacattaattttattaggtaagcattatttagacttgcttgattcaatttgcatgattatttaatcttaatacatgtggaatatttttgacaaataagtggttatttaaaggttaaaattgtcattcttgataaaaaatgatgactgtgtgatatagcactcatggtatacatatatgaatgaatagattactgtgggttttttttcatgcacaccatttataactcagctttagaaatggataaccttgaaagcatatgaacagtgttttaatgtctgtttccaaaccctaaattactatggtttacaattagtgcttgatattagaaatagataataatttattccagataatttttatgtgaatttttttaccttgtggtttatttataggcttatttctttctaacataggcagcatgcttcttggacacttttagcctatcatggagctagtagactaagaaaatcatacttatttaaatattagctgtagtattatgtgattatacgctaaattactctgcgatagtttttgtaatcatatatagtcaactgattaatttttggttttcagtgtaattgttctcccccttaggatgtataatgtggtttgtcctaagttggtgctcagtaaatgtttattgaatgaatgagtacattgtcatatcattttttatatttgtgtag

SEQ ID NO: 3562 - DNA, 1050 bp, Homo sapiens
tacaaaaaaaattagctgggtatggtgcgggcgcctgtaatcccactacttgggaggctgaggcaggagaatcgcttgaacctgggaggcagaggttgcggtgagccgagatcacgccattttgcacttcagcctaggcaacaagagcgaaactccgtctcaaaaaaaaaaaaaaaaaaaaaattcctattggagactagtccctccgtaaacactacgattcccatccacctctgccttccagtgctcctttgttactcattgtttatagttaatcttcagcttctctcaactgagcccatttcatcattattcagaactgcttgggccgggcgcagtggcttatggcctgtaatcatcttaggaggccaaggtgggaggatcgcttgaccctaggagttcaagactagcctgggcaacatagtgaaaccttgtctctacaaaaagaaaattaaaaattagttgggcatggtggtgcgcacctgtagtcccagctacaggaggctgaggtgagaggatggcttgagcccaggaggtcgaggctgcagtgagccatgttcttattgcactccagcctgagtggcagagcagcaaagtgagggacacactgtctctaaaaacaaaacaaacaaacaaaaaaaaaacaaaaataaaaaaactctttggatttctcctatcctaaaaaagggaaactcttttgactatcccccatcccattaattcatttaacaggtatctattgtgtacagtttacctggcactgactttggacacacaccaatcaacaagagaatcagtccttgcactcaagtcgttttttacagtcaaattcaggaagtacacactgatggaaagaatcaaagtaatgtaaaattacattaggtaagagctacaaggcagaaatatgtgataggataagatgaggggacctgatttggacatttcagtcaagacttgaaaaatgataaggtgttaggtaaaagcataaaagagtccaaacagaggaaatggattgtgtgaggccccaaggtgggcagacacacttgaggt

SEQ ID NO: 3563 - DNA, 1048 bp, Homo sapiens
ctggtctcaaactcctgacctcaggtgatccacgtgccttggcctcccaaagtgttgggattacaggcatgagccaccatacccagcctttcttttgtatttttaacagagatggggtcttgccatgttacccagactggtctcaaacttgtgagctcaagcagtcacccacctcagcctcctaaggtgctgggattacaggcatgcactgtgcccagccaactcatacatcttgagagccttcatgtttaacttcaatctcctgaatatgtgttacaggagcaaatgacatgagaagggttaagaaattcttgccttataggaatgacagcagtcaaggcagtataggggcctatcagttttctttcctgtggccccaggatgtagttcttagctaagagcaggagttcagtgatttttagtcacttgaatgcaggtttttagggccatatgtactgacccattttctgcctgtgtgattgagtttctgctgccctgccagttcctctttggcatcagctgatctctgtagcactctcttgctgtccaaattgctgtgtgaccaggttagaaaagagtcgctttcagaggaagttggccatgccacaaaacagacacctcatagccaaatggcctaagataccatcatgacaaggcttatataaatagtaccgtttgattattaatgggggaactataaggcaatctaacatatctaatatgactgctgcccaagaactgaattaaagtctgctagggaggtgtataagagttttgtacctgcctaagaatagctgtcacttcattccccaccctcaatacctacatgtacacatattcacatatgcatgcacatactcctactccttctgccccagatgaaggggaggggaagggagcccatcttaagaaaaagcttgaaagggaacaaaagcagcagtactgagtcaataaagcctaaagcagtaagtacctggatgcctcacatagaatggttttggtgtgtggcagagtcatttgtagtcagctgcactgttcctgaaggagc

SEQ ID NO: 3564 - DNA, 1032 bp, Homo sapiens
gctgaacagagtaaacaagtgtttcccagaaccaagagtcctggtgtcacctggcctatagagagtgcacatacagtcttttcattatagtgtcttctgcctggcactcagttgggaaacctgagtggctcctgaagacaggcccgacatatcacactgtcatcatgctaaagaagtgaaccactgcctaccttttgactttcagagctaaagaaatctgcctgcatgattagatgtcagcttcactgcccacttataaccctgaagttcacaagctcagtttcttttcagcaaatgggcacctcaaatgtgaatcttgggcagattcaactagaatgaagagagcaaggcgctgtgcttatgccgtcattatgccttattttaagattttcaaagatggattatcaagcaggatgaagcagatcaacaagtttcccttttgagaagttggaagatttatttttagtcattctttctgtcttgccaaaactggtccgacgcttccaaggatctgaagtgctgcatggtgctgcccccaactggttctttttggtgcttatattattaccacatcagaaaatatatgacatttaaatttttttcgaagcgctttcacatattttattttattattatttttttgagacagagtctcaccctgttgcccaggctggagtgcagtgatatgatctctgcccaccgcaacctctgcctccaaggttcaagtgattctcgtgcctcagcctcccaagtagctgggatcacagtcgtctgccaccatgccctgcttatttttgtatctttagtagagatggggtttcaccatgttggccagactggtctcgaactcctagcctcaggggatccacctgccttggcctcccaaagtgctaggaatacaggtgtgagccatctcgcctggccaacttttacatatttttttttcaagacagggtctcactctgttgcctaggctggagtgcagtggctcaatctcacttcactgcagcctccgcctcccgggttcaagtg

SEQ ID NO: 3565 - DNA, 1037 bp, Homo sapiens
gcctgaccaacatggagaaaccccatctctactaaaaatacaaaattagcttggtgtggtgctgcatgcctgtaatcccagctacttgggaggctgaggcaggagaatcgcttgaacccaggaagcagaggttgtggtcagccaagatcgcaccattgcactccagcctgggcaacaagagctaaactcagtctcaaaaaaaaaaaaagaaaaaatagtacaccaatttatttaggtttcatcaatctttgcatgcatctgtttctttttcttttttctttttcttttttttttttttttaaagacaagatcttgctgttttgcccaggcagagaagtgcagtggtatggtcatagctcactatagccttgaccttctgacctcaagtgatcctcctggctgtcttctgagtagctgggactacaagcacacaccaccatgcctggctaatttaatttttttatttttttagagacagggtctcactatgttgcccagactggtcctgaactcctggcctcaagtggtcctcccaccttgatctcccaaagtgctgggattacaggtgtgagtcactgtgcctggcctcttttcttttcttttctttttttttaatggttattagcagggtttcagtgttttagatgtaggccttttagaaaacataagtatcaaaattatgtccacgttttaacattgtattataggtttatttaggcctcttaattgttgttaccataacctttagaatcacatttttctggaaagaccagtatgggtcagaagaacccctatgatatgtatgctgcttactgctcaacgttggcagcagaaaagcttgtaaagcaaaccaggtagattttcattggttcgtagaagggcagttcttttttatgaatcaaaaaccaaaagtggttttattgaaccactggcctttttttctttctttctcattatcacaaggcaaaacacagactttggagccaaacatccagattccagtaccctctttaacctttgtcaagtcatttaaatac

SEQ ID NO: 3566 - DNA, 1074 bp, Homo sapiens
attcttgggggcttggctcaagacttttatagaaccacacatgaaatgtcgccaaagaggaagcaaaaagatgcaacccttgccagtgacttgtcagccaccacaaacccaaaagtcatgtgccatgctacagtacaaactaaccctagctgtctcatcatcaagtgctctctcacaacacaaactaacccttggtatcccaaaaggcaaagagatcagagagatcaaaggcaaaagagcagagctcagacctgagagaggtttactcacgactctattttttctgtttgtttgtttgttttagatagggtctcactgtgttgcccaggctggagtgcaatgtcttgatcatggctcactgtagccttgatctcctgggctcaagcgatcctcccacctcagcctcctgagtagctgggaccacaggtgcacaccaccacaaccagctaatttttgtatttttttttgtagagatgtgttttaccatgttgcccaggctatctcgaactcctgggctcaagcagcctacctgcctcagccttccgaagtgttgggattacagctgtgagccaccatacccatcttcacaactctttaggctccatgagaagacagattctcatccaaaaaggggttagcagagcttagggtctcagggtcttcagcagtctccttcaggtccctttgtggtagccacatctgttaaaggacaaaattagaataaatatagtttaaagacttcaatagtctttattgctattctagagtccagcaactcttcatttcctaaaatagaataagtgtaccaatgagctgagtggaagaatttggctttatagtcagagaagggcttaaaaaagcagaagcaaagacctgagagtgtattattagccctttcaaagttcttataatgcaaaggcagggatatcaaacaacagaaaagtaactgatttgttagtatcaactaacttcaggctacttcttttgtgtaagagttaaagcggagggactttagttatgccaattgaagattgaagctggtcagtttgggtgattggctgttatctctctttc

SEQ ID NO: 3567 - DNA, 1025 bp, Homo sapiens
aataatggcatctattttataggactgttatggatattaaatgtaaagcacttggaaaagcatctggattatagtaaatgctcagtaaatactatagcacctgtcctaaagccttgcacctagtggctacccaattaacatttgagtcagctaatagaggggattcctgaattggtctaaagattaaactagttcatctctaactgcctttataactttcaccctaagtttctgttttatgtcatggcttagggcctggtggattgaagttacacagcaaatatgatgcttatttagaagagctaatacacttttaagaactggcttttgatctgtctggtactaatatatgccattgtgtatattcgtggttaattagataagggatgccagtttttatgctagattgcctttggtttgaatggaaactgcaactcattatttcacagcaggaaggtaagctcagcagtattgcttttatttttaattagatagtcatcctgaaacgtgtctgtattagctgtgttggtccatagaaagaataacagctgagcagacttgtcatgtagatttgccatgtgtttggtattgatacacagctaatgtacttgtcagtattcccattctagaaaataagtggccagttttcggggctacatattactcataatgaatccttaatttattctggattaggtggggactttttatgattatagaaagaaaacaatgtgatgaggatattggtatattatgtttgcagtctttttctactctttatatctagggtgtgaaagtccactgaattctcagaaatcttttttgatgactttgtgggataatattaccaactttgtgcacatatgattccatatttggatggacattgacaatttttgattgctggctgacactgccaaatccagctacctgttggtagatagctttctagtgcattgcaggattaaatttgtgtctggactattgtgaagttgtatctactttgttttgctgaaatgaagggg

SEQ ID NO: 3568 - DNA, 1051 bp, Homo sapiens
aggctgaggaatgtgggacctggtagggagaggcctttaccagtctatctcagcctctatttacattttccctctcacctggttcccccatgggtcagcctccacatcttgtcgttggtagtagtaagcagccccagctacatgggctgctgtctgggccaggatcttggggcgtcggttggggtgcacctcgtagtcagcaatgatttctatctgcagctctgggaggctctggaacagtggacaaaatagagggtactgtcagcatgaggggagttatgaccttgtccgagggagccctagtttgttttgtgtgtgtgaacatggtcctgtcctcagaagggaaaacatgaccttaacttgggaggctccagtgtggacatagttatagttatttccagaagggcacatgtttgaagggaaatacataacacctggtgtgaaggaaggcatggtcagctttggggagatccagtgggtatgtacatagttatgtgtatatgtgagtgtgtgttgggagaatattgttctgtcctcaaaaggacagcataaagcttgcaggtctaggacaaagcaatgcctggggaatgttggactcattcctattccacttggaggccaaggaaaacctggtctgaggttcatatagttgcccatcagtgtagggtgagtgagactatttcacactgggggactgctagatgagggtggtggaacctgggtgtgtgagaaggcagaatgaggaaagatcacagaatgtcaagcctggctttagggtatcatttcacctttgaagtggctcctagccctaggtctagatcctgcattgagtgtggaggaactggaggcagctgtaggtttgggagctgggggaaaactgagccttcctcacctctctaacacggcccagatggtaggccacacactggtccactgggtcagtcagcattcggaggtggcagctctgcaagaagggcttgagggcccggtcaaacatggcaggcgtgctgagtaccaggaaggccagggtaggtcctggcagcggtaggtg

SEQ ID NO: 3569 - DNA, 1654 bp, Homo sapiens
aactttgcctttttttgtggaaaatttaaatttcaagtgctacatgaataaattaggcatgatagtatcttaaggctgtggtgatgattatatgtttgtaaaatggttagctcatactaaaagggtgaatgatctaagactgattgcaggggtaggtttcctggtatctgagtgttcaggtgcagaactggttttgtccataggagaatggtggtgcataccattgagaaggttattaattagtggtgcctttctcttgcagtgtgcccagctggctggaaacctggcagtgataccatcaagcctgatgtccaaaagagcaaagaatatttctccaagcagaagtgagcgctgggctgttttagtgccaggctgcggtgggcagccatgagaacaaaacctcttctgtattttttttttccattagtaaaacacaagacttcagattcagccgaattgtggtgtcttacaaggcaggcctttcctacagggggtggagagaccagcctttcttcctttggtaggaatggcctgagttggcgttgtgggcaggctactggtttgtatgatgtattagtagagcaacccattaatcttttgtagtttgtattaaacttgaactgagaccttgatgagtctttattttaggaagcatattattagcttttgattttaagaggaatttactccttgctttccctgttttggggaaaatgaggagagctgcctccaaatcagggaattatattgacacaggtagatatagggaatggaactgaatgaacccaaggtgttacattttgtttcactacacatgagggagaagaataagccctgctatagtgttggccagagcactgcgactgacgccacaggctgggttaccagttaaagtctcagtgtgactacttggacacctatttttgtttagacacactattcaaagggctgcatgggaaccagaagcttggcctcttctgataaatgcctggtacctgctatgtaaaagagctggaggtttctgttctttttgaactgacagaggaaagaggaagacaaggctggtggccttgggtagggctttcgtagttgcacagtactgggcaattcttagccttcccttggttctagccttgattagagatagtcttttttagtgtcattatgttgcccagagtggttctgaattccttgcctcaggcggtcctccgcctcagcctcccaaaatggtgggattacaggtgagcgccacagtgcctggccaaagctcgttttgatcctcattcatatgtcattgtcctcagagaggctgtcagctgggaaaagttattctcctgggcccttgaggccaaggtagattcagaactgaggatacttctgtgtatcatgtgataccattccagccacttgtcttcctcagctactcccacctgcccacccctctagaaccgactacacccatgagcagcagtacagaattcccagggcctttggtaatggccaacatactgcttactatatatgccaggtatttttccaaagtgccttacacgtgtttattcagtccctacctgaggtaggtacttttttttttttttttgagacagagtctcacactgtcacccaggctagagtgcagccatgcaatctcggc

SEQ ID NO: 3570 - DNA, 1023 bp, Homo sapiens
ttgtgtttctagtagagacggggtttcaccatgttggccagactggtctcgaactcctgacccggtgatccgcccgcctgagcctctcaaagtgctgggattacaggtgtgagacactgcgcccagtggtcttgcctcttaaaagttggactgactggaagggcgcggtggctcacgcctgtaatcccagcattttgggagactgagttgggcaatcatctgaggtgaggagtttgagactagcctgaccaacatggagaaatcccgtctctaatagaagtacaaaaaaattagccgggtgtggtggcctgcgcctgtaatcccagctactatggaggctgaggcaggagaatcccttgaacctgagaggtggaggttgcagtgagccgagataatgccattgcattccagcctgggccccaagagcgaaactccgtcaaaaaaacaaaacaaaacaaaaacaaataaaacaagttgaattagttataggttgtgtgctgtcttggacaaagctacctggagaaaagtcaaatatgcttctgatgttatgaaggcaggtggaggcacagtgatgggaaaggtcaacgtgacttttggggagccaaacaaaagtgtttgtggcattgtgcatttggattctggtttgagagtcttcatctgcctctctctctgcttctgtataatgaataagatgccactgcactaattatggttcagaaagaatgagaggttatctcagtatataaagaaattgccttgctgtttttaaatgaaaacaaaggctgagattcagagacttgtttcgttccaaaagttggaaagctcagactgtgacccttgactgctggctggagcttcttactaaaacaacatttaatgtattcagggacactggacaatgccttgattgtttacagctaagtctctttaagtaggtgaaggctgctggttatgtagaaaattaaggcttgtttctaattcatttctgttatttctagctgataggaagatgtcttcaggaaa

SEQ ID NO: 3571 - DNA, 1130 bp, Homo sapiens
cctgtatccagactcgtggctgtagaagacagcctctatgtatttggctgttccgggtcctgagccttgactagctgcggagcttcgggtaccctttccccgtctttattttcctgtacgtggaatggagttagcgatgagcccaaatgtccccgctgaagcactctctctgctggtgctttctccagtgctggggagggacagggggcacctgaagtggggtttagggatgtggccctctacgctgggcagatcccctgaaggggcccggtggcggcctgaatcccagcagcctttaccccgaattggttgggttttgtacttgggggccacttgggaaagaaggattggacgagaaggccatttgggggcaccaagttgcagcatgccttagtttttggtttttgttttttgtcgttaaaggtgttaaggactttttaaaaaacagttaaaagtttgctaagatccatgcttacaaaatttcttttgcttgtggtattgtgaactaagaactttgggacttggaaaagctttcagaccgcggcttagtgggttaaatctctgttttttgagctagagtctcgctctgtcggccaggctggagtgcagtggcgcggtctcggcttactgcaacccctgtctcccgaattcaagcaattcttctgcctcagccttaggagtagctgggattacaggcttgtgccaccaagccccggctaatttttgtattttttttttttttttttttttgagacggagtctcgctctgtcgcccaggctggagtgcagtggctggatctcggctcactgcagcctccgcctcccgggttcacgccattctcctgcctcagcctcccgagtagctgggactgcaggcgcgtgccaccacccccggctaattttttgtatttttgttagagacggggtttcactatgatggccaggctggtctcgaacttctgacctcaggtgatctgcctgcctcggcctcccaaagtgctgggattacaggcttgagccacagcgcttggccaagatctcaatactaatcttggtgttgatctgggtgaatccagtgcaaccttccttttcagcagtaaattgattcttatacttgttttcgccctggg

SEQ ID NO: 3572 - DNA, 1036 bp, Homo sapiens
ctccgcctcccgggttcccaccattctcctgcctcagcctcctgagtagctgggactacaggcgcctgccaccacgcctggctcattttttgtatttttagtagagatggggtttcaccgtgtttgccaggatggtctcgatctcctgatcttgtgatccacccacctcggcctcccaaagttctgggattacaggcgtgagccaccgcacccggcccattcaacaaatactttctaagcccgtgttgtatgtcccaggcattatgcaaggctctgaggatgcaaggagtgcccagcccagtaggggagagaatagacagtgatgtaagaaaaggacaggggttcaagaccagcctgggcaacacagtgacctgtctctataaaaaacaaaaacattaaaatggtcaggtccagccaggcgtggctcacgcctgtaatcccagcactttgggaggctgaagcgggtgaatcacctgaggtcaggagttcgagaccagcctggctaacatggtgaaaccccatctccactgaaaatacaaaaaattagccaggcatggtggcgggcgcctgtagtcccagctactcgggaggctgaggcaggagattggcgtgaacccaggaggcagagcttgcagtgagctgagatagcgccactgcactccagcctgggagaaagagtgagactctgtctcaaaaaaaaaaaaaaaaaaaaacaaccaggcatggcagcaagcacctgtaatcctaactatttaggaggctgaggcaggagaattgcttgagcccaggaggcagaggttgcagtgagcccatactgcaccattgcactccagcctgggcaacagagcaagactctgtctcaaaaacagaaacaaaatagacaggtccacgtggtagcacacacttgtagtcccagcttcttgggaggctaaggcaggaggattgcttgattccaaggcagttcagggctacagtgagccatgatggcaccactacaatccagcctggatgacagtcctgctcccgcctcttcggc

SEQ ID NO: 3573 - DNA, 1035 bp, Homo sapiens
tgaacatcctacctgttgctctcaagagtatcaccaatgccgaaaagagagggaaacgccggttcttactaggccatgctccaaagtcattgtccaacttctagctgtgatgatgaagcatcgttacattggcaaatttgaaatcattgatgataacagagctgggaaaattgtgaacctcacaggcaggctaaacaagtgtagagccccagctttgatttgcaactcaaagatctagaaaaacggcagaacaatctgcttctatcccaaccatttgacttcgtcatattgacagccttagctggtatcatggaccatgaagaagcaagacgaaaacacacaggagggaaaatccttggattttgtttctagggatgcaatacatatttacaaataaaatgcctcaaaaaaaaaaaaaacaaaaaacttcggaatatcgttcccaagacttttcctgagaactactgaagaacaagcttctgacaaactaaccagaaagattacaaaaggaatggtggtaaatactaaatgtatggttaattgtagagctaagaagaaatgagggttaaaagagagttagcatgtgatagttatatgatctcacaatctggacatagtataacttttttaaagtgggaagatggggagaacatgtccaaaaaaaacaaaacattttggtcactggtgaaatactgacattgctattctgaaacttgtgcataatatggaataaagcaattaaatatgatattctatactttgtatgcttgagaatcaggattcttgtaggaggaaataaaaacgtaaaatagatgttccgtaaaatccacaagggtactcagtttgaattgggaatatcagtaataagttatgaggtgttttagctttggagtgaaaaatacatacttctaggcggttctgtccactgaaaagacataaaaacagtgaacaaccccatagcaatgagtggctctactgcctggattgtgatcttgaaatagtttatccagacagcatacttaaaagaagagcttg

SEQ ID NO: 3574 - DNA, 1043 bp, Homo sapiens
aagattatcattttaacaaatcagtatctttaagttggccaggcatagtggctcatgcctgtaatcccagcactttcagagaccaaggcaggaggattgcttgatgccaggagtttgagaccagcctgggcagcacagcaagatccttgtctctataaaaaatttttgaaaaattagctgggcatgatggcacatgtctgcggtcccagccactagggagactgaggcaggaggattacttgagcccaggagtttgaggctgcagtgagctatgattgccccactgcattcatgccaccacgcccagctaatttttttgtttcttatacagactagctatcactatgttgcccaggccagtctcaaatgcctgacctcaagtgatcttcccacctcggcctcccaaagtgctaggattacagacagccaccacacccagcctctagctgtttttaagtagcacatcgatcagtcgcttctgttatagccatttcatcagttagtagagtcacctaaagaggagtgaaatttaggcattagctcctctaccctcaagtctaggaagtgacctggggtccttgctgtaaattatatattaatgtgaattcctattcccaggtgagtgttcttcaaaactttatcctcaggaaggtctatactgcccttacatattgaatatttgtccagaatgttctagataacaaatagtccagaaattactacaatttcaaatgtaatctttattatttatacagcaaacttgtattacaagcaaatccaagaaagaccagtgggaatgatttgaaaacaatgtatgttgctcattacacttaaggaacttgatgaaattcatatcaaactagcaatgaaagcattagcaacagagctggtggacatgggtggcgtgcacctatagccccagctacttgggaggcggaggtggaagcaagactctatctcttaaaaaaaaaaaaatgcagcaatcacagtatattcttattaaaaaacaactttcctttaatacttttattctatgattaaat

SEQ ID NO: 3575 - DNA, 1302 bp, Homo sapiens
gtttagatgacttttctcaaatccttaaaaaagatttatatccaagtcatcttgttggtataggtggtgacatacatctgtagtatctaaattggacttaagagttttgactctcaggaccttgatttcattatttaactgtgtctcattttagcagatatatgtatatatgatagtgattttgccttctgtgattttatgttttgttttttcatttacagagtgatagattcgtgtggcctttcaaatgattgtgaagtggtggaaatggatccaaaataataagtgacttctctaccaaagcatagaagattcttcatatctccttccagtggctcaatttagattttgggaaggagcagaacaagtgaaacacagaaaactgaagagaagaaatcctcattttggacctatatttctccttgactatttcttaatatccatcctacccatcgttctaatgttttaactttgctctgaatttataaatagtaaaggccaaagacatagaatatacatttagtagctttataccaagaaatttgccttgaaagctgctgttcgtggagggaaaagtgtagcaaattcctgtctatttttattttttatttttttttaacaaagacaagatttatgtccctagattttgaaggttaaggcaaatataaatacatatctgcacactattttttagcagttgcatgagtaagagtaatgagatttgtattttaaggactttgtcatgtggatgttttggagttgactgctcagatcttttatagggctttaatatttttgatctattaccttgatgacattatttgtccacacttgagcccatctgtctttctagctatgaccttgttatgaacagtatttgcactcggtgcaaatatccatgtcttacctaattaagcaacatcatagtgccataactcaaggaagttgaatgaggtgaacatagatacagctctttccccttccccccctttttaaatgtaacaaatactttttatgttccccttccccccttccccttttcccctttccccttttggaaacgtgtcaggaaccaaatagtttaagatgagcagttgaggggactgagagagtgatcgacacagaacctggcttcttcgtgcttcatcataagtcgtgctgccggccaggttacttaagcacccttttaacaaggaaaccttgtgggagatccagctggccgactcgagttcagaaacaggaccacagaggttacactctggggtaaatattctccatatgtctaacttggaaagaagactc

SEQ ID NO: 3576 - DNA, 1030 bp, Homo sapiens
tccaccatagcacacagagaaatggcatagtatggtaatcagtggttggctttgtagccagaccatttgggttcgaatctcagctttgctgcttacagctttgtgactttgagtgaattatttaaatgagactgtttgcctgtttcttcatctgttaaataggaacaataatagtaccttctcctagggttgttgtaataaataatatttgtataattcttaaaataatgtctgacggtaagaacttcatgattattagagaagttgtctttaatgaacatcctttaacacaccaatccagtgaaattcagtgaaatctgcacagatgagttgcacacggaggggtgtttttctttcttaggtactacttttctgttgacctttgtaatttatttgaatcaggatctaggtcccacaaactgcaattggctgccattttaaatgccttaatttgcatatttctcctcagtttttttccttgtactttgttgaagaaaccaggtcatttgtcctgcagtttcccacattctagattttcttgattccttgtaaattggtagttggatatagaggcttagattgagatttgatttggagatagagaagactgagaagactaaatttgttaggtgattctgtgtatttggggatttttattttctggtttgttcagtggttctcatctgtatcattttcttgcaatttctctgttgggcaacatagaataactttatggtttatttactctcgtttgagatgctaagtaaagtggagtgtttggtttgctttggtgcccaattcagtattaactgttccaggtagtttctttcctgccttttttttttcctacttgtatatttattctgttataaaattgagccaagtatcatgggttttcagtgttcttgtttcctggttttggttactaatgaatagttgtctcagcatattcaatctgaaaatttctcaaaactgaatttttttccctattttctaccctccaactattaggcattttattatttgcact

SEQ ID NO: 3577 - DNA, 1050 bp, Homo sapiens
ttacattgtcgattgttaggtgctagatatttttatattcctataaatattcttgagctttgttccaggaaacagtttgatcctctaagccttgcttttaagctctgttcaatggaatcagtgcagcagttagtctatggctaattttgctacactactaaagtactactgaagagtactgagcatagtactctacctgatgacctactctgcctcttgggaacgttaactatttctggcctatatgaagataggatttttcccatctgctttcccaagatctggatagttttttcacacccttgtactgatcggtatccaacagaacacaggaggggaaccttctgcagatctcacagtgctccctctgtccagctctctcttctgtgtgctgctctctcctctctggtactttgccctaaaaatttgatccaccttggccttctcaaattctcagctctctctcctcaactcagggagaatgctgaactctgtttttcttgctccttgaactgtggccaggaaattctctccatgcagtaagctggggcaactctagggctcacctcattggtttcccttatgtcagggatcaccctcttgtgctctctgtttcccagcatttgaaaaatgtttcctcaaatattttgtccagttttttagacgttttatgtaagagtaccggtaaattgtggttggaagtgaaggtctgtgggggaatacttcaagattttgtaaatatctgttctccaatatatttttatttttatttatttatttatttatttatttatttatttatttattttttgagacagagtctgtctctattgcccaggctggagtgcagtggtgcaatcttggctcacagcaacctcccctaggttcaaaagattctcctgcctaagcctcctgagtatctgggattaacaggcgcgtgccactacgcctggctaatttttgtatttttagcagagacggggtttcaccatgttggccagactggtctcgaacccctgacctcaggtgatctgcccgcctcagcctctc

SEQ ID NO: 3578 - DNA, 1105 bp, Homo sapiens
gtctcaactagttgggaagctgaggtggaatgatcccttaagcccaggatttcaagtccagcttaggcaacagttttaaaaaaaccaatccacccacccacccaccaaccaaaactgaaaccgaaaccgaaaccaaagccaaaaccaaaaccaaacaccccagcctagtaagtgctagataatgtaggaattatcccataaacatcaaaacttctagaattgtaaacattcaggacagcagtttttctagacccttatgcatatttattgcctttctaaaaagcaaactgaacaaaatttaacctgaagatttttggggaattgtgattcagatgcctttttgtttttttgagacaaagtcttgccctgtcgcccaggctggagtgcagtggcacaatttcagctcactgcaacctctgccttccgggttcaagcaattctcctgcctcggcctcctgagtagctgggattacaggcgcccgccaccacgcctggctaatttttgtatttttagtagagacggggttttgccatgttggccaggctgtcttgaactcctgacctcaagtgatctgcctgcctcggcctcccaaagtgctgagatcacaggtgtaagccaccacgcctggcctattttatagtttaaatgatgtattttacatacaagtaatagagtaggggttgaataaaagctcttgttttagtcctcctaaacaaggagaagacttttgaaagactaggtgttatatgggattacattaataactggaattacaaaatttgtttaagaccaaggttagaagaaaataataaagataatgaagcctgtgttttttctttttctctcctgtaggaaatacagatgaagaggactgcaatagaagcttttaatgaaacaattaaaatatttgaagagcagtgtcacacacaagaacaacatagcaaagaatatattgagcgatttcgcagagaggggaatgaaaaggagattgaacggtaagtctacttagtacctccaagggcatcagtgagacaggatttcttttcttccccaataatttctgtcttgttttcttttaccccctcaaactgcacagccctacta

SEQ ID NO: 3579 - DNA, 1027 bp, Homo sapiens
gtttatcattcccttcatatagagatggcttctgctccccccacagagacatacaaccacatatctttaggtccttaagagattttttctgttcttcctgataaaaatattgatagaatttaaatttgaaaattcattcagaatataaacaaaaatagaatttacttctgttttatttttcttaagtgattttttttgctacatttgttcatactgaatgctgtgtagatatgttgacctttaataaccaaagtattttatggacaaaacaatgcaaaatgaattatatatatatatatatatatatatgttcacacacagaataacatgccttttcactccttccagcctcattaacatagtaaaacttgtttatcatgtgacaccaagctttcacgtctccatatgaaagcagtagttcagttgaatttgggggaaaaaaatccacagttgttgtcttgttgttcacaggaagggaggcaataataagttaataaagatctatcaccgggatggtaaatatggcttttctgatcctctgacatttaattccgtggtggagctcattaaccactatcaccatgaatctcttgctcagtacaatcccaaacttgatgtgaagctgatgtacccagtgtccagataccaacaggtatgattatggaaatccttgctagctattgagcaagtgattatttaacagccttatttgattttatttaccaggcttatcagttttaaaaaactagccattttgttatttatttatttactttgagacagggtctctgttgcccaggctggattgcagtggcatgaatatggctcactgcagtcttgaccttctgggctcaagtggtcctcctgcctcagcctccccggtagctgggatcacaggtgcatgccacaacttcagggtcttgccatgttgcccaggctagtcttgaactcctgggctcaagcagtcatctcactttgaccacccaaagtgttgggattataggcatgagtcattgcgcctagtgca

SEQ ID NO: 3580 - DNA, 1052 bp, Homo sapiens
attttggggttcccggaattggctctcttaatttgatgagacttaaaaatgctaaggaccctacttctaatagtacagagagcactgacagtccatgctgtgaactgtttatatagcgatatgctaaatatctgcatttgatacttctaatttaccacctataagaggcaaggaacttggcaaccctgtatttgatactgtcaaacgtttgtagaaaaccaaggttttctaatattgctggacgaagtgatgaaagaaaagggtgagctcagggttttgatttcctggccccagctctgccataaatagcccaagagcttctaaatatgccctaagtcagaatcttctcttctgttgccaaaggtctgaaattgcacaaaatcaaacacatactctcatcatgtgattagctgaattacaatcaaaggtgaaatatcagccttgtaaggtatctgctgttaaaatgagggcattggttgggaaagatggaattctatacgtttggatggggatgtgtgggaagaccctgatgaggctggggacgttgagctcctaaattctgatgagtcttgtttgccagcagaaatggcctcccacccccagtaacagcatcccccctacactggcctttccacctttgtctgaggggattgactctgcattgcctgaggaaaccataatggccttcctctaggcagctgctaagccagaggatgctgagtcttctcaggacccacccccaccacacctctttgcttctagacctatagctagacttgagtcccagcagcccctaaagatgaggtacaaagttttactcatgaggagatgtgctacatggtaaaaaagctacttgaggtttctaatttatacaaggagaaatctggaaaatatgtatgggaatagatatttagggtgtatttagggtgtgagataatggtggaaggaacataaagttgagtcaggctgaatttattggtttttttttttttttttttttttttttttttgacggagtctagctctgtcgcccaggctggagtgcagtggct

SEQ ID NO: 3581 - DNA, 1035 bp, Homo sapiens
agatgtattttctttttaaagccctatccatttctgtcaaatcagtttccaggttgatgctgtattcctcagaacacttacctatccctttctcttctctgttctcttcctctaccaaaatggtatttatttaatttttttttacccttacgatttcaactattttaagagtacatttgcattgttgtgcagctatcatcaccatccatctccagaactttttcattttccctaacagaaattctgtacccattaaacaataaccccccattctcccctccctcagctcatggcaaccaccattctgctttctgtcttatgaattcaattgtaggtactttgcataagtgtaatcatataataattgtacttttgtgactggcttatttcactttcttcatacgtcttcaaggttcattcatgttgtagcatgtgtcagaatttcattccttcttaaggctaatatatgtatatgttatatatttttttaatccattcatctggacatttagattgtttctaatttatggctgttgtaaataatgctgcaattaatattggtgcacacatatctgagtccctgctttcagttattttgggtatatacccagtagtggaatggaattgccaggtcatatggtaggtaattctgtgtttaactttttgaagaggacttaatatgttttattaaaaaaattttttttttgagatagagtctcgttcagtcccccaggctggcgtgcagtggtgcagtctcagcccactgcaacctccgcctcccaggttcaagtgattcccctgtctcagcctcccaagtagctgggattacaggcgcttgccctgccaccacgtccggctaattttgtatttttagtagagacagggtttcatcatgttggccaggttggtctcgaacccgtgacctcaagtgacctctctgcttcagcctcctaaagtgctgggattataggcgtgagccactgcacccagccattttattttaaaattggttagaatatttctattttaatattg

SEQ ID NO: 3582 - DNA, 1033 bp, Homo sapiens
tctgtcacccaggctggagtgcagtggcgtgatcttggcttaccgtaacctccgcttcctgggttcagttcgagcgattctcctgcctcagcctcccaagtagctaggattacaggtgcaagtcgccatgtcagctaatttttgtatttttagtagagacggggtttcaccatgttggccaggttggtctcgaacttgacctcgtgatctgccctcctcggcctcccaaagttctgggattacaggtgtgagccaccgtgcccagctgatgagctgttttttaaacaattcagtattacaccagctgggatgattactgatctctccattccttcggagtgactctcccatcaggggacaggttccattctattccaatttgagttgctacataagtccatacagcaatagagaaagtggctccactagctaatacagcattactgtatttgtcatgaaaatcaggtgtatgtttctggtggctctgccttgcgattgtttgcagaatgctttgaacttggagatgacttagtgtgtgtttttttttttttttttttttttttgatggagtcttactctgtcacccaggctggagtgcagtggcgcaatcttggctcactgcaacctccacatcccgggttcaagttccctgccttagcttcctgagtagctgggattacaggcgcttgccaccatgcccagctaatttttttgtaatttttagtagagacagggtttctccatgttggtcaggctggtctcgaactcctgacctcaaatgatccacctgcctcagccttccaaagtgctgggattacaggtgtgcgccactgtgcctggccattagtgcattttcaaccaagggaaacattgtgaaggtgaagatagaactgtggtaatgcaactgctgctttggtgcaaattcttatgattgtaatctgtctcgtttgtagatgtttcatttaatggattatggcttcaaatgggtatttgatactttctgataggatttacatggtaactacacagaatt

SEQ ID NO: 3583 - DNA, 1117 bp, Homo sapiens
cattttgtgacttaagctttaaaatgttaatattatttattatcagcatgtgacctctaaacttatgaagataattggctgggcacttattgtaacaaagggaataatgaaaaaaaatgcaatacttaatgttattagcaagatttatatagctctgagtaaaattgtgtttgaaactttgaacaattagaaatgaataggccgggcgcggtggctcacacctgtaatcccagcactttgaggtgccgaggtgggtggatcacttgaggtcaggagttcgagaccagcctggccaacatggtgaaaccctatctctactaaaaataaaaaaattagccaggcgtggtggcgcgcctgtagtcccagctagtcaggaggctgaggcaggagaatcgcttgatccctggaggcagaggttgcagcaagctgagatcgcgccactgcactccagcctgggtgacagagcgagactctgtctcaaaaaagaaatgagtagtaagtttttcacagtgtattaggttagttttaaataacacagggccaaacggagagttttaagttatccagtgtgttattataccacttaattttactgtgtgtaagacttgacttttaacaagtaaagtgagccatcaagccttattaaagatcaatttccacattgcttgcccatatatgttgtatgtattgttccttgtgcatatttgtaaattcacataaagtaaaagggttatcttattgttttctttttcttttatttatttattttattttattttattttatttttgagatggagtctcgctctgttgcccaggctggagtgcattggcatgatcacaagttactgtagccttcccacctcagcctcccaagtatctggggctacaggcatgcaccaccacacctggctaatttttaaagttcattattttaataaaagaggcagtaggctacgtccagcctgccaaatcataccattttgcatgtcgcatatcagtatgaaaactgccctatgagttggtattgatgagccaacacaaagccaaagtcaataccatctacccttatccatacttggacttcctgtttcatgttctgtttgtgggccagattg

SEQ ID NO: 3584 - DNA, 1088 bp, Homo sapiens
tgatttaacttaatttatgggatagggtttaatgtaacttcaattcctagaataaagaaaaagcaaaaacaaaaacgagggaacctttctgtttcctgtgaacgtgtgatatatacatatgtgttcctatacacgtaatgtaaagtatacatatatagcactatatttttattttaaagctctgtctgacgctattacagacattttgtgtatctggtaggaaaggaaaaggaaagcaaaatggaaaagttggcttttttttcctttaaagtctaccccattttatgattattagctgtcagattttctcaaaccctgtttgcagttacagatggtgttttatgtaatgattctgaataagtagagagcctttgtgactccttgtttctgtcgaggatgaattctttatgtattttaaaacgtgttatggctaagtctacagaataaaatgtgtgtcattggggaacctcgtttattataagactgtatttttggaaacgtttgaaaggatttgagccatgcaagtgtgaagaagtgtaactgtcttatagaaggtatgtagaaattgtttcctgtgtccttgcaaacggtgaattatcctgttttttttttcaattagtcagtgttaaatggtgctgtactaaaaactagtattgaataaacctttttcactcttgatgatcacttagaatttttttcttttcctttatttcagagctttatttgcttttataattgtgactgcaatccagatgcagcttttcagtgttttgtaaagtttgtaagatttgccacccatctattgtgtctttccccctttgtttccccctaacggtaaagcatgttagatacatttgtcatacatatgaatagaaatttagtacatcactggtacttttattgtaaaaagtaaggttaataattctagattcctgttataagaattatatattcaaactgccttagaattatactgcattatatagtaccttgccttgcagacatacaaagggaatttgttgggtgggaggtgagtagggaggaggggagaaaatgaagaatgcacttatggttgaaatatattagcc

SEQ ID NO: 3585 - DNA, 1028 bp, Homo sapiens
ggctggagtccgggcagagcttgagggcagttggtgcggtcgggttggttcttacaccccggcgggagcgcccagacaagccgagctgactggacttctccggccggccccattcccgaggctgcggcagcttcggttccgagaccgaccggagaggagcccgagtcccggcctctgggggattcgctctctgcagaccagtgggaccccgaaacttgaacgcaatctccagcccccttttttgccttcctttgtcacttgcccgggtttctcccaacgtgttcttttttttcctcttcattctccctccttcgaaggacacaaaagtggcttccgcggaaagatttggaggcggtgggagcttttctccccggagagcgactgtgtagaaaggatttttgggaagccgctttttaacacctctgctctccgtcccccaagcctctgtgtaatcctctgaggagaaaagcccatagcttgaaagttcgggggcattttgttgtgttctgtaggagagagggggaggaccctgttcgggtagtttggccggactggtactggccgttggaaaacccgaagtacatttccgtgtggaacttttgcagatatatatttttagatttttaaataccagataaaaaatatatgccttctatatatctcctggcgacctgcccctgacagcgcgatgtacaatacggtgtggagtatggaccgcgatgacgcagactggagggaggtgatgatgccctattcgacagaactgatattttatattgaaatggatcctccaggtacttgggagaaaaaaaaaaagaatctcgtgatgggtctgatttgtatttaccaagagcttgctgatgttttcagggcagaagtattcctgggtgcgctaggttcgggatgaggagatttgcagttacagctgcggtaaaactgcttctggtttacacgtttaaagtttgcagttaggaccctgatcctattgtcctgcgaaggtgggggtgggggctggaagtgggggtggg

SEQ ID NO: 3586 - DNA, 1049 bp, Homo sapiens
ccaggctggctggtctcgaactcctggcctcaagtgatccaccaccttggcctcccaaagtgctgggattacaggtgtgagccaccgtgcctggcctgacatttctttattgatctaacatgctccactctgctgctcctgcctaagatctggttatatgacactgaatgtggtgagtgggaatttaagcagtattcgcagtttgtgtgtgtgtgttttcttccttccagaagaatttttataggttgggcctgtccctaagctctttaaatagggtggacatcccactattctctgagccgtgtctattttgttgcacctttgagtctatgtattgagagagacagatagtatttttttaaactggggaagctgctatcctttcactatttctctaaaggttgagctgttaactaatgtaaattctggacctgcttctggtcctggcagtttatcttttgagaaacttgagtcttatctgccctgccattttcattaaatgccttctgaccttctgaatgttttgggtcccaagaatttttgacatcagatggggttgtttttattggtatccagttatgtttgcttgtctttccagatgggcccagttattagccatacatagtacattgatacacctccaccagcgggtgaggaaatgatggaaaaaggagtaagaagtggccattcgttttaatcattcctcctggatttgtcctcagtccccaactgccaagtaggatgtgtccatggataaatgtgtggggcatgactaaagtaccacgtagctgttctttatatttatttacctagaaagatctggcaaagaactcaaagaaaattgtaccatttaatcagtaaatttgtcccctggtgctagcatggtgttatagaaagtggacaggctttagagttaagtgaatctgggttcatatgttagtgttgctattcattagctctatactgttgaacaaattgcttaaactatctaattttggggttttttttccatctaaaatagggataataatatctacctcataggatta

SEQ ID NO: 3587 - DNA, 1048 bp, Homo sapiens
gtgaacatgtacattaatttattcagtaaacattcaccagatgtcactctgcagagatataaaacaaaccacggtctatgtctttgaggaatttgtactagggaaaatagacaaaaaaagaaaaggaaaaatacaatacagtgtgataaatactatgacagtggtaagcacaggatgatttggtacacagagaaggggcacctaaccaagactagggacttcaagaagttaaggaaactttctggaagtggtgactcctgggcgagggcccccacccaccacacaattcagacaagagctttgtggccctgtgcaagaaaggacctcattattctttttaccttacagaatgttgctgaggcacagtgcatcgccaaccaagttcagctcttctacgctactgatcggaaagagacctacgggttagtggagacctttaacctcagaccaaatgagttcaaatatatgtctgtcatcgctgaattggagcaaagcggacttggagcagaactgaaatgtgcccagaaccaaaataagacttagaactgtacaggttggcccttcacctagttgactcagccctcgatagtctagagcccaccccctcctcaggaactcaagagctcagcatttataatgagcagttggtaatgagttgccctatgtgcttgtcgcaagcagtcacagagatgagccctattacttgatattcaggaacaaaggtacctgaacattctgataattatctcagcatacttgaggtttccttttttaagtgttcgaggttataacaagagacagccaaggacctacaagacagttgacttgattttgcacagtgtaacagcgcagttgcattctggccactttgaccttatagctcccaaatgatgagtttgtcatctttatgaactcatgacaggataataagcttgaagacctgctgtagttagatatgggctttaatccttcccaggcaccagtcagctgaacaaaagcataagccaaacatcctgtttaaactgtagaataaccagatattcccatc

SEQ ID NO: 3588 - DNA, 1284 bp, Homo sapiens
atttatacaacattcatcatttatagtgtttttctttcctccttttcccactcctagatgagaatcactgagatagagcattgaccatatgctcatagttaatgatgcccactgtgttctctctgcacatccaggtgccaggagcagtgttgtgattactgtacactgtctgtctagtccttgctcatttcagtcacatatccttttatctggcagaggttaagttcagaatgtccccaaacagtggacacttccccctaacagtcttcattacagcacccacttattttttctctttctcttaccagctgcatagggagaaagaagtgatatcactcagctgatatctcacagtagcagtaacccacaaacctaggacacagtgaggattctacttccctattcttgaagctattcagtaccatctctcccattcttccttccacattaacccttccattcatcacattcaactgaaagccaaaattctatccaagaatatggaattgccattaactgagataggcaagattgcaggaggaataggcctaacaggaaaatcaggagctcacttttcgatgtattaaatctgagatgcctattagatatccaagtagtaggcaattagatatatgagcctggacttcatgggagaagtccaggctggagatataaatatgggagttgtcagcatacagattgtacttaaaaccataggactgaatgaagtcaccaaggaagtaagtaaaaatagagaagagacgagatctaagaactgagcgaggggtctccatccctggagagatgaagaagcatcagcaaagattaagaaggaatggccatgaggtaaaaggaaaattaagatggtagaatgccctggaagctaaaattgaatgtttcaaggaatagggactgctcaactcaccaaatctcccttgtttattagggcaaatgagattagaactgagaatttactgatttcacaaacatggaagtcactgggggccttataagagcagtttcataaaagtgtgattggagtagacttaagagaggatgggaagagaaactccgaagaatcagcatagaaactctttcaaggggcatttctataaagggaaggagagaatggggtattagctggaggtggagaagtgcgcccaagggtatcttttgtttcaaatatgagaaagaaaacatatttgtatgctgatgggaaaggtccagttgaggctgggacagtggctcatgcttgtaatcccagcattttgggaggacaaggtg

SEQ ID NO: 3589 - DNA, 1047 bp, Homo sapiens
ttaggtggattgataagtacatgagtatttattgccacatatgaatttcttaattttaaaaaaatgttttaggctgggagcagtggctcatgcctataatcccatcactttgggaggctgagggaggcagattgcttgagcccgggagttcaagaccagcctgggcaacatggcaaaaccccatctctaccaaaaaaaaaaaaaaagtagccaggcttagtggtgcacacctgcagttccagctacttgggaggctgagtgggaagatcacctgagcccagcagatcaagactgcggtgagctgtgatcatgcctgcactgcagcctggacaacagagcgagaacctgtctcaaaaaaataaaaaaatattttaaaaaccaaatatggaggaaatggaatgaatgttacaggtggttggatatagagcaaataatttcatttattcatctgtctccttgtatatctgtttttcacagtttctatgtgctctgccaagaagggaaggttatgagttttttgtaggacaatggacaggtactgaactccacttcactgcacttataaatattcaggtaggtggcttgtgcccttcctctagaggaaagaggactaccccttggtaggactagaaacccttgctgaggctcaaggacacagaatagctgcttactcccagcatttattattgtggcgcagatgaattgtcatactttttgtgttggactagttttctaggccctcctcaatacctagaaattggaaaagactccaaaacaccttctctgactacttctggttctcttttgtctcttccccagacctctagttgtatatactgcatgtgcctcacttaacaaacatgcctgagttatgatggctatctttttaacccaagctagaagccccttgaggaaagctccaagtcttaaatgtgttttattacctaagtcaacaccttccaacatgctaagtgaatagtttctgtttaatgttattttgtttgctttcttcctttatttctttatttccaataaaacaatattaac

SEQ ID NO: 3590 - DNA, 1033 bp, Homo sapiens
agtgttgggattataggcataagccactgcacccagccttttttttttttttttttttaatatatttttaagggatcaaaaattagtcttcctgatttagtgaaatcctaaactttaccatttggaaacaaaatttgcggagtagcttttcttttagtgttttaaattcagttgagactacttttaactaaatttagctgtatgtttagacgtatacattttttgtaattcatttttgacagatcttcaggatttattccgcaagactggccaggacgtggatgggaagctgacctaccaggaaatctggacctccctaggttctgctatgccagaaccagagagcttgagagcatttgattccgatggagatggaagatactcattcctggagctaagggtagctttaggtatctagcttcatcaggcatattttagaaatggactgcctaatatctatttacctaacaacaaaacaacccttacttacccatcagtcctctagtcctccaaactactgtagcagatactttgccaccttttaacttgtttgaagaagctatataaaagttatttttttaaagaagaagaccattttacttatgatgttcagaaatctatgatttcctacaaccagtaagatcttacattttaaaattgccagaaaaaaaattaaagccctctttttttctctttcctttttttgaggggaggagaccttatcttttaaagctgggaaatgtatatagagagagaataagccacttttatatttcacttaaatttgccttaaattagctgcactttatagagactcagaaaatgtcttttctttaaaagataggccttttctgtttgtaaatatttaaatgaaagaaagcattgtgcatattgtgtggaaagtaggaagaatggttttgaacaggatatgaacaaatgacttattaaaaattgctgatctggtgtaggtggcagctgaaactacatccatgtctccataaggtatccctcaaaggcccaggcgctgccaggg

SEQ ID NO: 3591 - DNA, 1061 bp, Homo sapiens
agacaagagtctcgctttttcacccaggctggagtgcaatggcactgtcttggctcactgcaacctctgcctcccaggttcaaggcattcttgagcctcagcctcccaagcagctgggattacaggcgtgcgccaccacgcccagctaatttttgtatttttagtagagatggggcttcccatgttggccaggctgatctggaactcctcacctgaggtgatccgcctgcctcagccttccaaagtgctgggattataggcatgagccactgtgagatggcgagatttctaaagattctccgtattgccattatatataaaagagtctatttttgagtgatagaaccttaatatttatatatgaaatgttatctgagatttgcttcaaattaattctgtgggagaatgaaatggctaggagtataaatgaaataagattggctatttggtaatttttgaaactgattgtatatggtgatttgtaaaataattctctcatgtttgaaatttttcattatgaaattttccattaaataaggatcgtaggctaggctcagtgactcttacctgtaactgggcacggtggtgcacacatgtagtcccaggtacttgggaggctgaggcaggagaattgcctgaacctgggaggtggaggttgcagtgagccgagattgcgccactgcattccagcctgggtgacagagcaagactaagtctcaaaacaaaacaaaacaaaaaacggattctaaagtaaatttttttttttttttttttttttagatactcgctctgtcgccctggctggagtacggtggcgtgatcttggctcactgcaacctcagcctcccaagtagctgggactacaggcacgggccaccacacctggctaatttttgtgtttttagtagagacagggttttgccatgttagccagggtggtcttgaactcctgacctcaggttagccacctgcctcggcctttcaaattgttgggattactggtatgagccactgcacctggcctaaagtaatttatatcctcagcaaatttggaaacaaac

SEQ ID NO: 3592 - DNA, 1027 bp, Homo sapiens
tgctttttgttgttgttgttgttgttgatgagacagagtcttgctctgtaacccaggctggagggcactggctcagctcactgcaacctctgccttccaggtgcaagtgattctcctgcctttatcacctgagtagctgggattgcagccgtgtgccaccatgcccggctaatttttgtggttttagtagagacagggttttaccatgttggctaggctggtcttgaactcctgacctcaggtgatccacctgcctcggcctcccaaagtgctgggatttcaggtgtgagccactgcacccagcaagagatgcattttttattgtataatgaaagtatcatatgtttgcatctatttctgaactatagtctgctccacatatctgcctgccccccaccactagttaccatttgatttaatcacccacagctttatatttcaatattccaactttaatggcttttttttttttaatggagaagatgcagcttgaggagaggaactttaaaaaataacactgaagtcctgccaaatgatccctaaaagttctgagaaagaggctgggtgtggtggctcacgcctgtaatcccagcactttgggaggctgaggtgggtggatcacgaggtcaagagatcgagaccatcctggctaacatagtgaaactccgtctctactaaaaaaaatacaaaaaattagcctggcgtagtcccagctactcgggaggctgaggcaggagaatggcgtggacccgggaggcggagcttgcagtgagctgagatacgccactgcactccagcctgggcgacagagcgaggctctgtctcaaagaaaaaaaagaaaagttctgagaaagaaagaatattagctgtttcaaatgttaaaatgcactatagaattctagtgattaatgttttaaaaacactgagtgatcaattttaggacctgagtgtgtgtaatgtcttttactgtacatttcctatgtgatttctctacacttcacttttctcacctataaaatgggagaaa

SEQ ID NO: 3593 - DNA, 1048 bp, Homo sapiens
caatgtcttttaattgatagatggaagttttaaggtattaaatctctttaatctcttcctcttaccagagtctttttactgagtcagtaaaaagtttctgtttcttttgtgtgtgcaagacaacgttcatttgaattatctcccctttctaaagtatgcttcagcatttagattatgtcttttaggtaaaaagtacataatttcagttattttcacatgaatgtcttctgtttagatatcttaccatggatgaaacacgcaaattgttacttttgttggaatctgatcccaaggtttattctctaccattggtgggaatgtaagtattacattatttatgaaaaccttatcagccaaatgttcaaatgtatatgataagcatgtgactcagttgtactataaatatttagatcattttataaagccacaaagataagtggttgtcaggttttcttattttactagtagaatcagctaaaataagattttacccaatcttttttttgagatggagtcttgctctgtgcccagactggagtgcagtggagagatctcggctcactgcaatctccatcccccaggttcaagtgattctcgtgcttcagcctcctaagtagctgggattacaggcgtgcatcaccatgcctggctaatttttgcttttttagtagagacggggttttaccatgttggccaggctcgtctcgaacccgtggcctcaagtgatttacccgcctcagcctcccaaagtgcttggattacaggtgtgaaccatcatgctcagccagattttgtccaatattaggaagaactctaacatataaaacagataaaagcttaattctatggccaggcgcagtggctcacgcctgtaatcccagcacttttggaggctgaggtgggcggatcacctgaggtcaggagttcgaggtcaggagttcaaggccagcctggataacatggtgaaaccccatttctactaaaaatacaaaaaattagccaggcatggtggtgcgtgcctgtaatcccagctacttggcaggctgag

SEQ ID NO: 3594 - DNA, 1075 bp, Homo sapiens
aattattcacataatcttttggtcacatggaataaacgagaactgaaatgctgtaaatcagaactcatttaattttatttgtgcaagatattatatatgtatatgtatcagtataaaataaactttggcgatatgggcacatttcaaagttttaaaataattatttaatattgatttctcaggctctacagtgccatatatgtagcaaagattccttggactgtggtaagctgctttccctaagagttcatatcacttccagggagagtttggacagtgtggaatttgacttgcattgggcagcagtaactctagcaaataactttaaatgcacacctgtgaagcccatccccattattccaacagctctggcaagaaacttgagcagtaatctgaatatttctcaagttcaagggacttataaatatgggtaagtaaaagatacattaatctaaatgttagttgcattagtatattttcagaatgtccatgtaatgtgaaagaattgtccagtcaatttatatgccagagatatggtggcttggttaataaccagggaaagtaaaaaatgaaatggtttattttcgttgaatatgaaattttctttaagttgtgccaccacctacaaaaaattggtggtagggcctggcgcagtggctcacacctgtaatcccagtactttgggaggcctaggcgggcagatcacctgaggtcaggagttgcagatcagtctggccaacatggtgaaaccccatctctactaaaaatataaaaattagctgagcgtggtggtgcatgcctgtagtcccagttactcgggaggttgaggcaggaggatcacttgaacctgggaggtggaggttgcaatgagctgagatcgcaccacagcactctagcctgggcaacagagactccgtttcaaaaaaaaaaaaaagacaaaactgagtggccataaagtataatgtctggataactcagttctttttttgagatggtgtcttgttctgtcacccagactggagtgcagtggtgggatcttggctcactgtaacctccacctccctggttcaagtga

SEQ ID NO: 3595 - DNA, 1053 bp, Homo sapiens
aatcaaaatttacttacaaaaacaggagacctacctgctgaggttcataaagttaacaaaatgcctggagaacaactatagtttcagtgtctgtttattgccattctagtttccaagtggccctccgtatcccctgcctttgaccctgggatttcctgacaatgatctttctgtacatttttaaaaatgtgtgttataatttagacagcattttatggcaggaggtttttttaagatatgaggtctaccatattcataaaagacttgttgtttttcagaaatccaaagcttgtggtgactgagaagaccatccgacttgcttatcgtcatgctaagcagaataaaaaaaattcgtcatgctttttacttggttctctgacagcagacgaaggtaatacacttttaaaaatggaccagtgctcacgcctgtaatcccagcacgttgggaggctggagtgggaggatcacttgaacctaggagtttaagaccagcttgcataacatagtaagactccatcagtacaagaaaacatttttttaaattacttgtatgactgcaatagaatttattgattcggccaactattgtatttgctttgcgctaattttctttgctgtgtaccaaggatatgaagatgagtaaaactattaattacagagttcactgtctggtcagatggatcaatatatataagcaagtaagactttagtatacgcttataagagtttagtttactgtaagagtttagtttagtatttaagagtttagtgtactattggtatgaacaaagtgctttgctataatgtagtcttgcttggttgattttatgtttttaattagtatgctgtataatagctgttatttttgttctacagatgaagaaggtgtaacattgacagtagatcgctttgatcctggtcgagaagtacctgaatgcctagaaataacccctactgcttctcttcctggggactttttgattccatgcaaagttcatactcaagaactttgttcaagagaaatgatagttcacagtgtagatgacttcagtt

SEQ ID NO: 3596 - DNA, 1088 bp, Homo sapiens
gggcttccgggggagacatcacacgttggtaggattcgtgatgccccacaagccacaaaaaccagcaagtttttattagggagtttcaaaaggggagggagtgtgcgaataggtgtgggtgacagacatcaagtacttaacagggtaatagaatatcacaaggcaagtggaggcagggcgagatcacaggaccacaggactgaggcgaaattaaaattgctaatgaggttttgggcaccactgtcattgataacatcttatcaggagacagggttttcagatcaaccggtctgactacaatttattaggtgggaatttcctcttcctaataagcctgggagcgctatgggagactggagtttatttcacctctgcaatctcgaccataagagacaggtacgccccgggggggccagttcagagacctacccctaggtgcgcattttctttctcagggacattccatgctgagaaaaagaattcagtgatatttctcccatttgcttttgaaagaagagaaatatggctctgttctgcctggctcaccggcggtcagagtttaaggttatctctcttattccctgaacaattgctgttatcctgttcttttttcaggtgcccacatttcatattgctcaaacacacatgctgtacaatttgtgtagttaacgcaattattacagggtcctgagacgatatacatccttctcggctgacaggattaagagattaaagcaaagacaggcataggaaatcacaagggtattgattggggaagtgataagtgtccatgaaatctttacaatttatgtttagagattgcagtaaagacaggcataagaaattacaaaagtattaatttggggaactaataaatgtccataaaatcttcacaatccacgtccttcagtcatggcttcggccggtccctccatttggggtccctgacttcccgcaacaagacagagtctcactctgtcactcaggctggagtgcagtggtgcggtctcagctcactgcaacctcaactgattcaagcaattctcatgcctcagcctcctgagtaactgggattacaggcgtgtgcc

SEQ ID NO: 3597 - DNA, 1051 bp, Homo sapiens
tatccatcttttcacccaaatgaataaaggaataaaacacaaatagcgcattttaagacacttctgtttaatgaagaaaaaattggcactttttatactttgtagagttacagttatccatgtgaatactgttatccatgacaaccaagtactaaggaagggttttaggatttaaagcctgcattctgtggaagctgcattaaaccttttaagtccagatatttctaagaaggactgtttagtcacctttttttttttttgagacggagtctcgctctgttgcccaggctggagggcagtgacgaaatctccactcgctgcaagctccgcctcccgggttcactacaggtgcccgccaccacaccccactaattttttgtatttttagtagagacggggtttcatcgtgttagccaggatggtctcgatctcctgacctcgtgatccacccacctcggcctcccaaagtgctgggattacaggcgtgagctaccgtgtccggcctagtcaattttattagaagcacgtttttctctgtcttgaacaaggtataagagcattttcaataggattttcagcctctgactttatctaaaaagtctcttctaaataatctctgcatctggattaataatccttttctcctttatcttgcttcacacagagtgagacagaggctcattctcttgcccaggctggagtgcagtgggatgatatcagctcactgcaacctcccctcccaggttcaagtgattctcctgtcccagcctcctgactagctgggattacaggtgtgcaccaccatgcccagctaatttttgtatttttagtagagacggggtttcaccatgttgacccggctggtctcgaactcctcacctcaggtgatccacccacctcggcctcccaaagtggtgggattacaggaatgagctcccacacctggccttagacagtttctttttcctagaattgatacagaatgtgcaggacctaaggaactctaaggcttgaaagaatataggacatactgaactctaaagaaaggact

SEQ ID NO: 3598 - DNA, 1037 bp, Homo sapiens
ccccttgagaggcggcagcggggccctgggaaggttggtgggtaacattcaaagccctgtagtgggttccgccctccaggagcctggagcagatgacgagaaggggagctagtgggagaaattaagcagtccatgaaatccttgggtatcatctgagctaaggtatgtgaaagaggtttgcagtcgataacgtgccatttaaagttgtttttacggtgggaatttcttgaggactgaaaccttgaatgctcgctcttgcattcctcacaatttctggctcacactctgctacgtagtaagggatcagttaatgtttgaagttcatggactactggaagtaaagtgtaaacagcaaagtgcgagaatgctatgcgtgtgagtacagacagtatagtaccatcgccacggtgtctgggagaaggtttcacagaggaagtgacattcgagttggattgtgagggatggcgggggtttactagggcattccaagttaagggaggcatcctgtgcagatattgaaaccggggcactgcaagtagttcagtttgactggaatgtaggatgagtggatgggggggttaaggttggaataatagagtggggctggattgtgaagatcctttattctgtatgtaaagaagagccatcggctttttaaaaaaaatttatttttatgtttatttttgagacgcagtttcactctttggcccaggctggagtgaagtggagtgatctcggctcactgcaacctccgtcccccgggttcaagcgattctcctgcctcagcctccctagtagctgggattacaggcaaacgccaccacgctcggctgatttttgtatttttagtagagacggggtttcaccatgttggtcgggctggtctggaaatcctgacttcaggtgatccacccgcctcggcctcccaaaatgctgggattacaagcgtgagccaccgcccctgacatgagccattgacttttaaagcaggagaataatttgatcagatttatatggaaacactcttctagcagcat

SEQ ID NO: 3599 - DNA, 1022 bp, Homo sapiens
ggttgttgagaccaaggcgagctgcggagcctgtgggctgttgttcgtgggaagagggttgcgacctcaggagagaccgaaaacagcgccacttgaaacccgccggtcctgaagatcacagagttcccggagtggtagggaaggctccacgctcttgagagcagaggcggccaggggcagtgggggacgcttccaggtatgtgggaaggagaacttcatgtctaagtgcgctcttgtgggtttctcggccagctgggccgagcctctctttctctgtcctcatgtgtctgtcctctggacaacagtggctctgtatggcggattgcgaccctgagtgacgggcgcctgtcttgcatcctgtgtcctgtgtcctcccctccagacctcatgcttggtgtccacagagtggacccaggactgcctggaaggcttatcatccaggcccgcgacttccccccagagtctgaagccttgcgacctggtcggggacgacaaacctgctcggggtcaacagcgagaccctagtggggaatgaggatgggtgagggtgcgcctgggttgagggtctgtgactgtagcatggaaaaggagttcatgcagggatcgcactgagggacagccaagaatactccagcggcagcctccctcctaccaattacacgccgcctgctggcacagtggcacctcgggaacaggacgcccttccgggccctgaattggggcagcgcaggagggagggtgcagagccatagcgacctgtgtgtaccatagacatgcacatgcgctcaccttcacgtgtaacccttctgagtcccagacagggtaactggcgaggccgtaagtaccctcgtgggggcggaaatattgccgcgtccctgagtcctctgggcagatgcagagccgcgtaagcctcatagaagcaaagccaggggaacagtgggagctctggcctcgcggtgcggacgctagtaatggattcctggggaacagcgacctctggaggagcctctcatccacacaga

SEQ ID NO: 3600 - DNA, 1040 bp, Homo sapiens
tcctgacctttactcatgctgctttcactgcctgtaattctcttaccatgaatcctgtctgttgaaatcttatcctcgtaggcccaacagatgttcctgaatccatcattccctctccgggactcacatcactttatgcttttttctcctgtgaagaatttagttcattctgccttacccttggagcagagcgtctgcccatctcttgggtttgccagagagtaagcactgtaccttagcacacctgagtcccaggcactcaggccagagcctggcccaaaagatgttcattgagatcatagggattggagttggagggctaacggcatctgggcaatgagagaaacacatcacattgatgtgatcagaggacacagaaaagatgaacttctcccgcctccaagctgggctgccagccagccctggatgggccccaactcatatggacctcgtataagaaggtggcccccaagagccaccctccctccccaactctgggcaggcatggacacacacgactcttgtgggctccgggagaaaaaggcctattcaaagggtggcctataaaacctcttagcttgcactcagaggcttatatcactttttaaagtgtggtcagcacggtgttattgcactggggctgcaggggacggtgacatgatttacttgagtaattaactggttgctgcacccaaactctaagcaaacacagtgcacttggctgaaattacctgcttccgagctccagcttttccttgtggggttcaaagacattccaggagttagggctaaagtcagcttctattggggctttcttccacatgttacgggcctggggctgggtgcccatcgagagaggctccacagccctggccattccatttccaaaaagatctattctgaattggcatcttgggaggggataaactaccccatgtttggtttcctcttcttttcaggctccacaccccactcatctgccttctcctgcaagggagtcctgttgtcagcaggctttgactgagttggcaacttcttaa

SEQ ID NO: 3601 - DNA, 1112 bp, Homo sapiens
cacttgctcggttcctgccaactcatggctttagcactctctcctgaagtcgtgtgagagcaagtgggccctgccttaggaaccctaaacccaaacggggagagagagtattgtgggctggccaggtcctgcctctccagcccaatcttccaacagtccctccaacaacaatctgccaacagcaccctcttctgacctcctcccccacaccccctcagtctggcaggtgagttctctgggaagccgactctgaggtggtttccatgtatatttattagggaggtccttgggggtgggtggagaaaacaaatggagcagagggagaagtcaagctgagatgcaggcccaagcactttccacagggaaacttggatctgaaatagctggctgggcctttgcatacctgcctttattcctcattgaattgactctcattggatatgggtcgtgcattgaagggcccaactttgagcaaagaggctctgcaactggggcaaaagagactgacagtgcaaggctgcactctgacagcactgacagcagctggggcaacaagtccttcattaacatgggacctgggggctgcatcgccctgtccaccacaaccagggctcattatcatttccaagggcttcccttggaatgctgtatctacccaccacacacaccaccaccaccaccactattgcacaaacacacaaaacttaccaaaatcctttttcttcttcaaaatgttctaatagtacctcctccagaaagccttccatggtttccccaactttgaatgattgcatctctcactgctcccaagattcatgggcagagtgccacgtaggcagatatcctcttatcagacagcagttttctagaggtggcattgtatgtaatggagtgggccacagcagtgtccaagtggccttgcagggccttgtttcaggggaccaaagcaccagaaggggctaaaccagaagcgctcgcaggtccttcttgccttactgatctgtgattctctaggtcccactctgggtggcccactcctccaggtgtgcatgagcaccttagagaacagggcctgggccttctccatgtctgtaggaggttgttgagggcac

SEQ ID NO: 3602 - DNA, 1906 bp, Homo sapiens
atgctgcatggacttgtttgtgggtggatcttgtttttaacctacttcttgaacctgggaactaggatgtatactgaacctgcatccttcagctgaatacacagtcagcgcttagcaaagactataggatgagctctctaaagcaaggcaggaagggtgtgctggagaggaagggagtagggctgagtagttggcaccagtctgtggtgctgcatgccccagggaattcctcttggcctccttcctctaaaaaatgtttggaaactatgccctatcctcaaccctccccattctctccaacccctctgtacccacaactattgggtagtaatgcctgcccttctcaacaggaagagggcctgccgccagatcttatcccacagcatgggaggatctggaggtggtctaggtggatgccaagggaggggttttaaaaggacagagtgcttggcacagccaggaccaacagtcctgcaaagtgggagagccttggcagatcaagtagggttgaagcacaagcactcattcctggagcaagagcctctgggatgctttcctcctccccagatgctgggaacacctcatccccaggagcccccaggagccatgacttggcccgggcagatctacagtgcaatagaacgcactattggagccgtgctgctgtatgtatgagattttacttccccagtcttatccttgggcctcggtgccttttcctctgtgacatggtaagaagttgagagggcagggacccagcctcttcttctttttatttttgagaaggaatgattcctttttattattcgtagataacatatgatttacctaaaatatcaaaaacgaattataagaataaacaagtgactttagcaaagtcacttgatactgtgtccacatgtaaaagtcaattagatttctacgtatcaaaaacaaatagagcataacatttaaatgattataacatttgcatcacacttatatgaatgacacagggaaaagttgaacagaagaggtataattcttctatcctagaactacaaaatgtattgaaagaaaataaagatataaataaaggaagatatataccagcctcttctttaatccctctcctcctgcaccatggcagcttagacttttcagacatttctttcttgtctctgtaagaaaggataatgatacttgtaaatggatgtaagaattcaacaaaataatgcttgtaaactgcttagcctatgcttggcatgtagtaagtgctcagagaaagaaaagctccatctcttgaactctgagagaaacacttactccttaggacaaactgtgtcctctgagatctaatttaaaccaaaccagagcatgaggctccagcatcttcagcactgtgtgaaatggagataatagaaactacctcactgagtagcttagtgaggattaaatgaaagaaagtatataaaacagaacttgctaagtgattagttctcagtaaatgttacttgctgttgctattacactgcagagattttttttcccatttctttggaggtcagttcttgaatctcgtgaagtaaaatcttaatcggaattattttcagtataaaataaaaaaaatcttctttcatatccttgttctttgctttcttttttcaatttaattccttaatactttttgaattctttgtttatgaaggataaaaggctctgagaagtgctaatatgtttttaaagtctattttctataagatcctcatgaaactgtgtaaggacaccagaggatgggatagggatgttttgagggagagtaacaagaaggactggaagtcaaactaatcaaactggaatcatgagagtttctatcctaccttaggaggtagagaaggtgagatctctggactgagtttcaaaaagg

SEQ ID NO: 3603 - DNA, 1032 bp, Homo sapiens
agaagctctattttaatgaagcaagagacaaaacagcctgttgcaatacagtgacgacgggtgcgaacacatgtggtgtaaggcttaaattttgggttggaatcttctgaatttaagtccagctccattatttggcagttgtttgaccttaagcaactcccttaacctctctgagcttttgttccctagtctgtcaaatgtggataaggatagtgcctttctcccagggatgaggtgaaaaatagataaggtacatggtgcctggcaaagaggaagccctcagtaaatagtaggtgtaattatgattatggtgtgccatgctagaagagatttacagggagtagagactacttgtctacctgcgggtgggaggctgtgggtgtcagagcaggcttcttgcaggatgccaaagctgcctcctgaggcatgagtaggaattttccaggtggataaagagagggcattagcagggttggacagtgtttttcggaggcccctttcactgtgactgtatcacctgctgcttccaactcggactctgccttgcattttgagaggaagggagtaggctcttttgagtaccatcttgaaggttctccaggactcaggagatgccctgttggggctctgatgggaattccaggtcaccagatgcctcctgttacatctccactctaagccctgtgtctggccttggatcctcctcccttgtaaatgtggccgatgacgaaacagagacatcagtcccatttgtggctccatcagctttggaagcagatcacgggaattttctgagtctgggcccccagccagaaggcatttataatcagacatggagcaatcattagagcagaaacaataaattacaacagcaccaagagaactccccaaagctgctcacgcgaggggagatccaaggagcagaatgctagcaggctctgggcccgcctgcccctcccgctggcagccaaggcctcctgcctcaccacactcagcctctgcccccagacgtctgtgagtgatgcagcagca

SEQ ID NO: 3604 - DNA, 1050 bp, Homo sapiens
ccccgcatcagtgcctttgggggttcattttctactccaagaattgtagcccccttttttctatctaatgagtgtttgttctcaacctccaaatctcctctgagatgttccctcccgggaagtttgcccaggacagagctggctatttcctccttggtgttctggaatcagcctgcttatcacatcttctactgtggtagccatgtccgtgagctgcttacatctgccttcgggaagagtctgctgccagggagtagagagaagtggcagacttccagctaacagtcaagcctgaccatttctgcccaaactcctgtatggacaatttttgcaccggagcttcttgttgggcaggctgagaaatgtgtagaggggcttcagtctgcagcacttcctacctgatccttcttccttcctccacctgctcttttcaccatgtctggcctgcactacagtcaactttttccttgcctacttgtgcttcttctgtcctttgcctttcgtaagcattactcccagtgagttgcttgcacctctgactctgtcttggcttctgttccctgagacacttcctaatggttatttcttttttcccattggtctttacttcattctccactggctctgaattcatacatttatttattcattcaacaaatatttcttgagaaccaccatccagagttcccaccattcacagctcagtgccaaggttgctctcttttcataggacctagctggatccaactcttctgccattccccctgctccctctctccacacccctgagaatttcatgttctgtggcccctccattcctgggctcatgcactcccgtgtcctgcagcatcatcctttattccccaggtagcttcctcctttaaggctttgccaagcctcaggtctgggaagcctcccttgatggcccctggccctggttattgctcatgacagtgcatagcatatattaggttgcagaaatgattagttgagtgtctggctgaatctcagatgactattgtcagcattgattagaagacataatgtgtg

SEQ ID NO: 3605 - DNA, 1042 bp, Homo sapiens
aaggtgggaagaacataagctttgaaccaggcttcaaaccacagctcttgcttttgagaataatgtgactttagacaggctacttccctcttctaagcctaaactttctcatccttaaaatgcttaaagctggcataacagggttgcaacaaaggtttggtgttcatatgagtaaaatgcatggaaaagaccaggagctcaataaagggtaggtacctattattattatttctctttacctccatatggaaaaaaaaaaaacctagtcttacttgtcttttttcatcaccttgagctattgtgtgtagcacaattgagtctctgaagcaaactgaattagcaaaactagtaacacagatgaaaaagactacaaagaatagtgaaaggacaaaatataaaattttgagagggtagaggagggaacacttcctaactcacttcccagctttataaggccaggactatcctgataccaaaacaaggccaagaaattataagagaactatagaccaaaaccccttgtgtcattaaattgatgcaaaaactctcaacaaaattattagtcattcaaatccagcaaaatataaaaaggataatacaatatgacccaggaattatcctgggaatacaaggctggtttaatgttcaaaaatcaatcaatgtaatttcttaaatcagtagactaaagaagaaaaacccatatgatcatctcattagatgcagaaaaggcctttgacaaaattcaatattgctcatgataaaaactctcagtaaactaggactagaagagaactttatctgataaagaacatttacaaaaaacctacaagcaatatcatatataatggtgaaaataaaatactttcccctaagatcagagacaaagcaaattacatatctgataaagaacttgtctttagaatatataaagaatgctcaaaactaaatgataagaaaacaaatacaattttttaaataagcaaaagatttgaacacttctcaaaagaagatatatgaatggcaagtaagtaccataataaaa

SEQ ID NO: 3606 - DNA, 1028 bp, Homo sapiens
ttgtaccttttgcaaagccattttgcttattggcctttagctggtctgtctgctccccctaaaggacatccctggcaagccatcactcaggatatgccctcaggataacagcacctttgcctacatgcccaagtctctctatccccactgtcccagagcctattagcactattttggaatctttgaccctaagattttacggcctgcgtcattagaatttcagaccttttgacctcaagattccaaagcccacggccccccaaattccagaatttttgttgccacagatttaagagtccatgtcaccaaaagtctcagagccttttggggtacttatctggcttcattcagattcatgacacctgggctgctctgtgcttgactttctgtcttaaggagtactggactaggaatcaggtctaggcctggagcttctgataggttgtgtatagtcaccagcaggggctttaccctctgagcctcggtttcctcacctataaagtgcgggtaatcaccctgtgagctgcgggagataatgtgttggaaggcaagtgctctgcagatgtgagctattcctgtgttagtgcatgtcagctctgctcagcatcagcgtcatgacactggaaaatctagctgcatgacctccttgttttggcttttattcactctatgggccatggccatcctttgctgtttaccaagatttttaactcaattgacgcccgaactcctccaaccatgtcttctggtcttggctgcttgacctctttcctgtacactttctaggagtgcccaagtcataattaatctcttccttgccttcagcctctctgtttatgcctcagttgtggcactctgcaaagctgctttgtatgagttatatattgtatgtgttaatgacgccattatgctaattacctcctgccccatcactcctgggtgtttggtgcctaacagtgttgaccaaccttgggtgaggtccttggcctttctgaatcttaatttccttgctgttaacgtgggagaaa

SEQ ID NO: 3607 - DNA, 1044 bp, Homo sapiens
gacacatgtgagtccaggagtgggtgacaggtgctgagacagagggagaggtgtgctcgaggccttcgagtgtcagggaaggagtcctggaggattaggaactgccatacaaagagcagaaagggtgtcttagatacagagaacagcagtcagcagatgggactggaggcctgaagtagcctggcattcttctgtttgtggccattgtgggcttggctgccctctgcaccttatctaaaggccaccagatgtctgctcagggtcttagtggagcccagctatcagaatgggcagcagaggctgtaagaagggctagatgagcagaggcaggagggagcaagggaggattcctggaggagatgtacctggggcctcaatgaaggagcacatttggacaggtaggaaggaaagcaggataggagctcaacaggagcaaagaaccaggggcaggatgggaacctgacatggagggggcctcagactgtaggtgccttggagtgtggcacatggcataatgcctggctcctttaggtgaggctgtagcttacttctcccaactgcagtgagtgccagggaggaagctttgggtcagaagaaggcttctgcaatagaagtcgctgctccctcttcagggcactgagggtgctgagcgatgcaggggtcagaactcccagctcctatgggatcaggcaatgcctttgactgctttatgcctcagtttgaccatctagaaaaaaaggacacgggagggaacctctggcattctgtgattatctcactttgtgacattgagcggggcacatcacttttgggacttgttccctagtatataaagtggggagaagcatgggccactgctgtcacctcactgagagtttcagaggactgtgcagatggtctctccagaccaagcctctggaccaaggtgaggggtcagaggacaccgggctactagggactgctcagcctgcttccctgcagccaggcccccatcttttcctctgctgccccaccctctctaccttgggtatgagatggcacagc

SEQ ID NO: 3608 - DNA, 1681 bp, Homo sapiens
tattacctcccagaggccccatctcctaataccatcacattgtgggttagaatttcagcacatgaatttgagtcaggaggctaaggggacacaaacattcagtacataacagtgctgaaaaactagttgttgaatgagtgaatgattggaaagtaggtggatactgctgcctggagggactctcaggccagaatgaggaattcagtggctcccatgggtagtgggggaccactgctggatataacctgtgtgcaagaaaactggaagaaaccagatcccgaagaaagacttgaatttctagccagtatttaatttattgtaataataatgatactgctaataataacaataatttttataactacttaattagcattatttttgccagaaagtctcagttagttgcatgcttggccctgtctttgtgtgattagaggttgtggacttatcttgaggttttgctgttttctttcctggttggtctctgctgatagtccatctcactgttggctctttcatctgtttgtgctccatgagataccacaaaagcacaatctttgataaggcaaatatgtcaaatccttattataacatttaatcacttagggaggtttcatctggggtgagagtgggaggggtggtgggaatggaaagaaaaggccagattgctttaactgaatttttctttctgggtgaatgggaagtctttggtggaaacctcattgtttgaggctgtatccaggaaagagtaagaaaagcaattgaggaggttctggagtcttggtcaggagcatatattgagtacctattgtgggtgtggcattaggctgcgtgctgtcagggaaggcaggaagaacacacctgtcctcctgttaaggtgtggtatctgagtgtagggagttagggctgggcaggcctacctggcacaaggtagacctggataaattctcattgattggttgggcctttacctgtttggtaattaattgttttaagaattcagattggcgagagagatcatttccaaggagataagcctttctccacttataactatacccaaggctggctttccacgggttttcccatttattgcaaggtttctcatgtattgagagagctgacattcagaaggttaagagctacattcataccaccaggatagcagggacatgtctgtttggtttacaaaactggctcagggtctggcatgatattcctatatatagtagattgttagcttatgtgcactgaatgaatgaagtattgggggagtatactgtgtctaagtctctcagaaagtaggatgtgtacctatgatacaagccaggccttccatttccaagcctgatttcttttaccgtgctatcaaatttcattaggcagagatggtgtgttagattagattattgttcaaacatattcactctctgcctcttccttcccccagcctccagtgatgtagagtttgacgatgtcacttgctttggctttctggtgggctaagtgtacttcttgcttcttgactttgggctctgtcttgtcacttgctttggccagtgagacgctagcagacatgcgccaccagagccttagatgtgcttgctttagttgagctcatcctctcgtgcctctgccatcaccatgagaagggaatcttccatgtagctgctgcctcttc

SEQ ID NO: 3609 - DNA, 1049 bp, Homo sapiens
accactacagaacccgcatggtgaggcctgctggtggtcttggaggtaatttaatattctgcttccatcagtagttttgtggggaggctttttgatggaggtggctttgagagacaccttgcaggtgggataggatttgggcccctggagatgaggtggaaaggaagcagacttacacggaagtgccaggatgggaaaatgcagagggaatgcagaacaagcctttctacactccctccactggctttattcttcctgtttcctatccagcccctaagagagccattgctatttggtgcctgttatatgctaggcctctggtttatcacagtaaatttctaaaacaatcctgaaaggtaagcatttttccctcattttgaggacactgaggctaagtactttgttcaaaatgatggagccaggatttctacttggatcttttgataccttaaggaagaaactggactggagttggaaatccagctcctccactttggctagatggctgaacatctgtttccatatctgaaaaaatggtgctcacaacagtatttacctcctggggttgttgtgaggcataaatgagataatgcatataaaccacacagctgagtggctggcacacagtaagagttaatgaatgttaactgtggtggcttaagtaatggtcattttcattattattattggcccattttcacaatgtctgtcttgaagtgaagcccattctgtacaaaagatggctcttggtcctttggtctctcacacactgagcatcatccagtgcagggatgggttgttggttggtctgatgggaactatgtggttggaccacccagagcatggccatttatttttctgaccatctgcagtgtgtaatgtctgactgtattcattctggcttgccttcactgtggtctcccactactctctggagttgggacacaccaaaaggagggagtgaaaggtttaggctggagtccccagcttgaggcccagctctgccctgggttagatctgtgacctggggttcctgcctctcagcatcc

SEQ ID NO: 3610 - DNA, 1057 bp, Homo sapiens
catgctttctttactattcctttgcacccttcatcccagcctctctttgctttcacttagactgaccctgacacctattaggctcagcaaattacctgggctgtactgccgcaaggcttcacagacagcccccattacttcagtcaagcccaaatttcatcctcatctgttacctatctcggcataattatcattaaaacacaagggctctccctgctgatcatgtctgattaatctcccaaacctcaattccttacaaaacaacaactcctttccttcctaggcatggttaatgcagtcagaattcttacacaagagccaggaccgcaccctgtcgcctttctgtccaaacaacttgaccttactgttttagcctagccctcatgtctccatgcagtggctgctgccaccctaatacttttagaggccctcaatatcacaaactatgctcaactcactctttacatttctcgtaacttccaaaatctattttcttcctcatacctgacgcatgtactttctgctccctggctccttcagctgtactcactctttgttaagtcccacaattaccatttttcctggcccagacttcaatccggcctcccacattattcctgataccacacctgacctccatgactgtatctctctgatccacctgacattcaccccatttccccatatttccttctttcctgttcctcaccctgatcacgcttgatttattgatggcagttccaccaggcctaatcgccacacaccagcaaaggcaggctatgctatagtacaagccactagcctgcttctcagaacctctcatttcctttccatcgtggaaatctatcctatcaaggaaataacttctcagtgttccatctgctattctactactccgcagggattattcaggccccctcccttccctacacatcaagctcaaggatttgcccccaccaaggactggcaaattggctttactcaacatgctccaagtcagaaaactaaaatacctcttagtctaggtagacactttcactggataggtacaggcctt

SEQ ID NO: 3611 - DNA, 1024 bp, Homo sapiens
tcaaatatgagcaattcctgctctacaccaggtgctctaccccaggcttgtgctaggtgctggaatacagacctgaaacacacctgggccctgtcctcatggattttacagactgaggcaaatgaggctggacagggaggcaggcacttgagaacaagtcttcaaaggtcaggctgaggagtcgtagcttaaagaacaaaaaccctgtaggcaatggagagtcactgcagactttaagcagcagatagactgtaagtgccaggatcttcaaagttctcttggagtgaattgaaaggggtccagcctggaggatgttgtaaaagtgaagccaaaaataatgggcacctgaggaaatgggtaaaggaggtgaaatcaggacaccatgactgactgaaagagccaggtgagggacatgggagaggctaatatggctccagggttcctgccttgggtgaccagacatgtagtggtgcctttcccaggaatagagaacacaggacaaggagtgggtattagtgctggtgaaagaagggatagagatagagagaaagagatagagaaagagagagagagagagagagagagaacatgtacacacacaaatatgatgatgtgcttcaggagtctgcaggtcctccaagtggagatgttcaggtgaggagaaatgaaacttttacttccttggatggccctggtggctttctctcttctcctttttggtggctcagtaaactaaaacacagcagttctctgccttatatcagtgatgttggactcaccactgcctgagctctaaggcagctttctggtgcatgttgagctgggtatcccttatcctgctcccaacttcttactttccactgtgctgggcccaagcatgcatctctctgggatcatgagagcctgggaagcttccttgcttgtaagtatctctcaataaaccttacctaatacttctaatgggtgtcacaaatagcatatggactgtgtctctttatgtcaccagggtacagttggattttgg

SEQ ID NO: 3612 - DNA, 1005 bp, Homo sapiens
ctgcaggatggtctgactcacgcgagtggttttgagataagttgtgttatacctcaagttaggtaaagtcgagagatgaactaacttaaaaagtagtgatgtttacatagaatctaaattggaaaagacaataatatcagcattagaaagtttgcctttaagtaaaaaaaattattagccataataggttttacattcttcgtaatagaatatcctaaagcaataaaacctccactatgtgaactctaagttctgaacatccgaatttttcaaatagttctgagttatatttaatttgttctttactgactagaacacttcctaatttatcacatcatttttaacctcctcaaacatactgaatatattttttccaggtttattgaggtataattgacaaacaaaaattgtgtatgtaaggtgtacaatgtgatgttttgatatgtgaatacatttgatgattctggcttcccaatatgaagatcacttattgtgtcagccagcataaaacgtaggactgttgagatagagtagaatcatttatgtctgcaatgactgcctccatgctaatatgtctcaattttgttttgtttttagaatttatattttcacatttgctgcatatgatgcagagtaggcttggggaccaggttaccaatttgatatgattgcataaaacaagaatgaaaatgttctgtgtcagggccttttaagtattggtgttatgtcatcagctttgactattataagaattttgtgcttgcttcctgctccatttagatgcatgaacttggtgcatttaaagagtatgtcagtgtagatgtcaacagtctatctccccaaatccaatttaatatgtaaggataaaattacattgattaaatgttctaattttatatacattttaatataacagaaacataaaagcatgtagactacatttagatttctttatatgatgatttactatatcatataccatccactcccagacagattagaatg

SEQ ID NO: 3613 - DNA, 1070 bp, Homo sapiens
agatcagatagttgtagatacgtggcgttatttctgagggctctgttctgttccattgatatatatctctgttttggtaccagtaccatgctgttttggttactgtaaccttgtagtatagtttgaagtcaggtagtgtgatgcctccagctttgctcttttggcttaggattgacttggtgatgcaggctcttttttggttccttatgaactttaagtagttttttccaattctatgaagaaagtcattggtagcttgatggggatggcattgaatctataaattaccttgggcagtatggccattttcacgatattgattcttcctacccatgagcatggaatgttcttccatttgtttgtatcctcttttatttcattgagcagtggtttgtagttctccttgaagaggtccttcacgtcccttgtaagttggattcctaggtattttattctctttgaagcaattgtgaatgggagttcactcatgatttggctctctgtttgtctgttattggtgtataagaatacttgtgattcttgtacattgattttgtatcctgagactttgctgaaattgcttatcagcttaaggagattttgggctgagacgatggcgttttctagatatataatcatgtcatctgcaaacagggacaatttgacttcctcttttcctaattgaataccctttatttccttctcctgcctaattgccctggccagaacttccaacactatgttgaataggagtggtgagagagggcatccctgtcttgtgccagttttcaaagggaatgcttccagtttttgcccattcagtatgatattggctgtgggtttgtcatagatagctcttattattttgagatacatcccatcaatacttaatttattgagattttttagcatgaaaggttgttgaattttgtcaaaggccttttctgcatctattgagataatcatgtggtgtttgtctttggttctgtttatatgctggattatgtttattgatttgtgtatattgaaccagccttgcatcccagggatgaagcccacttgatcatggt

SEQ ID NO: 3614 - DNA, 1067 bp, Homo sapiens
caggcaatctgcaagacattgagtgataacccagagataaacagaaacacagttctcaatcaaagtttgtgtgtgtatatgggggttggggagagactggcatttacttgagggataataattgaaattacttgatattctttctagctgtcttggatagcataagccttagaaattccacttactaaggtttgtgaagtaagaaggaaataagctaacacagaacagatatcagctgatatactgttctctaaaagttaataaagttacttaacattacttaacagtaacttagcattactctcattaccaaggtacttctgcttttgaggggaaaaacatataagatattcaagaaggaagtattaccaacaagatggtagagtaggagaccctggccctcaaccccacaaacaacaatctgatagacatccaggaatggaaatagctgtgggagggctttggagtccagataagaagctgcggcagcatagtagagcaaaaaagcaaagcaaaaccaaaccaaaacaacaacaacaaaaacaagaataaccacacagaatgggtatgaagaagtctcattttatctttatgccatccgtcaggctggcacagctcattaccaaatgttaccctcaggtgaaaatgagagcagggtgagtgtccagcctcttcacaatttgtgggtactgcccaaaagatccacattggttttatcccactcaaatcccggggaagactggcatagctgagatatctggaagcagctaggaataaagaaggacagagggcattgtgtcagccacgtggcaggggataccatggttcatagcggcctggtcttcagatgaccccagcacccttctccactgaagacctcccagctggcttggaattcccatggctttcaccgcagatggccttctggctttctccttcatggaccccagctgactaggctatttttacctccagtggagctgccccagccagcgcctctgtgggcacccaaaccctgggaaccagtgcagtcactgcatgcatgcctgcagttggcactgacccac

SEQ ID NO: 3615 - DNA, 1054 bp, Homo sapiens
tagtttttgaagtaaaagctttgggttattgatttgaggtcttcttttttcatgtaggtgtttatagccatgttcctctagaagcactgcctcattttcattattaagttttatatgttttgttatattttaaatttctcttgaagcattttctagtgtcccttgtgctgttttatttggcctactgatcatttagtagtatattgtttgatttctacatatttattaattacccaaattttcttctgctattattctctaatttcatgttattgtggccaggtaacatattttgtatgatttcagttctttcaaatttattgaaacttgttttatagcctaacattcttcaagaatttttcatatgcacttgaaaagaatatgtattttgctatcgttgggtggaatgttctatagatgttgttaggtctggttgatttatattgttgtttaggtcttccatttactggttgatcttctgcctgattgttctgttcattgttgaaaaatcaaatattgctgtcttcgaactgtacacacatcctgttggttctgttttctctagagaatcctgacaaatacagcatgagagtaaaaaactccttggggccagagtcctagggggctctcacaagttcatacactttatctctagaaactcaagcaaatgcttcaacatgaaaaacagctaaatattggtagggacagtaagttttatggcattttaacttgaccgagtcccatctcctgctctctagctgcatagtaggcttgataaccaacatgtcacaatctcagtgaaaaccaaaattttggcaggcactgttagaggtaaaataaagttaggatttcttcaaagaccattcccagagaattgtaattacttgacttgctggagattgcctggaagaccccactttgagtgagagctttcccagtgcaaaatctttgccctggagggcatttttaaaagaaataattacaggcaattgttaaacctcattgccaactgaaatggtggatagccattgaattaaacaatagaccaatgaaa

SEQ ID NO: 3616 - DNA, 1028 bp, Homo sapiens
aaagataatttgacttgttcgtttccaataaagttggatgccctttctttctttctggtctgattgctccagataggacttccagtgctatattgaataacagtggtgaaagtgagcatccttgtcgtgttacagatcttaggggaagggttttcacttattcccgactcggtatgatactagctgtgggtctgttgtatatggcttttattgtgttgaggtatgttctttatatactcagtttttttgagagtttttattatgaaggggtgttgaattttataacatacttttttagtattaattgaaatggttatatgatttttgtccttcattctgttgatacgatgtatcacattgattgatttgcttatgttgaaccatccttgcatccctgaaataaatctcacttggtcatgataaataatctttctaatgtattgtcaaattcgatttgctagtattttgctaagagtttttatatcaatgttcatcagggttattgatctgtagttttctttctctgatgtgtctttgtctggttttggtatcaggatagtacttgaccatgtaatgagtttgaaagtgctccctcctctattttttggaatagtttgtttaggattggtattagttctacttccaatgtttgcgttgcaaggcatgatggctcatccctgtaatcccagcattttgggaggccaaggcgggagaatctcttgagcccaggagtttgagaccagcttgggcaacatggtgagaccttgtctctacaaataataataataataatagagtagataggtgtggtggcgtacatctgttgtcctagctacttgggaggctgagatgggagaattgcttgagccctggcagtcgaggctgcagtgagctgtgatcacaccgctgtcctccagcctgggcaacagagtgagatcccatctcaaaaataaaataacaacaaagtaataaaataaaataacaaaaataaatgtttgataaaattatttagtgaatccatcgagccc

SEQ ID NO: 3617 - DNA, 1023 bp, Homo sapiens
atttttcattattttttctctccagtttggatatttgcttttaaactgttctttgctaatcctatattctgctgtatttgcattgatgttaaaactttgatgaaattttgattgtgaagttttgatgaaagcttttcatgaggttttgctgttgaaactttgatcaatgaaatgggccaaatcctggaaaaatacaaactactataaatgatatggtttggctgtgtgcccactcaagtctcatcttgaattcccatgtgttgtgggagggaccctgtgggaggtaattgaatcatgggggcaagtctttcctgtggctgttctcttgatagtgaataagtctcatgaggtctgatggtttttaaaagaggagttcctctgcataagatctctcttttcttgctgccatccatgtaagatgtgacttgctccctattggctttaaccatgattgtgaggcttccccagccacgtggaactgtaagtccaattatacctctttcttttgtaaattgcccattctcaggtatgtctttatcagcagcatgaaaatggactaatacaataactaactgaagatgaaataatattactggttgtatatctattaaagaaattgaatttgtagttaagaactttttcaaggagagagccctaggcccagatggtttctctggtgaatccaaacaaaatttaaggagaacacaataccagtcttgcacatccctgaaaatagaagaaggaaaacttcccaggtcattttatgaagtcaatatttactgtaatgctataaccagacatcaacattacaagcaaagaaaaatgtagaccaatggccctcatgaatgtatatacaaaaattcccaacaacatattagcaaattaaatccatctgtatataaaaatgaaaatacatcacaattaagtggacttattgcagaaatgcagtataaatttatcctagtaaatgattaagaaaaagcatatttcttatatgtagtttcagcagacccaaaaaaggat

SEQ ID NO: 3618 - DNA, 1005 bp, Homo sapiens
ttacacgaatatttaaatatatatgtaaccaatgtttgcacttttttagtatactgaaaaataatttttttgactttgtttctttaatttttcaagtgattaagtatcgggctttaatttttataaagtccttgttggacttaaggaagtttgagacagtgtactttaataactactgcagaaagagttatctaggagaatgtggatttgacttatcccaggatcagcacagataggaaggactgatctagttggctttgatagattttgcgtcttatttaaattactttttaattttttccccaccaacaggaattttaaaaatcccctttgaccaagttaatttttattttttatgtttaggataaatttatttaccatttggctccagttgaaaaatcacatggcagactgcaaaacagaacatcaagatcacaaaagaaaaaatccaagtcacctgagagaagtaaatactgtataaatgcaaaaaactacgaacagcctacaatttcttcaaaatcacactctccatctccctacacaaaaagacgcatgtgtgagctatctgaagacaccaggcggcggctggcccatttaaatctgggaccctatgagttcaaaaaagaaacagataaacctccatttgtgattagacatgtatgtgttctcttaagcatttctatttgaaactgatcagcttttttcccaaaaaaactgttattctgaaatatctttcaacttctagcttatattaataatacttttctcttctgactgctaccctagcagtctaagatgggaaattaatttagaatgaaagaacttgctttttttcagtcttcagacctgacagagatcaagctgtgttatgaatgccatgttaaatcctctcagtaccggtttcctttcttatacaatagatagcataataacgctaccaattgaacttggttgtaattgacattagtactaaaatggcagagtagggctttaaaagagaaccaa

SEQ ID NO: 3619 - DNA, 1031 bp, Homo sapiens
atacgcggctaacttttgtatttttttgagatagaatttgccatgttgcccaggctggtctcgaactctggagctcaagcaatctgcccacctcagcctcccaaaattctgggattacaggtgtgcacttatctgcctggcctagtctgacttattactgagtcaccagggtggcttacttctttgtccacaggttatctaataatgtccagatatcattcatgtgcagttgcattgtgatagggtaacagtgacctatctgtgatgaagagccaataatatgtaaagcccagagggctcaaagggcaggactgggcttatcgtggaaggagtggattgttcatttactgcattatcagtattcaagtaaatttgctgaagatgataactgtgacttaagccaagaaaggtaaaatatagaattattgaggggaacattcttattttatttagaaagatatttaataattcagagtcaggctgtagttatttatcttttagatgcaagctgaaacacagcttttagagctctaaaaacctatgcttgccaaatgcagagctatgttattgacttgttttagagatgtgcactgtgcacattgtaaatggttagatatgctttgcctggactcagacagtttttttttcttcacgctggagtatgttcttccaatagatggatagagaagtcttttttttctttttaactttttgtctgaaatatagcatacacatagaaaagtacatacattctcagggtacagcttggtgaaagccatttctaaatgtaaaaccattacccattcatagtttaattgtacttatgaactaacatttccctctgtaaacttttaacaagagtcttccattttatttttatttttatttttactttttgacttgggatctttattgaacagagatatgagagaaaaggcattggtgtcagtatttaaggaaatacattttctttaaatattctttctagaaacagacagatctgggttcgagttcctcataaggctgctgta

SEQ ID NO: 3620 - DNA, 1025 bp, Homo sapiens
tttctttgtcacccaggctggagtgcagttgcgagatcatggcttactgcagccttgacctcccacgctcaaacaggaatgtctatagtgattgtcctgtccctgctgcacatgtgcaccttgggcatgtgtgaggcagataacttttctctttaggtcatatgtcttctgattgtgagaaactgcattttaggagctgtacataaggaactacacctcagcagccctatctataccaggattttatttagatgccaacatcctggatttcaagctgaagttgtacaaggatgagactttaattcttttcttttttttggtagagcatgaatgtattttgcatgtgagaggaatgtaagtaatttgtggtcagagagcagactggtggttttaaacctgtgcacaaaatttttgctactccttcattgaaaaggtagcctaactactctgtcattgagtttggattatacttagtgagtctgatgaatagaatgtggtagggatgacagtgtcagattctgagactacatcattgtggcttccttcttgctttgctcttggatcatcccctttgattaactagaaccacatcatgagaacactcagtagccttttggagaggtttatgagttgctgaatgttcttgccaaaagctagaaaggaactgaggcttccagccaacagccctgggaatgaaccttcttgagaagcagattctcaaactccagtcaagttttcagttgactgcagcctaaatgacatcttgaccacaatttcacgagaaatttcaacacagaaacacatagctcaacctctctcagatttctgacccatagaaattacgtgagataataaatgtgtactgatgctttaaaccgctaagtttcaaggtaatttgttttgtagtactaggtaattaacaagtagatatagtggatatcacagatatcactatgaagatacgtttgcagaagaacacacattgaaaatgtagcctaactactcttcttgagtgtagactgtag

SEQ ID NO: 3621 - DNA, 1031 bp, Homo sapiens
aataaaatcatgtcttttgcagcagcatggatgcagctggaggccattatcctaagtgaattaatgcaaaagcagaaaaccaaatacagtgtgttctctcttacaagtaggagctaaacactgggtatacatggacacaaagatgggaacaataaacactggagatttcaaaaaggtgaagggaaggaaaggggaaagggttgaaaagctattaatagctgtcacaggtgctatgtgcactacctgggcaatggaattatgattaatagaaacccatacctcagcatcatgcagtttttatccatgtaacaaacctgcacatgtaccctctaagttaaaaaaaagttatatggaggttttcaacagtgtgtgggtttgatggccctagcccccatgttgtttaagggtcacctgtatatgtaaatatcagtgtcttaacttttaaaatttggtttttacttatatcaaaattatgtcatttttaattggttataaaattaggttgtttttctttaaattcgttgtatatattctataagtcttattatagaaaacagcaataatgtatccatttcagcaaagtttcctgaacgatagtttgtagtattcattttcttttttttttttttttgcctcaattttcttaattaggaactactattatagtattttggatcattttgcctgtttagtgtttactttctgtgctatttaaaattctttggtttctttttgattaaaatattctcattttcttgtattttaaggcattatatctgtcgtattatttcctctcctgtttattttaattcatattcagttatgaaatgatttctgattgggtgtgtggtagctcataaatataatcccagcactttgggaagcgtaggctggagaattgcttgaggctgggagttgaagatcagcctgggcaacatagtgagacccccatctctacaaaaaaaattaaaaattagtcagttgtgatggtacatgcctatagtcccagctgctcagaaggctgaggtcag

SEQ ID NO: 3622 - DNA, 1087 bp, Homo sapiens
gaattatgagactatattactcttatttgaaggtctaggagaagagcattttaagcagaggaaaaacaaatataaaggcttgtagttgaaaataatcttgatgggttggaggaacaccaagaaggcctggtatgatcatggtaacaagaggaagaatgctagcagaggaagttggagacggaggcagcacaagctataaaggttatttgtagaatcttttgtagtgatgggaaggagagaggaactgacagttctcaataatgtcaaaagtttctgtgattgtgaaaggaatgatattttggggatgaagggagaaaaaaaatatatatcttccttcctgcctctccctgtatcgtctcactataggtgttcccggacgcagtagatcctggagatgtggttacacagcttgaatgtaagttttttaactttttaattcctgattctaagacattttaggatttattatccttatgatctttaatcttgggttaaataaaagtttaaaaggggttagtagaactttaaaaatcttgagctgagactttttaatactttttagaatttcagaatattcctggaaataataaaagatatatatgctgcagagaggctgagaattctttctttttttgtgtgtttggtctgtggaaaacagagacttatttaagctttttattgattaaaatgatatggggtgtttgtgatatagtgacagaaatttatgttagttgagattttcccctgcaaacagaaatatgtcttctacttcagtgtatttcaagtcaagagagtgaataacagatcaaagtaatggtagcttaaaatatatgcttttgcactttacattgcattcattacattaataaattatttgaaaaacacattttttcaaggctctgcataacaagtaaattcttcaaactacttagaataactataaaaagatacaactatttgtgagagcagcaatgcaaaagtgtacactttttaagctctgagtgttaaatgaaaagctccgttaatttatctttgtaatttgaaagggctctgggatcaacagattgatctaatgtataaatgtggc

SEQ ID NO: 3623 - DNA, 1035 bp, Homo sapiens
attggtgagaaattcttaatatttagttcatattcaagtttttctggttgtcccaaacatgagttccatagttaactttttcaaaccgggatccagtcaaggtttatatattacctttaatcatttgattgataggtctttgtagttcattttaatatagagcagttctattttttttttattcccacaatgttccttttttttcctcagttggttttggtcaattcatacactcatgtcaccatcacccagatcaagatttggaacacttccatcacccctcgcaattcccttgttcccctttcaggtccattccagacagaactgctttccagagagaaataagtataggagatgatggaaatgttaattagcttgaattaatcatttcacagtgtacatacctgtagcaaaacatcactttgtacagtgtaaatatatgtaagttttgacaaaaaagaatggataaatatattgtagtatacacatacaatagaatactactccacaattcaaaggtactactgatagaaccaacaacatggatgaatctcaagaacatgctgagcaaaagaagtcagatactaaatatcacatactatgtggctccaatgtgaagtttaagtactggcaaagtaatccatagtgatagaaatcggaatagtgtacacacacaccccctcacacacacacctaccacattttctttatccattcattcgttgatggacacttaggttgcttccatatcatgagtatggtgaataatgcagcaatgaatatgagagtgcagatctcttccatatactaatttcctttggatacatacccagaagtgagattgctggattatatggtagttctattttttaattatttgaggaaatttttctttttttaaattatttgaggaaatatgctttttgtaatggctcttctaatttacatttctaccaacggtgtacaagggttcccctttctccacattctttccaacacttacaattttttgaatttattatagtagtcgttcta

SEQ ID NO: 3624 - DNA, 1045 bp, Homo sapiens
ctggcctgggaacagtgtaagagcatgtttaacacatgcaaatacatacacacacacacacacacacacacacacacacacacacacacacaaaacccttaaagactggatttaactaactacctggccatatgctacatccaacattgggcaacatgctacaaaacgcatttgggatacaccagtgggaacctttgaggactatgagaaacagcaatctctaaagtgtcagtttaagccctgaacacaaagtattttaccacaaggggacagtccagagatgattcagatttttgcctctggagccctcttgtttgaacttttatttttgaacatatccagtgagagacaaatctggaaagtccagtttgaaatctgtgcagaaaaagaaacagattatcttaggttgagcttaaagaatgagaaaatgagtagaaataatatccttttatatttgtgtagcactttacattcagtatgtgtcgtgagcacacgtaagcagtgggcgaggtgccagaggcctctttcccactcccggctgttcctcagactcatgccgtgggcaagcctcttccatcctctgggtttgaatttcctcatgtaacatgagcgagttggaccacttgttcactgaggtccctcaaactcagtcatgctgagatttgataccagtaaaaaggggataaatgttattcttctcccgtctgccttacctcagcctgccttatgtcagggctgtggagatacccctgcccttccttacatccctatcagctataagctctctcatgtctattggcacttgagctgacagaaacccaccaagttctcctgggaagacacttggcttagaaagatctcagttgagttgagggattcatgtgccattttagtttagatcagatagcaatctaagggctgttccaattcaagattctagaattccataaaaggccaccctttaggatgtacttagagaaacccctaagcaaattcactggctgctatttcaacactttgtatgacagtgcttttagcaaacacc

SEQ ID NO: 3625 - DNA, 1009 bp, Homo sapiens
gttccaggaatgtgtttaaagcataggcttaggaggcacatagatctatagcacatcttggctctgcaccttcccagctgggtgactttaggaggagagttttgtttctttgagcctcatttcttcttttttggaaaaaaaaatgtggcttataatacctacttgcaaggttgttgtgaggtataatttatatgaagatctttatagaggtatctgacatgtagtagacattccacaagtggtaacctaattttttattgaggtatatttcattcaatgtgaattttaccattttaaccattttaaagtgtgtgcaagtgagtgttttttggtatattcctaaagttctgtaaccatcactactacttaattccggaacgtttttatcacccaaaaagaaaataaatccgtgttacccattgagcagtcactctttattgcccttttccccctgctcttggtaacaactaaactactttttgtctctatggatttacccattctgaacatttcatataaatgaaatcaataaatggcctttgtgtctggcttcttttactttccataatatttttaagattcatccatgttgtaacatgagtcagtacatcatttctttttatggttgaataatactctgttgtatgggtataccacattttgttatccattcataagttgatggacagttgggtttttttccaccttttggctgttaatgaataatgctgttatgaacatttgtgtgtgagtttttgtttgggtatatgttttcatttatcttgcatatacacccaggagcggaattgctgggttatagtaattctgtgtttagttttctgaggaactgccataatgttctctactatggctgcccattctacaatacccagcaggaatgtatgagagttccaatatctttacattctttactcttgttattttccttttatttttgatttgagccatcctaatgagtataaagtggtatctccttgtagttttgatt

SEQ ID NO: 3626 - DNA, 1048 bp, Homo sapiens
ttcagttatctctaagtgggtaaaggctcatctggctgcccttacctcaggctcacccttgctaagaactaggaagccctcctcctccaggacaccccctgccatgcagtctgagggcctgaaagtgttcaggaagactgataggtgtgtttccatctctgagatctccctcaatactggagcctcccatatcatagagtctttgccctgcccacatctgttctgctcaagagtagtcctttctgcttatttccttttagaactggtgagacccatcttggacagatgatcacctgtcaagggtaccacaggatggcttctgccctgagatggaaagtgtggatgaggttccatgaagttgtttacaggcccaagggctgataattctttaataatgtgtctacattttctttgaagactcaaaagtgctgtgcccaagtgagagggcattgttattaatgctattagttttgttgatggtgacaacagccacattagtaaaactaaccatgctgctctctcaacacagaggttttagagtcagacagatcgcatttgaatccgagatacaccactaattcattaccaaattaagaacattattccatatcactcagcctctttcttcatctgcacatttgcaaaataacccttacttttcagggtatttgtcaggggtaatataaaccaaagctaacatttactgaatgtgtatatgtgccacatatggcactagctaagttctttgtgtgtattatcctgccttttaaagcgtgcgcccttactctgtccattttaaagatcaggaaactgaggtgcaaagagactaaataacttgcctaaaatcacacagctaattagaggcagagttgagacttgcaatatgaacctaataaatttgtctcaaaagtctgtgatttaaaaaatattatgtctaaaaagcagctgccatgttgcctggaacacattagattctcaactggtaactataatttaacagcatgttacatttctaaacagctacacaaatgcaaagtgtttgtttttg

SEQ ID NO: 3627 - DNA, 2048 bp, Homo sapiens
gtatcatgtaattgaattcttacaacaaccctatgagattggagtatccttactttacagttaagaaatcaaaagctcaaagaagcagatttcaaactcatgtccaaaaccttttataccaggcagatattatctccattttatagcttcaaaactgaaactgcaaattaagtgttttaaccaagatcacgtagccaagcagtggcagagctggcacttaaatgtgacggtagtgattctttctgttatatctcactgttaacctggaaagatgaattaacatggaatgaagaccaaagccagaagaataattaagggtgttgtagtctttaaaatgagatgatagaaataccaccaggcaggggaagattggagagatgattggatgtaaaggttaccaatgcctagactaagtatttggtaaatggcccatagattctcctgtcctctgtatacttggagtcagacagatctttgttctaatgctggcacttccacctgttagctgaggtactctgagtacatcatttctcttttctgtatttcagctacttcatctttcaagtgaggataatgtcatgtgtcctcacagataaattgtgatgataagatcaaaagtgataatgaaaatacttggtaactggcagagggccatgccatttgagttggtaatggctaaacttctttaatccatgtcccaaaattcactacttttgacctgtctctggccttttaaaaaataagtttttagacacattcttcattcttaatatgacagtgacttgcactttgccagttgcattataacagactcttccttggaagaaagtccactgtttattgcattccccttagtaaaatgcagtaaaaatgtgttctgagtcttggcaatgacagggagacagcatgatgatataacacaaagaaccaactattaggggggccttgggcaagtcacataaccacactaaactggttctttcacctgtaaaaggcagataataataaccacctttgcgctggatataagaattaagtgaaggccaggtgcagtggctcacacctataatctcaactctttgagaggccagggcaggaggatcgcttgggcccaggagttcaagaccagcctgggcaacatagagagacacccccatctctataaaaaataaaaatttaaaaataaagaattaagtgaggtaatgtgaggacacagacatggcacatggtacattcaagacatgtgaggctttaagatgtgtagaccttgtgctgggaaagaatagcacagctcaccaactagacctacctctgggtgtataggatgacatcacaccatctcactttcactcctactttcctctaaggaagcatattctgtcttctctcaacattacttttttccacaaagcaaaatcctctcagctagggttacatggaaatgtgaccaaacatccaagaagttttgagtgacttttgttggtagaattttctgcctagttttaagaacagttgggcctgagccttccaagaggtggtggatctccgatgtgaaagttttctttgaaatttttatggctgatttcaggacctcttcagtttttacagccttttccagctttcagttagacagaggaattaacaattactaatgttctgttccacgccagaccttgtgcagacatttcagaaagtattctgtcatttaattttcattcaaccctaaagcatagatagtagtcctattttacaggttagacaactggggctaagagatattaagtgctatttccagcaccacacacatagtaactgagataattgggattctaacctccaaagtctatgctctttaccctaaacagaaaacattttcatataatgtgttgggggtccccaagactatctctaagttcagtgatttcctgggaagactcacaggactcagcatataatcacacttgtggttatgagttgttacagcaaaaggatacaaagcaaaattattgaagaaaaaaggtacatgggcaaagtccaggggaaaccag

SEQ ID NO: 3628 - DNA, 1029 bp, Homo sapiens
actaatgagagaaggaaactgtcttactcatcttatctccagtttctaacacagggcctacatcttgtaggtgtgcagtaaatattttataaatgtgtaagtggatgaacaaattgtatggggaaaaactggaagttaggagacttgattaacaggttaatgccataatctgtgagttagtgatgaccggatctaaactgaggcatcgttcttgaaaaatgtacaggctccatcctaggttaccaggcagatgtgtacattgtctctggattggtttagccttaacataaactctcactagttagccagtttcatctaaagcagacactgagatggcaatccatagtttgaaattctgtcactaaagaaattagtaagccagtcctaaatccagctttttagctgactcccacataccacttctatccagatgaaaaagaatcttttctaaacatctccatcagaaattccagagacttacattctagcaaagcaagacaatctcagttaggacttggaagttacttgctacttgtgaattcatctctgtttttatagtcctacacaaactattttgaaatttctctgtttaaaactgttgattactggagtttacaaaaataaccaggtagtctaacattatattaaaggctcaatctttgatataataagtagtaacctgaaagagtgtcatgtcagatttgccataatccttatttcactgtttttgagcaccagcagataatgattttacagacaaatccatttagcagatatgaacttataatgcagatgtatgtggaaccaaatgctcatttggtgttcattttttaaaaatctgctaaacaccaagcactgcttgggggtcagaataaagagataaatatggcaaagtctcttcagtttgcttaaggtctgaaaagagaaatagacatataaataaatggtgacaactctgcagaataatataaggctggaggtaaatatcattccttagcatcttgctcttctctaaggagaatccattga

SEQ ID NO: 3629 - DNA, 1087 bp, Homo sapiens
ttacctctccaaattactttatcctgattttcatgcctctcatgggggatactgagaattatctggcatttttcttccagttacagatttgccttgaccctggttattctttccaattacctatcatcccaggaaacaggtacttgcaatatggtatgaaaaacagcaatggcaataagtatgatacggaaatgacacaaacaagacttcttaaggagtaaacatttgagtcttaaaggatgatatgtagacatttagtaggtaaactaccattaatttgttttgaccattaaatctacacattttttagggacttgctatatatccgcattgtgctcaacaccaggagatatatggatgatgcattcctttagatgatcagtgacatgcaaacaaaggattgcatgtattatgacataaattccgtgatggagatacatgtagggtgttagagctgcctagcagagttaggcctcaccagggcaaattttttaaagctgagacaacaaattagcagcattgtggcaggtagacttgtggagaagtatcttctagaagaaagaagggtacttttccaattgatggttagattggaggagtacactatcagccaataacacacatcataattaagttagggatacttggttaggcagaaagattctaatttcagattagatatttcactttaacaatagccatacatacttctcatttcctattatactcatctttgcagagtatttttagcataaaccacaccaaaatgtgttagaggtttttggttttatgcctggacatatataggcaaaacgcccctatcaaaaattgtagcagactagtaaaaactattttctttctttccttccttccttccttccttccctccctccttccctcctccttccttccttccttccttccttctctccctccctccctccttccctccctccctccctccctccctccttccttccttccttccttccttcattccttcctttctttctttcgagacagtctcgctctgtcacccaggctggagtgcagtggcgtggtctcgactcactgcaacctccgcctc

SEQ ID NO: 3630 - DNA, 1043 bp, Homo sapiens
tttctagttatgaaatattagctgactttgggggtaatatatctagttgtattttcttttatgtaacatttaaaaagtagccatcttagtattttccaaataaaaattgaaaccttctaaagccttctcaagaggctattgagaccttcccaatgtcttaaacctgacaggcacctagaaacattttttcttcttatacagattcttttaaaaagaattggaagaaactgttcttgccttaaatataacactaacttgaattcctatgtttggagacagtcatattcctcatgaatttttatttcccatggggccttatatggccatgtttgcgagaatttgggagctgaaagtacactttcatgtgcattgtacctttaccttgtttactactaaactgagggactactactggttgtttctggggacattaaaaaaatagtgtgagttctcaccataaaaagcaataagtatgtgaggttatgcatgtgttacttagctcaatatagccattctacaatgtatatatagttcagaacatcagattatacatgatatatacaatttttgtcaattaaaaataatgaattaatatataaaaaacagtatgagtgccagtcctgttctttaaggaatttgtcatctaaagttggagaaccaaagcatatccttacaaaaagtatccctagcaaagatttgttatatgatctagaagaattcagaaggaacaatctttatagtcagaaaggactttaataaagagctaaagttttttggttttttgagacagggtgtcactctgttgctcatgctggagtgcagtggcacagtcagggctcactgcagcctcgacctcccaggctgaagcaatcctcctgcctccctcccagttgctgggactacaggcgtgcaccaccacacctagctaattttttgtatttttagtagagttggggtttcatcatgttgcccaggctagtcttgaactcctggactcaagtgatccacctgcctcagcctcccaaagtgctgggattacagga

SEQ ID NO: 3631 - DNA, 1050 bp, Homo sapiens
attgttctgttataaagacacttgcatgtctatgttcattgcaacactgttcacaatagcaaagacatggaatcaacctaaatgcccatcaatgggagactagataaagaaaatgtggtatatatacaccatggagtactatacatccataaaaaagaatgagataacccacagaatggaagaaaatatttgcaaatcatatatctgataagggtttaatatccagaatatattaaatatattaactcctacaacacgacaacagaaaattaaacaattcaattaaaaaatcggcaaaagacttgaatagacatttcttcaaagatatacagatgaccaacaagctcatggaaagatgctcaatgtcagtagtctttggggaaatacaaatctaagccacaaataagatgccacttcatacctagaaggatggctataattttaaaaatggaacataagaatttatgaggatgtagacacaaatttagaacccttgtacattgctgattgggatgtaaaatggcagctgctatggaaaacagtttgttgactactcaaaaagttaaatatagagtaaccatttgaaccaggtattccactcctggccatatacccaaaagaactgaaaacagggactcaaataggtatttgtgcctgaaagttcattgcatcattattcataatagccaaaaagtggaaataatccaaatatctatcaacagattaatggataaaaatatggtatatccatacaatggaatattatttagccttaataaaggattgaagtactgataaatgttgcaacataaatgaatcttgaaaatatgctaagtaaaataagctagacacagaaggacaaatgtatgattcatcaataggcaaatttttgaaaacaatcaaataggcaaatttatggggacagaaagtagatttgagtttgccaggaactaaagatgtagggtaaattgggaagttattgcttaaagggtacagagtttctttttgagtaatgagaatgttaggaaatagatggtggtgatagtttca

SEQ ID NO: 3632 - DNA, 1092 bp, Homo sapiens
aaacggatcagtttccgcttttcctgattattatgggaaagcgatcatctaatgaagtgttgaatgtgatacaaggtaaagtacatgtcacaaggagagtaaagccttcctggtatgtgataactttatagtttttccacccaagctgacaatatttctattagtaaatatctttgcatttgaaaatatagaatatcctgaaaaatgtcttcaaaaaatataggtgctataaaaaataatatgctgcatgaaaatctaaaagaaacatcttaataaaattgcacaacccttggggcacaggatgttcaagttaaatgttcagaattgctaaattgtataatctatcaattaggacataatcagttgtcaagtgtgacatttctatttatattgatttattgttataatgttgattaattggaagaagtacttatctttagttatctagaaaatccagtcactgtatattgaagattgaatttttcacagtgacaattgtttcttcttatttgtatgattccatgtttagggtgcaaccctgaagcatgaagctgtgggatgcctgtgaatttaaccacagtgcacattctttaccaaaaaagaagtgaatgattttgttttgtttactgttagtaatgcactccaagggttggtgtaaaatattaccttgttcattacaaagcttaggttgaacagtatatcttctctatgccactggggaaaagattttcaagtgcctcaagctaaaactatatctggtatactaatttctgcctccatttaagtctgattgggaggaggggatatgtgtaaattgcagtgcctttaaaacccaaataaaaccagacctctagcattttatgttttctctataactagagcattcaatttcataaacagtgtttaaaaagacctccaggggaactgatttgcatagggtaaatggataatgaagataacacttcattcctgctttccctgtcagaggcaatgttgcaagaactagtgtttctcaaggtgtggtttgtagacatcagactagacccttttaggatatctgtaaggtcaaaattattttcctaactgtaataa

SEQ ID NO: 3633 - DNA, 1050 bp, Homo sapiens
gagctcacagacttttgagatatttattagtatttttttcagatcagattggagtttacccatacaaatgaagcaagtgggaattaatatttttaaagtggttgactcaggagactagacacttggtccagtgaagctatcattgcccaaaatatttttatgatgatttcttttaagaactgccttcagagacagattaaagtcttacaaagagagtcctgtgtccagaaagcaatgtgtctcaaagtgtggccattaatcacttgcatcaaaattacctggggtggggttggagacgtattaaaaaggctgtttcctgactcaaatctattgaatcaccttctctgtgggaatggggctgaggaacttgccttttaaataaattccctaggtgatttataggccactaaaggtttaggatcactgcctttaccttagtttcccctagcttagtcatatactctgttttcctaacttagtttagtttaaaccaaagatttaggattatgctatggtttgagcatccccaccgaaactcatatgggaaccttaattcttagtgtggaaatgttgggaggtgcaacctttaagaggtggagcctaatgggagatgcctgggtcatggacccaccatgtccttgactgttctcatggtagtgggttctccctcttgttctcattaagctagtttagcaatcccaggaatggatttcttcccaggagagcaagttgttataaagggaggatgccctttccacatggatccacttcccccttgacctttcgccatattatgattaaatataaatgtatttaaaagaaaatagtgattttagttttgtatccagttgtaaatgtttaaaattttgtggtattgtacaaatgcagcatctataatgtattgtcttattttctaaatattgatacctgcccattcattttctgaatggaaaaaaaaaaacagtgacagtgttggtttagtcaacaaatctttgctaatgtatcttcctgtgcaaaataaagtctcatagagctggcctgtagctataa

SEQ ID NO: 3634 - DNA, 1031 bp, Homo sapiens
ttttaaaggaagtgtattgccatcctaaacatcccaggtcaagggcttaattaatgctttaaaatgaaggttccaaaacaccaggagagtttgtcattttctccctggtttgttttgtgaagagggaggagagaaggtgaggaggaacccctcctgttccatgattacatcctacccactcattttctccttttctcttctgcttttgatttttagtggcggtcttaacagaatgtcaagatcaatttgcagcatggtttaactcaaggtttgcgttctgccagcagcaattgtccctgcaaacaatgccgtgtgttcttgtaacttcagaagcttttagagggatcatggcaagggcagcatctaatgactttattagtgtagggtttcaaaatgggctcagtaattgttcatatctctttgtcagcaagtcataattactgctcagcattgtccaagggtacacttgtgaatagtttcctaatagtactgaaaggaaaaaaggaaagggagaatggataaaagtgatggcctcttacaattgagaataagtcagtctctatatagttgatggctaaactgtttatagtacattcaacattcttaaaacagattatccttttttttttttttgagacggagtctcgctctgttgcctaggctggagtgcattggtgtgatcttggctcactgcaaactccacctcctgggttcaagcaattctcctgtcttagcctcccaagtagctggggctacaggcgcttgccaccatgcctggctaatttttgtatttttagtagagatggggtttcaccttgtaggtcgggctgatctcgaacccctgacctcaggtgatccacctgcattggcctctcaaagtgctgggattacaggcatgagcctcctcgtccggccaaaatagattatccttttaaaaatgttctttgagataatttaaaattaccaatttacgagccttttttactctgatttggatacttcctacactcctacctagtactacagttata

SEQ ID NO: 3635 - DNA, 1031 bp, Homo sapiens
tccatcattactactgttaaggcaaatgggaaaatacacattttataaacacaaggtgaaaattcattagaatgacatattcccaaaaaggggattgactttgacatatgaaactgtaagataattaattaggctggtttattgcttaaaaaaagggtttaacttaaccacaattttcttgccacctatcatatcacagattcatctaaataaaattgtctaattgggtttcctactgtattatctttcttggatttttacaccacatttatccagaggtgtttatcatgaaaactgattgcatcactcattagatgcttttaactttgagtaacaaaacctcaagctttcactctcaattcagtagacgactgcttgcactaatatttattgatccatggggtacatgtcaaaaggtgttatgacatcatttgcatatgattagcaagctgaaatggggacatattaatatatggaaatacagaagagatttctaggcatcacaagtaagattgttgttttgggcttccttttaactgttatttctttatgatagatgtaagtttggaaataaattcctggttaatagcttgcctcgtcccatatctggttaacctagttcagacaggccataaaaatttagagagtcctggacctgtaagccatttggatgtttttgtagtggtttcctaggactaccatctgatattatagctgaggatgttgatatccaatatgggaagagacttgccaagcagatatacttttgcttaaggattactctgactaagcctatagaggcattagttcttcaatcacagtatactgtggatctctcatgtatgtaggagataagtgaaggatattaaactaagtgaatgctttgatgaagtcaccagaatatgagtatcacttgctattataaattaaatttcctaatttctctaacaaattggaataagaaaagaaacatttctatagaatgtcataacccctgtgatgttgatgatttggatttttacacctcttaa

SEQ ID NO: 3636 - DNA, 1066 bp, Homo sapiens
attttttcctttatttttttcttttggaattgctttacatttcttccttaagtgtcaaatataaaatattttatatgcatttgagagtctgctgaggtattcaaatataaagagaattaatgtttaatcctcaatttggtgtaaatgatattgttttagtgatattttctgttgaaatataatatggagacttttaaaagaaacagttttttccttctattggaattctggaataaatgaactgaagtgggaaaataaggctaatgtaactagtaaaatcatatgaaagtgagtaaccaagagtttcttcttataaatggcatggttttatagcacttattaaattcatttgctaagtgtacttaaaattccagtattttagtatatcagtataggccaagaagaattctaaaaaccaataaagctcatttccaagcttttaaagaaatgtttttatgtttagtatgcactagacattagccccaacatttacttaaaagtcattgattagacttgtgaaatctgaagtgaatttgaaaagtattttaattaatagactcactttttcctatagatatggtgattgccatcctgtattttttattggctcattagaagctgcttttcaagaggccttctatgtgaaagcccgagatgtaagtacagtttgaccttttctgattaaaaagtgcatcccacaggtttaccactagggctgaggcaatgcttaaatgttttctgtttttgtttttgtttttttccaaaaacatggaactcttcacgaatttgtatgtcatcattgtgcatgggccatgctaatcatctctgtataagtccaattttagtattatgtgctgctgaagcaagcaccgttttctgttttcattttgagattggagactttatttgtttctggttcatctgctaacctagtcttcaccaagatacccatttcacaagggacattaatgtgataggggtactgctggctcttgcagaaggccttgtgaagcactgaaatagggtttttttttaaatgggaaaaaaggtggatgtgcttagaagg

SEQ ID NO: 3637 - DNA, 1028 bp, Homo sapiens
tagttggtgaatgttgctgaaaggaacatctatttcaattataagcttgctttaatgccagttatgagttctaaatgtttaccttaaacggtttagttatcatctcctccaggaagtttttcctgattcctaccccctatgatttaggtcctctcttctgaatttacatgtcatagcactaatcactctgtgtataatatatggtgctccttaagagaggatatactgtatcttccacataggtccaaacagcgtagcacttaacagtgatttgtaaatgtttgttaaatgttaaaggtaataaatgaatgcaataagcataatcactaattttttagctgtttttaaaattatgaataaatactttttctggatttaaagaattttagggcagccatgacagataccgagagattatctattctcatcagcaaacattaatgaaaaaaagtttatcttattttttagaaaaagctttttctaacctgttagatggctgataaaaaaatatgaagagactgggagttccttatacataattaagtagttcattcttgcagatatttcaataattcatatttgaaatatacttttttcaacaaaattggctttttagatacctccctttgaagatgttgtggttataggattttgttttctggaattttaagaggtttggggattctctactttgtgaagggaaaacgaataatggagacacatggagaatattaaaatcactatcttagtatgaagtaaggtcctgttgttatagaaggagctaatgtattgaacaggatttggagaaagaggatggatgtgggacagtaaagtaaaaggggtaagtatagaaagaagtatatatagaacattcccttttttctcccctgtgtctcccaccccttgttcttaacctgatgcctcaaaggagggggtgagtactaggcaagattaagcaaagactgaattgatagcttacctgatagaggatgtgagaagatttgtcatactcgtcctttgtttctttt

SEQ ID NO: 3638 - DNA, 1264 bp, Homo sapiens
ttaattcagactcttttttcctaggaggaaaagccaggacaagatgcccagcagcactatgtccatgtcccgagaccaaagttgttagcatgactgcctaggttttgccaaggaattagatgctgctggaaaaatatccagagctcttatatttgctatccaaagagttccacagtgttgaggggtaaatggcatctcactattgactagacatgagccaagtggctcgttggtacccttcatgcatacaaagcaggcttgagatgtatccttgcatatttgaaggttctgtggttatgatgagctgaaatgaccactgattaatacagtagctctctaaaataatgaggtttctccactaacggaacctctttatttatcaaacttataataaaatgaggaatctgcttgaggtaaaataaccttttcattgtaactgaagatttcgtcttgattctctgaatttgttgtgattgtagaataaggcaaagggcttgttttgataagatcctagactgttataatcaatatatcatgtgttgactttatatgcttttgttaatgtgactatctaaatgttaggaaaatgaagaaaaatatcttcagaaaatgttacatttctaataatgcacttttcctgtgtatgatggtttttaaatttttcaaactattaagatactgaaattatgtggccataacaagattaccatcgaactgttttcgttcaccaatatgtgtgattttctacaaacaagcaatttcttctgttgaatttcctgctcagcgtcattattttgccctttgcttttcatgtgtttaacactttctgtttcaaagccagtttccatgagctctgccttgtgtcctccagcctgtgcatgtgtatatacgtgtgtgggtatgtggggaggttggtggggggtgagaaatgacagttaattcctgttaactctgaccaagtaatgtacggtgggtatttgtgaatcaaattgtgcattgtgaaaaatacgtatctgtccactcctgttttcctagtgaacattagcattgattatgatgtggacatatttctcagactttctgggtcttcatctaaatagcagcagcaaataatgaagtattcagagcttaaccatcatcatctcatgtttccttgagtttaaattgaagtaaaaatggagtaaaagaccatcttatttatttttaaaatctgctatccgcagaaagtaattaactcaagatccacaattagcctcacagcagt

SEQ ID NO: 3639 - DNA, 1046 bp, Homo sapiens
atgaaaaaatgctaatcatcagaggaatgcaaattaaaaccacaatgagataccatctcacaccagacaaaatgactatattaaaaagtcagaaaacagtagatgctggcaagactgcatagaaaagggagcacttacatactgttagtggtaatgtaaattagttcagtcactatggagagcagtttggagatttctcaaagaacttaaatcagagctaccattcaacccaacagttccattacgggtatatacagcccctccccagcaaatagattattgtaccaaaatgacacttgcagtgctattcacaatagcaaagacatggaatcaacctaggtggacatcagtggtggattggataaagaaaatgtggtacatatacaccatggaatactatgctgcctggaaaaagaatgaaagcatatcttttgcagcaacctggatggagctggaggccattacctaagctaagtaatgcacgaacagacaaccaaacactgtgtgttctcacttacaagtgggagctaaacactgagcacacatgggcataaacatgggaacagtagacactgtggactactagagcagggagggagggtgtgggttgtaaaactacctattgggtagtatgctcactacctgggtgcaatatacccatgtaaaaatcctgtacatgtactccctgtgtctaacataaaagttgaaatttaaaaaataaaaataaatcatgctcacattctcatgtcattttttttctcattttgctgggaaacttttttttttttttttttttgagacggagtttcgctgttgcggcccaggctggagtgcaatgacgcgatctcggctcactgcaacctctgcctcccaggtttaagtgattctcctgcctcagcctccctagtagctgggattacaggcatacaccatgacgcccagctaattttgtatttttagtagagatggggtttctccatgttggtcagactggtctcgaactcctgaccttaggtaatccgcccaccttggcctcccaaagtgct

SEQ ID NO: 3640 - DNA, 1068 bp, Homo sapiens
cacaatctcccaaggttgaatcaggaagaaattgaatccctgaatagacgagtatcaagctttgaaattgaataaataataaaaaacttgccaaccaaaaaaagcactggaccagatggagtcacagctgaattctgccagacacctaaagaagaactggtatcagtgctactgaaattattaaaaaaaaaaaaaaaaaaacagaagaggagggactccttccctagctcatgctgtgaggccagcgtcaccctaatactataatctggcagagaccataaagaaagagaagtaaggccaatatctctgatgaacaaagatgcaaaactcctcaataaaatactagcaaactgaatccggaagcacctcaaaaacttaattcgccacagttaagtaggctttatccctgggatgcaaagttggtttaacatacacaaatcaataaatgtgattcaccacataaacagaattaaaagcaaaaaccatatgatcatctcaatagacgcagtaaaagcttttgataaaatctgaacatcacttcttgataaaaaccctcaacagatgaggcattgaaggaacatatctcaaaataataagagccatctatcattaaccacaaacccacagctaacattatactgaatggacaaaagctgggaccatttcccttgagaactggaacaatacaaggatgcctactctcaccactcctatttaacatagtactgaaagtcctagccacagcaatcaggcaagagaaagaaatgaaaggcatccaaatggaaaaagaagtcaaactgtatctctttgctgatgatatgattctatacctagaaaaccctaaggactctgccagaagctcctagaactgatagacaatttagcaaggtttctggatataaaatcaatgtacagcctgagtgcggtagctcatgcctgtaatcctagcactttgggaggcagaggtgggcagatcacttgaggtcaggagtttgagaccagcctggccaacatggccaaatcctgactctactaaaaatacaaaaattagctgggcatggtggcgca

SEQ ID NO: 3641 - DNA, 1016 bp, Homo sapiens
attgccactgaccaaaatcctacagtttcaaatcagatagctgtgtgtagaaaaagagcaatgaatatggggacagaaaatgttgtttctagttcaggctgagtaaaataagtttcttcacctgtgttctgtaccccatcaccttctattttctcaggaaacatatgttatcaataatatctaatatattttttctttgatctcattgtactagaaattctgttcacatttaaacatggcaagtctctcatcttaacagaaacacacacgcatacacacacacagaaacataaacataccattaaagcaaaaccaagaaatcctccctgactttagctactactttctcttctctttacagccaaaattcagagttatctgcagttattatctcaatttttttccttctacttattcgtcaactcatgccattctggctttcaatttgtttctccaccagaatagcttttctttaggtacgaatgactgccatgttgctaaatcaagtagactttcagtcttcactgttcttgacttcttagcagcatttaaaaaaaaaaatgttttgttgaaaacaattaggaaaatacacaaatcatgaatgtacaatttgatgaatttttaaaagtaaatactgccatgtagccagcatccagattaagaaagaaaacattttaaagtatcccagaagccccccctcacattccctttatccaaaagataagaccatagattagttttgcctggttttgaacattatatattatgaatcatgcggtatgtactatttgtctctttcactccctcctttcttcctttccttccttctttgtccaaccttccgtttatgagatggatccatatttttctatgtagttatagctcattcattctcagtgctttattatattccattgtgtggatatttcacccgtttatctgttctactattgatgaggcaggcatttagatagttttcacttctgggctatttaaaatactttctaggagcattt

SEQ ID NO: 3642 - DNA, 1331 bp, Homo sapiens
aaaataagaaagcaaacaaaattatgcaacctatagaatagggggaaagggcatatagtctcaaaaaatgtggggagactgcatgttaaaaaacggttatatttagggaattggctctttttactaacatggcaacttattcctgaatccagaagttcaaaaatgctatcatagttcttacctatgatatttatctattttcagatgtttgtaaatttcagatgtaatgaaaattagccttttacagtatgacatcacaagttttgaagtgagcactaaaatcgctttttgaattttagtttaatgcaaaatatgtcttacaactaaacatggagtatttttgtgacttgactccagggaaccaaaataaatttttacatgaactgtaaccattctcttgacttctgtattatctttgctttattaataaataattagtaacaggaacaatatttaaacaatatttatgtatcttactttgttctaggcattttgctgaacgtcgatatgtttttttttttgagacagaggctcgctctgtcgccaggctggagtgcagtggcgtgatctcggctcactgcaacctccgcctcccaggttcaagcgattctcctgcctcagcctcctgagtagctgggattacaggcatgtgccactatgcctggctaattttgtatttttagtagagatggggtttctccatgttggtcaggctggtcttgaactcctgacttcaggtgatctgcctgtctcggcctcccaaagtgctgggattacaggcgtgagccactgcacctggccttatatgttttatctttaatcttcacgttaatcaatcccgaagggtagatgttattatccccacatttacacattaaggaactgaggcttagggtggtttaacaacttgttgaataacacagaaagaaggggtattgaaaagggatcttgacccgtgtttgactaaaggctacctctttttactataccataaattatttctctgtgaaccttaaatcccaagttcttatcctttctttcctagcatagttccccaattttacctattatgcacagtcagagattttccttaaagaatcttatctggaggccaggcacggtggctcacacctgtaatctcagcacttcaggaggccgaggcaggcagatcacttgaggtcaggagttcgagaccagcctgaccaatatgatgaaaccctgtctctattaaaatacaacacttagctgggcgtggtgccatgcacctataatttcagctacttgggaggctgagacaggataatcacttgaacgcgggaggcggaggttgc

SEQ ID NO: 3643 - DNA, 1048 bp, Homo sapiens
ggctggtctctaactcctgacctcaggttatccacctgcctcggcctcccaaagtgccaggattggaggcgtgagccaccgcgcccagccaagaccttttctttgagaaaccctgcctatgcccttcttcccgtgctgccttctccaaccctcttagaaatgcatttatagttctcttcttctacttaagtttttttcacttttttcttattttgttatttgtttccttcatttctcccttccttcctcctctctggcttcatctgggtcaccacaagcaacttaatgtctatggatctcagtctccgtaactgtcgaacaataactcgtagagttattgtgaagattaaagagtcagtagttacaagaatacttactgctaggtttattttgaagactgaagtagtatgtactagaaagaatgccttaacatggttgacttttggctattactgtgttttatttattgttttaatctatctattcattcacttgacatttgtggaacaactctgttaaaagaaaacttcagacaaattaaatttaacagagtttaattgaacaagaaaaaaaaatgattcgcaaattggcagcctccagaatcatagcagattcagagagactccaggaatgcctcgtggttagaacaaatttatagacaaaaaaaggaaagtgacgtacagaaagaagcgaggtacagaaacagctgtattggttacaggttggcatttgccttatttggaaacagtttgaacatttagcagtgtatcagtggttgaagaatggctgctgagattggccaagacttaactattattataggcatatgctcataagttaggttttcagtcttgtctacctattaagttaggttaagcttcctccaccaggactcaaatgtagaagtccggagccctaggctgggcatggtggctcatgcctatactcccagcggtttgggaggctgaggcaggtggattgcttgagaccaggagtttgagaccagcctggccaacatggtgaaaccctgtctctactaaaaatacaa

SEQ ID NO: 3644 - DNA, 1048 bp, Homo sapiens
ttttttttgttgtttttcttgcttgagtgagaaatttgatagaaaatgtgctacctttatttttacaaaaataaaagaataatgttcatacatgatggtctactgtttacctgaggaggcatgaagaaaacagaaatgttctcagtattgtctaagaacttgttacaagaaatagtaatattaatagaagaagataattaagacctgagcatatcattaaattctctgagctttaattttgtcactaatttgcagaactattatgaagataagtgataatataaatacagtacctggctcatagtagacactcagtaaatgagtcgacattataattaagataactgcaaaaaaagttattgtaattacagattacaattacaggcaagaattggctggtttaaagaaatgaagtgatgtctgagacttgcttcagaataacctatgtgtggcagagtgagtgaggatagagctaatttagattaggcatctatcaatcattgttgaatctaggtgatacatatattgggtttattatactgttctctcaacttttgtatatatttgaaaattttcataataaaaagtttaaagcaaaaatagttgtcttgtttaagagcagggacataagataatagagaaactctggaaatgtggggcttcacagggttggaaaagccaactgcttttgcaccccacccttgtagaaaccagactgaaattggcttatcaggtacaagttccaagaatgataggcaaagtcgatgaaatatgatcaattcttctgcctgtaaaatagtgccttatacattttaggtgctaattcattgaattgagttggcatggtcttttatgagacccatgttttaatggtttttataacatttaattttttgccaaagagttgtcatgcagtctaattactataggaaaatatggaaagcagctaaaactgtttgtttccaagactgtaatactacttggtgctcttaagtcacagcaaacacaagagggaatccctattaagaggcttgattcttttagcctc

SEQ ID NO: 3645 - DNA, 1051 bp, Homo sapiens
tcaaaaaaaaaatgtgtaagacaaaaaggcccttaggaaatgttaccctgtgaagtgccacttgtccttaactggaatttaacatactctaaagatgaaactccgtcagaagcaacacaatattggcagctgggcatgccagccactgcaccccagcctgtgcgtgtgttctttttacttctctaaagtgctctcaagtcccaaatcaatcagtgtccttccccctctctttctcacttccctctcttctttctttccctatcatctatttctccctatctctttaccctccatcttcctctcttctctttcctccttttcccttttccccttcttctccctttcccttccccctccctctttcttcctcatatttcttcatcttccctccttctctgaaagaactgtgtccttcatctgatccatgatgactttaaattcatctgtatcattttatacaaagctgtattttatcattgaggtttcctagaatactaacttttttcagaatcgtttttatgttttgtgtacattttggatttttttcttccctgcaggattatgatttcaattttttattaaatataaccatcaataaagaaaatggaattgtaatctattagtaaaatccccactcttttgatgcttttgctatcttatcacttgtgcttcatccatatactggtaacatctacgtatggtaacagcattggtatgcatggaattatttttgaaaaacactaaattgttgtttagtgattgtggttcaacataagattcttttagtttaaactcagaatactctgtgaatttagcctttgcattggaacaatcaaacattagcctaatatgctttacatgggactctctcagccaagttctgtctgcattagccagtttattctatgacaagttgcttaacagatgtcattctggggagaacaatgaagccaaatacttgtgcaatggctaacattactctgactttgatcacttttgttcagcacatcagtctggcgttgtgcttaataccaacataacactatagcca

SEQ ID NO: 3646 - DNA, 1045 bp, Homo sapiens
atggtggtgggcacttgtaatccctgctacttgggaggctgagacaggagaattggttgaacccaggaggcggaggttgcagttagccaagatcgcgccactgcactccagcctgggcaacaaagagcgaaactgcatctcaaaataaaataaaataaaataaaataaaataaaataaaataaaatagtacaaggtgacaggggtttagcattgctctagcaatagctgttctcatcttttctttttcaatatagagtatgaagcatgagtgataatgttggggaattgagagaatgatgctctgaaataagtgactttcattggctatgattgccaggctgtgacaattttcaaggatagacaacctcaaatttacttattactgtcataatgcagtaaaacacgccaaaaaataaaatatgatcaaatgcagttaccgtttattttggactgcatgacaatattcacttgcacaaaaccatataaacaacacccacctgtgtttgaaggcaaggtatctttgatcagaatctctgaaatatccctttgagttagctatcactatagcaaactttattaatttgtacctgacagtaatttaggatttatgattatttagttgaactaaagcataaatatatgaaggaagagttagccaagtaagtgaatagtgtgagtaacaatttctttggcaaggagtgaggggaggggatgatctacagaaaaagaacagagttttccagtttcagtttttagggatgtgtcatggtacaataaaaaaaaaaaattgccttggggcccggagcaatggctcacgcctgtaatcccagcactttgggaggcccaagtgggtggatcaggaggtcaggagttcgagaccaacctgaccaacatggtgaaaccccgtctctactaaaaatacagaaaaattagctgggtgtggtggcggacgcctgtaaccccagctacttgggaggctgaggcaggagaatcacttgcacctggctggcggaggttgcagtgagccgagatcatgccactgca

SEQ ID NO: 3647 - DNA, 1049 bp, Homo sapiens
gtggcatatatttattttgcctttattactgtttcgatgggaaaatactgcaaatatttccgaaatcgagttggccatactgacaagttgaaatgtttaagcagcgttaatgcaatctgctcacacctgatatcctatgcagaatgattcaaaatgactacatcaattattaaaagaaatatttaaaattctgtaaatgtgccattgtgtgccacagttggctgaaactgttctccgtggcctgctatgtagattatcaaatatatcttaagcttcaaggacttaaaacagtaaatcttttttataccattttctaaatgtcattttaaaaatgttccagaaatatttttgcaaagacagatattcttatgtatttcttgtcaagaatttggtttcttctcctttttcctttttttccctttaagttaatttaaaataatatttttaaatgctagtttgccaggaacaaataaatgcagttgctacttatgtcacttgcttctctgtgagtagacaggtacacataggctgttttattctgtacaacttagataaaggatgtgggacctctctgggcctagttctgtgacttttctgcttcaacttgtgcaacacctgtgatggagggggtagtttcaggtgaaggacaaggtgcccttatctacagctattcaatccacaatgacacttaagtatgtacattttttcttgttgcatgattggaaagttagtttgattgcatcaagataaaaatataattgtgaaactattttgtagttttattttataatgctagtatttgtcttttattaatgtgaaagcttaatgataccatatgtgctaaattgtaaattaatctatctcaccagtttcaggaatttcttttcagtattaataggtccaagaataaatcctgactaatataattgagggaaaggaaaaaatgttcaaaacacaaaggttcctggtcatttttttagtgtattttatatatatattttttttaatttttgaaagccttgcatttttaaaagaaaactttgcactat

SEQ ID NO: 3648 - DNA, 1025 bp, Homo sapiens
acctgaactttgaaatcatcatgaaaaatgttattagaaattatgtgaaaccaaatgtttatttatctagacatgtttaattgccagcaaagaaagcaattaaaagtagctgtagagtaagaggccaaccttcgttaaacatggttttaagattgttacagaacttgtggtgatgataacatggtgtcttggaggatgttaacaactgtagcagggtgttaattaagaatgatgtaatctgcagctcagaattattagtatatgttagtttagctggacaggagcaaaacctagtttcagttgtgatgagagctcaaatcatatttatagtggaaagattaacattttatttttatgctgttcctgagacaatttaaaaatcctgaatgaaatacaatctaatgtaaacatcaaggccctagctcatttacatatgtgccagattttcaaactgattgctatttgaacctaatctgtcattgctagctgcattagctacaacaaacattacatttacatattgatttcttattttgttttagtgtaaataacccataattatggtaaatttggtcttttgttgacaagaactcatatgactctgtaagtttagaatggaaatttaaattgccatgtgtcacgctttttaatttaaaatcttgatgtagctaaagagataaaaataatattgtagatcacaaagtattcctaaagagacaaaagagagaaaaaatgttagggcatttggaaagatataaatggtaaagtattaatgaaaaattcaataccacattttaaaattattacatttttataattaaaaaaatcacagtaatctcaaataaagtctttgttcttgcttcactatcaggccatatttagaaaataaaatctagtgaagatgaaccttataagccaattttaaattgttatttttgtttaaaatatacagtgcaagaaaagaaataacatatgcacataacaggaatgaaatgagatttcaatcactgtattgatgttagtac

SEQ ID NO: 3649 - DNA, 1048 bp, Homo sapiens
agtctgtattttaaaaacataaatctaaatataagtgttataaataaagagaataaacactaaaaaaaaaaagaagtaaataacctgcatacatctagaagaaagaaaggaatgaggaactcagtcaatacatcagcaaacagcaatttgaaactgaaacagaaacacaggaaaacaagtataatagaaaacagaaaatatgatggcaaaaagaaaaataaaatttatcagaattctccatgaacaagaaagtactaaactctcctattaaagacagaaactctcaaatagaatttacaaaaatagccatatgttgtttaccaaagagacatcttttaaagaaatgacagagaaaataaaggaaaagaaagtgaccccagggaaatattaactgtaagaatatactatagtaataatatttatatcacataaaattgaatttaaggcaaatagcattgaaagacaatttgccaagaagatatgacaattgcaggcttgtatgcacaagtctacaaaattggacagaattacaagaagatatagaccaactccacattgaacacaaaatctttcagaaaataatgtatttaaggccaggtgtggtggctcatgcctataatcccagcactttgggaggccaaggtgggcagatcacgagatcaggagattgagaccatcctggctaacatggtgaaaccccgtctctactaaaaaatataaaaaattagccaggcgtggtggcgggcgcctgtagtcccagctactcgggaggctgaggtgggagaatggcgtgaacctgggaggcagaggttgcagtgagctgagatcgggctattgcactccagcctgggcgacagagccagactctgtctcaaaataaataaataaataaataataataataatgtatttagcaatacatctttgtcagctatagaagattttaataaccccgtaaagcactcatggaatacttagaaaactgaccatgtagtagaacacaaagccagtatcaaagaatcactatcatattgactgcattgtctgg

SEQ ID NO: 3650 - DNA, 1100 bp, Homo sapiens
caatgccaccaggttctttgctaacacataacaaaagtgacttttgctccagttcccaataagttccttatttccatctgagctctcctcagcctggacttcattgtccatatcactgtcagcattttgttgacaacaagttgataagtctctaggaagttcctaattttccctcatcttcttgtcttctgagctctctgcactcttccagcctctgcccattacccagtttcagagacgcttccacattttcaggtgtctttatagcaatgccccacttttcagtagcaattctctctgttagtttgttttcacactgctataaaaaatacccgagactggataatttgtaaagaaaaagagtttaattgtctcactgttccatggactttataggaagcaaggcagcatctgcttctaaggaggcccagggagcttttactcatggcagaaggcaaagtgggagcaggccagagcaggatgaagagagaggaaaggtagcacacacttttaaacaaccagatctcctgagaaccctaccacaagaacagcatcaaagagggaaatcagccccctatgatccagtcacctcccatcaggcctcacttccaacactgggaattacaatttgacatgagatttgagcagggccacaaattcaaaccatatcaacattttttttcttttctgaaattcttgttgctcttctctttaatacagtttaaattgtctcctatatattattatctatatattagctttattattttttgtttttaattttttgagatggggtttttctcttgtcacccaggctggagtgcagtggcacgatctcggctcactgcaacctctgcctcccaggttcaagtgattctcctgcctcagcctcttgagtagctgggattacaggtgtgtgccaccacgcttggctaatttttttgtatttttaatagagacagggtttcaacagagtttcaccatgttggtcagaccagtcttgaactcctggtctcaggtgatctgcccaccttggcctctcaaagtgctgggattacaggcatgagcaaccacacccagcctagctttattttttagtt

SEQ ID NO: 3651 - DNA, 1049 bp, Homo sapiens
acacatgcacacgtatgtttattgcggcactattcacaatagcaaagacttggaaccaacccaaatgtccaacaatgataaactggattaagaaaatgtggcacatatacaccatggaatactatgcagccataaaaaatgatgagttcatgtcctttgtagggacatggatgaaattggaaaccatcattctcagtaaactatcacaagaacaaaaaaccaaacactgcatattctcactcataggtgggaattgaacaatgagaacacttggacacaggaaggggaacatcacactctggggactgttgtggggtgggggggaggggggagggataactttaggagatatacctaatgctaaatgacgagttaatgggtgcagcacaccagcatggcacatgtatacatatgtaactaacctgcacattgtgcacatgtaccctaaaacttaaagtataataataattttaaaaaaattaaaataaaagagagatttaagaataataaatacacagcactttgggaggctgaggcgggcagatcatgaggtcgggagattgagaccatcctggctaacacagtgaaaccccgtctctactaaaatcacaaaaaattagctggacgtggtggctggtgcctgtagtcccagctactcggaaggctgaggcaggagaatggtgtgaacctacgaggcagagcttgcagagagccgagatcgcaccactgcactctagcctgggcaacagagcaagactccatctcaaaataataacaataataataataaaaaatacagacttctatcagaagcagcgcacaccaggaggcaatgcagtaagtgttgaagaaataaaattttcacctagaatgctatattgaacaaaataatctttcagaaatgaagactggagatagttttcagataaaagctataagagatgttaaagtaagcacccaggcagcctgaaagaaaacgataacagatggaagattaagttaatacagagaaatgaagagcactagaaattgtaaatatttggttacac

SEQ ID NO: 3652 - DNA, 2065 bp, Homo sapiens
ggacattgtaggtatgtagaaatggtactgattttcgtacattgattttgtatcctgaaacattgctggagttgtttatcagagctagtagcttttggacagatattgtggagtttcctaggtatactatcatatcatctgcaaacagagatagtttgacttcctctcttcctatttggatgccttttatttctttctcttgcctgattgctctggctaggacttccagtgctgtatatgttgaatagagtggtgagagagggcatccttttcttgttctggtttcaaggggaatgcttctaacttttgctcaattcagtatgatgttggctgtgggtttttcatagatggctcttaatattttgaagtatgtttcttcagggcctagtttgttgaaggttttttgtttgtttttttaatacagagtctcactttgttactcaggctggagtgcagtggcgtgatctcggctcactgcaacgtccgcctcccgggttcaagtgattctcttgccttagcctcccaagtagctgggactataggcatgggccaccacgcgcagctaatttttgtattttttgtagagatggggtttcaccatattggccaggctggtctcaaactcctgaccccaagtgatccacctgccttggcttcccaaagtgctgggatcatagacgtgagccaccacacccagcctgttgagggtttttaacgtgaagcatgttgaattttattgaaagccttttctgtatctgttgaaatgatcatgtggtttttgcttatagttctgtttatgtggtaaatcacattaattgatttgtatatattaaaccaaccttgcatcccagggataaagtccacttgatcatgaaggattagcttttggatgtgcagccggatttggtttgctagtattttgttaaggatttttgcatccatgttcatcattgatactggcctgaagctttcattttttgttgtgtctctgccaggttttggtgtcaggatgatgctggcctcataaaatgagttagggaggagtctctcttcctcaagcatttggaatggttttagtaggaacaataccagttcctctctatgcatctggtagaactcaactgtgagctcatctggtcctgggcattgtctggttggtaggctttttattattcattcaatttcactttactattggtctgttcagggattaaatttcttcctggtccaatcttgggaggttgtatgtttccagaaatttattcatttcttctatgttttctagtttgtgcatagaggtgttcatagtagtctctgagggttttttgtatttctgtgggtttggtggtaatgtcccctttgtcatttttgactgtgtttatttggagctatctctctctctttctctcctgttttttttttaagtctacttagtagtctatcagtcatattctttcaaggaactaattcctggactcagtcttttgtatatttttttatgtctcagtttccttcagttcagctttgattttggttatttcttgtcttctcctaactttgtaattggtttcttcttgtttctttagttcctctaggtgtgatgtgtgatgttagattgttaatttgaggtctttctaactttttgctgtggacatttagtgttataaacttttctcttaacactgcttaagctgtgtcccagagtttctgttacattgcatctttgatctcattagtttcaaagaattgctttaattctgcctttattttattatttaccccatagtcattcaggataggttgtttaatttccattaaattgtatgcttttgagtgattttcttactatcaatttctatttttattgcactggttcagtagtgtgattgctattgtttttatttttttttaatttgctaaggattgttttatggacaattatgtgatggaatttagagtatgtaccatgtacagatgagaagaatatatattttgttgtttttgggtgtagagttctgtagatatctgtcaggttcttttggtctaatattgagttcagatttta

SEQ ID NO: 3653 - DNA, 1053 bp, Homo sapiens
caatttttcactattatacttacctacacgtaatctttttctgtatttccctacaacttatccataatctctgctttttcccaagggctctacttctgtcaattttttttgcatttagaagagaaatttcaaaattaaacatagttggcattttgtttgtttgtttgttttttggagacggagtttcactcttatcacccaggctagcgtgcaatggcacgatcttggctcactgcaacctccgcctcccaggttcaagcaattcccctgcctcagcctcttgagtagctgggattacaggcgcccaccaccacgcccagctgatttttgtatttttactagagaaggggtttcaccatgttggccaggctggtcttgaactcctgacctcaggtgatctgcccacctcggcctcccaaagtgctgggattacaggtgtgagccagtgtgctgggcccattattttttgtttttaataatagccattctgactggtataacatggtatctcattgtggttttgacttgcatttctctgataattagtgatactaagcattttgtgtatgcttttttggccaaatatatggcttctttcaaaaagtatctgatcgtgtcctttgcctactttttaatggggttgtttgttttttgctcattaatttaagtttcttatagattctggatattagacctttattggatgcaaatatctcctcccattctgtaggttgcaaatattttctcccattctgtaggttgtgtgattactctgttgatagtttcttttgctgtgcagaagctctttagtttaattgggtctcatttgtcaatttttgtttttattggaattgcttttgatgtctttgttatgaaatctttgccagggcctatgtccagaatggtatcttctaggttgtcttctagggtttttgtagttttaggttttacatttgagtctttaatccatcttaagttgatttttgtatatgctgtaaggaaggggtccagtttcagtcttctgcatatgactaaccagctaccccaacacca

SEQ ID NO: 3654 - DNA, 1050 bp, Homo sapiens
aatatttattgcacgttagaagcctctctcattcctcctactagcaatttaatctcccctctgaaaccactgttttgacctttgtcaccttggattgcatttgtgtattttgaccttcgtataattgaaatcatacattgtatactgtgtttaacttctttcactcaatattatgtctttgagattcaataattcattcattctaattgctatgtagaattctattatatgaaaataccataaattacccattctactggtgatagatatttgggttctttctagcgttaccaagctgctgtgaacattcttgtacatgtttttggcatacataaacattcttcttttgaccttcaagtggagctgctgaatcatagcgtgaagatatatgtttgtttagagttagcaggtgtagcaaaacatttttataaaatggtcgaaccaatttacttccaccagtagaacagggttccagttactccctatccttgccatcacttaatctggttaatcttttcaattttagtcatattcctgatcctttctgaatttcctttttttttttttttcttaaaatgaattcaggttccaaagttcattttgaatttagccctcataacaggctggaaatcttttttctaacttggtagccatctgcattcttatttcagattgattgtccaaacttatcaaattttcttagctgcattgaggatacctctggtatagtttaccgtatctgtgttttttcatttttttccagtttaaggtccccttgaaaaaatatttttatagtgttgacttaggaaatatataataatgaaatgcagttacaaattcactatggcatttttgaattcatgtgacttgaaatgatttttttctcttaagtgacagagtcttgctgtgtcacccaggttggaatgcagtgatatgaccatagctcactgttgagcttgaactcctaggctcaagtgatcctcccacccacctcagcttcccgagtgctgggactacaggcgcacgccaccatgtttggcaaattttttt

SEQ ID NO: 3655 - DNA, 1035 bp, Homo sapiens
catgtatctttatggtagaacaatttatatgcctttgggtatatacgcagtaatgatggtggggtcgaatggtaattctttcttaagttctttgagaaattgccgaactggtttccagaatggctgaactaagttacattgccaccaacagcatgtaagcactcccttttctctgctacctcaccagcaccttttatttttagagatttaaataatagccattctgactgatatgagatggtttctcttgtggttttgatttgcatttctctaatgattagtgatattgagcattttttcgtatgctttctggctgcatgtatgtcttcttttgaaaagtgtttgatcatgtcatttgcccactttttaatggggttgtttgttttttgctcattaagttgtttaagtttcttatagattctggatattagaccttttttggatacgtatatcttctcccattctgtaggttgcaaatattttctcccattccattggttgtgtgattactctgttaatagtttcttttgctgtgcagaagctctctagtttaaatatgtctcattggtcattttttgtttttgttgcagttgcttttggcgtgtttgtcatgaaatctttgccaggacttaggtccagaatggtatctcctaggttatctttgaggttttaggttttacatttgagtctttaattcatcttgagttgatttttgtatatgctgtatggaaggggcccagtttcagtcttctgtatatgactaaccagctaccccaacaccatttattgaacagggagtcctttccccattgcttatttttgttacctttatcaaagatctggtggttgttggagtgtggcattgtttcttggctctctattctgttccatgggtctatgtgtttttgtatcagtaccatgctgtaatggttactgcagctttatggtatagtttgaagtcaggtaatgtggtgcctccagttttttgcttaggctctttttgcttaggattgtcttggctactcaggctccttt

SEQ ID NO: 3656 - DNA, 1052 bp, Homo sapiens
tcagtcagtcggtcagtcttgctctgttgaccaggctggagtatggtggtgtgattatagctattgcagtctcgaactcctgggctcaagtgatccttctgcctcagcctttcaagtagctgggattacaggtgtgtaccaccatgcctagctaattttttttttttaatttttaaattttctacagacagagtcttgctgtattgcccaggctggtctcaaacccctaggctcactcgatctcccttcctcaatctcccaaagtgctgggattacaggcgtgcgctactgcaatttacatatagtaaaacatacggattttaaatgtagatagccctatgaattttggcacacatatatatcatgtggccaatcccccctccctcaatcaagatttctatcatgtcagaaaatttcttttttggttagtaacccccagctctactctaggcaagcacggatctaatttttattaccacatgttagtagtcttgtctattctagaactctatacgggttgagcatccctagtctggatatctgaaatccaaaatgctccacaatctgaaactttttgaatgccaacatgatgccacaagtagaaaattttgcccttgaccttatgtgatgggtcacagtctaaatgaagccaaaaatttgtttaatgcaaaaaattatttaaaatattgtatgaaattaacttcagactatgtgtataagatatatatgaagcataaatgaatttgtatttagactggggtcccatctccaagatttcttttttttttttggtggggggatggagtctcgctctgtcgcccaggctggagtgcagtggcgcgatctcagctcactgcaagctctgcctcccggcccccgcctggcctccaagatttcttattgtgggtctgcgcatattccaaaatctgaaaaaatccaaaatccaaaatgattctggtcccaagcattttagataagggagactcaagctgtatgaaggaaatcatacagtatgcactcttatacctggcattgttcactcaacataatgt

SEQ ID NO: 3657 - DNA, 1031 bp, Homo sapiens
gcttaagaatgatctaaaattatactggtttggattacaaaatggttttctcttaatatagacctcaaatggcaagctaaaagctaattattgtttcaaggaaataattacccagacccttgactctttttcttggtatctacctacctcccttacaccatttgggctgcatcaacctaggaactcaaaatctagagtttttacatgagaatgaaagtattggttttagttagtcaacatgaaagggtcagtactcctagttagtgaggatccaacactcctgcttagggtaatgactcttaatatacttacagtataacagagtcttaaagtttttgttcagtaaggagaaataaagttcagaattccaagtaagttagaaagtataatgaggcccttgcattcctggtcagtcaggaagtgtaacagagtccaaaactcttagtttggaaatgtaatgatccagcattcttagtcaggaagtataacagtccagcacttaggcagctattgcttagcaactggtatgaaggtttatggaaaggaaacaaactgatggttaaagtgaagttttggaatcattaatttattcaggccatgcttttaattgatctccttaaaattttatgccccatatgtgggtttttctttttaccttaataacttaaaaaaaattttactatctggctttttattttttacaattatcttcatttcttgccatgttaacagattggctacttcaaaatgttgtttttcagataacttcatatctttcttttctttgctagtcaaaggcctaggcctttatcttcctttttgctacaaccctaaaggcaaagaaagaaagggaaaaaaaagcttggtttatcctgtatttcttctgagtttactaatattaattattttttcaatgtattttgttttaatgcatgaatatacatggatattattgaaaaatttaaaactatatggaaacacaaaggagaaagtcaccatcttacactacaacttttggcactttggtatgt

SEQ ID NO: 3658 - DNA, 1188 bp, Homo sapiens
tttaaattattttttggtataagtttaagtttttgtctggcatattctttctgggtgaactactttagcatttcttgtagagtacatttgttggcaataaattctcagttttttgtttggggaagtttttatttcttcatttttgaaagatgctttcactggatatggaattctgtgttgacagccttttttaagatgtttctttgtgtttgtttttcatagtttgaatatgatatgcctaaaggggtgtgtgtgtgtgtgtgtatatgtgtgcatttgtttgtgtgtttctaaagccttacagccttgggtgctgttggtgctcttggatctgtgattttgaaatatttttcttttttattgaggagaaatttatataatatacagttaaccattttaaaacatacaattcagggatatttagtgtattcacaatgttgtgagcccaccagctccctctagttggttttgaaaattcatgattaattttttcttttctttctctctcctctttctaagattctgactatgcatatattaaatagtttgttttttgttctacagcttttgtttgttcttttcagtgtgtttcagtttgagtaatttctgtagctctagtaatttctatagatctatcttcaatttcacttattctttccttgactgtgtcagttctactgatgagactgttgtggacattcttcatctctgttactgttttttttttttttttaatttcaggcatagtttatctttttttgctgtaattacccatctggcttaggtattgtctgtttttctatttgagcctttagcatattaatcatagtcatctaaaatttcctgttctaacatctgtgtcctatctcagtctgtttttttttaatttctaaaatcacgtttattatcaaagccaaaattgcccatataattaatacattagtcttcaatttttatttctgcatgattatgcagtctgaatgactaactcacaatcccaggtggtattacaagttttgctcttcagaatggtgttactgttgtaaggggaaaagtcctcactgacaaagaaatgaaaacaaaatcaagaatgatccgcttgtatcacagattacagagaagctgtcagtgagcagttcctcacctcttgcagcaaaggggatcaagggctaaaaatatctcagaaaa

SEQ ID NO: 3659 - DNA, 1050 bp, Homo sapiens
cacacacaattctgcatttaaagagaatgtgtattgttgaaaggatttaaatgatttccagctagggtgtgtaaggaagagctgtattgataaatgtacactttgattcatagatatagcaggggaaatgcattatatgatacctttaataaagccatgactagtggctgtgtagatgtctttgaagatatttaagtagctctaatgtaatgctatgttgttaccaacatgttggcattttgactcttttttttacaaggatatttattatgttttacttatgccaaaactgacgtatagttctagaggttagtagtctatatagtctagaggttagtagcctatatagtcagtcattctgtatagtacactatagtctatatagtctgtatagactaaaatatagtctatattttaggagtgtggcaagtccaatagcactctcacaaattctatgcttgaattttgggacttatttttttcttagtaattgatttactgcacagaggattaatattttaaaatgtataatgagtgatagcagtgtgtttagaatgcaaggatatctaaaaatgtaaaggaactacagaaaaattgcaaaatagtgtagagctctaaataccctttttcaaacttctgctaatgttaacatcttataaatacagtacacaacaattggcatagtgctactggtaattttcttttttcttttttttttttttgagacggagtctcactctgtcgcctaggctatagtgcagtgctgtgatcttggctcactgcaacctccacttcccgggttcaagcgattctcctgcctcagcctcctgagtagctgggattacaggcatgtgccaccactcctggataatttttttttgtgtgtgtatttttagtagaggcggggtttcaccatattggccaggctagtctcgaactcctgaccttgtgatccacccaccctggcctcccaaagttctgggattataggcatgagccactgcgcctggcttagtacaatattattgactaaactactgaccttatctg

SEQ ID NO: 3660 - DNA, 1882 bp, Homo sapiens
tgaacattataaattctaatctgggccccagaattgacccacgtctcactttctgttttcactatagaagaatttgggtcaggggagaataaaaatctatatggcttgtgtaattttgactaatcaaaatgttagctatagtggtaaacacactgcattaattgaatgaagagccctggcttttcagacctcttagtaatttattgagtatggccttggctaagttacttctctctaacttctgaattcctcatataaaatgaagggtttgtaccctagattatactcaagcttccatgatatatgaagtatttctgaaggatctattttgtcctaattttttgttaaaattcaatgaatagcagtcaattataaatagtagtacagatttttaatagatcttcataagtttgaaacatttgtatacatactattaaaaattattttgacaactttatagtgtagatgatggcaggagaagatgctctgccacttattttacacacggtctctagatatgaaactccttcaataaattaaaatttccaataatctgtagcagatccagggaaagatatctgacatatacttgataacccaatgttaagtgaaataaagtgaaagtaaacattaacctagccatactacgttttaagtacttgatactcttaggaaatgatttttgaactttgcactcaatttctgctgtagtttgctgcctgtgctgacattgctgttttgctgaagaaagactctattcagagtgcttatatttgtctttaactacatgtttcaacctacaagagtgaaacaaatccgcatatgtgtttctatattgtcatggaatttttagtcctcgaagataattttgtactaatagaagcttatagtacagtcatatacactgaagagtcaaaactaaggaaaattgtactgcacataatctgcctcattttaagatccattgaggtactttgagaaatttcctccaattttcacttttgaaggaacatatcttaatgtttgccctaaaatttcatgtagcagttccactactctgctcaggatgtggctgtagaggtcctcaaatgtgcactgcttttctactttatacagtgttatgaacacctgcagttttatgaatgaatagactaaccattgataataatgagtctctgtcctcatccgaaagcagccaagcattgagcactgcccttcatcagtggctatcagacactggtttatatttgcacagatgcttgctacaacaaaagataagttactgtgaaagaatagctcatcatatcaatttctgcttctttgctacagcccattatttacaaaatttttcaatttctctgttttttaacctgacaaccattccatcttctattgtctcttctttaattgagggtttattttgtgttaggcatcatatccagtgatacacttacattatttcacttaatcctcacagcagtccccaaaagtaaataggtaaatgttagttttattatatagatgagaaactgagggctaatgaagttaagtaaactgtccaagctcacatagctgttaaggggtaaagttttgaacccaggcctgtcagttcatgaggaattgtcatagcggtaaaccacattttaagattacttatcacattttccctacctagtatgcttttcttctctgtactggcttttttcttcctaccacttataaataatatcatattgagctttggctgtaatcacatagtagtgctttactctaaatacatttctgctttgttttcaaatagattctcagttctagaggaagggaattgtgtttcttattaattttgtctgtgacatatagtaattgcctaatgaatacttga

SEQ ID NO: 3661 - DNA, 1047 bp, Homo sapiens
ttctttgccaagattgatgtccagaatggcatttcttaggttttcttctagattcttatagtttgaggtcttacatttaaatctttaatccatcctgagttaatttttgtgtatggtgaaaagtaggggtctagtgtcattcttctgtacatgggtagccagctatcccagcactgtttgtttattcaataggcagtcctttccctattgcttatttttgtaggctttgttgaagatcaaatggctgtagttgtgcaagcagctttatttctgggttctctattctgttccatgagtgtttatgtctgtttttgtatcgattccatgctgttttgattattgtatccttacagtatagtttgaagttggataatgtgatgcctccagctttgttctttttgcttaggattactttggctatttgggctcttttttgattccatatgaattttagttttttctagtttgtgacaaataacattggtagtttgataggaatagcattgaatctctggattgcattgggcagtgtggccattttaatgatattgattcttccaacctgtgagcatggaatgttttttatttgtgtggtctctgatttctttcagcagtgttttgtagttctccttgtagagatctttcatctccttggttaaccacattcctaggtatttcattttctttgtggctattgtaaatgggattatattcttgatttggctttcagctggagtgttattggtgtgtagaaatgctactgatttttgtacatcgatttttgtgtcttgaaactttactgaagttatcggttccaggatcctttttgcagtctttagggttttctagatacagaatcatattatttatgaagtgagatagtttgacttcttcttttcctatttagatgccttttatttctttctcttggttgattgctctggccaacacttccagtactatgttgaatataagtggtgagagtggacatccttgccttgtttcagttctcaagaggaatgcttccagtttttggccattcagtat

SEQ ID NO: 3662 - DNA, 1046 bp, Homo sapiens
aacctgggaggcggaggttgctgtgagctgagattgcgccactgcactccagcctgggtgacagagtgagactccatctcaaaacaaaacaaaacaaaaaaacaaatgttttagctttggccattgggagttcagttagctttatatccctttgacgtattcgtttgtcgtatccccatcattagtgtacgtgtgtatgtatgtgtggtgtttacatttgaacacttacttgcattctggcactacaaggtgttccaggttcgtcttgtatattgccttcctaatatcagtcctagaattagccatttctacaaggaacactggttccttttattgaacagtggtattagaaaataagatctgggtactaggtattcttgatttgacctacttttactttccagaacgtaccttaatttcatacatctgtgtctttggccataatgttttctctgtatggaatgttctccaccttttatttgcctgacgtactccatttcatcttgagaagcacgaagcctgctcaagtactgtgtcctctggaatgcatacctttattttctgtaggtcatttactgtctctttttagtcgttttacacattttacatactattatagcacatatcctactatagtattgtttacatgcttttgtcctcttagacagtgagctgcttcagggcaatagttggagcattcttatttgttaaaacacaaaaacacacatacgaaattaaaccagttgtctttttgaggaaaaggatggtagtgatagttaaaggaggatttgaatgactggttttatcaaaactagagtctggggagttggggaggtattggtcaaaggatacaaaatttcagttaggggggtaagttcatgagctgtattgtataacatgatgacagtacttaataagaatgtatgtattagaggctgggtgcagtggcccacacctgtaatcccagcactttggaaggccgaggggggtggatcacaagatcaggagttcgagaccagcctgaccaacatggtgaaatcccgtct

SEQ ID NO: 3663 - DNA, 1050 bp, Homo sapiens
aaggagaactacaaaccactgctcaatgaagtaaaagaggatacaaacaaatggaagaacattccatgctcatggataggaagaatcaatatcgtgaaaatggccatactgcccaaggtaattcatagattcaatgccatccccatcaagctaccaatgactttcttcacagaattggagaaaactactttaaagttcatatggaaccaaaaaagagcctgccttgccaagacaatcctaagccaaaagaacaaagctggaggcatcatgttacctgacttgaaactatactgcaaagctacagtaaccaaaacagcatggtactggtaccaaaacagagatatagaccaatggaacagaacagagccctccaaaataatgccacacatctacaaccatctgatctttgacaaacctgataaaaacaagaaatggggaaaggattccctgtttaataattggtgctgggaaaaccggctagccatatgtagaaagctgaaactggatcccttccttacaccttctacaaaaattaattcaaagatggattaaagacttaattattagacctaaaaccataaaaaccctagaagaaaatgtaggcaataccattcaggctataggcatgggcaaggacttcatgtctaaaacaccaaaagcaatggcaaccaaagccaaaattgacaaatgggatctaattaaactaaagagcttctgcacagcaaaagaaactaccatcagagtgaacaggcaacctaccgaatgggagaaaattttttcaatctactcatctgacaaagggctaatatccagaacctacaaagaactcaaacaaatttacaagaaaacaacaaccccatcaacaagtgggcgaaggatgtgaacaggtacttctcaaaagaagacatttatgcagccaacagacacatgaaaaaatgctcatcatcactggccatcagagaaatgcaaatcaaaaccacaatcagataccatctcacaccagttagaatggcgatcattaaaaacgtcaggaaactgcaggtgctggag

SEQ ID NO: 3664 - DNA, 1053 bp, Homo sapiens
atggaaaggggagggaagtatgggaaggactgtagtcttgtggtttgagtgccagttcagccgcagtacaatagaataccaggtaggtttctaaggtgtttgaccctagtctggcttctgtgcagtatccctggacctgccctaaggcctagggggaaattttcatgctttagggaaggatataagcttggttggcttcaccatctgctgatttttgagacataggaccttgtgcgaacatagttggtagccaggtagtagttacaggcagcctgggatgtgactcagtactgtgctggcatcaggtctgacccagcacagtcccagtgtggcagccataggagtacttgtgtcaccccacccccagctccaagcaactcagtacagagagagagagagagagtctccatttgtttgggagaaagtgtgggaagataacaatagtttctatatgctaatccataaaattcttccagatcttatccaagaccatcaaggcaatacctctagaagtctgtaagagctacagtgttactgggcttggggtgccccctaatgcaggtatgacttagatcacaacaccgaagttctttccaatacctggaaagtcttcccaaggacagatacaaagaagccctgaatgcaaaaattacagtaaatacctaactcatatatatgcccagacaccagcaaacatccataagcatcaagattatccaggaaaacgtgacttcaccaaatgagttaaatgaggcaccagggaccaatcctggagaaacagatatgtgacctttttcagacagagaattccaaagagctgctttgagggaaactcaaagaaattcaagataatatggaaaaggaattcagaagtctatcagagagactgaattaattaaaaaagaatcaagcagaaactctggagttgaaaatgcaattgaactactcaagaatgcattttaagtcttttagtagcagaattgatcagacagaaagtattagtgagtgtgaagacaacctgcttaaaaatacagtcagaggagacagaagaaa

SEQ ID NO: 3665 - DNA, 1111 bp, Homo sapiens
agcccttcatgctaaaaactctcaataaactaggtgttgatgggacgtatctcaagataataagagctatttatgacaaacccacagccaatatcatactgaatgcacaaaaactggtagcattccctttgaaaactgtcacaagacagggatgccctctctcaccactcctcttcaacatagtgttggaagttctggccagggcaaccaggcaggagaaataaagaaaggggattcaattaagaaaagaggaagtcagattgtccctgtttgcagatgacatgattgtgtatttagaaaaccccatcgtctcagcccaaaatctccttaagctgataagcaacttcagcaaagtctcaggatacaaaatcaatgtgcaaaaatcacaggcattcctatacaccaataacagacaaacagagagccgaatcatgagtgaactcccattcacaattgcttcaaagagaacaaaatacctaggaatccaacttacaagggacgtgaaggacctcttcaaggagaactacaaaccactgctcaatgaactaaaagaggatacaaacaaatggaagaacattccatgcttatggataggaagaatcaacattgtgaaaatggccatactgcccaagataatttatagattcaatgccatccccatcaagccaccaatgactttcttcacagaattggaaaaaagaactttaaagttcatatggaaccaaaaaagagcctgcattgccaagacaatagtaagccaaaagaacaaagctggaggcatcacgttacctgacttcaaactatactacaaagctacaataaccaaaacagcatggtactggtaccaaaacagagatgtagaccaatggaatacaacagagccctcagaaataataccacacatctacaaccatctgatctttgacaaacctgataaaaacaagaaatggggaaaggattccctatttaataaatggtgctgggaaaactggctagccatatgtagaaagctgaaactggatcccttccttacaccttatacaaaaattaattcaaggtggattaaagactcaaatgttagacgtaaaaccataaaaaccctagaagaaaa

SEQ ID NO: 3666 - DNA, 1016 bp, Homo sapiens
tcaactaatgaggaaagtaaccagctaacatcatgaagacaggatcaaattcacacataacaatattaaccttaaatgtaaatgggctaaatgctccaattaaaagacacagactggcaaattggataaagagtcaagacccatcagtgtgctgtattcaggaaacccatctcatgtgcagagacacacataggctcaaaataaagggacggagggatatttagaaggcaaatggaaagcaaaaaaaaaggcaggggttgcaatcctagtctctgataaaacagactttaaaccaacaaagatcaaaagagacaaagaaggccattacataatggtaaagggatcaattcaacaagaagagctaactatcctaaatatatgtgcacccaatacaggagcacctagattcataaagcagatccttagaaacctacaaagagacttagacgcccaaacaataataatgggagactttaacaccccactatcaacattagacagatcaatgagacagaaagttaacaagaatatccaggaattgaactcagctctgcaccaagcagatctaatagacatctacagaaccctccaccccaggtcagcagaatatacattcttctcagcaccacatcacacttattccaaaattgaccacatagttggaagtaaagcgctcctcagcaaatgtaaaagaacagaaattataacaaactgtctctcagaccacagtgcaatcaaactagaactcaggattaagaagctcactcgaaaccactcaactacatggaaactgaacaacctgctcctgaatgactactgggtatataacgaaatgaaggcagaaataaagatgttctttgaaaccaatgagaacgaagacacaacataccagaacctctgggacacttttaaagctgtgtgtagagggaaatttatagcactaaatgcccacaagagaaagcaggaaagatctaaaattgacaccctaacatcacaattaaaagaactagataagc

SEQ ID NO: 3667 - DNA, 1029 bp, Homo sapiens
gactatccatttttcttagcaccatttattgaagagactgttgttttcccaatgtgtattcttagcacttttgctgagtatcagttggctaaaaatatgtggatttattaatatttttaatttcaaggttctctgttctgttggtctatgtatctgttttgttttgttatgttttttgagatggagtttcattcttgtcacccaggctggagtgcaatggcacgatctcagctcactgcagcctccgcctcctgggttcaagtaattcacctgccttagccttccgagtagctgagattacaggtgcccaacaccacacccagctaatttttgtattttttggagagacagggtttcatcatgttggccaggctggtcttgaactcttgaactcaggtgatccacccacctcagcctcccaaagtgctgggtttacaggcgtgagccactgtgcctagcctatgtatcttttattataccaatactatgctgttttggttactatagctctgctgtatattttgaagtcagctttgttctttttttctgattattgctttggctattcagggtctattgtgcttctatatgaacttaaggattgctttttctatttctgtaaagaatgtccttggtattttatagagatgatgctgtacctgtagattgctttgggtagtatggtcattttaacaatattaattcttctaatcaatgagtatgggatgcctttgtttgtgttctcttcaatctcttttattagtgttttgtaattttcattgcagaggtcttttaccttcttgattaaattgattcctaggttgttgttgtttttgatagctattgtaaatgggattggtttcttgttttttttttttcaaattgttcctttttggtgtgtagaagtactgccgatttttgtttattttgtgtcttgcaacttcactgagtttgtttatcattatcagttctgagttttttggtgaagtgttaggttttctatatgtaagatcatgtcgtctgcaaaca

SEQ ID NO: 3668 - DNA, 1087 bp, Homo sapiens
gcctttttaaggagcaacaatactctgttgtgtgaacatactacatgttctttatttatggatggacatttgagttgtttatacattttggatattgtcaacaatggtactatgaacatgggtggataaatatgtcttgactccttgcttccttaaaagtcttttgggtacataaccacaagtgcagttactggatcatacggtaattttttcccttgtatttttagtttacatgtaataattgtgtatacttatgggatacaactgatgttttcataagaatatgcaatgtgtagtgatcaaatcagagtaattagcatatccttcaccttaaactttttttttttgttgagaacatttaaagtctgcttttttatctttttgaaaatatacaataaattatagttaaccatgtcaccccacagcgctgtagaacaccagaactcattcctcctatctagctgtaattttatatgttaaccaggttctccccattctccctctcactgcccttcccagtctccaatatctacagttgtatactctaattccatgagctcagaattctttttagctcctacatatgactgagagcatgtatttatctttctgtgccttatttagtttaacatagtatcctccaggcttatccatgttgctgcaagtgataggatttcattatttttctttgtagttttgtttgtttgtttgttttttatgtttagagacaggatctttctgttgcccaggctggagtgcagtagtgtgatcatatgcttcagtaatgttaaactctggggcttaagcgatcctcccccctcagtctcccgagtaactgggattacaagcatgtatcaccacatctggctaacttgttttactttttatagagatggggtattgctatgttacccagcctggtcttcaactcctggccttaagcgaccctcctgcctcagcctcccaaatcactgggattacgtgcatgaggcacactacatctggcccaattccattctttttcatggaggaatagtattctattgtgtatataaaccacatttttctttatccatttgcctgttga

SEQ ID NO: 3669 - DNA, 1013 bp, Homo sapiens
aagtccaaaagcagcagcctcatttctgtcctcctttgaatttcatattaaattgcttacatagaatgaaggtcgagttcactggcaggctaacaaagctccttgtaatttggccttatatgccctatgccttctgctgtagtaatactttgatgcttgtaattttcttgaacttacgtcattttgtgtctctgcttttgtcagttctcctgactcttagttttgcctgactctgtcttcatagacttgtgtgtaggcattattatctcctgtgaagtcttctctgacagttacttactccctcctctgtatttctcattcttcttcttttttaaaaaaatagatctgcaatacccatatgtatttctcattcctatatatccatctgtcattatagctatcacattactttgtaaatatctgtttgtctttcttactaatttgtgagttctttacagccaggaagtatatgttacttgttttgctatttctggtacctggcatgcttcctggcacatagtacgttctcactgaatattaaattgagctgaactagttaattttgagcttgttgaaataagaaggaaaagataatggttgggtctttggatgtttattttgtcatcagaatgcagctgttttagctttctgtcatttgcatatgtaaatggacattagtttgttagttaacactgtctgagtgccctgaggtttgggactgtgtcatgttcatctcagtattactagtacctagtacattgcctaggaaatttcaggatgtcagtacttattaaaatggggcaaatgaagttgaaatcagatgaaaacattgatgctgcaaatataccacatcactagtagcgttcataattacttctatgtgttagctttaagaataaatctggctggacgtagtagctcatgcccgtaatcccagcactttgggaggctgaggcaggaagatcccttgaggtcaggagttcgagtcagcctggccaacatggtgaaacccc

SEQ ID NO: 3670 - DNA, 1038 bp, Homo sapiens
cctgctgcttggagtcttgttgatagtagccttaattaaatgatgtatgataccaattgatcagatttagttcaagcctctgtcagttggattaatcagagtgcctgatagtggcatacttgtgagaaaatttatcagctgccaagatggttagaaatgaggagtggatgttgttgggacacaattctctatgtctcgtatgtttctgcacatcttgtgaatagggtactgattgttctagattttcttctcaaggatgttatattgctaccagactagatagtgtttccccagagggctggttgcttgcaccttgaaggtaaagatactttctccctccacagcaaaggtcaggtatgcttacagtccattatgaaagattcacattccctaagcacagggttcctctcccgtaacgcaatccatgatgtatggcccactctgtgtcaccctatgggaaattggccttgggaattggtgtaaaaattgctgatactctgtaaaaaaaaaaaaaacaacgacaactaaaactctggctgccgttattgtgaggaataaattgctttgtccttgtcttaggagtcctgtatcttcctccaatatccatgaaattgtaacaggccaggttgttagcttgccagtaagtagggtggattcttagcttttttgtagttgttaccaccctgcaaggtaggtaatccctcattttgcatattgatcttagagatagtaattataataactacaactaacatttactgaacatttaattcccttcccttccctttcccctccctttccctcccctccccttccttaaaatacagtgtggtttacaacaaagtttacatgtgatgtggtgcagtggcaccatcatggcttactacacctggctaatttatgtgtacatatatatacactttttgtagagatggggtttcactatgttgcccaggctggtctcaaactcccgggctcaagcgatctgcccacttcggcctcccaaagtattggcattacaggcatgagccaccgcat

SEQ ID NO: 3671 - DNA, 1059 bp, Homo sapiens
tacggacctttgcctgttgctaatggcctagctctttggtctgccacttggaaagctatagactggcaagttaaagatagctcttgttaaagctgtgaactatgaaaacaaattatacttgctgatcaaaccatctggatcactcatctagatgcccttagtaagggcctgtcttctgatgaagcccactggaatcaagcttctgattgagtgtacactgcccagagccatattcattatattggatatgacgaatatcaactatcataaactgaacacaaagcaaaggactgtgacacagagggtgccattacatgccagacttgtgcctcctgctaaaagtttaaccgtttgtcacatgatgagagaagccagtggcatgggatgtggctcctgcttgctcctggcagattgaatacattggacctttgacctgcctattcagccagcttcctatcagtggtgcctcactcctgttgccatttttttttatggttttgatgttgctgttctagtccaatcagctggctctggccacgccatcgtgaccctagaaaccaatctgtgttatacttttggctttctggactgtttgcagtctaacagtagtgcaccttttatcgtacaagccactcagcaatgaactgattgtcaaggtatttgatgcttccatgctccctgccgttcataggcatctggtatgtggataaacattgaatattggaacagcttcttcaaaaattgactcaacgatttctgattctacatccttcacctcctcttgatccacacaccttacttattagaaagccagttttgccactgattgtagctgtccccagaaaaggattatctcgtcttgatcactcctgagtaatgatcagaatggaaggggtgggaggttatatagccctattttgagaattcaggattccaccctgaccaattttaggcatgatgtttctttttaccccctagtaacaacccaaggccagcctggttggtatctatcttctatgtggcagctaggccaaaagatggcttaaggaattcagactt

SEQ ID NO: 3672 - DNA, 1658 bp, Homo sapiens
gaccagcctggccaacatggtgaaaccccatctctactaaaaatacagctgggtatggtggcgtgcacctgtagtcccagctacttgggaggctgaggcgtgagaatcgcttgaatctgggaggcagaggttgcagtgagctgaaatcgcgtcactgcactccagcctgggcgacagagcaagactctgcctcaaaaaaaaaaaaaaaagaaaaagaaaagaaaaagaaataagagtctgagatcttcaccattttctctctgtctggctccctctcttgccatgtgatagtctgggttgactgtgagaggctgtctcccgctttgccttacaccatgattgtaagctccttgaggccctcaccagaagctagcggatgctggcaccatgctttctgtatagcttgagaaccatgagccaacaaacctcttttctgtataaattacccagcctcagattttttttatagcaacacaagaatggactaacagagtatatttcagtatactgatgcttgatgcttaggctgtttcatgacttcacatttttggatccttacttttcatgttcctttggaaagtttctatttctctttcaaaaaccacctcctaccttttgcttgtaacattcataccttgtacccagttagggttaatagtttcttttctattttgtacatctctcttcttttgagtcttatgttagattgtcagtgatcaatttacatgtttctttctcgtactgtcagctctgttggggaaacaactgtctggatcttaaccatctgttcctacagtatctagtaaaaggtgctcagtgactatttactgaaggaatattcttagtttaggctgttatggtacaaatggaatagaattgtaaatgtttatgtatttttgatatctatcattgacatgattttgaataataaaatctgtcattgagaaaataaagatttgactaaattgagggttgtaactttaaagtgatgcatatatagagaagtacaaaacacttctgctcttgtttagcttttattgaggggctcaataagatgtgataaaatataggccttgaggccaagaactttgtaaaatttgaatgctgctgctgaatttgctgttttattcactcttcctgattataatttcattctcaaatggattttaaggcatacattttattttcaagtcaaaattgttcaccatgttaaatcactagtcattgactttaaggtgagtttgagttaatttcaaaaagcagtctggtaaaattaacagaataattacacctggctttatatttacttgtggttatgggggaataatagagataggaagaatgagatgtcaggttgtggtaaaggaagaaggaggagttttcaggttatgtgcaccttaatggctttcaggtggggtttgagtcacctagtttttctctttgcagttcatccaggctccctggattctttaatgattgaactataatagaagagtgttagtgagaggaaagcttcttctcttttgccctccccatcctctttttccctaagggaagtagtggttgaatttgttttttaaaatcaattttagatgtatcctttctttaatagggaaagagtaatagcagtaacttctagcttttggttactttgtata

SEQ ID NO: 3673 - DNA, 1032 bp, Homo sapiens
aattggaatctttggagggtaagaagataacaaggagacagataagactatatattccagagtatctctgcaatgaattcacaagcttaataaattacctattcatatttgcggattcccctcccctacagacttgaattgcttggttggtgtcctttctccaggaatactttaaaggataagtaaaggctgttctcttaataaacccagtcgtagtgccactgacatgtaagtatcttaggaaggccctttgaaagtagaactgtatgcattgtgaaagacttggagctagaactaatatcctgtgagtgctacctttgccttttgatgtttggtgaaggaattattttagtgagatatttttggccattttggcatcaacttagaagctactgtcaagtataggcagacttttccctcttttttaatactcacattgcacaggttctaacactagcttagtaggcagtatttttccttgctgaaattttgttgggcttttctctctctctgttctattaagttccttattttttttaaaattaattaatttttttttttttttgagacggagtctcgctctgtcgcccaggctggagtgcagtggcgcgatctcggctcattgcaagctccgcctcccaggttcacgccattctcctgcctcagcctcccgagtagctgggactacaggcgccggccaccacgcctggctaatatttttgtatttttagtagagacagggtttcgccgtgttagtcaggatggtcttgatctcctgacctcgtgatccaccctcctcggcctcccaaagtgctgggattacaggcgtgagccacactgctcccggcccttatttttacaaattaacgttcagataaccattttcagagtttgctgttttggttacccagtgaaatctgatatacaggtattaggaatatgcatatatctacagtttgattaaaccataacctccaaactaataaaggagtgtccttataataaaagttgaccataagattttgatgtttt

SEQ ID NO: 3674 - DNA, 1066 bp, Homo sapiens
tgccaaggtggttccgacctcagggcctttggacgtgctgttctctctgtcagaaacactttctgcaccgggctttctgtaccagatttcagctcaaatgtcacctcctcagggaagcctttcctatccccagactaagtcaggcccaaggactcttctccttggagcctgtcatcaccctcatagtgactcaatcggggggcggggggggggggtctgtcccttaaagtgagaatgctgtgggggcaatggcttggtggttttggtccctgctgtcttccagtgcctggcacagagaagcttcaagcttgctaattgaaagccttcaaaatgctgtcagcccaggaaggaggcagacacatcattaaaagcctctgtcctgccccaggtggctgggctaggggctctgtgcagttggtaaccaggagaaatagagttgaattccaaccaggagactccaggaagacttcctgaaggaggaggtgttttggttagcccagtggttttcagctaggggtgacttccccctgtgagacttttggcagtgtctggagacattctggatgtccagctagggagacgatgctactggcatctggtgctcaggggccatggatgctgctaaacatcctacaatgcacagaacagctcccctgccacccccaccaacaaagaattatccagcccaaaatgtcagtagcgcggaggctgagaaaacctcttttagataggatgtggaatacgaacaaatgtccagaagctgcccatggctgagtgtgccagggcccatacggctgaaattcagggggtgaggagtgtgttatcatggtgggagatggggttcgaaattcctcaaataccagctctcaggattaccagaactgtatgaatccaccaccagggagtttacctgaggcccagctggaaggggtcccagcccctaccccccacccccagcagtggctgaaacaggacttggcatctctctgcagggagctggacagccttgttcagtcctcacaatactgcaagggtgagaaccacccgcactttgaaggaggagtga

SEQ ID NO: 3675 - DNA, 1063 bp, Homo sapiens
cagggtccagcagggaaatggtgaaacaagcaataaggggtgccgagaacgacccagggaccccatttcctgtgggaaaggggctggtcaggagggctgcctcattccctggggctcattgccaaatagaaattcagggtcatttgttcaaatattattaaaatttaaaaacagtgacagcagagaattaaaccaaacatgggccctttttaggcacaggccctgtgcaacagcatagaccacacacccgtgaagctgccctggaaggcttactggaaaaagtgacatttacactgagatggactggatgagaaggagtcagccagatggagggcgtttctaggcagagggaacagcctgtgcaaaggctcagtagtgaatgagggtctagagtatctgagagatggagacactcaccttggctggagtgggaggagctgaggcaggtcccagaaggaagaaggcagggtgatggacagcggactggggatggggagtccatagaagcaacttgggctggagaggaagacaatgaagtggggtctgaaaggaccagaaagtggagtagggggagcttcagtgagcacgaagaggaagagacttggagaggccaaggggctgcctctgccttccagtgccctccctatcctgacagccggtctgggcccaagaaggtgggaccccagtagacatgtcccagagtgagaggacagctcaggaatgaggggactagcggcctagatgatatatatgcaaatacaaacttgggtacaagctaaacttggagtgcctgaggtttgagggttgtcatacctctgtacttcatttcccagttcagactagagttgggggcttccaggaggtaggctggggaggggctagtattcttagccacaggtgcctgttggggccttgggcctcagactagaaattccacatttctgccagctgcccgggtggggctgtccctctttctgggcccagcaccagacaagtttccacaggtggggctgggcaggtggtgctgagtcccgggcctcagacctgcagtgggagaggaaga

SEQ ID NO: 3676 - DNA, 1005 bp, Homo sapiens
agcattgcactccagactgggtgacagaacgagactccatccaaaaagaaaaaaacaattattgaggatcccttctgcatgatgagtcagttttctctcactactttcacagtgctatctttgtttctgtctttcagcagtttgattataatgtaactcagcataggactcttttgagtttatcctacgtggagtttgttgacctttttatatatccatgtcttccctcaaagttggggagttttggccattatttcttcaaataagctctctgcctctttctttccggtataaagattagtgtgggggtgtctccattgttcttttttttcccctcaaacttagagctggaagaaaccttagacatcctgtgggccagaatttcatattaccttccacaaaactaacttccagagaggtcttcaggaagttggcaaattttagttacgtatttttaaagtgtctttgaacttttaagaactacatctcgttaattatatgtattcgtatatattattatccaaattttaacaaattagagtgcattggtgctttaaagtgctgtcaactactctgagaatgcaaaattcttgttttaaaatgtgtatcttacaactccttccttggatgaattagatttttttagatggagaaaccaaaatcaagtacagccataccttggagacattatggtttggttttgttttaggaacccaggctggtcttgaattcctgggctcaagcagtcctcccacctcagtctcctaaagtgctaggattacaggtgtgagccgctgcacctggcccagcatgggttcttttccataccaccacaataaagcaaatattgcaataaaagaagtcacatataaaagttctgttttcactatactctggtctattaagtgtgcagtaacatgtctaaaaaatgcacgtgtcttaattagaaaatgcttcattgctttaaaaaaaaaaaatgctaatgatcgggcacagtggctcaca

SEQ ID NO: 3677 - DNA, 1049 bp, Homo sapiens
catgtacttttctgaatagatgttatatttcacagttaagattagaaaataatatgtattatttccagttagtaagattgcagatcactatggggaaacatttgttcctaatgtctatattccttaattaattaagaatttgtaaagaatatattctttggagtggtgatgaggtttcagctgtgaagtgttgcctctctcattcatggttttgtatgctttgtttaggtagaaacgttgaagcacaatgatccttttgctcctggtggaacagttgttgcagcaagcgattcaggtaaataaataatttatcaacttcattgaacattaaacattttttttaagattcttttttctttgtctctaaatatatttgtcctgttatttatagctttaaaattattgcataattatatccaatagtaatttaccaataataagcatttgtatatcactttctacttatctttcattctttcatttattattcatgttgaatattacactagaatatgaactctacccagtatcagtaaaccaataaaaatgttttgctttataaaatgctgtgttgcttggcagcttcaaagtcagcattgactgttacggatcttggtctaagttaaaagattagtggcttccagtagaaaatgaaaattgctttacaaatacaaatgggttctgttaataatacagagaaaagctaaatgttattttagcatccagtcttcatacttcatttatggtataaaattttttatttattcttttaataactttttaaatagtaatctcattttaaacataaactgaggaccagaatattaagcagtgttcatcaagatcgtacagtttaatagatttgaaccaggtaaagccaagattcaatattaggtctgacaaaaagctttttcaacaaagtaactctgcttcttttctactgttcatttaaaacaaaacagataaacagaccagctatcatttgggatgggagagcagaaaatttgaggaaagtaaactcaaatgtgtaaatactctaatattatgct

SEQ ID NO: 3678 - DNA, 1051 bp, Homo sapiens
tgggattgcaggtgcctgccaccacacccagctaacttttgtgtttttagtagaggcggggtttcaccatgttggccaggatggtctccatctcttgacctcgtgatccgcccacgttggcctcccaaagtgctgggattacaggcgtgagccaccgcgtctggcctaatttttgtatttttagtagagactgggtttcaccattttgaccaggctggtcttgaactcctgatgtaaggtgatccgcctgcctcggccttctaaagtgctgggattacaggtgtgagccactgcgcctggcctgctttgtattttcctactgactaatgttgaacatctttctagatgcttattagccatttgtgtatcttctttggaaaagtgtttattcaattttggtgaagtccagttatctattttttcttctgtcacttgtgcttttggtgtcatctaagaaactattacctaagtcgcaaagatttaatgctgtctttgtctaagagttttatagttttgctgttacagttagatctttgatccattttgagtttatttttgtatatgatgtgagatagaggtcgagcttcattcttttgcaagtggatatccagttgtcctaacaccatttgttgaaaagactgtcctttctccattttgtgttcttgatacgcttgtcaaaaatcaaatgaccataaaggtaaggatttatttctggactcttcaatcctgtaagaatttttttttttttgcttcagtaaagctcagtacctttatttctgaactggtgatgataataccctcccagtactcttgtggagagtagagattttgttagtaaaatttttgctgtaatgtcttcccctccatccgtaacctcaacttgtgatcaaggtaagtatagttggctgtatatttcataaggtcaatgacattccttattttatctactgtgaagtgaagttattgaaataaactttgctttgcttttgtttgaaagttactctttaagtagtggtgtcaccacagtaaatattgttatttggatttcttt

SEQ ID NO: 3679 - DNA, 1026 bp, Homo sapiens
tgctttggtataattttctcactttcctttatgctggagctaaatggagcctgagcttacattttgggttatgtctgagatggaaactgaaatgtagtcttgaagctcgaaggagaaacttggctatactaatctggaggacttgttaaatgctgtcttcccttctccatgttgccgccttttacctttccctgcgaccccagaaatgtactgctgcagaattctttgagctttttctctcattttgtagaaaagaaagtgaagggaggtgtgtgtgtttgtgtgtgcgtgtgcacgcatgatttcagtacaactacaaatgggcagttaaattgttacatcaaaagtgacagctttattttgcaattctgaatctaaggttgcttgggattcgttcatagccactcaggcctgattaaagcatataagaatttaggtaacgatgtttcaaagtaaaagcggagcccagcatgtttgatttgaagagcagaagagataaatgctgctgtggttctttttttactttatatatactgtttgtatatttgatcaattggatttgatatatggtcctaaaatagctttttttgagatgtaatttttgatagagcaaattgcctgtgtattaataatctttcccattttctctgttgtttcattctaaaattgatgcacaccagtgatttaaggggaaattaacacttcagtaaatgtctttttccttagtattgttgactgtttttattagccattttcatttaatttgacagtggtacctaagggttaaccttacagagctgatgcaacccctccttttctttaccagcaattttcattggacactatttccatagcaacagtgacatcagtgaaacctgagtgtttcattgattatttttctcctcttccttttttaatctatcctcttttcaccacattttagtgagaaagcaattttttttttacaaatggagcttatattgatttttatttcataaataattgaaagagggtagaaaaatctgc

SEQ ID NO: 3680 - DNA, 1019 bp, Homo sapiens
agaatataagaaatatggtcaagtatcctaagtgcacacaaagatatgtttagatatttttatttgcctgaaatgagaagaatagttataaaggttaagaatcattgcaagacaacagaataacatttgagcatctctgaaactgtaaactaggtcaagaaaattacttgattttcagtctgatatacaggacaagttttcagtcataatttttttaatagaaagtgatataattgaacatttaattctttttaagttttctgtttagcaatatatgttatactacttggttgtgctaataaaaggaatattgtaagaccagaattttattagataaacatgaatcaaaagttaaatttaattgatcttcttactaagaggaattaatgcctaaagatctccatattttttttttagttgggaatggtcttcaggatatgattagagataacaccatcctttcctccccttcctcttcctcccccatagaccccaaattatgaagagaaatttgtagtcctcaagcttcctccattttacccaaacatagactgtgtttgctgtttagagctgagtcctttgtaatctgttttggattttcaccaagtgagcttccttcctttgctctcccatctttctgccttggctactttgagtcagctcactggcttcttgtagccctgttttcctgcatgcacacttgatctgagcagacactgtcagtgacagcagttagcagcagagcagaaagaattcagtacaaatgtgtgcactgctgatctgtgacactgtagtgttttctatttttgttattatctactttcagaaaccaggagctgagttgatactgaccttgtgtggaatgcctctgaggatttgggatggggggagggtgctagattttcatgtgacttatctctaacatgctgcagcaagactgaaaacattcatctgctcacataaggaggaaagaaaatttccaagattgagcttgcagaatttgttgggtattttcagaa

SEQ ID NO: 3681 - DNA, 1031 bp, Homo sapiens
caagagctttcataattgttacttgaccctcacacaaaccttgtaatttgagataggtggtggtgtttctgttttacaggtaagaaacttaagatgcttagatattttgcccaaaatgatacaagcttgtcagctgcagagctgatacctgatcccaggactactttattctaagttgaatcttctttcttatacataggtactatgtagaacagactcaaatacaatttgatttgaatctgagtatagcagatattattggtacttccttaatttccgtgttccctggaaactttatagtaatactgattgtaaaaatgactataaaattactttttaaaagtgagataatttttctgtctacagggcactgtatctaaatattcacaccagtctttttctttttttaaccctcacaacactttgaagcagataatggctgatatactttattttactgacagtattgagatataaggagattaaatgagttaactgccttatatggcaataatttggcaatgatcttaaccttatctgtgagactatgttgagatttctgtagaaaaactggttgttagaatttttcagttgtaagaaagaactaaacccaaactaagagtgaaatttattgacttgtgaaactgaaacctttcagaggtagggctggcttaaagcattccttgatattgaggctcagatgatataatcagttctcttgctctccatttcttgtttccatttccactgggttgattccattctcagatagactttctccttattttggcaagagggctatagtacatctagctacatgtacttataatttcaaatttggtgaagagtgcctctcttctggcatttcctggaaaagacctgaaattcagtctgattggattggcttattggccttttcctatgacataaaacttctaatattgaaatctgaccagggcaaaaaacacttcgtggtgattgtatagtttaattttgtccttactcacggaaaaaaaaaaatcaaatccaaa

SEQ ID NO: 3682 - DNA, 1044 bp, Homo sapiens
ctgggttgtccaaggcttttttttttctgcccccagcctgcctcttgtcagattgagtaaaggaagataatgacaggatatgcaaatcagccagtttggctatggttaacactgctgggtcaaactataaaaaataaagattgagaattatctgagtattttgtttatacagactttcagttacctatattaatgtgggcattagtcaagagttaactatgtttgaatttactcatttcttaaaaaaaagtaaaaatgtgcacctatggataagtcctaactgacctgtattttcttctgttattttctcttccccacagcattttgattgagatgtcatatggaagtgatacattgttgctctgagttagtagggtagaattgttcagaatttgtgatggatattgtaatggattgaaagagtgacacttcaaagtttgtttcattttggcagaaatactgttttttttcctccctgtagtgggttgtatcccctgcagaaaaagctaaatatgatgaaatcttcctgaaaactgataaagatatggacggatttgtgtctggattggaggtccgtgaaatattcttgaaaacaggtttaccttctaccttactagcccatatatggtaagactttatttgaattgattttttaaaaatatggttttgtatcaattccagtttctgcattttgatttttagtcatttgtaaataggacagtttttgtttcagaattttttatagagaaaatcagaatctgaagaattcttctggctaatggacaaaagcttgagaatgggttacctgaagctttataagattgacagcatccgctgggcatggtggctcacgcctgtaatcccagcactttgggaggccgaggtgggtggatcacctgaggtcgggagtttgagaccagcttggccaacatggtgaaaagctgtctctactaaaaacacaaaaaattagccagacatggtggtgtgcgcctgtagttccagctactcgggagggtgaggcaggagaattgcttgaacctggga

SEQ ID NO: 3683 - DNA, 1032 bp, Homo sapiens
tgctcatgatttttgtagatttagagtttgacaagatcctgtaatttagcttctttaagcacagcagttcctggcttacaacccaggctaacctgagccttctagagtcatgctcttttttttttttttcctaatgaactttaaattttggagtgattttagatttatagaaaagttgcagagagcacagttttccattccccttcgctgttttccctttttaccatattacattaccatggtacatctgtcaaaactaaaaaaccaacattggtgcattattaactccagactttatttgggtttcgccagtttttcctttctgtcacaggatccaatctagggtatcacgttgcatttagttgtcatgttttcagtctctctggtatatgagtttgtcagtcttgccttgctttttatgaccttgacatttttgaagaatactggctagatatcccacagaatgtctcccaacttaggtttgtctgatgctattctcgtgactagactggacaaatgagtttttgcaaagaataacacggaggcgtaatgcttttgtcatcacattatattgggggtacatgatatccatgtgacatcactattgatgttaaccttcacttatttaagataagtgtttgccagatttcaccactgtaaagttactttttcccttttcctactctattctctggaagtatagactcatgccctttttactttgctgtttgtctgcatatctatctattggtttttacattcttactaagccttaaatttttctatcaggtaagttcttagactgaaagtggcttaagcttttgtcagtaatatttgtttgggtcttcattatgtgaagagtttttggcacttagagatgtatagaggagctgtttttgtgtgtattagtgtgtatcacgttgtattaaaattaactgtttacatatttcctcctcctattgggtcgtaaaactgagcacgatcttttccctttttttttttttttttttttttgaaacaaagtctcactct

SEQ ID NO: 3684 - DNA, 1043 bp, Homo sapiens
aaaatccaaaacacttctggtcccaagcattttgggtaggggattcgcaccttgtgccccttttcctgtactagtacttatttctcctatgttgaaaacaagattttcaaccattactctagcaaaatgagtcctttagattatttttatttattttcttccccatcatgttcttttttttagttttaatttttattttttttgagatggagtctcactttgttgcccaggctggagtgcagtggcgcgatctcagctcactgcaagctccgcctcctgggttcacgccattctcctgcctcagcctcctgagtagctgggactacaggcgcccgccaccacgcctggctaattttttttgtatttttagtagagacggggtttcactgtgtttgccaggatggtcttgatctcctgacctcgtgatctgcccgcctcggcctccaaaagtgctgggattacaggcttgagccactgtgcctggccccccctcatgttctaattccagaagaccttagaacattttttgtgactcaaattctagattttgctcagttaatttatttcttttggttttggtatttttcttccagttttgttcaatattaataactagtattcttttggttagaatttgtctgataaatctttctttatccttttactttaataaatagagcaacataatctgtactctttttaaaaattataattactgcaagatagcctgtgtaactacagctgcaagtcattgatttgtttttatttacaagcatcaatattttacaaaactgaattttgagagctgatatcattcttccttgaaaattgaagtaatttaaaaaatacttttgcagtagtgacgtagctaagatctgaacattttaaattatcctcctaaataataaaatataatgttcttatttatatgatcagtccttttggcctatggcagtttatactctgccaggattttggtttgttgaagtataatacaagtttaggtcttattttactagataatcaaaactgacttgaacata

SEQ ID NO: 3685 - DNA, 1045 bp, Homo sapiens
gtgcaaatttcctcttttagttcatccttagaggaaaactatattctcatcagattattgggtgaactttttttttttttctttttgagacagagtctcactctgtcacccaggctggagtgcagtggcacaatcttggctcaccacaacctctacctcccaggttcaagtaattctcgtgcctcagcctcccaagtatctgggattgcaggcacatgccaccacgcccagctaattttggtatcttttgaagagatggggttttgccgtgttggctaggctggtcttgaactcctgacctcaagtgatctgcccacctcagcctcccaaagtgctgggattacaggcatgaaccactgtgcccggctggttgaacattcttatatagaatttatatttattttctaaacaaatggataacagaaaatgtgtgttctgccatcttcattttatttggctttaaggtacataggaacgtatactttgtataattactgtaaagatagtatcttttgtatcacaacctgaccaggtatcttagtacctgcttctaatatggaataattttgcttcaaatgtatctcccaaatttcacatttccttttatttcatttaaaggaaacatgaataacacttgagtttcacttcatttatgaaggcagaaaagttttgacattttatctgaagacatgtcatcttagtaattgaatagttaattccaaatatggttgtattcacctcttccttaaaggtttgataaaactttgctgtgaattcatcagtggtaaatttctaatttcccttttactctcagattttctctttttattttggtaaggaattactaatttcttttactttcaaacttgttgctacaaatttgtgatactctctttcgtggttgttctctttactcactccaagtcttgggagtactcccacttgtatttttacttaatctgattttgtctagtttattgatctgttagaagaaccatcttttgaatttacttatcctttctattatattttgacttttaattta

SEQ ID NO: 3686 - DNA, 1040 bp, Homo sapiens
tgaatattatattttgatgaaagtgaaaaatgttttttaaatgatagtttaaaaacatatgtagtctattctttaaggacttgatttttataactgcagttaaatccttttctcttattatttaacttgtgattttgttttttattgtagcctgaagataaggccaaatatgatgcaatatttgatagtttaagcccagtgaatggatttctgtctggtgataaagtgaaaccagtgttgctcaactctaagttacctgtggatatccttggaagagtaagatattatttactccgaaatgtaatttttatgtattttaattttatatctattatgccaggagcatgtataactctttgttaaaaatatacaaatcttattttaaagttgtatcattataggattttttgttttctgacttaatgtataaaattattgccagcatatttctgtatttggttattccctgtaaaaatgagtggttgaaatgaattacatatgtaagccccttaagtaggtccttttttagtttgtgctgtacactcttgacctcctatttgcttgagttaatttctagagaccatcagtattttatgtctgccacttactctgtggctgtatcatggtgtcttgttgtaaggaatagttttatctctgaaatcataaattcttctctctaacttgtacttcctgtctttatagagctcttttccagaaactagcaagactaattctttgactggttttactaagacctttaaatctgacttcttggctgggcatggtggctcacacctataatcccagcactttcggaggctgaggcgggtggatcacgaggtcaggagttcgagaccagcctggccaatatggtgaaaccccatctctactaaaaatacaaaaattagccgggcgtggtggtgcgcagtctgtggtcccagctactcaggaggctgaggcagaagaatcgcgtgaacccaggaggcagtggttgcagtgagccgagatcgcaccactacactccagcctgggcgacaagc

SEQ ID NO: 3687 - DNA, 1051 bp, Homo sapiens
caccacacctggctaatttttgtgtttttagtagagagacggggtttctccgtgttggccaggttggtctcatactcctgacctcaagtgatctgcccgtctcggcctcccaaaatgttgagcttacaggtgtgagccactgtgcctggccctaagtattattttaaacatgagtattctgtatgatttccactatctgtatgtattttcccatttatgttattattagcgattcataaatactaggaacatctttctacataggatttttctgcaagatatttttgaagcaaatatgctacttgttgctacataagacctctgtagtaattatgaattgttttatatttttagattgtaagtatttgtgcaggtaggtaagttggtagagggagaatgctcttaacattcatacttttctttcttaggaattctttgttgctttgcgtcttgtggcatgtgcccagaatggattggaagtttcactaagtagtttgaacctggctgttcctccaccaagatttgtaagaaatgcttttagatttaaattgtatttaatttttaaaaagtgacaccacgttatttgaaaattaaaagtaatatattaaaaggaattctccctttggccctttcactcagctacttggcttttttccccctactggctcctgctgtttttagttaatttcttgtgtatccttccagagtgattatatatgtatatgtgagaaactataggctgggtgaggttgctcacgcctgtaatcccaacactttgggaggcagaagtgggaggatcatttgaacccaggagttcaagactggctgggaaacaaagcgagacccccatctctacaaaaaaatctaaaatttagccgagtgtgttggtgtgcacgtctggtcccagctacttgggaggctgagatgggaggatcatttgagcctgggagctcaaggctgcaatgagccgtgatcacaccgttgctctccagcttggttgatggtttaagaccctgtcttaaaaaaatatatatatataaatacttatttt

SEQ ID NO: 3688 - DNA, 1028 bp, Homo sapiens
gattttgaacagtatgcaaccaatttctagaggacttatttttaaaaagactcactattgagacattgattggatttataaagtagttttttgaaagtactagcctcggaagtccgatgacaggttgcaaggagaatacacatattgctctgttgcactattttattgtattcagtatcagtcttatccttaaaaatttaacagtgggaatatgaaaacatttataaatgttgacgtttgaagctgactcattaatagtgatgtcactagagctccatgataaatagaaactgcctcagtggttctctgcaaattgtctgcccatctattttctggagaaatgaaaatttagagcttagtttttattggatacagtgatgtctttatagctcattgctcctgaaaaggcttatgaaataataaaatggttaccaaacaacaaaataaataaacagttgtagacttgtacaatacaataaatgacaaaaccatctaagagttttcatactattgactttgcacatacttcatttgcacccaacctgcaatttcccactgacatagccagctggtggcctagtgtgtcttgtggtcactgtacatgccactgcactgcctggcataccaggtaaccaacaggagcaccagtgtcaaatatttctcctaatattttgcaagaccatacagagttaattgcccatggttgcttaagtctgaggatacttttcagtaagtctatgcactccccttgcaaagaagttgttttgttgaatctgtaaagaatcagaacaagaaagatggaattatcactagttctcttccagatttcatcacttgtttatgtggtgaaagcacttatagactactagttgataacttggccagaaactagatatacacagtagagatacaaaatccattctggttttagtgtattttgatataatgattgataatagtttttttaaaatttaaaatttaatttaattttttatttaaaaaatttttttaaatggagacaagatctc

SEQ ID NO: 3689 - DNA, 1033 bp, Homo sapiens
attaattgattgtgtgctttatagtttaagccctaatgtgtacagatattttatatatgtccactataatttatgctgttgcaaataacctttgctctaccatttgataaatttttttctgtagagttatatgtggtacttattatattattgaattatttttctatgtatacatttgagttttgaaatcaaatgagtgaatttttagtttatattttaagatcttgaatggtaaagcagacagcagcaagggttaactcgagcaataatctgaaaaatgctattctgaagggattaaaccgagcatatttaatttggttgcaagggccatttatagtttgtcagagttcacttagcataggaaattggcattaaaagttgtgagcttgaagaagattgaaatatttcagtttgtatatacagttttcacccttctctgcagtctgtattgctttcattcttagtttgttctctacattcttagtttgttctctacattctgttctgttctgtttttttttttttttctggcacacttttatgcggcgccttgtaagatctgggggtggattctggaccatctggcacttcagaatagctcaaaaccttaactctcttgactctactttgagccatacttgcttgaaatgtcctggtttgtctctctgcttggcacgttttctgctttataccctcagagctttttatgactaatttcttccttaggacaggaattttaagagtaccagtattcataagttaaagtggacaagacttatttcactgtaaaattcaccaaaaaaaccctcataaactttgcaatctgtttttaaatgtataattgacatgagcacttatgtctgtttgataaatatttaaaatattcaaaaatggaattttttaaggtactgcttatagtttttctttgattatgaggccagttaggaaagtgtaattctgcaaattgtaaatctactgagttgatttctagtcctagctttaaaatacttcatatgtccaaattaataataag

SEQ ID NO: 3690 - DNA, 1068 bp, Homo sapiens
gagggaagttgtggaagttaggggagacgcccgcccgcccgccccggcctcgcctgcggccgctccctccgcctcctccccgccccgagccccagtcagcccgtcttccttcccctcccttgcatgatggaaacaccatggctgcggcggcccagctctctctgacacaggtaacgccacacgcccgtccgccgggcttggccggccggtgccccctcccccaccgccctcagcttcgccgacttcttggcttgtgggccaagcaggcagcttcttggcttgtgggccgggcggccggtgtgtgtgagggaaagcgggtgcgactgcgggagggcgccctccggagccggagcccccctgcggccgccgcgacctcgcccagggtcgtcgggcgcctcctgccccgccccgcgcggccctcgccgccctccgcgccgctgccgagtggactgtgacccggccgcgctctgccggtgccgggccggctcccgcggggcagctttcacctacccaggaagtttcctcccacagggccgcacgcatcccaggtgagctcctgttgagctcgcgcgggccggccgcacccccgggccgcacgaggctcgcccgccaggccggctgcgcgccgcccccagtaggagttgccttccagagccggacgcgcaggccccccaagccagtctttcctctccagacctgcctttctcccagggtccgacggaagccctcccttcccagagtttaatgtagttagcctcgcctccaaagaagtctcatcctactcaactacccactctgccggccccttcctccgttcagcctctcccccctcctgatcaggtttccttctgggtcagacccccaatgcagccttttgccacccacgtctgcttccacttcaacttcccctcggggggctcacgcctgatcgctgtccaggtggatccctttaacgggtgtggtggctccgccagtcttggtgccaggaacggcctcccggggagcacttttcttggggggaatcctcagcaaaacctgttctcgagcttccctcttgcctcgttgctt

SEQ ID NO: 3691 - DNA, 1050 bp, Homo sapiens
gtgagagtctgtctcaaaaaaaaaaaagagttgggagtgaaaaatattgaagcctgatgttaggccaaataaatgaaaaataattgcttaaggctggacatggtggcttatgcctgtcatcccagtactttgggaggctaaggtggcagaatcgcttgagctcagtagtttgagaccagcctgggcaacatagtgagacaccacttccaaaaaaattaaaaaaaattagctgggtgtagcaatgcacacctgtaatctcagctacttgggggctgaggtgggaggattgcttgagcccaggaagtggaggctgcagtgagctgaggtcatgccactgccctccagcctgggcaataaagcaagaccctggtgtttttttttgtttgtttaaagaagtgcttaagaaatagaagatgatggaaattcactcagtgggagtgagagagaaggcagtctagaatgatgcccagatttctttcttgaagcagtgggttggtggaacaggaacagtagtaagagtgggagcatatgaggagtttgttctgatacgtatttagttggaaatgtctgtggggccttgtacctgactaaggccttttcctcagtcagatgcttgttcaagattctctccctgaactgttttgttattaaccatcctcctccatgccttcccagtttctcagggctggccctttgattggaatatataaatggccactcttgaaattgtggctgctatcctcccctttctctctatcttcattctgcaaccccagaaccagccttagtttctgtcttggccaccaaaagaatcttaagtctcagtccacaaagggaagagaagaaataggctgcctgtttttccgagcaccgttgaagtaccaggcaagggcttttgatacagagtccttagtaccatgaatttcctccagtagaaatcactttagagaagagctaatccctccatttatcccttattttatagataagaaaacagaattcttaagaagggaagaggatgtattcactcagtattaaatgttattttct

SEQ ID NO: 3692 - DNA, 1021 bp, Homo sapiens
tctggaattgccatagttctttcctaaaggggaagctgtagttttggcaggccagcattatcatattctgtttagaagggaacctgacccctctgatgctgggcagctttcttcttaagatgaagactgctgggctgggaatgatggctcacgcctgtaatttcagcattttgggaggccaaggcagaagcattacttaaggtcaggatttcgagaccagtccaggcaacacagtgagaactcatccctacaaaaaataaaaaattagccaggcatggtggcacatgcctatagtctccgctacttgggaggctgaggtggaaggatcatttgagcccaggagtttggggctacagcatgctatgattgcaccacagtattccagcctgggcaacagagtaagaccctgtctcaaaagaaaagaaataaagaaagagagagagaaaaatagattgctggtaatagactaggattttgagtgaaatgggtttggcgtatctatactgtttgttacctttgttgaagattgtatgtggaaaccatgaacagtttagtatagaggctaaaatgggaggaaggaaatggtgagggatgtgtgtgcatacatacggatacatacatagatacatacatacatagccagaactagtatgtcaagcctgtttgtgaagctaaggtgctgggctttatcctgtagaaatggagaaccattaaaggatttaagaagatttgtggttaagaaatatccagagagacaagttatgaagctgttttaaagtacagatatgattccactcataggagttatctaaagtagtcaaattcatagaagcagaaaatataatggtggtttccagtagttggggagaagagggaagagacaagttattttatgggtacagaattttggttttgcaagatgaaaaagttctgaaaatctaatctactgcacaacagtgtgaatatagttaacattattgaactgtaccccttttttttctgagacagagtctcgctctgt

SEQ ID NO: 3693 - DNA, 1026 bp, Homo sapiens
aaaatccaaacttaaaatgacaagcagcactagaatttgttaatattcactctaaaaaatgcattcccaaactcatatttttaattagtcagaatgcctagacttggagggtagacagagccttcaggccagtgctgctgatgcctattccatttacctcattgtacaatataaatattatcattttgcatgtgtacatgacatgaaaaagattgggaaacactgctgaaggtaggaattctgtaatacacctctgaaactgaatcctgagtaagctgtattaccttttacattctggagtagagaatttatactttctaaaaatgaagctgcttactctaaattgaagcaaatctatttcatgtgtctttcttaccaattaaagatgccatttgcattttgtacttcttagtgtggtcctctttgatatctttgtcaatatccttacgcataaccttgcggaaccagcttatgaagcagatgtggcacagctggagtataaactggtagctggagaacatggtttaattattcgagtgaaaggatttaaccacaaactacctgtaagtacaagtactctgttttccttatagagagcattaaaataccatatttatttagaggtttgtgcatgggatgctgtatagagaaataaatgtttattaatgtggattatcttgaatattcttggctgatgacagctattctaactgtgactgactatccataagaacaacatatgtttcattaattactggcagtgcatgggattatagcccatgctttaggattgatttcacttccctttgctgtcagtttctccacaaccaacactggcatttaggattggttctagctaaattttttaccatacaggaataaccttttttttttttttttttgagacagatactcactccatcacccagactggaatgcagtggtgtgatcttggttcactgcaacctccgcctcccgggttcaatcagttctcatgcctcagcctgctgagtagctgggactaca

SEQ ID NO: 3694 - DNA, 1099 bp, Homo sapiens
cagggtttcaccacattggccaggctggtctcgaactcctggcctcaagtgatccgcctgccttcgcctcccacagtgttgggattacaggcatgagccaccacgcccggcctccagatttctttctgattttctaataggtatattttcttaacaaagtcgagattataaagtatatatataattctgtctcctgctttgtttcatttaatagtatacctgtaataactacataatgagttgtgtgattacattataatttacttaacaatttgcctacagtgaatattgcagaaacattcttaattcaccatctctctttattctatcacggcagatttttttttctgtttttactaattgccttaggtattccctccttcttcaccccgttaccagtctcttttgctttcccctaatcagtgactgttttgttacacgcttctgctgctggctccattctgttaatattaaactaactctttccagagacaacttactttttattgtattctttctggttttaggtttcctcttcatagaataatagcattgagaagaatcctagagatactttaacccaactaactcattttactatgagtaaacagattcaaaaagatttaaatgcaagtgattttctcaggtcatgtaagcacatatagcaagatagtggtaggactgaatttcagccatgggtctcctgactcctagttttgtatcctttcttgcaagaagagatccatacacagcagcatttcatatcctcatagttcttttatccctgctttctctacctctgaaaccaaataaaaaagaaatttacaaaaattgcattattcgagttggaaaattggcaagttgaaacaataactgcattgtacttaacctttccttgtttattggaggataaatatattgaattttaaacattcttgtagtaaaagtcatagagaaacacttacatctgttcttctggaaaatatttttgtttagttgttccaatcagaaaaattcatgctctgaccatcacatgggcacttcctcctcaacagcaacattacaggtaagagtttaagggaaaatttacttcattaga

SEQ ID NO: 3695 - DNA, 1040 bp, Homo sapiens
tatgaagcatagaggatagaatgaaaacatcccatgtattttacttgtagttgtagaaggaggagagagaaaattgaagtagagacaacagttgaagggttgatcactggaaaattttcagaacctgttgtaagacatcaaatcagaggttaaagtctaataacttccaaaaggatacattagaagaaatatggaaaatttttgccagataaagagaaaattttcttcaaaggaagatgagttacacttacagatgactactcaacttcgtgctctgaaggaaaataactaccaactaataactagaatcataaattgtacactaaataaaaatatcttttaagaatgttagtaggctgggcatggtgactcatgcctataatcccagcactttggaaggccaaggcaggtggatcacttgagcccagcagctggagaccagtctgggtaacatggtgagggaaaaaaattagcagggcatgatggtacatgcctgtagcctcagctacttgggatgctgaggtgggaggatcacctgagcctggggagttcaaggctccagtgagccgtgatgtgccactacacactccagtctgggtgacagaattaaataaaattagtttcattatttaagtcaacagaaattatccaacccatcattaatcataccaagtactgaaaagaaaaaaaatgccccaatatatctagcaggtagttaagttaaaagttaccttattgcaagcaaaagttaaaagttttttaaagaagcctgagcaatatagggagaccctgtctctataaaaaatttaaagatttaaaaaaaaatggtagtgcacacctctagtctcagctacttcggaggttgaggcaggaggattgcttgaacccggcagtttgaggccgcagtgagcagtgattgtgccactgcattctagcctgagtgatagagtgagacactatatccaaaaaaaaaaaaaaaaagtttactaaacattttaggaaattaattttttaaatcattctattttgctggaaaaaca

SEQ ID NO: 3696 - DNA, 1080 bp, Homo sapiens
gaggatcacctgagcccagggaggttaaggttgcagtgagctttgattacaccactgcactccaccctggccaacagagtgagactttgtctcaaaaaaaaaaaaaaaaagaaaaagaaaaaaagtggtcacccttaaaggtgggaagagttgaggtataagtagtagatatgatttaatagttattcttcttggaaaaaattattttttaaaaagaaagattgtaccagttttttactaagttgttggattgagtaatatttttaagaagctttttcctgtttactactcagattattagtgatcctgtttttgggtagcatgatagaccaagtattaaatagttttaacttggaaggctgtagagatgaacatcaaaacactgggggaaaaaaaggtatatatatgtcacttgatagtctgtatgctaaggtctctatgaacagattggaaattaatagattcacttttaacttaaaatagatctcataattccaaatagagcattaataggaagaaattataaaagtcacaaaaaaaaagaacactgacagtcaggaaacctgggttctacttctggctctgttcctttctttctgcgtgattttaggtgttttcattttctttcttttttttctcagttttaaaacaagaatataaaattctgaggcctattttagctctaagccagaccatgttataacttcttaactgaatacttcttatctatactttttttctatatctttccatctatctgtaagtagcttttcccatgatctgacttgtttatatttcctattaactgacaaagcatttaaaaacagttaaaaattgtctcgacaggcattttaaatgtcaagacattataaaatactttagatttatacagcaattgtgaacacctttgacaaatgaacatgtctgttcagcctttttggtacccctttttattttgcttaggtagatcaaattctaagttgatcttttctagcagcagggtcagagtctagtgatcgtttttaaaatggcttagatgctacctttcttttctgagaactcagtgtgatataatcctta

SEQ ID NO: 3697 - DNA, 1033 bp, Homo sapiens
aagtcttttaataaagcaataaaaatattgaaatgtttttagaagcttctgcacatcaataggcatccttgaagactaattcaggacccctcatttttaagtgctgtgttgttcattaggaacggtccattgtaattttaagttacaaagattttgccatttctgtaagtagttatttcttctgaggcctaatatttatacattctaccttatagctagaaggtagaatacggtgttcttcagatactaaggatccaatatttccctagaatcctggatttggtcctcagatccccttcatcaatttagttaatgatttttccctacctaagggtacaagaaaaagaatgtagaacacaaaaatctctgcaaatttctgaagtctgcacccactgtaatattaccatttctgctagtttctgcctgatcctggacatctgcagcctcttaactgaatccaagtcagttaattatcagatccaatccaatcatggatccagtccagtttctgttgtgacttccaaacccagttcggatcagaagtttgctcaaactcggttccaaacagaaatctgtcgagcttcagaatctcagcgagaacttaccacgatatcagttgcttccagaaagcaatggacatcgtgagtctgaggggtaccttgcttggtcactccatgctcctgggcatgacatctgttgaaaaccttagacatattaaatttaacagagtttaactgagcaaagaatgattcacaaattgggtagcccaggaaccagaataggttcagagaggctctggtgcagtcccatgattgaagatttatggacacaaaaaggaaagtgatgtacagaaaacagagatgaggtacagaaacagccagatttgttacagttcgggcatttggagtatttgaacatagtttgaacagttggctgcctttgattgactgaaactcggtaattagcacaaaagtaggttacgatctgtttatacatctagttaagtttcagttcactgtgtacagagaaacct

SEQ ID NO: 3698 - DNA, 1051 bp, Homo sapiens
ggggaggcggaggttgcatgagccatgatcacgccattgcactctaacctgggtgacagagcgagactccgtctcaaaaaaaaaaaacaaaacgaaaaacttaaaaaatttgtatttccccttattactaataagatcagacattatttcatagtttgtagacatcaggatttctccttttataaattgcctgcttttctattgggttgttttttctttttataaatttgacttgtaaaaattcattttattttgaatgctaattttttgtcgattatatgagttgcaaatgtattctctaagtccatagcttatgtttgctccttgtttataaagtcaaacattgaatcagttattgatcttttatggtttgcactttttgtatcttattctaaaaattttattatagttttttacattaagaaatctaatttttttttttttttttaagaccaggtctcactccatcacccagggtggggtgcagtggcatgatctcagctcactgcaacctctgcctcccgggttcaagcgactcccacctcagcctcctgagtagctggaactacaggcatgcaccaccacgcctggctaatttttgtatttttagcagagacagggttttaccatgttggccaggctggtctcgaagtcctggcctcaagtgatctgccctccttgtcctcccaaagttctgggattataggtgtgagccaccatgcctggcaaaaatctaattttattactatttaaaaaaaaatatggataaccagttgtccagtcatacttttaaaaaagtataaatcccagagatcaccaaatattttctgtaaaagttctagctaataaatactttgggctttgtcagtcaggaggtgaaattgaggatattaagtaagtacttgtatatcaaaaaagaaaacaaatttctgcaaatttttggtgaaaatttttatgaagttcaaaatatagtatgttttttggtaatacagttctactagtaagaatgatggaattgtttttattgggataacattttgctttattggga

SEQ ID NO: 3699 - DNA, 1083 bp, Homo sapiens
ttaatcttaagaacatacccagagaggctcattttagagagacgagaaaatatcttcacttaaagtgaaggaagtaacgagtatggatgcaggcagtgaaaacttgaaagggtgactttcccctcttatttgtaaagtagtcattgaaatgtacttaggtggtcctctggggaactctaagggaaatagtgggatgcataggggaagccttgagtgtgaaggtttgaaatagctaatgtagaaaatgggtgaagtgtatacgtggtaaatactaagaaaatttgtgggttcttgagcatgaaaatgataaaagtaaagcagtattttaagaataaagcagtagtttaaatctataggatgtggaagactggcttaagagtcagttataattgtgtcagttgtgttgacacaaatggtactagtctttctgtagctgatgtgttcccctcttcacttttctttttgctttccacttaattcactttaaatgtttgctaggctaaatgcccgtgagtacggagatcatgtctgttttattcactcaaggtccagtacattttaggttctcaaataatatttgtagaatgtatgaatgtatgagtgcttacatgccaggcattttcacagaactcatggggatattttgccagaaatttcttagattaaaattgtattctgaagctgggcacagtggcacatacttgtaatcccagctacttgggaggctgagatgggaggatggcttgagcccagtagttcaagaccagcctgggcaacaaaatgagatccctccatctcttaaaaaaatttttttaagtgtattttggccagttttaaagcaattgattttcagagaaaatgaatatggacaggttacagaagtgcaaatgatacaaatactacaaatgcgtatgctgatattgtatattttgtgtggaagcttgtgcttggcatagtaagcactcaaatgttagctattactgtttatatattggataaggccatgaataaagctggctttgtagcattttttgtagtagtaaaaagttggtacaactttattttccattggttgaataaaga

SEQ ID NO: 3700 - DNA, 1007 bp, Homo sapiens
gccctccttggcctcccatagtgctgggattacaggcacaggtgagccactgcacctggcctggctgtggtgcattctgaatagtaaattttaacaatgaagaacacttaacgttaggtattttggattgactaaaacaagtacagagcactttccatgtttaacctgctcgtaaaaagacctgtatttctatggagaaggaaagaacaaatgaaaaggtatgtaaacttctttttttttttttttaatgattaaaaaaaattttgagacaggatttcaattcatcgcccaggctggagtacagaggcaccatcacaacctgccccaccatgtccggctaattttttgtagaaatggaggtggtggtgggggcaggtgtctcaccaagttgcccaggctggtctcgaactcctgacctcaagagatctgcctgcctctgcctctcaaagtgctgggattacaggtgtgagctaccacgccctgtcgaaaaggcatataaacttctgaagggcaagtccttctaatttaaattttggtcagactgttacaagtgaggagatggttatcttaataaattttcaggctgggcgtgggggctcacgcctgtaatcccagcactttgggaggcggaggtgggtggatcatctgaggtcaggagttcaagaccagcctggccaacatggtgaaaccctgtcgctactaaaaataaaaaaattagccagttgtagtggcaggtgcttgtaatcccaactacttgggaggcagaggcaggggaatcgcttgaacttgggaggcagaggttgcagtgagctgaaattgtgctactgcattccagcctgggcaacagagcaagactctgtctcaaacataaataaataaataaataaataaataaataaataaataaataaaaattccatatattatagaaaataatgggtgggtgtgtgctgaataaggtacaggctatttctgaatattatgttgtttactattatatgctgtgg

SEQ ID NO: 3701 - DNA, 1027 bp, Homo sapiens
acactgtaacattgtatacagtgtcatggataattactatttttttctggtcattaacactcacctactctagtactaggatttcagaccaaggtcctcatgacgcctggatattttagtatctatatccaataatcttttctctcctactgaatatccaggcaaagatgaaatcgttttctttaaaactgtcaaattctgtaaaactcaggagccagttcaagggaacaagcatcttcacaatagatggaatcaagagttaaatgttatagtggcaagcttgtctactgggcaacagacaaccagacctgcttgtgagatggcagctccccagccctgctctgtgacctcatttctgtcaaatgaaaggcagcagcttccagctgattgcagcatagtgttcatcaatcacagtaatagcgcaattagccaccaaggttcaagctgtgtaatatgtgttagtggcaacttgtcctggatttaatcttcctcaacaatccaaataaaatatttaaaaactcttgacttctggctgggcgcagcagctcatgcctgtaatcccagcactttgggaggccgaggtgggcagatcacctgaggtcaggagttcaagaccagcctgggcaacatggtgaaacccccatctctactaaaaatacaaaaattagccaggcgtggtggtgggcacctgaaatccctactcaggaggctgaggcagagaatcgcttgaacctgggaggcagaggttgcagtgagccgagatcgtgccactgcacttcagcctgggtgacagagcgagactccatctcaaaacaaaacaagcaaacaaacaacaacaacaaaaaacacctcttgacttctaaagacgcaaaagtggccaaaagtgcaatacagtattgtgtttatttacatctattttaaatgcatgtgtatctgtaaatacaaagtgattcgtgactcattgtctcctcagtctatagcattattaacttctaggagcagcagtggagtagagtgtactgaatgg

SEQ ID NO: 3702 - DNA, 1032 bp, Homo sapiens
agaaaactgctattattatgttttggtacattttcttttaggctcttttctctgtacatattttataattaaaaccagactatagatacatttgtatcctagttttttatataagctaccaatgaaaaattattttcaatgattatataacaataatcatttagaaatactgtaacattttgtttgctttgagacagagtctgttctgtcggccaggctggagtgtagtggtgcggtctcagctcactgcaacctctgcctcccaggcttaagcaattctcatatttcagccaccccagtagctgggactacaggcacgtgccaccacgcccagctaatttttgtatttttagtggagacagggttttgttatgttggccaggctggtcttgaatccgtggcctcaagtcatctgcccacttcagcctcccaaagtgctgggattacagacatgagccactgtgcccagccctccctaactttaaagcccaagtttgcagaatttacagaagtgttagaacttaacaataattttgttacagcaattatctattattattgaacatttgtctaaagattttcccaattgaaataatactacagaaatgtcttcacatattaatctttatcattaaatttcaagaagtagaattactagattataatttctttgttttgcttttaagtggactgcccctgatggtgattattcataaatcctggtgtggagcttgcaaaggtaagtgcaaatgctcaatctaaattcaaaactcagatgtgttgttaaatattaacatttaacaaatattggcactgactctggcccagcactactgactgtttaaggaatactaaagaaacatatgacatagatttcctgccttcatgaaatttgcaattatatttggaggggattttagggaagttaaggtgattaagatacagttatgtcacgtatgggattaagtgctaaaatgtcaaatgaacaatacatgttagaggaagctgaaatgtacggacagagacatgaga

SEQ ID NO: 3703 - DNA, 1042 bp, Homo sapiens
cgcgcaccccgctctgcctggtctactgcgtacggcccggcggcccgatcgcgggacctcaggtggcgggcgcgaacgagaaccctggccggaacgtcagtgtgagttggcggccacgcgctgaggaggacgggagagcccaggcggcgggcagcagcgtcctcagggaactgcatactgcggactctgtagtaaatggaagtgcccaggccgacgtacccaaggaactggagcgagaagaatccggggctgcggagtctccagctcttgtgactccggattcagagaaatctgcaaagcatgggtccggtgccttttactctcccgaactcctggaggccctaacgctgcgctttgaggctcccgattctcggaatcgctgggaccggcctttattcactttggtgggcctagaggagccgttgcccctggcggggatccgctctgccctgtttgagaaccgggccccaccaccccatcagtctacgcagtcccagcccctcgcctccggcagctttctgcaccagttggaccaggtcacgagtcaagtactggccggattgatggaagcgcagaagagcgctgtccccggggacttgctcacgcttcctggtaccacagagcacttgcggtttacccggcccttgaccatggcagaactgagtcgccttcgtcgccagtttatttcgtacactaaaatgcatcccaacaatgagaacttgccgcaactggccaacatgtttcttcagtatttgagccagagcctgcactgaccagaggaggtaggggggaagccatggcttctgatctccactccactttatttctctgggaaaaataggctgcaggtctccagagcatatcgatgcagtactgtactagagctgttgtgactgattcactcaaactttcctgcatacccctgtgccaggccttgggtttacagcataagttcagactaaagagaatggagaactattgtggtgcaacctggcaaatccctcagaggacagagctaaggtggacagggattacctagatt

SEQ ID NO: 3704 - DNA, 1050 bp, Homo sapiens
ccaacatggtgaaaccctgtctctactaaaaatacaaaaaaattatctgggggtggtggcgggcgtctgtaatcccagctactccggaggctgaagcaggagaatcgcttcaacctgggaggcggagattgcagtgagccgagattgcaccactgcactccagcctgggtgacagagcgagactccgtctcaaaaaaaatacatatcaatgacataaaagatcaagatgagtcatgacagccatagccatgtctgattctatactggaaggtttactggagggaaaaaatgctacaaagaacatcactgggcagatgccaggttaaagtatcaaatccatgtttgactgaagtagagaactgtcctacagttgtgtaagagaatatccttatttttaggaaataagcatttaggaggaaaggcctatgatgtacgcaatttactctcaaatgcctcaattttttatggagaaggagaaagggagagagaaaccctgacaaatcaaatgggacaaaatgttaataagtgaacaagaggggaatctgggtaaagtgtgcgtggggttttttgtactttcaacttcctagaagtttaaattatttctcaataaaatgtatttttaaattcctccagtatttataactaaaaatgtcctgggtgtattccatcagcattcacagaaatacccagttgaatacctgccatccacacgggcagatctccagcaatcctgaactcacctctgctctccacatgacatttacactgagttgcccttccgaaactggaagagtagattaagcccttgagtcttcgattcacttcaatgaataatctggtaaaaacaaaaatctaagtgtgacttctacttgataaacagctgtgatgtaactgggacaagatcagtgtggaattatcctttttataccaattctgtacaaagagtgcaagaactgatgctttatattttatttcccctctgccctcccatcccacccttggtgatggttgtacccatttgagcatttctgagcacatgaccataagtaa

SEQ ID NO: 3705 - DNA, 1072 bp, Homo sapiens
agcaggtaacatccagttatagaattctgtaatagtgattttaagggggcttctggcccagcctgtgactcatttgcatttcaaactcatataccttctttatcttctctttcggtgccttctcttgtccttccaagtaaaggttaagactagattgggaggcagaatataggataccgaagtcctcaggttaaatgcctccctccatttgcagatttaactttaagcccaagggagtaagacccttacagttcctcacaactgtgtttctcctaatgcagaagctaacaggccaaaaagcaacagccaaccatgcggcagaactgctggcaaagcaattctgcacccgagggtcacctcaggaaaccaccgtcctgcttgtggatgaggtgaggtgcccatgggcggacaggagaagaaacagggctgtacctcaggagcaagtgctggatgggagggaggaaagtcctggctcccttctccattcatatgagcccattttctggtgctgagaggcgtgtgtcaatggattgttttggtgctatgacttgggaaacatgcagctaaagcagtggttataggtcttcattttgaagcaccagctcagtctctgtgattgactctgcacctctctcctttgccctggcagctcgaccttctgtggactcacaaacaagacataatgtacaatctctttgactggcccactcataaggaggcccggcttgtggtcctggcaattgccaacacaatggacctgccagagcgaatcatgatgaaccgggtgtccagccgactggtaggttctagggcagttcccatgctgttcttgcagatctgtaagcttggccaagaagttctgcaaaaatggtccaggtgtggtggctcacgcctgtaaaccccgcactttgggaggccaaggcgggcggatcacttgaggtcaggagttcaagaccagcctggccaacacagtgaaaccccgtctctactaaaaatacaaaaattagccaggctaatttttacttaggaagctgaggcaggagaattgcttgaactccggaggcagagtttg

SEQ ID NO: 3706 - DNA, 1073 bp, Homo sapiens
aggtggtggctcatgcctgtaattccagcactttgggaggccaaggtaggcagatcacgtgaggtcacgagtttgagaccagcctggccaacgtggtgagacctcgtttctactgaaaatacaaaaattagccaggtaggatggcaggtgcctgtaatctcagctactcaggaggctgaggcagcagaatcactttaacccaggaggcagaggttgcagtgagccaagatggggccactgcactccagcctgggtgacagagactctgtctcaaaaaacaaaaaacaaaaccacacatgtcaagggttaagcacagtgtctggcacataggaattgctcagtaaagtgtccttgagttgtcttaacctttccctttccaccaaattctttctagactctgatcctcctcctaagaaacgtgctcgagtacagtggtttgtccgattctgtgaagtccctgcctgtaaacggcatttgttgggccggaagcctggtgcacaggaaatattctggtatgattacccggcctgtgacagcaacattaatgcggagaccatcattggccttgttcgggtaggtgatgccaccatccttggttctaccttgaagcttatttctgtctgcctcctgaacttcatgaccccagaaatattaccggctctaataccccatagggaatgcattatttcctgtcatcttctgtgcttgcctgtctgtttcatctcaacagatatttattgagagcacgtatcatgtgttaggagcctcctacaagaggtgacatttgggttgtgacctgagggatgagcaggaattagcagatgtatctcagggggatgttatatttagctatgactgtggcatgcataaagcattgtgaggctgaatatgctggcttaaacgaggactgcaccttgagtaaatcagtacaaagagtgctagttgctacagacaaatttgtatgacaggatttcttaataaatcaggtgctaatgagcggctggtttgcaggctgaagtaagtcactggttatgagtttttcctgaagtgacttcaggctccccagcatggga

SEQ ID NO: 3707 - DNA, 1035 bp, Homo sapiens
gagccttagtgaaggccaggatctgggagtgaaaattcatgaattcagtaaacatttactgagaaattatactgtgtgtcagatggtgctaggtgcttgtaaaacaaaatctccattacttgatgcacactttattaggaaagccagacatgttaaatagaaaaggagtttagatgaatcagttaacattgccctagcaaatccaaacaggatgtggatttaagattattacatcacaagattttgacagttgagctagatcttgaaagagatgcaggaattttttttttgcctagagatgagagaggaggaggagtatgcttagctgagggattaatatatgcagtcactgagttttgcctggcataatgaaaaagagtagaaaatattagggctagaggacggaggtatatgggaaagatggtgataaggctagagagggtaggcttagaccatattatggagtttggacttggtttactgagcattggggacctaattaaaggtttttagtggaacgaagacataatcatatttgtttagtaaacgtaggacttgaatgaccttaaaatttattatgttctgctggtgctattgtagtactaataatggctttgactgggtaatgaatattacaaacaaagaattcctagaaacttggagcattttatctaacctacttgcctcagaggtatttgttcttataggcattgtctgagtctggccttcagctctttgttaacttagttcagaacacttgggtcagagtcagtatagttaaactaggagttcaagaagttaaaacaggcactcaggaaatgctgattgaatgaaatgataacttaaaggggaagtgcctggtatggtctcaggcttgttatatttaagccttcttaaaccacccatatactactggggcatccctgtattgtagagtggcagagccttgactgtggttgagctcttctcttgagcaaagaactggggctgaaggaagttactattagtcataagcccttttaggaggggagagtc

SEQ ID NO: 3708 - DNA, 1115 bp, Homo sapiens
cctgagtagctgggactacagactttttttttttttttttttttttagatggagtcttgctgtgtcacccaggctggagtgcagtggcacgatctttgcttactgcaatctccacttcctggattcaagcaactctcctgtctcttcctcctgaatagctgggactacaggcacacgccaccatgctcagctaatttttgtgtttttagtagagacggggttttgccatgttggccaggctggtctcgaactcctgacctcaggtgatccccctgcctcagcctcccaaagtgttgggattacaggcatgagtcactgcacctagcctacaggcaattttgtacagagaataattcctttccagaagtagcccgatatagcagaaagcatgagttttgttgtgagacagacttagctctacatcttttatgtgagacttaacctgttttttctatgggcaaatgacctgaactcctgaatcagtttccccatctgtaaagtgaggatgaaaatagtatctactttattgagatttttcttattcatctgtagcatctttgtgtaatgtcatatggatgtaacttggttagtactattagcaactgtgatgatgatgattgtgaatcttattttcatatcttgggttttcttacagtgaaatatttgttgctgttattttctttgtaaaaataaaccatgtttgcatcttggtcttctttccatttggattcaaaagttttatagtgattcctcctagtaaaattgcattttctccctaggagtacttctttgattccagagtattaacagatggagaactggctcccaatgatagatgttgccgtgtgtgtggaaaaataggccactacatgaaagactgccctaaaaggaaaaggttggcaaatgaatatatatcaacattttgaggaaaataaatgagaggccaatttgtagctataattatgttcagaaatgtttaactgagaaagtttagggtatttaattatacctaaggtaaatgttcatttgagtggaattttgtaatagggtaagatttgcatgtggtataatagtatcttctaacattcatttgttcatttattcattaattcact

SEQ ID NO: 3709 - DNA, 1049 bp, Homo sapiens
tttgataggtcaagtagataacatcaaatgtatcatttggagtttaatgctcttaaaagacatccttttccagctttggtctttcagatacgttttattcattaacttcttggcatcaaattataccatcatcctgacatgttctttttggaagaagtattttagtatgtcttataggtaaattctaaaatggtattagagtatttggacctttgggttggatcacttgaaatctaataatacaattaatttttttatgcagatctttgatggaaaacagattccacagagaatggttgatggatggaatgctttcttctttgataaaacagaagaactggtaattttaaaatagtctttatgttctagaatgctcactgatatatgttagcatctgtataatttaataattttacttaaatttgctgtccatgttttggatagtactgtatagacattgttcttttctttttttttttatatgtagaaaaagcgtttaccttcacttggaaagaacacagaatcattaggggagctttggctgggactgcttcgtttctatactgaagagtttgatttcaaggaatatgtaattagcattcggcagaaaaagctgttgacaacttttgagaagcagtggacttccaagtgcattgcaattgaaggtaacatttaagctgatattaattcaggagcaaccaaaatttggtcaacgaaattgaggggaaaactgaaatacattaggatttggaagattcttcctcttttatcagttttcctcctttaatgtgtaattttagaggaagagtttgctgatttgtatagtctgagtacatataagtattagacttcagcggtgacttctaagtatatttttatggtacagtgaatgtaattcttaatcattgatatatttcttttgtagacccttttgacttgaatcataaccttggtgctggagtttccagaaaaagtaagttttaaatatagagattctctgattttaaaactctgacacattaatgtctgcatctttattgttttcttct

SEQ ID NO: 3710 - DNA, 1132 bp, Homo sapiens
ggcgaggtggaggttgcagtgagctgagattgtgccactgcactccagcctgggtgacagagcgagactctgtctaaacagaaaaatgcaatgtaaatataacagtacatattagaatatcacaataagataagaattttggaaatgtttagggtcattctttacataaatatgattgacttatttggtgatccttataatatgattgacttgtttagagggaggactgagtgctaagttgaagatgattcgtgttgaatgagagagaacagagagacagcagggagagagagtgtgtgtgtgtgtgtctgtgtgtgtgtgtgtgtaaaagtgtatagcattagtgcttctgggggctgaaacagagtggagagaattaaacacagtgaaacatgagaattcaaaagaataggcaaaatgagtgatgattaacgttacaaggcccacagacctactccactgtgttatcagccaacgtagttgggctggatcatggatattactgagaagtatgaaatctcttaaaaacaatcatgatctaaagagttggattgttgttactcagaagtatgaattatctcaaaacagggttctaaagaggtagtttatttcaatatctagcaaataaatctgtgtttacaaaacatgaaatacctataatagcgtctgaatctttaaggataaaatattacatgtcagccccttaatatcttcacttctttcttgaggtcagaaatcctatgtcttttgtttcagatattaatagctgcaattgcctctttttttttttttttttttttttttgagacagaatctcgcttagtcacccagtctggagtgtagtggcacaatctcagctcattgcaacctcaatctcctgagttcaagcgattctcctgcctccgcctcccaagtagctgggactaccagcacgaaccaccacgcccagccaattttttgtatttttattagagacggggttttgccatgttggccaggctggtcttgaactcctgacctcaggtgatccgcctgcctcggcctcccaaagtgctgggattacaggcatgagccactgcgcccggcctcagtctttcacttttgttttatgaaatgtcggaatatgtgctag

SEQ ID NO: 3711 - DNA, 1061 bp, Homo sapiens
catttacttaggcttactggtttattataagggatattacaaaggatataaatgaagaaatacataaaacaaggtatgggagaagggatgaggagttttcatgccctatcagggcataccaccatctaggaacctccatgtgttcagctatcaagaagctatttggaccgagacctttgggtttttatggaggcttcattacatatgcaagattgattaagccaagctgttcgccattggtgatcaacttaacctttagcccttctccgctccccaaaggttggggtatagggctgaaagtcccaaccctgtaatcatgccttggtctttctggtgaccaacccccattttaaagatacctaggggctgtcagccagtagtcaacttgcttgcatacaaaaagacttctctttggagattccaaggatgttacgagttgtatgtcaggaaatgggtttggaggccaattataacatcacaattacatcagttgagtttgagatgttgaacctgctttgtataactctcttttgtacattattggatttgatttgctaatattttgttgaggaattttgcatcattgttcatgagagattggtctgtagttttctttacttacaatgtctttgtctggttttggtattagggtaatgctggccttgtagaatgagttaggaagtgttccttctgcttctgtcttcgaaagatgaggcagaaggaacacttcctaactcattcttcgagaattggtttaatttcttccttaaatgtttggtagaattcatcagtgtacccatctaggcctagtgctttcttttttggatggttattaattattgattcagtttatttaatagatataggcccattcagattttctgtttcttcttgtgtgagttttggcatattgtgtcttttttttttttttgagatggaatctcactctgttgcccaggctggagtacagtggcgtgatctcggctcactgcaatctccgcctcctgggttcaagcaattctccttcctcagcctctggagtacctgggattacaggtgcc

SEQ ID NO: 3712 - DNA, 1118 bp, Homo sapiens
aactctgctgtctctggtttttacaagagtaacacatttaaatttacagaggtaagaatttccttggagaaataggtgctggtgataataggagtatctttcttttccatatcaacataattataataaataactcacagatttaaaggcttattttgtgccaggcattctgctgagtgctttacatacatgtctcatgtaatcctcccaacagctctgcaggacaggagtttatgattatcttgattttatagaatagtaatgtaatgctcagagaggttaaacatctggttagtcacacagctaatcaatacttagtttaagatttgagactgggtgcagtggctcacgcctgtaatcccagcactttgggaggctgaggcgggcggatcacgaggtcaggagatcgagaccatcctggtgaacacggtgaaacctggtctctactaaaaatacaaaaaaattagccgggcacggtggcgggtgcctgtagtcccagcaactcgggaggctgagacaggagaatggcatgaacccgggaggcagagcttgcagtgagccgagatagcaccactgcactccggcctgggcgaaagagcaagactccgtctcaaaaaaagaaaaaaaaaaaaaaaaaaaagatttgaatccaggtttgtctcaatttggagcctatgtacttaatcagtatattgttttgccctcaccaaactcacctctagttgtttattcacttattgaaaaccatattcttctcctgtctttgtgcttctcaaactttaatctgcatgtgaattaccttgggatcctgttaaaatgcagattatgatttagtagactggggagggtcctcagattctgcatttctatcaagtttccagattatgctgatactgtaggtctatgaatcacttacttggagtagcaaggttattatagagctttatggctggaaattgtaaatgctactattaaatgcttagattaaagtagaatttgcacaaggtgaaattgagtcaaacttatttatttgatttgttttttagaaattaaattgtaaggaaataattgaaaatttggcaaaaattcttaagagacatccaggtatgaattttgaa

SEQ ID NO: 3713 - DNA, 1211 bp, Homo sapiens
tggggcaaagttgatagttcagacgtgttgaatgtatgatgtctgtggaaaattggaaaaagcagttgggtacatgggtatgggaacttgggcaaaagcttgggctcaagatgttttggaatttctcagtatttcttccagtggtaggtaatttaaatcatagaaatggacaagagcatgttgtattaggtcatcagcagatagcagaagactcctcctctctgcttataataaggccttggactttgttttcctttgcttagaaaaggcaaggttgtgcttatttggctcttctaagaatggatttggatttcgtgatagtgatctggatatttgtatgaccctggaaggccatgaaaatgcagaggtaagagtgtttggaaagcgttatgtaagtttattttctcccaatgacgattctatgtttatttttgtatgtgatattgataaaaatgtggtatcactctttgtataaatatattagcaaaataagtgtttgaaatatgaaaacagtagcattttcagtttagaagacattgaactcttaagtaaaagtgtttcagtaattttatgatacaaaaaccatgtcactgagagttacagtgatttgtaatgaattttgggaaaaaatatatcacgaagttggaattttttcactagaaccaatgggaagctgatgcatcagttttgtagtgaacattgatctttcatactttgtcttctcatatctctttcattagatgatgtctttgtgttactataggtagtaaatataggtggtcatctaatttataattggttttgttctaaaagttagttataatttttgaccactcacataaaattttttccatagaagcaatgttacagatgatatgctaagggctgggcgtggtagctcatgcctgtaatcccagcactttgggaggccaaggtgggcggatcatgaggtcaagagatcaagacactcctggccaacatggtgaaaccccgtctctacgaaaaataaaaaaaattagctgggcatggtggcacgcgcctgtagtcccagctactcaggaggctgaggcaggagaatcgcttgaacccaggaggcggaggttgcagtgagccgaggtcacgccactgcactccagcctggtgacagagtgagactccgtctcagaaaattaaaaaaaaaataaataaataaaatgctaagatagctttta

SEQ ID NO: 3714 - DNA, 1047 bp, Homo sapiens
cccagatgagttatcaccaccttgttctgaacaacacaacagggagcaaattttaattggcttggaaaagtttattcaaaaagaatatgatggtatgtcataggttaaaaaatttattgcgtttttgctgtagtcatgtagtcttgagtttcatttatttaaaaatatttattgaatgctatgtgttaagtactgttctagttgctgggaatacagtgctaataaaagagatgaaacctcatgaagcttatgtttcaaatggggagacaaatagttgactaataaatatataatattatatcagcaaataatacatgctgttaaaagtataggagataaaagaactgaagtgatggagtgttatgataggcctctctcataaggtagcatttgaggagaatcctgaataacatgaaggagcaagttatataaatatccaaggagaaaacattgttgatggaacaagaatagattatgtttggcatatttgaggaatagccaggaagtcagtgtggctggagtggagtattagaggtagattgtaatgtatagaagaggtcagagagggggtctagggattaagtcattagtgccttatggatgttggtagaaagcctttgaattttattttgagtacctaatgagaatcttttagaggatttttagttaataaatgacatgatctgagtgaatggtttgctgggctataagactggaagcaagcagaacatttaggaggctgttgtgtgagtccagagtagatgagaagtggtcagatttgggatatattttgaaggtagaaccaataggatttgctgatggaaaatgtgaggcatgagagaaagaaagaaatcaaggatggtttcaaggtttttgctataacagttacagtaggtggtcctatataactgagatggcaaagagcaggaagagtaagttttgggcatggggatgaagaatcaagatttttgtgactaaatattttagaaaaggataaaagttgactttaatcagaatgaatttgtacttttacaagatgacccatta

SEQ ID NO: 3715 - DNA, 1076 bp, Homo sapiens
tgactcaaaaaacttttttgtagctaatactgcattttaacaacatgtttttttttttaattacctcctgaaagcacaggttatcaaaactgagttacataaaagatttgttttgaattcacttcctaagtgatgaagtccctcaaaagtttattagattagatttctttttatctttgtgtagccaccaacgatagtatgcagcatctgcaaaaaggatggccattcaaagaatgattgcccagaggattttaggaaaattgatttaaaacctctaccaccaatgacaaaccgatttcgggaaatacttgatttagtatgtaaaagatgttttggtaagtctttcattactacaactattgggactagattccttcttagatattaaatattaattttctgatttaaaaacagtttgtttacgttttgttttgctagaggtttttgaatagatacccaagcacagatatttactaaatgactattatgtgcagggcatcatggtaaatgccaaggggaattgagagtccatatatattgcttttaaggagcttaaaatatggatatgagctgtctaacatggtagcttctagcctatgtggcttttaactttaaatcaattaaaattaaattaaaaaccaagttcttcagttttatactagacatatctcaagtactcagtagctacatgtggctagtggctgctgcattggacagcattgttgatagagaacattttcatcactgcagcgttcttggataacactatagatgagttaatatggcatttatgtaaattgccataattggaaatagaatgtgttacatgctatagtagtggtaaacaaaacgcagtgtaaacacaattttatctggggtggattagaggaatcaggattaatgatgtgatatttgagatgaaccttgagctgcatttttaaacgtcaaagattatgcataaaagcatagagtggccgggcgcagtggcccacgcctgtaatcccagcattttgggaggccgaggtgggccgatcatgaggtcaggagttcgagaccagcctggccaacatggtgaa

SEQ ID NO: 3716 - DNA, 1060 bp, Homo sapiens
ccttgcacaaagtaggcactcaatgaatagttgtaaaatggaatgtgagaatgattgtttcattgtgtttatgctgcctagtggttacttttagccaggtttcatctagctaattctttggaattcaggtgttacctcttctgttatgattcccctgattagaggcccatcttagcatgtagcccttactataattgttaaattgtctctcccctcctaatagtctatgaagtaggaccttatttaggtggcagtatagtatagggattcaccgcatggacccagtggccaggtggtcttgagtcaaatccttgacctatagtatccacttcatggaatagttagaattgttaatatatgtgccgcttttagaagagtgaatggtacatggtaaaccttatgtataagtgtgagctttctttattttatgatattcctaacaatgtcagggacataggaggttctaaagaaatgtttgctgaatgaaggaattagtttttttgaaagccagggcatttacttatattttaaaattaattattggaaaaacgagttgtagtagttatgcagtggtttgcagctttggctgcacatgaaaattacttaagggagctttaaaaataccattgcctaggctgatagcctagtcagttatcagaatcttgggaggggtgtagaaggtggggttggtgtggaattcaggtattggtgtattttactgctctccacatgattctaatgtgcagccaaggttgagaatcactggttcagtggaaagaatgcagaattcctaggagtcagtaaactgggactttgttcccagctttgcttcaaactgactgctttttggcaaattactccttcatgtctcagtttttgaaaacgtgatctccaaggtcttctctaactgaaaatttgttgatttttatggttttgttaagcttaaatgaaaagtattttttcttttccagtctcctttagcattggaaacaccaaatcgggtatccttgggacagttatggttagagctgcttaaattctacacactggattttgcttt

SEQ ID NO: 3717 - DNA, 1067 bp, Homo sapiens
ccatgcattcagcaaacattcgttaaatgccttctgtgtgtcagacactgttctagaggctgggaacatctaacaggacatacagagtcctgctttcatggtgctcacatacttctggaagagtcaaacagtaaagaaatacataaataataatatctgctagagcttagtgctacaaaaatgaaatgatagaatgaatgacattactctgaatggtcaggaaaagactctgaagagatgatatttaagctcagacgggtaatagctagccacatgaaaatctgatggaaaactctccaaggcacagttagtccaaagcttccaaggtgggaatgaactcaggaggagcaaaaaggaaggctgtaaaactgctttaatcaagagtatgctattggcatagaaatagaaaaatagatctgtggaacagaatagaatgctcagatgatctagtgtacagattttattaaatagtgctttcacaactgtatcttactggaagaaaataatgttggactcagcatgctaaatgcaaaaataaattttacttaaatgaaaatttaaaattttagaagaaaaatgtaggagtatgtatatgtaaataatgggatggggagatcttttactatgataggatacctagaaggtgtatagttgtcctcagtatccagtggtagggggattggttccaagacccccaaggataccaaaatttgaggacgctcaagtcccttatacaaactgtgtgttatttgtatctaaccttcacatagactctaacatactttaagtcatcactagattacttataacatctaatacagtataaatgctctgtaaatagttgtactgtattttttaatttgtattttttattatattgctatttttagtttttaaaatttaacattttaatttttttcagagacagagtctcactctgttgcccaggccagagtgcagtggtgccatcatagctcactgtaaccttgaactcctgggctcaagggatcctcccacctcagcttcctgagtagctaggactactggtgtgtgccactgtgcctggc

SEQ ID NO: 3718 - DNA, 1076 bp, Homo sapiens
cagtcagttaagtattcattttttgctattatcatgtagaaagcaagaggattgaactaggaaattaccttgcactatttgacattgaagagatcagtgccctgtctctcatgtatatcagttttgataattcataatgctgcttttgaaattaatttctcattaacttaaatactaagtttggttgaaatttatttctgaagtacaaatgaatgttaaaaacatctttctttaattcgtatggaactctagttatggaatgacatgtagttttcagttagctctaaatttattaaaacatttgtttttattagggcttttacggtactatgttacaatatgataactagaaagaaaatagccacaggatttgaagtattctgcttttaagggtattaatacaatgaaatttgtttctttctcattcacagtggtttactttgtagagtgagtgcaggaaacgatatggcatgtctcactactgatttacttactgcccttggcaaaatagaacctgtctttattcccttggtgttagcctttcgctactgggctaaggtaagtgaaagagaggaaaactacttatttatatttttagaaggaaatgtatttaatcttcaaaattaggccttttcttgtactgacatgtaacatcaatcataacatgtgggagaaagtagttttctgtgctagacagaaagttggtgtggcaggttgtaatttatggacataaaaataaatttttgtagacacacttatggatatattttagaatttttaattgtcatgctatattctccttttatgtactatagaaatgttctctttcatatcagcatatgaggctcaagttttcactcttactgtaagttaaacttgtaaggttttaagatgtatatacattaagattcttttgttggcatatttttttccccagtctctaagaatgctattctctttcctctaaatcattgataacatgtaccaatttctgattgggcaactgctgagcattagttatttaagtttcctaaattagtcttaatttgtatgtctaaaggctgtggttgccctgt

SEQ ID NO: 3719 - DNA, 1496 bp, Homo sapiens
ctcctagctactcgggatgctgaggcaggaggagtctttgagcccagaagttcaggctgtagtgagctatggtcatgctgcagcctggacaatacagggaaacctcatctcaaaaaaaaacaaaaaaaaaacacgattctgttttcactatttaaaacacaaagcatgattatatttaaatgttattctttaatgaaattgagttttccttaatgttctgctgtccgaactttgaaattagtatatcgatttatttttgaaacttttttagatgaatcatccagatcttctgataaaagtacttgggattttaaagaaaaatggtgagtttcttttctttttcttttcttttttttttttaatttgtctttctaaaggtacatgtgttgtttatatatggctaaccaagttaaaactaaactgctggcatagttgagtcattgcattacaaatggagatacatacacacacttgtttatagatatactagaaaatataatttaactgtaacttaggtaaaaaaaaaaatgccatattaaaattgatatgtaggctgggcaccgtggctcacacctgtaatcccagcactctgggaggctgagatgggtggatcacctgaggtcaggcgtttgggaccagcctgactaacatgctgaaaccccgtctctactaaaaacacaaaattagccaggcgtggtggcacgtacctgtagtcccagctactcgggagactgaggcagaagaattgcttgaacccgggatgcggaggttgcagtgagctgagattgcgctgctacactccagcctgggcggcaaaagtgaaactccgtctggaaaatacaaaaacaaaaaaccttcatatgcaaaaaactactgccttttgggtaattaaaaaatatttgctttgaatattatgggcatttcttatgtaaaagaagacaaaacctataatcattatgaggtcattactgaaagaagattaaggagagacttggaataaaaatgtatgcatgcattgagtaaatatgttttttcccacctaaagcatctatattaatttaatcatttatattacatcagttgaatcatacctagttgagtttttcatgtgtgctttttctgtctggattgcctttgtaaacacatcattcatataggtaagaaaaatttaaaaattacaagattctcaaaccaggctccaggtcatgtgttacaatcttcaagatttgcttggtttttacttactgtttttcttgttacaaagtgaatgcttaagattaagcttgggagctggagctagactttctgggctcagattttagttctgccacttactggttgtgtgtcctttgacaaattatttgtgttaataccttagctttcccatctgtaaaatggtaatattacattgtatctttttgatgagaaagttgttgtaagaatgagataggctaaactatagtttagaaaagtgtgggatatacaataacttctta

SEQ ID NO: 3720 - DNA, 1084 bp, Homo sapiens
ctataaactcttgagaaccacagtgttttgggttttaggtttacagaattaactgacttggcttcacttcgtattttataaaagcattggcattgaatgtttatgatcctttccccaaagtgctcttacataaatatttaagagtaaataaatgtagtttgtgacagtagccatagctaagttggtacattagttactgttatatattgaatgctaaacatattgtcagtcatttctaaatgaactattactaaaattttgtttaaacagtaagcttctgtgagtagtttctctctcccttctctgttcctacactccataactgggaaccatttttttattctatagatcagttagaaagggtgttcttcttgtataattgtcttactagaaatggaagacgtagaactgaagtgtgtgaaattttcccgtcgctgtttttttacatctctcatatttgcatgctatttcatgctttgatgtttttcctttattccagaatgttcacttaggttgtatggctcatctctgactagatttgctctgaaaagtagtgatgttaatatagatataaaatttcctcccaaggtaagtaattagaatctttcctgtgtggttcttaactagtacttagtaatttttatggattatctttgtagagaaaggatagggaaatataaaactctggtttgtatagtgttaccatcgtgactaaacagtgcttttggaaattactattagatttcagacaaaggcaggataaaagaaataagggacaagggcaaaaggaagcagaagaggaaagctggaaaaaggaaaaatgtttatatttgaacatgttgaatagttaatacttctggtaagcagtatagaaggtgggaagagttttgaaatcagatacctagattcagatcttatctgtgataagcaagttgcttgaactttttgagcttcagttttctcatttccaaaacaggaataataatttttatattaaatgagataatattaatatatgtcaggtgtcttaatatagtatctggtacatatgggtacttttaataagtagtacctagaatcatta

SEQ ID NO: 3721 - DNA, 1024 bp, Homo sapiens
tgtatatatatgtatatatatgtatatatatttttttaatttagtagagacggggtttcatcatgttggccaggctggtcttgaactcctgacctcaagtgatccgcccacctctgcctcccaaagtgcttgtaggcatgagccaccacgcctggcctgggctctctgtttgattccattggtctacatgtctgtctttatttttattttatttttttgaaacaaggtcttgtttgttgctcaagctggactgcagtggtgcaatctcatttcactgcaacctccacctccggggctcaagccatcctcacctcagcctcctgagtaggtgggactggaggtaggcaccaccatgccaggctaatttttatattttttgtagaaacagggtttcaccatgttgcctaggctggtctcaaactcttgggctcaagtgatcctcccacctcagcctcccagagtgctaggattactggcatgagccaccatgcccagccatgtctgtctttatgctagtacacatagtggtttgttttgttttcttttgtgttttgagacagagtcttgctctgttgtccaggctggagtgcaatggcacgatcttggctcactgtaacctctgcttccgggttcaagcagttctcctgtctaagcctcctgagtagctgggattaccattgtgtgccaccatgcctggctaatttttgtatttttagtagaggtggggtttctccatgttggcctgtctggtctcgaactcctgacctcaagcaatccacctgccttggcttctcaagttgctggaattacaggtgtgggctacctgacctggccatgttgttttgattactatagctttgtagtacgttttgcagccagtaagtgtgaatcctccagctttgttctttgtcaggatcgttttggctatttggggtcctttgagagtctgtgtacatttaggattgatctttatatttctgtgaaaaatgtcatatatatatatatatatatatatatatatata

SEQ ID NO: 3722 - DNA, 1050 bp, Homo sapiens
gatttaaatggagcatttcattatgttggaaaagaaagatattaagggttcgctgaatatttgacttttaagctgtaacttgaaggatgattagttttaccaggtggatacacataggggacaaaatgatttaaaggcatggagacccaatggcacatagagtatttggagactggtgactgtttaaatgtggatgtctgtcaaaaatattggagagggtggagggaatggttggaggaaggcctagaaatgcaaattgagaccaaaatgctttatattccatgttaagaacatgttgcattgtcttaccggcgcattgaaggttttttttttttttgaaatttttttattgtggtaaaatatatataagataaaatttaccattttaaccatttttaagtgtacagttcagtgacattaagtacatttacattgttttgcaatcatctccactgtccaccttcattcagaactttttcatcattctatactgaaactctgtatccattaagcaataactccccattcccctctccctgcagcccctagtaaccaccattctattttctgtttctatttgcttgtctattgtaggtaccccatataaatggaatcatacattatttatcctttagtgttatttcacttagcatgtcttcaggtcaaccgcgttgtagcatctgtcagaatttctttcctttttgaggttgaataatattccatcgtatctgtatgccatgttttgtgaatcatttcatccatggatggacacttgggttgtttccaccatttgactgttgtgaataatgttgctgtgaacatcgatgtacaaatacctatttgagttccttttttcatttgttttttgtatatacccagaattggaattgctgggtcaaatggtaaatccatgtttagttttttgggattgccatgctgttttccacagtggtgacatcattgtacatctttaccagtaatgcacaagggttccaaattctccacattcacaccaactcttgttttctgcctccccccgcccccccataa

SEQ ID NO: 3723 - DNA, 1034 bp, Homo sapiens
caagtgattctcctgcctcagcctcctgagtagctgggatttacaggtgcatgccaccacacctggctaatttttgtatttttagtagaaatggggttacaccatgttgatcaggctggtcttgaactcctgaccttgtgatccacccaccttggcctcccaaagtgctgggattacaggcgtgagccactgtgtccagctgtcttttttttgttgttttttgagacagagtcaccctgtcacccaggctggagtgcagtggcgcgatcacagctcactgtaacttctacctcctgggcttaagtgattcttgtccttcagcctcctgagtagctgggactgcaggcgtgtaccactacacccggctaatttttgtatttttagtaaagatggggtttcaccatgttagccaggctggtcttgaactcctgacctcaagccatctgcctgcctcggcctcccaaagtgctgggattataggcatgagctaccatacatggctagatcattatctatttggacttgataggttatatagaaatttgattgatctcagtcttctccattaggcctaacttcagctcccacctggcacatcatttttctttttgtcatttattcattcattcaataaaattttgttttttggtgtccactacatgccaggaactgaactagtcattaggaatatataagtgatggaaccgataattccactcttatggagttaatcttctagtgggatgaaacagataacaaacacaataaataagaaaaatatgtagtaagttggccgggcacggtggctcacgcctgtaatcccagcactttgggaggccgaggcaggcggatcacctgaggtcaggagttcaagaccagcctggctaacatggtgaaatcccgtttctactaaaaatacaaaaaactagccaggtatggtggcgtgtgcctgtagcaccagctactcgggaggctgaggcaggagaattgcttgaacctgggaggcggaggttgcagtgagctgagatcgcgtc

SEQ ID NO: 3724 - DNA, 1050 bp, Homo sapiens
tgtggttttgactttagttttcattataataatttagaaagaagaacctaatacatttttaaagtaaaagacagtattactctggaaaagcaaggcagagaatgtagaggactgcactataaagaagaattattggccaagtgtggtggctcattcctgtaatcccagtgctttgggagactgagatgggagggtcacttgaggccatgagtttgagacaagcctgagcaacatagtgagactttgtctctacaacaaaaaaaaattagccaggtgtggtggtgtgcgcctgtgttcttagttgcttgggaggctgaggcaggaggatcatttgagcccaggagttccaggctgcagtgagtgattattaaagagtgaactctttattttaggtaggatttttttgtttatatgatgtaaagttatatgatagagatgtttacctaaatttgtaatttagtaaatcaaccaagtaaaatcaaagatggtacattttaattctatgcagtttgcttttgctggcagaaggactctaatttttattcatattattaatgtttgtttagaaacggatctgaatttaaggtgtatagggcaaagtgaatagtaaaaaacatcctgattttttaataaaatcactttttttttttttttttgagacagggtctcactctgttgcccagactggaatgcaggaatgcaatcttggctcaccgcaacctctgcctcctggtctcaagcgatcctcccacctcagcctcctaagtagctgggactacaggcgcatgccacagtggccggctaatttttgttttctttgtaaagatggggtttcaccatgttgtccaggctggtcttgaactcctggactcaatccgccagcctcggcctcccaaaatgttgggattacaggtgtgagccatgtgcctggccttgacattattattattattattattatttttttcgagatggagtcttgctctgtcacccaggctggagtgctgtggcgcgatctcagttcactgcaacttccgcttcccgggttca

SEQ ID NO: 3725 - DNA, 1050 bp, Homo sapiens
gtatttttagtagagacagggtttcaccttgttagccaggatggtctcgatctcctgacctcgtgatctgcccgccttggcctcccaaagtgctgggattacaggtgtgagcctgtagtcccgcgcctggcctgttttttttgtttttttttttttaagacggagtcttgctcttgtcacccaggccaaagtgcaatggcataatcttggctcactgcaacccccgcctcctggttcaagtgattcttcttcctcagcctcctgagtagctgggattatagacgtgagccaccactcccagctaatttttgtatttttggtagagacagggtttcaccatgttgtcaggctagtctcaaactctgacctcaggacctctgaggtcatgagcatttcaggccgcctcggcctcccaaagtgctgtgattataggcatgagccaccgcgccctgcactgccatctttttttaaaactgaaaatttgtaagagctccgggactttttgtaggaacttgtggcattgttaatgtgtcttgaacattgctttcccccccatacctgtttcctcaaagccaggaaattatatccatagtttactacctactgtctattcttcgttctcttgtgagactggtgtcctgctggctatatttcttatctgtcattgtcatttcaatctgggaatctgtaggtcacccctttatattcactgatactttggtgtaattcctgacatccatattgggcagtgggaagcataacattgaatgttatctgacactttatttccttaatttctatcttctagtgatattcaactctactttccttgatagctcctattcatatcattcaaaatgattcttcccaccaaaattttctgaattatctgtatatgtatttttaatgtttctttagtttttttaatctatccctaatttcactgtaaagcctctttttggctttatcctttcccttcatcggcatgattactgttgtgttccttaccctattgaaatagtgattctgtaacttcgcaacccagtacaa

SEQ ID NO: 3726 - DNA, 1026 bp, Homo sapiens
gactaggaagtatgagtcctccacttttgtttttctttgtcaagacttttggctatttggggtctcttgagattccatgtgaattttaggattgattttggtatttctgcaaaaaatgtcattggaattttgatagggattgcattaaatgtttagattgctttgggtagtgtggacattttaacaacagtaaggccaggcacagtggctcatgcctgtaatcccagcactttaggaggccgaggctggtggattacctgaggtcaggagttcaagaccagcctgaccaacatggtgaaaccctgtccctactaaaaatacaaaaattacctgggcccagtggcaggtacctgtaatcccagctactcaggaggctgaggcaggagaatcgcttgaacccgggaggcggaggttgcagtgagctgagattgcgccattgcactccagtctgggagagagagcgagactccatctcaaaaaaaaaaaaaaaaaaattaagtcttttggtctgtggacatagaatgtgtttctgtttatatatttctaaatttctttcagcaatgttttatagttttcattgtacatgtctttcacttctttggttatgtaattccttagtactttattctttttgatggtattgtaaatggaatttttaaaatttccctttagattatttattgtgtttagaaatgcagctggtttttcgtgtgttgactttgtgtcctgctactttgctgaatccattttttagttgtgtgtgtgtgtataatctttagggttttctacatataaaatcatattatttgcaaactgagataattttacttcttcttttccaattgagatgcgttttgtttcttttgcctaatggcgttggctagaacttccagtactgtgttgagcagaaatggtgaacacaggccgggcatggtggctcacgcctgtaatcccagcactttgggaggctgaggtgggtggatcacctgaggtcaggagttcgagaccagcctgacgaacatggag

SEQ ID NO: 3727 - DNA, 1050 bp, Homo sapiens
tagccaggcgtggtggcgggcgcctgtagtcccagttactcaggggactgaggcagaagaatggcgtgaacccgggaggcagagcttgcagtgagccaagatagcgccactgcactccagcctgggcgacagagcaagactccgtctcaaaagaaaaaaaaaaaacaagcctttcgttgcctgatcgccgccatcatgggtcgtatgcgtgctcctgagaagggcctgtcccagtcggctttaccctatcgacgcagcttccccacttggttgaagttgacatctgacgacgtgaaggagcagatttacaaactggccaagaagggccttactccttcacagatcggtgtaatcgtgagagaatcacatggtgttgcacaagtacgttttgtgacaggcaataaaattttaagaattcttaagtctaagggacttgctcctgatcttcctgaagatctctaccatttaattaagaaagcagttgctgttcaaagcatcttgagaggaacagaaaggataaggatgctaaattccatctgattctgatagagagccagattcaccgtttggctcaatattataagaccaagcgagtcctccctcccagttggaaatatgaatcatctacagcctctgccctggtcgcataaatttgtctgtgtactcaagcaataaaatgattgtttaactaaaataaaacaaaaacaaaaacaaaaaaaccatatatgtaaatggttcaaaatagctaaacattatcatcataagacaacctattgtttagccaggacctactacgtgacttgccctttacatagattattattaatcttcagaattctgcaaggtaagaataatatctattctacaaataaataaaaactcgaagtgacatcatagcttgttctgggtcatgaagctgagattttaattaggactctaagcctttcaactatatgcagccctgtttcatgaacatgttccatatattacagacattcatctttaatagagtcttatgcaactaagatattggtcagcctgacaaaataa

SEQ ID NO: 3728 - DNA, 1046 bp, Homo sapiens
aggtgagggagggtgtgctttggatctgtttgtttaaagaaagccagttatatgtattcacctattccttatttggtatttatttaaagtatcttgagttgtgccaaattcttggctttgtcctgaagttaaagagaaattaaatgaggactcgccttcacgtacataataatctagtggaaaatacaaaaaacaagaatcgaactagggccctaacagagaagtgccttaccagtgccagagatgtggtcagtgtgcaggaaattactttacagtgaatgacaggatgagactgaatgtagggcatggcacttgtggtccctaagcccataggtcaggtaggcatgaatttcctggccacctgccccccaagaggtgccccctccacatacataaccatttcaaaggctataagacagccctctgcccttactgcatggcagatggtcagcaaaaggctatggttaagtgtactgggtctgtttggatgatctagagactttggagcttaacattcttgttcatatttttggtgttgataattttatttactatttattgagcactgtgctgggcactttatatgcatttcaaaatctgacagtaaaattgtagaggtttcctcggctctatttgacagtttaggaatcttgggcccagaggggaagataggcagagcttaccttacatccaggcaggttgaccccagcatccacgctcttctgcagcctccatgtctgctgtctacagaaagcttcatagggagcaggtgcccaaggcaggcttcctctaagaaggggatgagttcttcctgggtctcatactaggcctccaggggcagtaagtgcccatttggcaggaaggagaggggccatggggtcatcctgagagctcatttgggcctgcctcctcaacacacttcctttctaggctgaagacaatgagaacttcaagacaatagtggagtttgagtgccggggccttgaaccagttgatttccagccgcaggtgtgtgtgtatctttctggggaatctttgtctttggg

SEQ ID NO: 3729 - DNA, 1031 bp, Homo sapiens
tcaaagccacgctggagaacatcaccaacctccggcccgtgggcgaggacttccggtggtacctgaaggtgcggccggggcggggcccggggagaggaggcccgtcctgatctcagtgctgaaccggagccttctctccggcagtatgagaaaatatttaaccaggcacattaagtgttcggggttttcctagttagaattttacgtttgctttctattaaagtgtattggtttatctctaattggcagtcttggaaagcttcattttgtagttcttccctgtgttaaatatttcgtggtctgtaaatggacactaaacgaaatgctacttgaagggacgcttgtgattatttaataaggtgaatagttcgcctttcgtttattgatttggttttctttattgtgaaatagtttaattttgtgcgtaatccacccttccttagccctcccacactggtaaagctggtaccctagtggcatggtctacagaggcctccccttccccagcagttcgaggctcttcactcttccagatcccagagcttctgctctgttttactcctggtcaaaaatcccagcatccttctgtacctctcaaaagccctgtttttcgggaagctgcctccggactacttttgtttcccaggattttgaagcctgaataccagggcttacttgggagaatctgttctttggcttgaagaagcggaatcgagtgaaggagacagaaaaatagagtaacaatagagtgataagtgcttataccagtgacatacagggcctgtgggaacataaagctaaccaagcagagtgggtcgggggcctgctgaggccatttctctttttttttcttaattgacacagaattgtacatatttatggggtatatagtgatgttccgataaatgtaatgtattgtgatcagatcaaggtagttagcatattcacctcaaacgtgtatcatttctttgtgttgggagcatttaatatcctagctatttgaaactatatattattgtcagctatagtca

SEQ ID NO: 3730 - DNA, 1085 bp, Homo sapiens
tcgtagcagtatctttgcattctgattgtccattcagagctttatctcccttacttggctatgagtacttcaaggacaggaactttgtccttttatcctgggaatcttcagtatgccgagttagtcagcaaatgttttaaaaacttctcccctgtgtaagacactgactgtgccaagtgccaaggatccagggaagaaaaaaataaagactttaagagctttcagtctttaatcaggcaaaaataaagtcctttaaggtagatgttaatacatgtcattatgtgctatgataggggcatgttggatatagatagagacagaggaacaatgtaatagtggcatgatactcttgtgaagggatggtagaaggaaaggtaattccagagtaaaagtggcgcttctggagaagacagcatttgaattggccttgaaaggcttcaccaggaaagatgatggtgaggtgattattccaggattattttgattggagtggagaaagataaatctacccctttcttgccatcctttgccctatagaaagaggcagatatatgctgttttgctgacataactcactctgaaatattcaatatttttaatttctgctaatctgaggagtgaaagatgagtattatttccctgacatttccctgtgaggtagagtatattttcgtaagcttatcagcccctttacttatattttatctgttatgaatcgcccactcacagtcttttcttatttttctattggctatctttttcttatttatagaaatatttatacatgacaaatattaaacctttaaaatatatgttacaaatattttcttccagtctgacatttggttttaaagtttgtttatggtatcttttgccatgcataaatatgaaacttttaagtatcagatttgtcaatcttttaagatttctgggttttgtgtcttgcttaagaaggccagcctcactctaacttattaaaatatctcctgatgtttttcttttctactttaaacttttttttagtattaggatattaatctatttggaatttaaattttagagtatcgtatgaggtagagatttaa

SEQ ID NO: 3731 - DNA, 1099 bp, Homo sapiens
tgtgccccagctgtctccctctctgccattagctccagatgcctgtgagctgagtgtccagcctaatggaggctgtgaatacctgtgccttcctgctcctcagatctccagccactctcccaagtacacatgtgcctgtcctgacacaatgtggctgggtccagacatgaagaggtgctaccgaggtaagcagaccttccaggagggatggcccctggcagtgtcagaccctaccctgctgaaatcttcccttggcttctgggacacagtatgctgctggttttcttccatcttccctggttacttgttgccttttgggggtttctcttttttaccttccttgaatgctcatgcccccaggatccttccaaagctttttctcactcccaaggaaaaaatgcacatatacataaaacattttaaattcagtttcagggagtttctggaacgctttaaaaacctcaagttaagaacccttaatcgccgtggcttcaggtacatgcagataactatatatttgcctgtttctcacctagaacttaacaaacactacacagcagcccttttgcaatataattgggactaatagttaatacttcaaccgcatacacagattcatgtcctaatcttgatgtatagccaaggcctttcatttgagcctaagtctactgcattattaatgatttacaggttcaattgtttaaagtggaataagaatttcaatctattggtataacaatatatgagtgtaaaatccttctagatttatctgatttcccctccctacagtctttttattgctgatcttacaactaattccacagcaatgttttaatgactcatctttattgaatcaaagtgaagtgcttagcattcagctaaagaaaagatcatagcccactggggagattaggaaaggcttcacagaagtggcatttgagctacgccatgaagataagttcctaagtatatctcagaggcaataccttaggcaacaaaattatctgtccaagtgacctccatggtatttcccctccagcacctcaatctacctcaactacgacgttagcttctaccatgacgaggacagtacctgcca

SEQ ID NO: 3732 - DNA, 1046 bp, Homo sapiens
ctcttgtgactcagaccaccccggtcatgtccccagcaagaaggcaaattgggttattttgtcttttaggttcatgtattggtctgactggggggaccaggccaagattgagaaatctgggctcaacggtgtggaccggcaaacactggtgtcagacaatattgaatggcccaacggaatcaccctgggtgagccctgcctttcctgggttgggggcctattctagtgccttgtcctgatcactgtctggaactccatgagtcttgtttctgggtcctctcatggtgccagtgactttgtttcctaatggttgccgtaggctggcctcagtgtgaggcctagaaatgtgggcagggagaggtacaaaggaacagagctccagactggggtcccaggttcatgacctgatcctgcttccttcccaagatctgctgagccagcgcttgtactgggtagactccaagctacaccaactgtccagcattgacttcagtggaggcaacagaaagacgctgatctcctccactgacttcctgagccacccttttgggatagctgtgtttgaggtgagtcctgtaaggagaggcaagggcccactaggaagctgaagcctagaaaatgcttgttcaaataggatgagtccctgagacttgttcaaatgaaaacaggaacagggaaaccaactgatttgtttgtaaacaatctgtgagctgcctgcacacaaaggctctgcagcccactctccacctggcagcctttcccacgctctcttcccaagacccctctcccagagcacttctcacaggtgagctgctaggcatgtatgtttcctctctgtgccctcagcacccagcactgtaacccatatacaaaaggcacccagtaaagggaggaaaggaagaaggaacatacatatccttagaatcatttactggaggaaatggcctgagagatgctgttcaattctgcacacttttattgacctctgccagaccctggggtcatagaagtgaatcagacactatcctagtctcaagaagctccca

SEQ ID NO: 3733 - DNA, 1033 bp, Homo sapiens
gctttccataatcacattgtattatatctggctcaccctaatgggcagagctgtggagcagccccaccttagaaagccagagaccgtggcccatgtaagtctgtacccctaccctggtaccccagggaatgtgtagagtggaaattatccacgttcctctaaaaatctattgccatggcccagatggaagagaggggaagggtgcacaggtagctccagatgggcccatgggtggaacatctgccccatggtcatctctgttttctcttaagcgcctacatggacaaggccagtgacccgaaagagcaggaggtcctcattgacgagcagttgcactctccagagggcctggcagtggactgggtccacaagcacatctactggactgactcgggcaataagaccatctcagtggccacagttgatggtggccgccgacgcactctcttcagccgtaacctcagtgaaccccgggccatcgctgttgaccccctgcgagggtgagtgtcccaactgaacttcccattctcccaccataggtgctcagtcctcttgtgtctgtcacaagggctatcttgagggttctagaaagctctgggccactcagacacaggccatggggaagaaagtcttgttaatccccaaccaaggttctctgggcattggtcaccaaagttctccctggactctcccacccactcgttatatcgtagaattggagtgtctcagagcagagtagggctctagagatggcctgatagaagctcctgggggaggaagcctttcttcaggctgctgtaggtgagcatctgacagctgctcacatacttccaaagacaggtagctcattacctcccatagggcctgtttcaccgtggggcagctctgctcattagaaagtgggtcttttcccctcataatgccaaatctatctccctgcaacttcctccattggcctctggagttacataaaacatgtctattccctgccctgtgagagagccagcaagatttgaggaccaagatcactggt

SEQ ID NO: 3734 - DNA, 2008 bp, Homo sapiens
ggtcagtccctccctttcctgccttctggcagactgtttccccagcacctacctcctgggtgcttagaggaggttcatcctcctgagcttcccaggaagagcatatttccttccccttttgaagattaaaaaactgattgtgaaaggaagagtagttgagtgaaagtgactcagcttctacctgagctggcaggagatagacactccctctgcctccaggccctgccaagagaagtcccagaagaaggaacttgtggaaaaagagacagggaagccagaactactgagcctagctcccccaacacccagatttggagtagccagggactactgtcctactaatccctctcttctctctcgtcgtttgcatgacacaccaaagaggagtacgtacacacgtgcttgtgtctgtgtgtggcctctgtctctgtgttggtgagaggccggtgtctgtatccatgtcttcttctctgagtaaagcaggggaactgcattcatgcatctatgtgtgtgaccccatgtatgtgtgaatgtatctatggagtccatgggactgtttgtgctctgcacataagctggtatgtgtgcatgtagttgtgggcatgctggtgtgtgcatgtaggtgtgtgcagtgacaccacttcttccttccatggaaggaagccgcaaatactactctggcctctctgcaccactctaccccatccccctcctctcctggctccccagcggaatcacacccaggctaggtagaattaagaaggactgaagacttccctgcaggcatttggggaaaggttacagggacagacaggtgcagacctgctctcctttctcttcccctcacccacctgagccctggaggactctgtgccttccttcatcagaagccagtcactttgagttctctcctttccccttccccctttcagggccatcccacctacacatgccacttcatcaagtgctcagtaaatagaattgttgagttgttgctagctgcaaaaggagaggaaggaggcgagtggatgcatgatgggggcagtgggtgagtgggaggacagatgaatgaacggtgctcagggaataacacaggaaaggagaggtcagggagggctccgagcgactgaaagattcctagaggtgggagctgccgtggctcagcccacctccaagggtctgaggcttcccagggctgggcctggctgagtcatccctgggtcccccagtcatggagttgctgtggtcttgttctttcagttccgccaacattcctgggaaacaggaggaggcccaggggtaaaggggttattccctaagcatggctcaggctggaagtgggggcaccccatagctgtgcatggcctggggtgggcagctcagaccagctatatgcatggccatggctggctcagctcagcactgcttggcttggctggagtggcagtgcatgagcctggggggcagagggggagaggggcgcggcacctctccttggcttgtggaattaaccttctgtgactctaaagctcaggagaggctgtaagagcattggtcctggattccctgacctcccctaagaccctgccagaaggtagtgagggagtggaggatggggaaccagaaccagatgacctctgggcatcccttcacctcttgcagcaggtggtaatcctggaaccgggcccatgacaagataggaggaacagggacaggtgctgagaggagaggagttaaaaaacccatcatattagttcatgataggagagaattgatttagcaatggctccatgttaaaaaaggcccaggagtcttaaataaccacaagcacattagggggggcatcctgtgttgttcaggttccttctgggtggcaaactagctctgggccctgtccagacagggacatggacagatggagtgagtccagagaaaggcacccaaatggcaggagaccagatatcagtgctttaagggagcctgtgcaccctggccaaccccacacagc

SEQ ID NO: 3735 - DNA, 1034 bp, Homo sapiens
catctgtaaaatgtggtaatggtacctgccttagagggattgtgagaatcaaatgaaagaatgcaagtatcatcgctggagtaaatggcagtgttatttgtattattatattttggctgcaagccccctctccccaacacaacagtgtgttagatattaagatgttagattcttacagtgttaaaatagtgtcagtgaagggagttgcattgagcgggaaagggatttgagagaaggtcccaattcttgtgttttccccgattatgttgtctgtccctagctggctggggtttctcccagctctgtttccctctggttctgtgttctgtacctatcaaatgtagccaggagtcacaatggaaaagcccagaacatttgcctaatggcaatagcatttcagctctaattatagctcacttgattggggacggcttctgacccaccttcaggcttctgttgggaggggtgagggtgggggaggggaggatggttcaaggtgagttatagttctggatgctatttatttgaatatggaggctttttcatgcatcttagaacctttccacctgggaggggggcctctctgattaaccaggctcatcttgctattatagatcagaaaatggaggcccagagattttctgagctcactcagtaagttagggactgacccagctagcagcattttgcctggccttgactgaaggaacttggtgtaactcccccttctgcaccttgggtggccccatgctgtgcttcctgtggattgagtgacactggcagttctcaccaccggagcctctggtcccttagagctggcagtccccatttggaggttatctgcccctgaaactcacgtgggttgacactgtagatgcgttccctcaatgggcagccgccaagtactttcattctttaacagacattgcccttttcgttaatttgtgaatttatgaattggagaaagtaccaatggatttgaatttctggggcaggattctctgggaatttaaatgcctttaaatgccgtgagc

SEQ ID NO: 3736 - DNA, 1050 bp, Homo sapiens
gcattcttctaagcaaagtgtgaagaaaactcatcttagaatgcagatgtactgcaaagattccactgagaaggacagacatggaacagattcagagacacagtctctctcaccaaatccttgccaggctccccagaggagggggagcaggcctgcagccccagaagcacccagagggcctgtgggtagatttgaataaaggtggtccatgggagtggcttcccagggagaaggcaagccccagaactgtaagtatggagcagaggctggggggctgtgctcgcatttagctcagtgtcccgcactgagacctaccccaagctggattcttgctgaatttgacagtctctgtgctgcagggacagggaagaaagcaaaccatgttggactcgcaatcagtgatgatctagagcagaggtcatcaaaatacaggccacaggcctggcctgtcaccagttttttgtaaataaagttttattgaaacataaccatgctcactcatttatctaatgtctctgactgcttctgccccatagtggcaggattgagtggtgtgaccgagaccatttggccctcaaagcctaaatagctactatctggcccttcacagaaaaagtttgccaacctctgccctagaaggacattcaggggattgtaggagctcaggagaggctactgatcaagactggaggtgatacttaagcccagtgtgtaatggaaagaaggtgagaggtgggggaaggggctttcagactaaagacagcttgggcaaggtatgatggtataaaaagcatggagtatatgaggacccaccggcagttgaggtggggctagattgggaagtatgaggaggggaagatgagggagcggggcaggctggggccacgggacttctaagcccctggggagaggccacatcctagtggcccctgatgttaaatccatcccaagctcattccaggggaggactttggtggtctgagcgccccaaggcctggggtaagtcactgctgtgctgaggtatcctcttttaggctgaaaagagacccc

SEQ ID NO: 3737 - DNA, 1030 bp, Homo sapiens
agccctcactgtgctaccctggatgtttcccaagccccttttcatggcatagggcctcctgcatttcctccgggctctgaagcatgtgcagggctgggcaggcatgacccggggtcgatttggcacctttgtcatctcctgtgtctttatagtatggctttcttcaggcaggactggctttcatgcactctttcccaaccccccagtgcccatcacagggcccagcacagaggaggggcccattgtatgcttgttgaatgaatgaatggatccccctgcttgcatacctcctgggatggaggcctcactcctttatacaacaattggttccaagattttcagaaacgaagttctttctggttcttcccgagaggctccatggctcccaggcttgccacaggggccacacagacaccctggctgatcctgcgtcctcagagcagcgcagaaaagaccagagacctctgagccagcccagctcctcacaggctcctgcacggctgggtctccactgcactaacctctgggttgtcagtaatcataggtgtcacatatggagccctcactgtgccaggcagcatctcattccattcacatcagcctgtaaggcaggtagttctcatcccccatttacagaggagaaaaatgacttcctccaggtcacacggcttagcaggagacagaacatctgagtcaggagggtgggaggtgggctggggtgggctggaggaagacctcctggagcatgggattgtggcagggcttggggatactgggggcttggcaggagggggcaaggctgaggaggggcccaagggcttttctggaggtggaatctgcccctgcccctgccccagcccgtctcttccctctccccatgctgtctccaaatggatccctgacaccaagactccaactggggtagtcccagaggtgagacctgtgaacctggggcccagagcccttcctgtccccctgaaggccagggtgtgggtatgctccggggcagagctcaaggccgctaaactga

SEQ ID NO: 3738 - DNA, 1085 bp, Homo sapiens
tgctcggcggccaaggtgcgtgcagccggtctctgactcggctctgctccgccctagccaccaacaaagcgcggccgggaggccggagcggggaggggtccagaacccggggctatcgggggctcccgggcggacaggctccacgcgaagcggctattcctgaatttgccctcggccccccgcccccgcgggcctcggtgttgagggctctgccctctgggcagcggatcttgggggaggggtgcaggggggcttggccagcggggaactttgccggaggggcggccattcatggttccggatgagctgtgtgattctcgccgttggggtttatttgacacgcgcgctccgcggcggtaatgagcagagccgggcggcttctccgcttgacaatgcgtttccgcagacccctgcgcgcggcggagagagagggggctgcctgccagggtgatgtgcctgcggctcccactgcgcctggcgcgcgggcgcggggactccctatgggctgtatctgagcagatctctgactatgggtcgcgtgtgcgggtgagtgcgtctgaatggagggtatacccaggtcgtgtgacactttaagtaggtgcctggtctcgccgtgccaccgagcggcccgacatccacggaacccctgccatcgtgccctccctttggatggagtgtgcctgaagcccccggggtctccataatcgccccctttcctcctccccagcgggtccttccgggtggcccggactgcatggtggggagtggggccgagtccgctgatccagctcacgctccctccccctcgcagggccggccaaggattgcgaaaaggaccaattccagtgccggaacgagcgctgcatcccctctgtgtggagatgcgacgaggacgatgactgcttagaccacagcgacgaggacgactgccgtgagtggcgggccagggagctcagacccggggagagaaaaggaacggtggggggcaccatgcttggcgcgcacgtggctgcagccgccgcgctgccacctgcgcgggacttgccgccggagcctgcgaccgggaaaccgcctgggcaccgcct

SEQ ID NO: 3739 - DNA, 1027 bp, Homo sapiens
aattctatctgggatcttagacaaaccactttactcccagagcctcagtgtctcttgctgtaaaatggaatattgatccctaccttggtgcttgttggaaagattaagtgatgatatgcagctcgtggtgcctcaacctgaggttgggcccaagcagtgtggataaataaacaggtgtaacaagtaaaccagcacaaggttattgcctgcctgctgtgtgccagacccccatgtaggcaagggaaataagatgaataagaaagatgtggttctcatcctcgagttcactgtgtggagcagcgatggctcagctgggggtgcccagaacgtctgtggggtgggggaagaaatattagaatgcgattcttatctggtgcatctcactcttggtataataatggtgatgagcctccatgtgaggcactgttctgagcactgcacatgtttgtaactcacttggtcttcacaatgactgtatgagatatgtggtttttacaaatgaggaaactgagacacggagaacttccttgcaccccaaggccatataactagcatgtggtagaatgcatttggttatatatacatagttaaattatcaatgaatacattttctccagattgggatatgagatcaaaaaagttggagacaactcgtctagagcagtgattatcaaacctcagtgtgcataagaaacatttagggaaggggttaaaatgcagattcctcaccctctggggggttacaggaggtttttaagtaaggtgtcaggtgagaaaggaacacctgggcattcctacatctgaaggtacaggttagccattttcagcctcagtttcctcacctaaaaaatgaggacaggtcctcctgcctggccagcctctggggtgtgtgagcgtcacactggccctgtgcactaggccccgtcacctgctccaagacatagctcctcatcatcagcatttcctttctgttgagtcatccccatccccatgtaagcaagctgatgtttctaccattttacaaacc

SEQ ID NO: 3740 - DNA, 1031 bp, Homo sapiens
atttctattcatttttaattgttttgaaaaatattgtctctgtgctctgtggttcacttaatatgcttaatgtaaaataaagcttatgctttgaatttatgtttcatttagtgctgtgcaagcatctgcagaacatcagaaaagacttcaacagttcttggagttcaaagaatagttaagtaatataaactgtgttcattacactgctgatacaactacagatgggacagtaaatgttcagcattcttggatcagaagaaaacggactaattagatgcttcctttgtcgtggtggttgctttgaaaactatactttaatgggagaaatcatggaaagaaattctcaacagaataactgaaaactgccttttctgtaccgattgctttttgtgtgtgtggtataataaaatctttattcaattttacagaagcattgatggcagtcgaaatgtctctagctcatataacttaatagtaataactaaaaaacttttagaatttacttttgaaaggagggaagccagttctgaaatgagtataggttgatttcatagtcttcttaattaagagtttagctctttgtaaactcaaaatacataaactttttaagtgtagtttcatttactgaaggataaaaatggtaacagtgcagcaatattcacaaaaaatattgtctaacggacatattttgttaatctgttaggttgggtttttgtttccagggacaaattaaatttgtatgattacccaaaaaagggtctcagtttacagatgctaactctatataaaggaatgtggaaaaactcagttcttaagttacaagattaaaaattcacatttggtctttaagaaacaattgactgacatctatgaatttattttgtatcatgctagtaaacacgaagtattaatgtatgggtattttcccagctagttttgctttctttttctggagcaaaacattaagtgattgcagagtttttcaagcaagagaaaaaggtttgcaaaaaaacccaggaaatgttcccttt

SEQ ID NO: 3741 - DNA, 1034 bp, Homo sapiens
tgagccaccacacttagtctttttgtttgtttgtttgaagagatggagtcttgctgtgtctcccaagctggagttcaatggcatgatcatagctcactgcaaccttaaactcctgggctcatgcaatcctcctccctcagcctcctgagtagtttggactacaggtgcatgccaccacgcccagctaagttttatattttttgtatagagacagggtcttgctaagatgcccaggctgttgagcctggattcttttatatctttctctacttcaaaaaagtgcaacagatagattgtttttaacttatgttaacttatgttaaatatgaaaacttagttgttaaagagctgtttcttttcatcttatagatacagccgtctcagtgcttaaatgttgctcagaggcctttcctgaccattctctgaatactgtatgcccttaccacatgtttttttttttttttttaatttcctggcacatattattacgcaacactatattatttttaaaattttcttcctaatagaatgtaaagccagagactgttattttattcattactaatgcaattgagtacttttttcagtgcctattccaatttttttgcccgtttttctattgaattgctcctccctttatttatttatttatttatttatttatttatctatttatttattttactttttattttcgagacagtcccactctgttgcccaggctggagtgcagtggtgtgatcttggctaacttcaacctctgcctcctgggctcaagtaatcctcccacctcagcctctcgagtagctgggactataggtttgtggcaccacacatggctaattttgtagagagggggtttcaccatgttgcccaggctcgtcttgaactcctgggctcaagcgatctgcctgcctcagcctcccagagtgctaggattacaggtgtgagccaccgtgcccagcctttatttctttttatattcagaatattaatccttcctaaaatagatgtatttcaaatagttttgccta

SEQ ID NO: 3742 - DNA, 1075 bp, Homo sapiens
ctatgagaaataagggaatttttaaaggaatggggacacagtagtttaagttaaataataagataatctgtaagctctctgagtgtaaagtgtgatcattattaacgagtcattcccacagatgtaacagcaaataggggctgttatatacatgaaaatgtaaggaagcccagggggtcagacgcaaaagtttagaggtcactggggaccatggaggtgcatctcactggacatcgtagtgttcattgtcttagttcattgttcacagtcatagcagtctgtttaatactgctagtgaagtaaccctggtctttctcgctcaacctatgatctagtgtttggctttattttagcgaccaatttgagaggttttttgtttttttttttttttggtatgtgtgtggtaaaatagcaagtttttgcttgtagacttttgggaaacttaattcatccaagtattcattgaactcctgctgtgtattagatgtcatgagtataaatagtagcttcactaagaaaagtgggtcctgatgccaagcataatgtagaatttcttactgactttttcccccacttcaagaggggaatgtaagattatttacattttaaaagctggtgtttggacctcctaggtggacatccccacaattggacagccatttcaagggagtgtttgaatcttttaaatggtatgactcagaaactgattctctatcaagaagctgctgctacgaatgggagagtgtcttcatcttacccagtggaacctaagaaattaaattctccaggtaatccctaggactactaagaggggaaaacatttacattttatttcctaagaaagatgactgtagtagactgggcgctgtggctcacgcctgttatccccgcactttgggaggccgaggtgggcggatcatgaggtcaagagatcgagaccatcctgacccacatggtgaaactctgtctctactaaaaatacaaaaattagctgggcgtggtggcgtgcacctgtagtcccagctactcaggaggctgaggcaggagaaccagggaggcggagtttgcagtgagc

SEQ ID NO: 3743 - DNA, 1059 bp, Homo sapiens
tacactgacaattttagggcagaaaaatacagcttaagaattctaaaagtttggctgggcgtggtggctcacccctgtaatcctagcactttgggaggccaaggtgggtggattacttgagcttaggaattcgagaccagcctgggcaacatgatgagaccgctcttctacaaaaaatacaaaaaattagcccagcatggtagcatgtgcctgtagtcgcagctacttgaggagctgagctgggaggattgcttgagcccaggaggttgatactgcagtaagccaagattgtgccactgtactctagcctgggtgacaaagtgagagcctgtccccctccccaccccaaaaaagaattctaaaacttttaatgctacaaaggatcttaaaaattaggtggtctactctctagatgggagatttaagtctcagagattggcttaaataaagttaatgtcagaattggaataagagtcctgtcatttggctccatgtacaggactcctccttctgctatgctactctgcctccttttaaaaaaaaattaggaagaaactagattcaatggtgactcaaggatgctctcagcaactctgaaacacttacagtgtatactgttcttgccatgctgttcaagactgtgactttgccagttctctgttgttcctagagggaaaacagtccagtcccaggcactggtgggaaacagagaacctgggtagcctttcttctgtattttaagagacagggtctcactgtatcaccaggctggagtacagtgtcatgatcacagctcactgtaacctcgaactgctgggctcatatgatcctctcgcctcagcctttcaagtagctggtattataggggcataccaggtgtgcaccaccacacctggctaatttttaaaaatttttgttgaaacagggtcttgccgtgtttcccaggctggccttgaactcctggggtcaagcagttctcctgctttggcctcccaaagtgttagaattacaggtgtgagccagtacactcaaccagcttttcatcttttttttaatgat

SEQ ID NO: 3744 - DNA, 1082 bp, Homo sapiens
tattaattataactaatttgttagagaaacttaaaagtatcagttactcatttggttactcaccaaatatttatttagtggtacgtcagtctctgctagttgtttgtggtagaatgatgaataagacatagcacagcctagtagaaaatacagacgcccaaaataactaaaatgtactgtggcaaatacattgggacctcttattcagcttgggaccaatgcaagaaaacttcagagagggatggtatcttgaaggatgagtaaaggggtttgcctgggaaaagatgaagattttcagtaaagaaaaaaaaaaaatagggtggccgggcatggtggctcatgcctgtaatcccagcactttgggaggccaaggcaggtggatcacttgaggtcaggagtttgagaacaacctggccaacatggtgaaaccccatctctactaaaaatacagaaatcagttgagtgtgctggtgtgtgcctgttgtcccagccactcgggaggctgaggcaggagaattgcttgaacccgtaaggcggaggtagcagtgagccgagatcacatcactgcactccagcctgggcaacagagtgagactttgtctcaaaaaaaggaaaaaaaaaattaggtatcacgtgctaggcactgcctttggatatggtagcaagtaagattttccgttttcttgtgggccgcacagtttggtgggtggaatcagatgggacaagtaaacattcaattacaatacatgatgttagtgccattgttgagagctatgtgagtgtatgtttgtgtgagggaaaccagggaaaattccaggaggaagtgatgtttcaatttcccaccgcagatatatgaaagagcacagagaattctgtagttccttgtagctagaacttgtagtaggtagggagggtagaggcaggaaagttctggaagtctagaaaggaaggttatggttctgagattttttttttcatgaaaaagtttaattaatttcctcttggatatataatgatgaacccaattagtgagattttatgtagaggttaaaaaaaattaaataatatgtgttttttccccc

SEQ ID NO: 3745 - DNA, 1048 bp, Homo sapiens
caggctggagtgcgatggcgcgatcttgactcactgcaagctccacctcccgggttcacgccattctccttcctcagcctcctgagtagctggaactacaggtgcccgccaccacgcccggctacatttttttgtatttttagtagagacggggtttcacagtgttggccaggatggtctcgatctcctgacctcgtgatccacccgccttggcctcccaaagtgctgggattacaggcatgagccactgcgcccagccaaaaaattttttaatttccatcttgatttagtttttgacccagtgctcattcaggagcagattatttaattgccatgtatttgcatggttctgaaggtttcttttggagttgatttccagttttattccactgtgatctgagagagtgcttgatataatttcagttttctgaaatttattgaggtttgttttatggcctatcatatggtctatcttggagaaagttccatgtgctgttgaatagaatgtgtattctatggctgttggatgaaatgttctgtatctatctgttaagtccatttgttccaggtatagtttaaatccattgtttttttgttgactttctgttctcataacctatctagtgtcgtcagtggattattgaagtcccccactatcgtgttgctgtctatctcatttcttaggtctgttagtaattgttttataaatttgggagctccaatgttagatgcatatatgtttaggattgtgatattttcctgttggacgagaccttttaacattatataatgtccctctttgtctcttttaactgctgttgctttaaaatttgttttgtctgatataagaatagctacctctgcttgcttttagtgtccacttgcatgaaatgcctttttccacccttttactttaagtttatgtgggtccttgtgtgttaggtgagtctcctgaaggcagcagatggttagttggtgagttcttatccattctgtggttctgtatcttttaagtggaggatttaggccatttacattcaatgttagt

SEQ ID NO: 3746 - DNA, 1060 bp, Homo sapiens
aactggtagcagtttaccagttaaactgctaccagtttagtatatattcttccagaccgtttagtgtacatttacatgtatgtacctataacattatatattttgtgaagtggggtttatataagtggttttatcttatatatattattcagtaactacttttttcatgtaattatgaaaatttgaggcttttttttgagacggagttttgctcttgtcgcccaggccggagtgcagtggcacagtcccggctcactgcaacctccgcctcccaggttcaagtaattcttctgcctcagcctcatgagtagctgggactataggcgtgcgctaccacgcccaactaatttttgtagaaaaattacggctttttaaagatctactaattttaaccaatttgccattagtccattagttttttctttaaacttgcctacactactaaaaccagttctattgcctttatcagattctttgttctgtgagttaccaggagtgtaaaaaatacaaataataaaaaagatgaaaacaaaatcacccaaccaaaaaagaacaggaacaaaaataattcttaatgatggacccatagggaaaagcagactgttagtatgaagtagggcacaaagaaatggacatcaagacaactatgccaacaagactgttgaaagtattacatttatagagcatttagcatagtgcctggcacacagtaaatatttagtgaagggtagttcatagctacatcacagaagaaatccaacagagaattgaaaaacacttcagcatgggagcaagaggtgggggaaatggtgttttctgcctgtctgctgaaatgtcgacctgcttccctagcctctctgaacctttgtgaagaatggttgaggtgaaagctatagtaggaatagcataggaactatggcgtttttattggggcaggtgtgtggtggtggtagcacccagtggctacacagaatagtgcaattccacatcttgtactttgaaaatatttgaacagaccaatataattgaagcaatatgattagtgaccaagtatttatat

SEQ ID NO: 3747 - DNA, 1233 bp, Homo sapiens
cacctaactttgtactaatgcaggcatcagctcactgatactataaattctttagtggtacgtaatgttattactagtagtgaatgtttgagttacggattatgatctgagttagtggttaacatcctgtatgaaaagataggatttgcataactgaaataatttaactgacttcatgagtgagggtttttctttttgtttataggttttgggctggaggatagttgcaagtattgtttggtcagtgctatttctacccatctgcaccacagtatttataattttcagcaggattgatttgtttcatcctatacagtggctgtctggtaggtgatactcaacttggggagaaagttataggacctacttctcaacataaaaattgcattatgtttcaagcagtttattttcaattactgcctatgttatattgacacatcaaaacattcactttgagataattttaagatgtctccttcgtaacataaatcacctttttattatgtaataagattaataagcttgtcaaagactgtgatcataggaacgaaaagatcattagaagaccccataaatgaaaacttagtttcatttgtttttcctttgggcagctttattgagattgtttgtctctttaaaatacagaatggttcctgtcatcgattcgaaattgtgggtagaaaatatgacatgtacctcttttaaaaatacgtctaaaattaagagcacttgatttctttttttgaaacagagtcttgctctgtcacccaggctgagtgcagtggctcagtcttggctcactgcaacctctgcttcccatcttcaagcaattcttgtgcctcagcacgcgccaccacgcccggctgatttttgtatttttagtagatacggggttttgccacgttacccaggctggtcttgagctcctgacttcaagcaatccacctgcctcagcctcccgaagtgctgggattacaggtgtgagccaccgcacctggcctaaaatgttccttaaattccttagagactaagtaaaattactaaatgtattaaaattaacttgttttctgttaataactacccattattgcctgtttaccgtgtgccagctccttacatatattacttcttatccttcctgtaactctgtgtagttaagaggtactttctactttataaatgggataactgagattcaggttaaataatccatgcagagacacccagctagtg

SEQ ID NO: 3748 - DNA, 1060 bp, Homo sapiens
taggttcttctgtaagaggagctcctgcctttggtcccagtagaggggactctcttctccctgaaccctttcctagaacacaatatgggtttgttccattttataacaatcctggtggttttttcttttttctttttcttactttctttttttctttttgagacagagtttcgctcttgttgcccaagctggagtgcaatggcatgatctcagctcagtgcagcctccatctcctgggttcaagcgattctcctgcctcagcctcctgagtagctgggattacaggtgggtgccactactgcctggctaatttttgtatttttattagagatggggtttcaccatgctggccaggctggtcttgaactcctgacctcaggtgatccacctgcctcggccacccaaagtgctgggattacaggcgtgagccaccgtgcccggccatttatctggtcatataatttatctggtgatcccattacactttgtattaagtatcactctcatggtgcttgaaacactaatggctgactaatcatgtgtccatctgcctattcattaatttgttcggctatttattcattcatttgtccactgtatactacaatgtctccccagttaggctcagctcgacaagaacaaggcatggtgttactctatatcttcattgcctaccacataacctagtatacatagggcactcagtaaatatttgtggcatgaataaatgaagccacactctgcacatgatcttgctgcaggacaagaacctttactttgctgtgtaatcacagactgtcctttctgtccaagctgctctctcccagaggcatgagatgtgtgcaaaaaccaggggcttagaattaaataaaattacaattaaatcccaggtcagctatggtggctcacacctgtaatcccagcactctgggaggccaaggcaggcagatcacttgagctcaagagtttgagaccaacctgggcaatgcggcaaaaccccgtttctacaaacaatacaaaaaattagcttggcatggtggcatgctcctgtagtcccaac

SEQ ID NO: 3749 - DNA, 1032 bp, Homo sapiens
tttgtattttttgtagagaaggggtttcaccgtgttgcccaggattgtctcaaactcctgagctcaagcgatctgcccaccttggcctcccaaagtgctaggattacaggcatgagccaccgcacccggcctttacttttatttgttctggcttgaaaacctcagagaagggttagaaacacataatcttactttttgttgttgtttttgagataaagtcttgccctgtcacccaggctggagtaaaggctggtctcaaactcctgggctcaagcaatctgcccacctcagcctcccgaagcattgggtttgcaggcgtgagccaccacacccggccctctttctcttatttaagaatactatttcttaagtccatgaaaagatctagaagcagtgacatccaagtatcagtgagcacatcaaatacccagattgtgatctctaaatacctttcccattaattggaaccaagactctttggaggaatggccaattccaaaagtgtgacaagaaatagacaagattagcctgggacattttgttgtgccagaaagtagactaatggataatgtcaagaggatacagaagctaacatgaaggtactcttattagaaaaaaaaaaaaaaaagggcaatttgagcaggaaaaaaaattttacagttgactacaaccatactgaatatatttaaaagtgaatccatattgatagaagagaaaaaataaaagaccaaaacaaaaccctcattggactccatgggatgtaactagggcagaattactcatttgaatatttgtatttaaaaggaaagaattgggcatctatcatgtacagacataaccctggtagatgagagaaagtgctttgcagaagaattcctgctcattgatgtggaagatatgatagaattagagaatcatcattagtccaggcatggtggcccacacctataatcccagcactttgggaggccaaggtgggaggatggcttaagctcagaagttcgagaccagcctgagcaacatagctagacc

SEQ ID NO: 3750 - DNA, 1048 bp, Homo sapiens
catgtattttgacccttaactcatttcttctgttacatttatgttttagatttggtacacacagaggggcagcttcaaaatgaagaaattgtggtaagtgaatatactttatagaattaaaaattaacctgcacaatgtatttagactttaacctatctccatagtcatagttaataaatttcctcatgatattataggtttgtacctaaatcaaccggtagagaaagttattctcaataataatataagctaaatgtacattcataaattaggttcttacctttcatagagagtgacggcaagataaaacaattcatttattttttgttttatttttctcattcatttactttgaagtatttatttggtttgctttctttcatttgattctgtaggcattttagaataggaatgaaaaaagggtcgcgatgccaaaattgaatgttaatttaagcatgaaaggacaagtgagattcatataaggggaactagagcataggatcagcaacaaataagccaaagagagatgaggtggaaagacaaccagtatttttcgacaacattccattgggctttgcttgtcaagtgaaatgaatgcccgttgatgaggaagctgctgcctcatcaggagttccgctattcctggtagttggtcaggccctggttttagacaaacacaaaacaactgaatatctattaggtggtcatgctttgtttaattaaggtttccctaaatgagggttaaaatagtaccttatccattaagtttacttcttcacaacttgccagaagctgctattaaatcagtgtttcaaaaaattctgtaggaagtttttgaatcccattagttcctttctctcccaccaaaattcacccaagtactggggaggccagtgaggtcctgaaaaatgattaatgttactgaattttatcttcctgtttttttctgtctttacctagtgggttatgattagtaagcccctgctacctttcgtatattgtttcaggactccactgtggagggttacagcattatagaaaatttgg

SEQ ID NO: 3751 - DNA, 1054 bp, Homo sapiens
ggtcagaaaacaaggatgattagttgaacatctatttacagagtaatcagactctaggtaccttcttccgtcctacaaaactaggtgaccactcctttatcccacagacctccaccacaaccctcaagagacaactgcaaatatagaatgttgaggctcaggagaccagatatagtagggagtgagtgagacatggagttgaaaatacgatactagtggaagcctacatattgaatagtgggaacaccagcctccttcctgtgttctggtattaacttcagcagccaagaatataccctcagctgggagactggaacattcatctttggagaaactaaatggccctagaaaaaagacctatggatactgacaaaggccagctcatttctggtcaccttatttaagtccagtaatcaataagtgtggctcatgcacacagttttcaaatgatgcacagttttcaaatgatccacaagtaacaaaagaaagatcacaagacattaatgaagacctcaaaccctgaatataatcaagcttttagctctaatttccaatctataagaaatgtagaggatagaggaacaaattaagtgaaaccacgaatagacaagatgataaaatctagaatgtggggcctgggcacagtggctcatgcctgtaatcccaacactttgggaggctgagggaggaggattgcatgagtccaggagttcaagactggcctaggaaacatggcaagatgttgtctctacaaaaaaaaattaaaaattagccagggatggtgacatgtgcctgtaatcgtagctacttgggaggctgagatggaaggaccacttgagcccaggaggttgagactgcaatgagctgtgatcatgccactgcactccagcctgggtgacagagcaagaccccatctctttaaaaaaaaaaaaaaatctagaatgtgggacattgtacaggacaactgacctggtctcttcagtaagtcaaagacattaaaaaatgtgtgtaggggagagaaagcagttgaaggttaaaagagacttaattctga

SEQ ID NO: 3752 - DNA, 1027 bp, Homo sapiens
acgctggagtgcagtggcgcggtctcgcctcactgagcctccgcttcctgggttcaggagcttctcctgcctcagcctccggagtagctgggattacaggcacctgccaccacacccagctaatttttatatttttagtagagacgaggtttcaccatgttggtcaggctggtcttgaaccgctggcctcaagtgatccgcctgcctgggcctcccaaagtgctgggattacaggcgcctgccaccaggtccggctaatttttgaatttttagtagagagggttttggggtttcaccatgttgcccaggctggtcttgaacttgtgagctcaagctgttcgcccacctcggccttccaaagtgtcaggattacaggcgagtcaccaggcctggcattgtatggatttctctaaggttggttgcctcttctcattaactgcaacaaagaaccttaaagaaaaccaagtctctgccgtttctacttaagtaattctacccaaaacaggaaataggaagggtaatggtgaatatagaaggtgtgaaatgagttttgtattaaagcatgtgtttgcttctctcagaaaacttaagaatgtgaggtaagaaaagaactgaacatttggagagtacattctttcctattcatctgctccatatcaaccctaaagtgtaactctcttttaaaaaacaagttatccgccggacacagtgactagcttctgtaatcccagcactttaggtggccaaggcaggcggatcgcttgagctcacgagttagagaccagactgggcaacatggcaaaaccccatctctacaaaacaaaaaaattagccggccgtggtggtgcatgcctgtagtcccagctactaggaaggctgaggtgggaggatcgcttgagcccgggaggcagacgttgcagttagccgagatcgagtcattgcactccagcctgggccatagagcccagaccttgcctcaaaaaaaaaaagttctctccctacatctccaaccctcacatttccaccg

SEQ ID NO: 3753 - DNA, 1017 bp, Homo sapiens
ttcttctgattgattttttccgttctcttttccattgatgttcattatagcatgatttattcttgatgaaagcattaaagatgagaatgatacgatttgtcccttcccgttctacccttaaggccttgctggtccttatttaattacatcttaagagtcttcttatttttggacttaattcaaaagcctgttattctgatagaggtgacaggtagctagtaagtgtgtttggtggcaaattaaagtatccttggtttttaagctttaccataatgtgcatagataactaagagtttactctaatgctattgattatggtagatgtatttaattgtttgtatcctgtcccaataaggattggagtaatcttgattatattgttcttttgaatatacatatataaaaataatatatttctcattatttattttatttttagcttatgtccctgatgccaaaaatgcacctactctttcctctaactctggtgaggtcattctggagtgacatgatggactccgcacagagcttcataacctcttcatggactttttatcttcaagccgatgacggaaaaatagttatattccaggtgacaactgagcttcatggattcatctaaatactaacaacagtaaatgtatatgtcttaaatgagtgtttcagcatagaaccatactcagtcacttacaaatatttatcatcaaataataattacttatttggccctacattaaaatattagacatcagttttattacccttccctttgcccgttagaagcctaatctaaagcccattagtttttatgtaaccagaactcttgagtcttttaaattttatggtggttaaattgataaaatgaaatttttaaatatgagagacaataattaatatacttcgaacataaatagtggccatatatgattacatatggatatcagataaaagcaatatgacataatttttagttttttacagtgcttttactcatgactctaataagagaacttgttg

SEQ ID NO: 3754 - DNA, 1047 bp, Homo sapiens
gccggccctcgcgcctctgggccacagcgaaccacattccccagaatgcactgcgaagaaatgcgggcggaaggcgcgctgagggcggctgtagttttccgagaccaactttcccgacagcaccgtgcgcctcccgcctacggagaactacatgccccagcctgccccgcgaagggaagaagtcaggaggccccgcttcgcgctaacgcttgcgatggttgaattcccctcctcacgccagcctaggagaagaagttcgtagtcccagaggtgaggcaggaggcggcagtttctggcgggtgagggcggagctgaagtgacagcggaggcggaagcaacggtcggtggggcggagaagggggctggccccaggaggaggaggaaacccttccgagaaaacagcaacaagctgagctgctgtgacagaggggaacaagatggcggcgccgaaggggagcctctgggtgaggacccaactggggctcccgccgctgctgctgctgaccatggccttggccggaggttcggggaccgcttcggctgaagcatttgactcggtcttgggtgatacggcgtcttgccaccgggcctgtcagttgacctaccccttgcacacctaccctaaggtagggcccgtccggagcgggctgcgacccttcccttgcagcccatttctcggctccccacacgtatgtcggctctggcaacctggctgttaaatcggcccttcaatcgctgtctcccatctgtgtagctcctgttttcctccctaatcctgcctgcaccccatttctgctgtcattaccggaagtttgtcctgcactaccctgtgataggctgggggacacaaagatgagaaagacgcgatccctttcctctgggagcttgccgggctgcaggggagtcgagcactcggaggaggataggggaggatatggatgattaatgcggggtcctcacctaagggagcgtaaggggggattgtagaaagggaggcgcagatacgcgagtccacaaatgattgattgataacccttgtttactaag

SEQ ID NO: 3755 - DNA, 1050 bp, Homo sapiens
aaattatacttaccactcttacactgaaaatattggtttctattgacattaacttacttatttgctctattctaatatataataattgcaaaatgatattgaatattattactaatagtaagtttactgaatatactttaagatgttgttgtggttcattttgtccttgagatatatcccactaggactgtgtggtcaaaatactgtctttcaaagtcatttgaaatcatttttcctcatgtgactgtgtctccaagttggtaagattcagtttatttgtttcagtttgggatatttaggggttacttaactttgttttgatctcttaaaattatataaagtattttatatgcttacacagtgaaaattatgaaacagggcacatttaaggagatccagccatcatgcctgcttcctcccctctttttactacttcccctgacagagaattattcttattagtttccttccattgttttcttttgtcaaacacaagcaaatcagcacatataaaaatgtacttttaacatcgtagtagactgtgcacattttcacttggggaggttattattattattaatttcaaaataatgttttaataattaacttaaattccctactgcataatgttttaactaaaattctcgggccctgcctgacacttcctgtctcttttcctggcttgctttttctccatagcttctcacagtgtcatatactatatatgtatttcttttattttttatttatttattttttgagacagagtctcgctctgttgcccaggctggagtgcagcggcatgatcttggctcactgcaacctccgcctcccgggtgcaagcgattctcctgcctcagcctcccaggtagctgggactacaggcgcgcaccaccacgcctggctaatttttgtatttttagtagagatgggattttactatattggccaggctggtctcgaactcctgaccttgtgatctgcccacttctgcctcccaaagtgctgggattacaggcatgaaccactgcacctggccccataaactct

SEQ ID NO: 3756 - DNA, 1064 bp, Homo sapiens
agatggtgtaggataatgcagagactgcagatgggtggcctgaatctagcccatagatgtatttggtattggccagcatagagttttaaaattttgaattaattgcagacatttcaaaaatgggagattttaaataaaaatatggatttcgtgcctcttttggaaaatcaatagatttggccaattaggccccacaaactatggactgaaacctgcaaactggcttccctccttagaaggagcactcgctcaccaatttatcatagtccccatcactccctattgtctccctgatgctgagactgtgtgttaattgccattaatcatcacccagttcttcactcatttatggtacctgcatggtccctgtgggcatttgggtttgggacctctatgctgaaggctttaggtcctatggattctcatcccagcctcctgtctgccttctgtgtaagcttctgggcctcatctgaaaattgggaatggctgtaccaactttgtaggataaggaggacgattaaatgagataacacatgtgaagcacttagcatacagaacgggctccacattaatggttaatctggtttgtgttggcagcatgtacctgtcccgctgacgtctccctgtgtttgcttccagtgctaccagatggggctgatgtcccggtatgttgagtcctggagagtaggagacacagctttctggcgaggacctttcggagatttcttctataaaccaaaccaggtcagtgccagcaccttaaatcttcaggagatccctgttgactgtggttttcatgtttcggcccatagcatctcactgtgccattctccttgagctcaaacacaatcccaggtgtatccttggggttggacatgggagaagatggaatagacacttatttatttatttatttatttatttatttagagacggagtttcgctcttgttgcccaggctggagtgcagtgacgcgatctcggctcaccgcaacctccacctcccaggttcaagcgattctcctgcctcagcctcccaagtagctgagattacaggcatgtgcc

SEQ ID NO: 3757 - DNA, 1035 bp, Homo sapiens
gaacaactaaaaatccagggattggaaagacagacgctgagcacccccaggcagacggaaacagcaggtgctaaatgccactttgtaggccaggtgcggaggctcacacctgtaatcccagcattttgggaggctgaggcaggaggatcacttgagcctaggagtttgatacgagcccaggcaacatagtgagaccccatcaatacaaaaaatttaaaaattagccgggtgtgacagcgcgtgcctgtagtcccagctcttgggatggctgaggcaggaggattgcttgaacctgggagttcgaggctgcagtgagctgtgatcacactactgcattccaacctgggcaacagagcaagcgaccctgtcttaaaaaaaaaaaaaaacaaaaactaaaaaaaaaacaaaaacaaataccaattctacttcgtgaacatcagatactccctatgccctcacacaatcctctcgtaccttaaccacacatacccgctcccctgttccattctgaagctagggaaatcagtgaacagtctgtcccttcgctttccaccacctcgttccaaaaccggtttgaagttcactattgagctcaaggcaggagagctccccactcagcctcccccacagcagcacagcctgggctgggggcccttgaggacagacccctgtcacagatgcccagcctttgatcagcactgacacctgcagatgaggaaagatgaccagccaaaaggcttttcctctcgaaggcaaaagctcatatttataaagccctaagggatgaggtcctagaagcaaacttccccccagcaactcctactctctttttccagttgcagctgaaataacttcagtctcaagtaaattgcttttcatagggtttcacagcgggtggggcaagtgttcacccaggaaacccgtggcccccgtgtttaccttctcattagtaaccacaccagcaccgccgatggccccagctctggagccgggttctcgtctagtacccctgcccctctcctagtggccacctgt

SEQ ID NO: 3758 - DNA, 1051 bp, Homo sapiens
aatttttctaaaaaccaacctctaaaaaacagcacagtcatgggtggggaagagcgaatggaggcctgtctcctcatccctggcatcagcatcccacgctgggtgggctggaacgtgcttccgaggcagccctccgcgcttactgactgtgacccatggtaggagagtcctttggtggtgtgacccagtctacacacacatgaatatttacacacaaaaccggggttcatgaaagacacctgccttaaaatacacaaagctctctgacttttttttttattacctcggatttttaagagataattattgcagcttgctgaattgctgagtgagtttctacccatagtttgtaaccccaaggttgaagtgaattcatctgcccatgtcttctggggcggggtaggggggtcgaggtcagcatagcccagggttgaggcggtgggggtgggggtcagcttggaactgaggtatgaaaaggatagcccacccagtcgcccagcagtccggggtccccacccttcatgcacttccccctgtccccagctctgcaccggaactcttgggtttcagggctggagatgggccttggacccatggggcttctcatcccagctctgccactgaccagttttatggccatggccaagttccttcatccctcgagacttagattcctcatcagtaaaaattggaatgagaaaccccgcctcacagggctgctttgaagtgcaggtgaattcacggtgtgcgagtctgtgctgcccacaccgtgtggccctcactcactgtcccctcactccctgtgtgttacatctgtggtgccccttgctcctcttgcctctgttgtttatctgtcggtgcccccggccctcctgcccccaggaaacccgtcgcctgggcctctccctgacacttgatcagtactgcctcgagtcacccatagccgtgtcactgtcccccagactgtgagctccttgagggcagggcccttcccgatctttccccacctcccgtgcaagcggcacctacgtgctttgcacctgggtccctg

SEQ ID NO: 3759 - DNA, 1025 bp, Homo sapiens
gctgctgctcctggcgaagccctcactgggggtgtaaactgactcccgaatctctggcttctgtggatctgatactggaaggatgggtgtcagtagctgcgttcacctcatgcttattaagagcttgggctggtttatcctttctcctttggacctgagtttttactttgcgttttcttagaatggagtgatttttccctgtgcctggaagctgctctgccgcaggtcggcagttctcccagcactgtaccgtggctgctccctctgcccccacgaggtccttctgtccttcatagggggatgggagtggagacccctgcggggctggagagtatttttgttttgtctcttcatagctgactgaggggtggactctcttgctcctgtccccacctaccttctcagcaaattgtactgaggtttttctccctttttttttttttaaaaaaaaggtcaaattccttagcccttgtagcagaagaggtttgaggaagagaattccagcagaatcctgtaataacacgcctcggcatgacatggatcaggatagaccccctgagtaagctcatgccacagtgggaggaacctccccttcaggggagtctgggctgggctctgggcccaggcactgccctgggggtcagaggccattccagcatctagctcagtgtgaggcactgttctaagtgcagggaaccacagtatggggtcaggttcatgtcctgtttctgcctaagttaactcccaggcaacctctccctgaaacacttcctctcccaaagagggccttagaatccatgaagctcctaggccaggcccacctgtgatcctgtaaacttttctctcagaaaagccccatctcaggctaggcatggtggctcacgcctataatcccagcactttggaggtcaaggtgggcagatcacctgaggtcgggagttcgagaccagcctgaccaacatggtgaaacctcgtctgtattgaaaatagaaaaattagccaggcatggtggcatgcgactggaa

SEQ ID NO: 3760 - DNA, 1049 bp, Homo sapiens
ctgtgtccttttcccaccatcacctgcaactccctactcagcctcacctggcttctcttccctggggagccccttcactcctgctgcgtgcagctagccctgtgcccagaagacgccctggtccttggaggagagcccccctccccacccccatccccccaagagctctttaattcaggaaattgaggcattgttgtcatgttctggaaggacactaggtgactggttccaggccactgttgtctcatggaggcatcattcccagctcccttttcagcatggtaaacagcctcgccgcctgttcacattgccaaagactctaggtcgaaggctgccctgctgtcctcatcctgtgtcgtttggttccaacatgcccgacccaagtgctccccagttgtgttcagaactcgtcatggctcccttgtcctgcacaggctcaggagtaccccctttgccacatcttggttcaagtttccccttgtctgaaacttgacaagggccaccttctccggtctcctgtcctctgtctccgtgctacccatcattcgttctgcaaacacgtggaggcagtgctgtgtggagcagcgctgtctggtagaaatgtactgagggccttgcaggttatttcagagctccttgtagccacataacaaagtaaaaagaaataggcgaaattagttacagtaatatactttaattatgaccaaatatattcaaaatagcactgtaagatgtcatcagtgtaaaaatcattaatgacatcttttatatttttttcccccaaactgcctttgcagtctggtacgtattttatgcttatggtgcgtctctgaaccgcccacatttcaagtacttggtagctgcttgtggctagggcttccatgcaggaccgtgtgagtgtaaagatttaagagcacgagatttgtagcatggtggacctgtttaatgcagtttcttgactgctgtttatgggcattgtggccttgggtgggtgacttccccctccgagcttatgtgcacctcatagagttgtcgtcaggattgaacgg

SEQ ID NO: 3761 - DNA, 1062 bp, Homo sapiens
tcctgagtagatggtactacaagcacatggtgccgcgcctggctaattttttttttttttgagatgaagtcttactctgtcacacggctggagtgcaatggcacgatctcagctcactgcaacctctgcctcttgagttcaagcgattctcctgtctcagcctcctgagtagatgggagtacaggcgtgtgctgccacacttggctaattgtttttgttttgtttttttttttttgtatttttgtggagacggggtttcaccatgttggccaggctggtctcgaactcctgacctcaagtgatccacccgcgtcggcctcccaaagtgctggaattacaggcgtgagccaccgtgcccagcctaattttttgtattttggtagagacagggtttcaccgtgttgcccaggctggtctcaaactcctgagctcaggcaatctgcccgcctcagcctccaggattacaggtgtaagccaccgcgcccagcctcagtacagtaatcttctgttaggaatctgctctgtgccatggtcagggcttggtcaggcacagagactttgcttggcgtttggggtgagacgctagttacttctgtggaaaccaaggattttaaaggaaatcttaaaaggagatgttcatgcaagcacttcagagagggcctttgaaatgcggaaggcttttcttttctgccctattacttttgaggccagctggctcaggtgagattactcttccttctctctgaaggaaggtgtggggaaaggagctgggaccatgggcttagaggttcttccagtgccttggtcttttccctggatgggagggctgagactcgggtggtttttagagtgcggctcttggtgtcctctcttccaggctgccttggtagctgggaactgttttattggaagggcaaatattgcgtagtgtcaataaggatgttttttatgggggctcctgtgtttctgcagtggataagcatgaagaagccaagtgtaagttagtttctaacggctgggttcagccctttttcttcccttgcagaagtttcccatccgagc

SEQ ID NO: 3762 - DNA, 1013 bp, Homo sapiens
tggaacctgtaggatctgaaagtagaggtgatcttccagtttaccctttcagcttggattttggcctgcagtttttcccctcgcaatgggcctgatttcgacggaaagaatgggtctgccctattccaattagagtgtcagggccttgttagatgcaaaataaataaaacaaacttgtgtatccagctctaaaactggctggggccctctgagagttgtcctccctgtggcaggggtgtgtggggacctgtccagggagcgcctgcagctggagcccccgtgcaggcgaggaaaccaaggggatggcatgacggtctgaggacacggcgctgtccggtcgggccgcctccccgcgtcacctactgcctcctgtctctcctgcagttctcgggtttgccattcagaatccgttgaggggcccggcgtcggctcacattttttgggactgggtggcttttgtgctctgttgagagggatctggcttgagccccatggattgtgttgaggttcctctgtcattagtcatcctgttttagagtgggaaaaacatgacagtttactctcagattgaagtttccgagcagttgattgagatgggagttctgaggttttgtgttgtctgcacgtttctgttagcattgatgatggcagtgagcacagtgctgatcacgctagatgctcgcatggtcaaacggcaagacgcagcttcttcctgctgcacatcctgcaaggtgaggctcatgagatgacggccatcccgccctccccttgccttgttccattaacattactatagtaagaccccatatggatgactttctcttctggaggctgggaggtgaaggcaggggaggaaggggtttgaagctgagatgaagcctcataggaagtgggatgacccagtggggaccgtttctgacagaaggttcctcaggggtgttttatggagaagtcacttgaagaagccaccttaccagtcagccaagaagtttggatccatttggcctctctgg

SEQ ID NO: 3763 - DNA, 1107 bp, Homo sapiens
cttaacacagagttgtgtgttacattaggcccaggttcacagggatctccgattggttggcttcctgggtttcttgttttttgaatttctttcccctggagaggttagtgttcctgggatttgtgagggagcggggagtgggctggagaggagcttagagtacttactgggacttcaggtggctcactccccctccccatctcggttgtaagctcctgggggagaggtctgtgtgttagaggcccagcaggtctttgtggaagttccttgctcccacgttagatgtgaacgccgagaaccacatgacaagagtggtagtgtgtaccctcctggggctctaggatccagcagggccacctccccacttcacccactgcctcgtgtctctcctgtagttctcgggtttgccgttcagtggggtgaccctcagagtccattgagggtcccagcattggcttatgttttgtgggattgggtggaaagacttgcctcactgtaccgtgtcattgctggtctgtccacctgccctgcatgtggcaggtgcctgggaaaggctggcatgtggttttgatgggtaggagtttgaggggctgggaggtgcactgatgctgcagaaagcagagcagacaggcagccttgtaaggctgtagagtctgcagacagtggtatgcgctggctccaggctttctagataagatcaggttgcagatagtgaaatgggagtcccatcttttgttgggcatcctggtgcagcattgggatgtaggagtgctcttgctgagccgggggagtggtcagtcactgacagccctggatctgggtccagttcggtttctagtccctgtatgatttggggagtcagtcccctctgtgctgcagtctcctcctcatctgtagaatgaaggtgctgacctgatcatctgcagtccctctcagtccctcagcccatgtctggatggaaagagagatctcagcagagtctatgcattgctggacctcagactggtttcttggtatagaaggtggctttagggtttatctggcttgtgtgaattttgccccattcagtgtagttccacagggtttgctgaatgccactccccttgc

SEQ ID NO: 3764 - DNA, 1027 bp, Homo sapiens
ctgactttgtaagtgagcccctagctttttgtcaggagtgggggtgtggatctgtgtgtagcagggtggcctcatttgtcgagtgcccaccctgggccactgtgttaggcagtcacgattgctgcaaagcctttaattagcgtcccaggttgcctggctgccttcctcactcgcactgcctttttccttttctcccttcccctcctagcccctttggccttctgtctcctctcactggggactcagacctctcttcctgtcttccctccctcccttcctaggggcctttccttgattctctggggaaaccagataggcctctgttacccctgtgagccctgttccctccacccagaagatgtggagtgaggtgaggggctctacccccagcggtgagactgtgtcaggcctttctctgcgtctgtgtgattttatgaagtctgtcttgtcaaaaccaagaggctgaggaaagtccctacatttattctttgaagatctcttgaacgctggttgctgagcacaaagcaggtggggcgggtggaggaagacttcctgaaatggagagaaggcgagtggacacccgatgacttgtagatatgtgggtagaatgctggagggagaagcggctcctggggcacccgtgcttggccccctttggatgtcggctccctttgcagctcctaagctctgtgtttggggtgggagcggctgcgaggcggtggggggcttgtttggcagacggcgcccatcagacaactggaaagtgccagtgcctgcgtggccatctgtccccgccgcctagctcccggccgccttctgcttcccacagaagggcccgcgctgttctgtagcacaagggcacggggcctggccgggaggggcaggcacagttccattttgccattgtttattcccatctcctttgcagctcctgcgcttgggagttgccaggtgcgtgaaaagtttgctgcgccgtggccgatcaggttgtttggtggggcgctggcgggaaggaaaggtggaagtg

SEQ ID NO: 3765 - DNA, 1064 bp, Homo sapiens
taagcaaagctgttacctaaacattttgggctttaaatttgggttcttttttttatggcaccacactgcctcctagtttctttggtggaaacacttggggggacccatgcaggctttctgtgatcaaagccattcccaggccagtttacctgggtcacaggctttcagatacattagaactggctggggacccctgagccccttccagcgctgttattctgtagttgagaagagatgttttagagagtgaagtgattgccaagattggacagagaatttgtttgctaattcttttaggtatttgttgagtgcctatcgtgtgccagtattagaacacatgataaagcaatgaacaaaagacaaacattctgatcttcggggagctcaagtggaggtttccatatttctgtgctctaactttcctcttcctccctaagcttctagacagctcttttgtccctctgtggactcagggaatgcaaagtaattttagtataatgttttttgggttgaactgaaggagataggtgaatcagcagaggaagagaagttatgtaattgattccaaaaccgagagaaaagatacttggttggcttatttgtttttaatatgtattctttttatttctttgagcacatggtatatgtcaggtactgttctaggtcctaagaattttgcaagtgaacaagactctgaaggtgttggcggttgagtcacacacccagtagtggtgggaggtcatggtttgactccttggtgattatcaacccatgatctgaacatttcttcaaggtaggtgagtgttaactggtcacggtggtccccatttatcctcagcctgtcaggccagtggtgttgctgtggggtaccaagatggcatcgcaccctcctgaaatgatgaatgctcacctgctccatttctgctctctgaaacgtattttctgattctttgctccacggaagtgccctaaacattggagtttttacataacagcttttcttacttatccagcatttctgtcaccacctgcagcttttgccacaaaaacacagtgacctctac

SEQ ID NO: 3766 - DNA, 1229 bp, Homo sapiens
ctccctgtgtaaatatggagtcttagtaagacaacagtgtctaagtatccctctgccccgccccccgtgagacagttcatctcccaggcctccatccagtcagattgcaactcctgggcagcacccagctcttataaatgcctgtcctcgccgttatctgggagagaaaacgaggggtaaaacaacaacaacagcccaccactgaaagcaggactaatccccagggcagtctagcgtgtggctcagatgctcagacaaatgtttagacagcttaagaaggtaaactagaacttacatgaataaaaccatctgcctggtctaagaaaaaggttagatttgggggcctgctattttcagatgctttcaaggccgggagcttatagggtgggggatataccactgagtgttccttcctggtctaatatcttgcgcctatgtaggggctgcccggaggagcccaggtcgggtagaggcttccgccttctgggtccttactcaccaagtagactatctgtggccataaagaggatttgacctgggtacctctgatcccatttgctcactaagtcagtctttccacaaagcaacccctgggggcccttcactctttgccaggccctttcttggggaagagaggatggtttgtggagagagagaccctggggactgctctgtctcaaaggatgctggctgatgccacatattgggcatgtggagatttgctcttagttgagcagctgcttgctgccaggatggtccactgctggcagggttactgagctcgctcttgggagctctgggtctagcatgaggagatgaatgaatactgagaaaagggagagatctttcttgctgagatgtttgtgtgggtgtgtttatttgtggtctcctacgcttgtccttaccatgatggtaaagatgggcatgaagataattaagatggcaggctgggaatgaaaagatacaaattctgaattttgccttaaaccacccaagaaatctttgccaggtctttaatacctctccttcctgaacttttaaaattacgcctccagtctctttctgggagagctttctgtggttgcaccctctttcagtgaggaagggagaactgaacccatggcggaaggacgatgacaacacctcccagtcagggacagttaaaaattagggcttttgccattaaatgagaatccacattgaccagtagtatcatcgtggtggtgggg

SEQ ID NO: 3767 - DNA, 1501 bp, Homo sapiens
attgggagccaagactcccacagtgacggggtggggtgttgtgcatcttcccacgggatgctctcgtcccctccccctctctggcccctggcctcctgcccacctgagtggtgcttgtgcttcggctgtatgaccttttcatgaaatgaaaactaaagaatgtttttaagcaagttcatgctctggaagtcagttagctcacgttgatagccctgatatctcacgttggattaggtggggtctgcattttacactctgtctgggttcttggggtcagggttgtgtgtggttagcatggatttgctttgcattctgtcccctgccaggtggggtgggggatggagggagaaagggatggggacagcttgttccacctgaacaggcttcactgattgacttgcttcttcaccttggcttctgtgaaatggggataatgtaagcatccattataggatagttgagggtggtttgtgaacaaatttcatcctggagaatgtgaggtgtttggtgtcagttctcctggaaaggcttggacaggtcaagaacttttagatgggaaggagcagggccagcagggcctcaagaaagtgtgatgcccttttggggcttactgaagagattaatgacaaaggtggtgtgggatgacctgggatgtttgctcagagtcgtcttcccggagcctgtgctccttgtgagtagcggcaggaaccagggctgcaggctgcaggcctcctggctacccagtctctggatccccaacacgccgtgggctgccggccacctgcctccgcacacattcccgcgcacctgcgtcttacctgcccagcctgccttccaaggctcagtgtaagccctaacttctcctaagaaagctgccctgggctactttgccattctcaaagacaggcttccagccagtgcccattgggctctttgagccctttagtcacctcttcccatgatgtccttgtgcacggctctggagaagcctctgtaataacctgcctttcctgtccagcaggaaagagtctagtggggataacgggatgaacttcacactgaccgcagctctggtggtccagacgtgcacaccatgggaaacaactcatgtctcccacggtcagcccagggcactcagctcagacactttcctcaagcagcccctgggtgtgagtagggagttgggggcaattctgagctggtgtgccgagaggcattcctgtttttttttttttttttcttgaaacagggtcttactctgtcacccaggctggagtgcagtggtgcaatctcggctccctgcagcttccacctcccgggctcaagcaatcctcccccatcagcctcccaagtagctgggactacaggcatgcgccgccacatatggctaatttttgtatttttttttatagagatggggtttcaccatgttgtctagtctggtcttgaactcctggtctcaagcaatccacccgcctcagcttcccaaaatgttggggtt

SEQ ID NO: 3768 - DNA, 1078 bp, Homo sapiens
gccccagccagagggattgggggctgtggctgaggccaggagacctggccttacacccctttccctggtaaagggccctgggttctccaccacagcccctctttgtcctgctctgagtggtttggagttctttgtgcagtggcccagaaatatggacgcgcaaactgtaacagagccccacccacacctctgggtagcgaagcacccatatttgttacatgattgtcttaatcctctttaagcaaggattagcgataactagggggttaaacaaaaatcagaaggaaaaactgtaagttggggaaaatctatccatgaaagaaagttgatgagaatatgggaaagttgggctggattcagttcatttgttataaaaatgggaactctggcaccttgtttctaagctgatggccagaggtccgagggcatctgctttttggggttgtgtggcctgcacgtcaggagagtgcaggggaccggggcctgtagaggttccgtagacttggtgtggatttgtgctgtgttgaggccgagcagaattgtggtgaatcggcacggcttcattattgctggaagtatttttccttacttaaaatatctaatttatttacccatacatgtttaaaataatatagcagataacatgtaaatttagagatactatgttccaccctaaatttacatgatatattttattctaggtcttcatatgcgtttttgttatcagtgtcttaaatgctgtcatcaaagccagtttttatcttctaacccacctttctaggacgtatcaccaacactccaagttgtttgacatatattatttttcagctttgtgtatgatgcttcctctgggaattttgtcccaagccacaggaatccattagaacatttaaacagtggctttgtaaaaatgtgtcttataggtgtctgtcgctggaaatgctccagcagatctgagatccctgctatgatgctggggggatgggtagggaggcaccacccttcctgagtgttaagagcctggctgctggcgtcctacctcaagccacctgtgtgaccctgctcttttctgcaacct

SEQ ID NO: 3769 - DNA, 1159 bp, Homo sapiens
attacaggtgcctgccaccatgctcagctaatttttgtatttttagtagcgatggggtttcaccatgttggccaggctgatctcgaactcctgacttcagatgatccacccacctcggcctcccaaagtgcttggattgcaggcatgagccaccatgcccagcctaactgcacatcttaaaatataagatatatcctgttggttccagctgacttgtcccctaggaaggcacaggaatgcttcccagcatcccctcaggggattgtggggtcacccttccctgggcttgccccagcaccctgtctcactgcgctggccagctctgtcatttttggacttgttgcttggactcacctgagttttgcttcctcctctgtaaagtggtggtaaatgatacctttgtggtcccagcgtgggtgggtgtggacttggttgagccaagtcatttgagggcctcggcaaggtgccccaccgaggtgggggtgagagtttggagaaagtggtgatcaccttggtgagagcacaaactggagatgtagctgaaacaaaaatgtccttataaggctgttattctagcaaaaatgtgttaaaaattggttattggaaacacaaatctacaaggacataaactaaaagaatgaagactctactgacatgctctctctctctttttttttttttttttttttttttgagatggtgtatcactctgtcgcccaggctggagtacagtgtcacgatatcagctcactgcaacctctgcctcccgagtttaagtgattgtcttgcctcagcctcctgagtagctgggactgcaggcgcacgccaccacgcccggctaatttttgtatttttagtagagacggaatttcaccatgttggccaggatggtcttcctcacctgacctcatgatccaccagcctcggcctcccagagtgctgggattacaggcgtgagtcaccacttccagcctctctctcttttttaaaagtattggggtcttaccttgtcacccaggctggagtgcagcctcaaactcctcctgcttcagcctctgagtagctggaattacaggcttgtaccaccatgcccagctaattgtcagattttttttttttgtagagggggtcttgctgtgtttttcccggctggtctcaa

SEQ ID NO: 3770 - DNA, 1164 bp, Homo sapiens
cagctctctggatccctgggtttcaggtacccctgggggattgtgggggcaagtcacattatgttctccctgccccagtgattggaggagcaagtcacatatgccgcttccaaaccagccctggtgcttgtgaggatgagaaaacagtggacgcacagatgcttctggcctgtgcctggcctgaagttgccccatcactgtccattttcttctctcctagtgacttctcattttctaggaatctggaacaggtgctttctccagccactttggcctcttcaccatgattcccgcttggtaccataccacctgagagggttttttcctcccctgccaattattcttctgtagagccaatgctagcctggaatgtggctgcctccaccaggcctgccaggacgactcctatgggaagacatccctcttctgttttttccccaggaactaactctgtaactctcctagtcgtttgttaccagctgcctggaaggagagttatttcagttaaggttgtgtctcttccttcccctttctggaatgaaagctccttgaggggaggaactttacttgccctttctgccaccccattcctggggcctattgcaggtcttgaatgcattctggggtctgtgagcaaggctctgagccttgagaagtgagaaggatttgattcctgcccaggcatcaactgtgctaagtactcgttttaatgaagatggacaaggggcacgtggtgaagcactgtttgtaaactgtgagctgtgacccattaatacatcatgaaaccaacttagtgggtcatgactggtaattaccaaaaaagaaacaaccgtattacacagagtaaacacaaatattgtttctggaaatgtctgttttcagtgatttatgtgtgcatataaaagtatgtgtgccctgggtttgtgttgtagtatttgccttttttgggggctcaacgcaaagtcagaaggccactagcccagagacagctgagactgaatcttagttcctacaagttaagtgacttgggtcaagagacaagcaattgctgagcctcagtttccagatctgtactagaaggaaatgatccataccttagagagttctcgggaaattgtttccccaccacatgttgtgctttcagagtggtgcctggcgggcact

SEQ ID NO: 3771 - DNA, 1087 bp, Homo sapiens
aaaacaccagcaggggagtggagaagggatgacagccaataatgggttcattctcaagcaggttaccactgggggccactacagtgtaactgcactgggaaaactggaaaccagtgtaaaacatgcgtttcaaaggtacatcccacaagggctgagggagctggtatttatacaccaacttccctcagtgagggtagctccagagggatgtggagttcctggcacttctagccctccataggcagcaaagccggccctggcagccagagagccttttgctccattatagatgaatgtccctccccagcacacattatttttgtaacacacatgaactcattcttatctcatggcaaaatatttaaaagaattgcctaatttaaagttgtggccaggggccagacacggtggctcacacctgtaatcccagcactttgggaggctgaggctggtagatcacttgaggccaggagtttgagaccagccaaaaccccatctctactaaaaatacaaacatagccggtcgtggtggctcatgcctgtagtcccagctacttgtggggctgaggcatgagaatcgctagaacccaggaggcagaggttgcagtaaactgagatcccaccactacactccagcctgggcgacagagcaagactttgtctcaaaaaaaaaaaaaaaaaaaaaaacaaaaaaaaaaacttgtggccaggctcggtgatttatgcctataatcccagcaatttaggaggccaaggtgggaagacagcttgagcccaggagttccagaccaagctgggcaacatagcaagaccctatctctgaaaaaacaaaaacattatccaggcgtggtggtgcagcctatagtcccagctacttgacaggctgagaggtgtgagcatcacttgagcccaggaggtcgaggctgtagttagccatgatgacaccactgcactccagcctgggctggacacagcaagaccctgcctcaataaataaataaatgaagttgttacacaggtttctcttataaaaaggcaagcatcacaaatttgctgaccttctctctcttttttttttttttttttt

SEQ ID NO: 3772 - DNA, 1434 bp, Homo sapiens
gtgatttttattttcttctttggtcatgggggccaaggagaaaggcatgaatcttccctgtcaggctcttacagccacaggcactgtgtctactgtctggaagacatgtccccatggctgtggggccgctgcttctgtttaaataaaagtggcctggaagctggcgtttgtcgtttcttgcttgggggaccaaaatgtggagtcagatctgggctcgggtgcaggctgtgccattccccaactcagttgctctcactgaacccatgagcccatggccgagggctagaagaacatgcaggaactgacaggtttatttctatcactgtcagagtgtgattggagtaagtgttgaaaggatccctctgtgtgcagggtggcaagcagaccagtgagaaggccaccactgcagtccaggtgagacgatggtggctctggttagggtggaggcctggctttgtcacttggttgtgaccaattaattttagcaagttaatcctgttgagactgttgtcctcatctacaaactagtggacccactagctgtccattaaaatgcattcctccattctttggacacatagctagactacctttcccagccttccttacagtcagttgtgtccttgtgttaagagctttccagtggaatgtaaacagaagtcataaaaacctatatgaggtctcctggctctccccttcactcagtgcagatgacaaccaggccataggtggttggagagtcttatgtcagaaggaacctggattcctgagtcactgcaggagaagcgcttgtggccagaagtgcaagaccaagcctgagaaacatagtgagaccccatctaaaaattagctaagtatggtggcaagtatctgtaggcccagctactctggaggctgaggcaggaggattgcttcagcccagaaacttgagactgaagtgagctatgatcgtgctactgcactccagccggggtgacacagagcaagaccctgtctcaataaataaatataaggcattacctgggctggtgcctgagagcccaacccagagctccttggtttgctgagcttaggcgctagactggactgggtttgctgagcttaggcgctagactggacaatctgtatgttgctcctcccagttccaaatctgaatcttagcagcagctgccttacaaacctcaagccatgaacctggcatcaagacctatgagaagaagcaagagggccacgtaggggccttggcttggtttaccaacctccttacaggagggtgtcaacaatctgttcactacctgacctaatggaagctgaaagtagaagagaattcacatgcgtatccttggaacttctagttaccccactggcagacctgaggtctgatccctctgggggaggggtgagaaaggtgtttgtgggagggggtcagtggtg

SEQ ID NO: 3773 - DNA, 1050 bp, Homo sapiens
agaggggcagaagcccagcagtctgagctctactcctgactctacctccactgctaagctacctaacccccaagccccaattccctacctgcaaaagggggataagaatacctgcaccatcttcttcaccaggttaacggggttaaacaagagaaatcctccaaaagccttttctgggctgcagaatgagcagttgggtttctctcacgcctcgcgttccgtgtgcctcctggcgtcctcacccacttctctgcctctgcagcttccagatgctgtatgccgactgctacatgaaccgggaggagttctgggagatgtttgatggctccttgtaccacaagctgcgagagaagctgggttgccaggacgccttccccgaggtgtacgacaagatctgcaaggccgccaggcactgagctggagcccgcctggagagacagacacgtgtgagtggtcaggcatcttcccttcactcaagcttggctgctttcctagatccacactttcaaagagaaacccctccagaactcccaccctgacagcccaacaccaccttcctcctggcttccagggggcagcccagtggaatggaaagaatgtgggatttggagtcagacaagcctgagtccagttccccgtttagaactcattagctgtgtgactctgggtgagtcccttaacccctctgagcccgggtctcttcattagttgaaagggatagtaatacctacttgcaggttgttgtcatctgagttgagcactggtcacattgaaggtgctgggtaagtggtagctcttgttgcttcccgttcagcgtcacatctgcagtggagcctgaaaaggctccacattaggtcacctgtgcacagccatggctggaatgatgaaggggatacgctggagttgccctgccatcgcctccatcagccagacgaggtcctcacaggagaaggacagctcttccccaccctgggatctcaggagggcagccacggagtggggaggccccagatgcgctgtgccaaagccaggtccgaggccaaagttctc

SEQ ID NO: 3774 - DNA, 1103 bp, Homo sapiens
cctctcacttccaccatattctccttattagatcagagtcactaatccagcccatactcaggggaggggcactgagctccacttcttgagaaaggactagcaaagaatctaggggcatatgttaaaaccgctacagaaggccgggcgcagtggcttacacctgcaatccagcactttgggaggcggaggtgggcggatcacctgaggtcaggagtttgagaccagcctgaccaacatggagaaaccccatctctactaaaaatacaaaattagccagatgtggtggtgcatgcctgtaatctcagctactcaggaggctgtggcaggagaatcacttgaacccagaagcggaggttgtggtgagctgagatcgcgccattgctctccagcctgggcaataagagtgaaactccatctcaaataaataaataaataaaaataaaaataaaactgctacacagagctaggattcaaaatgaggtttgtcttacatatttgttctgttaagtaaacactggcccacactgccttcaggtaaaagaagaatctggaagaataggtgtgttcagcctacatttgcatgcaggaagtgaacgttcagacctctagggatctgtcattgtgctgatctgtcattgtgtggtagtagggaagtgggactgggaagagggagaagtcaagctgtggtgcagtcacaaggaagacctcagctaacccacaggcagccctggggtaagatggccctccagagttgtgtcacctttaggccagtgggctaggactttataccaaatgctgccccatcaaccagtcattgtgcagactgaccttggatgaggcagctcccttctgccaagggcagttctccctgagtgtcagcagtcagcaccctgtgcagctgggggaacgggtgcctccctggagcgggcatctgcgcgcagcatcctctacagtagaaatgcagaagacaagacatttctagaggggaggaataaacaatttcaaatgcatgccttttccccccctctgctgggataactcttctcctcccattggcggcctttcccccaggttcctccctgatgagtaaggccctggaatga

SEQ ID NO: 3775 - DNA, 1008 bp, Homo sapiens
tgaactccagcctgggcgacagagcgagactctgtctcaaaaaaaaaaaaaagatggtcctattttttaaaaacagtgggcatatgtatgtaatttctaatagacaaataactcccacaaagtatgtatttttattgtcatgttacatgtgaagaaacaggctcagagatgacctgcctgggtgtgtccccagctgcccaccctaaagcttgtgcttttccaggatcccccctgcctctccccgagagcatctgccagaattcatttatggatgaggaagctgaggccaggagaagctcagccatcccaaggcacacagcacattgagtcatgaccatttagggctgcaggagacatcagctcaatagaagatttgggtgtgggagcccccagggccagggaggtatgagccttattcatgtgagcatcctccagacgatggtggctgcctggggagtgctgtacccggaggactgtggagcttggtccagggacagcagggaaagtgccatgaccagttggtgccatgagccctgggttgcactgaggggctgacccattcccagagttcgtgcttccctggccttggggaaggtgggaagggagggagggagggaattcccctgcatggggcactgcatcagggcagttaaatgtttaactctgttaaacacttgcaccaggctaggcggggtcgctgagttctctagactgtcggggactcactgtttggccctgggcacacaccacttaacctctttgagctcctgctctctctgctagaggatacccgctgtgcctaacctcaccagctttcaagagtctcaaaggcagtaatagacatgaaagagctttgaaaaggccaggagtgctgaacagaagccgggtgtcgctgttacaccccgatggtgctgggcgcttgtctgcaggctgatcacaatgccctctgtcatttcagctgaatagcattggcaattactacaagccgtggttctttaagcatgtgga

SEQ ID NO: 3776 - DNA, 1456 bp, Homo sapiens
aagaggtaatgtaggctgggcacagtggctcacacctgtaatcccaacacttaaaagaggtaatgtaaacttccacaagattcgagtaatcgatttgatgccttggaatctagattgacattccttccacatataccatgcaatttttattagcagttttttctccatttagaaaggatttgtgcttattgtaagagacttggaaaggatttgtgcttattgtaagagacttggaaggtacaaacaagtaaaaaggaaagaaaagactccacctgtaaatatgtcccaaagccagtgttgctaatgtgtttggtacacagttggccccttgtatctgtgggttccacaacagtggattcaaccaactgcagattgaaagcgttcaggggccaaaaaacggatggtttcatctgaaatgaacatggacagactttttttcttgtcattattccttaactgttacatagcatttacattgtattaagtattgtgagaaatctagagatgatttaaagtatacaggaggatgtgcatagggttatatgcaaatactaaatcattttatgtaagggacttgagcattcatggattttgggggatcctggaacaaatcccccatggatactgagagacaactgtatttatttcctctttctctgtatggatttttttgaaagtttttaaattataaaagtaatgtaacaatgctgaaatatataaagaaaaagttaaagtgcatctctttacgccagggtgtaaccacttacgtataacagttttgtgtgcattcttcgagacctatttatttttatttatttattttcttattgtttttttttttgagacagggtctctgtagcccagactggagtacagtggtacgatcacagctcactgtagccttgaactccagggctcaagcaatcctcctgccttagcctcctaagtagctgggactacaggcgtgtgccaccatgtccagttaaaaattttttttttttttttgagatggagtctcactccgtcgctcaggctggagtgcagcgcgtgatctcagctcactgcaacctctgtctcccaggttcacacgattctcatgcctcagcctcgtaagtagctgggattacaggcatgcaccaccatgcctgcctaatttttgtatttttagtagaaatggagttcaccgtgttggctaggctggtctcgaactcctgacctcaggtgatctgcctgccttggcctcccaagccaagtgctgggattacaggtgcgagccactgtgcccggcctggttaattttttaatttttaaaatttttttgtagggatggggtcttgctatgttgccaaggctagtcttgaactcctggcctcaagcagtcttcccacctcagcctcccaaagtactgggattacaggtgtgagccaccacacccagccgagacctatttctctgt

SEQ ID NO: 3777 - DNA, 1026 bp, Homo sapiens
atggctggactttttcaaaagagctttctttactagaactgaagaatcccaatcagaatggccaaggaaaagtcagttgtctgtgtccaagacaaatgtcaaaacaataaaatgatgaggttggacattgatttatggaagcagatgaggtgttgtaggaaaaacgctggccggggagttaggtggtcttgcctgagccctggcattgctgcagctgacttttctgggaagactttggtgagtcatggcagctctgagagactcagtttctttacttgtcataagggggtgctagcgctctccctgggctctgtcgggggtggatcccacaagccgatggactgggaaaggccttgtaaattttagtaatggttcagaagggaggcattttaatgttccccagctacactgcctgacacccactaaagggtgtcaaggcctggccttggactcctgcccttgtgcaatgcccctgccattgtgggtcgttgggcagcagtgccagtcccagctttttcctgaatagcctctgggtcaggggctgtacctagatgggagaaggaggatgctctctcagtgagggtccctgagacagagggcagtattaggttccatgtcatgtcgaagctgcagggaggaaactaaagcccagcaagcacagtttgtaaagctcattgtttgggtttatacaagagagtgagagaatagggactctcccaggctttgctcccccactgactgcatgccacaatgtggggcccaaggtttcagctcacaacacatcaattctgtctcacagtccgaaaactcagacctgttctatgccgtaccctggtcctgtgggacgctgggtttcctggtggccgctgagatccgcatcatccctgccaagaagtacgtcaagctgcgtttcgagccagtgcggggcctggaggctatctgtgccaagttcacccacgagtcccagcggcaggagaaccacttcgtggaagggctgctctactccctggatgaggctgtcattat

SEQ ID NO: 3778 - DNA, 1035 bp, Homo sapiens
aggtataacggtcagcatgtccttgtgtgcaaagggcagccttgctcttaagctttccaaaaagaatttccacagctgagggaaaacaagatgcttcctctggaatgtgagtccaaagagttaccagcgctgccctctagtgatctcagctcagcatatgcactaaccgtgtgtttacagggctgagtagtgctgcagtgtgaagtgaatggaaggcctcgaggtgtttgtggctggccaccctgatcagcctgcaggtagtcccgatgaagccagggcacagggggattcgttccagcttgttcactttattctgccttgccaggttactgaaagtccctcgtttgctctcaccagccttcctggaaatgtggactcttgaaagaaaagctcccgtgctcttgaagtatacctgcttgccaggggagtccaagaaaattttgacatgtatttttaaaaaaagaaaaaaaaacagctttaataccaatcattatagtagaaaaagaaaataaatatgtattgaacacccactgtgtgcaaacactgaactaagtgtcagttaatcattacgtctttccaatagtctgtaactttccttaacagcagtctcctctgtggtcccttcacagtacttggtacagaataggccccattaaatgaatgttactgatgtagtaggtgtcatttttttttaagtgttatctttcggatcctcataagcactatgtgaggcagctgtcaccctgattttacagaaaggtaactgcagcccagcacagtgatgtgacttagcccaaggtcactccacacattacctcatcacctacttcatttgcagagaaaataaaagctgtcacaggagagctcctgcggccactaattcccaagcatctgcactgttcttgtctcctctcctgtgacagtgggaagtttgcctctgtccacccaaagcccctagcgctcatccccgcccaccttggcagagctttgcgttctaatgtgtatgtaactcttcaatatccagaacgctccacc

SEQ ID NO: 3779 - DNA, 1019 bp, Homo sapiens
cattttcttatggatgtgtattttgtggagtaacaccaggtgagacaggttctgttttgtttctttggtctcctaaagctcctggcatatttaagcaacgaccacccattagcattgctccctcaagccctctgttgcccctccatgaggaggtagaagccttgttgttcatgtctgaagggaaaccttacctgttagaggtatgtacttgttattctaaagccatttttttccctcctgtttgaggaaaattgctttttgttacgagttatgtttggcatgaagagtattgttaagaaatggttctttcaaattaagttttcttatatgtcaaaaagaaataattagtggaagagaatgttattagtcttctgttcagccaaggtccagacctccaggtccagcccagccagctacccatcagggccccagagggaggtaaatggcacttcatccatcaaaatcatttcgttaattgtagagggtttcatccccaatctcttttgtgtgttcctggtcctggaatactacaactctgaaccacgtgtgttgttaaacctcaggagtgtgggtgggctgctctcagctctccatcatggtgcctgtgtggctcatcctcaatccaaccttccccttccagcagagccgcccccagctgtggactccatcttccagtccttcttccctacctgatttacagatatgtgaatctatgaacaatataattctggtttttttttttaaattaacagtgttgtgctatttaatacatatcttttttttttttttttgcttaatattttttggatctgttggtgattattttaattgtgggagcttttgcctttgaaaaactgatggaaacgactcctgaaaaagtgcacatttgcacaaaattgtgtaaaatttcagacaggcttagacaccctgaagtctatctatagacttctaacagttaagaaaccctgttttcaggcagtgttaattatcttaaaatctgggtagatttcagttaaagg

SEQ ID NO: 3780 - DNA, 1034 bp, Homo sapiens
gtctcttcccacaaggcgatcacagtctgctggtaagttagagatcttttcagaactgctgatccctgatcctcttcctctctaggtctgagctccaaacatttatttgcctacttgatatctgcacttttccctctaatctatttcattcagcaacagacctgttctttttcaaacaaattagatcacattacctctctggttaaaaattcttcagcggaatcctgttgctctcagaataaaatccagaattttcaccattacccacaaggccttgcttgatctggtttttgtccttccaggctttccttgactcactctctgcttgtcaggctttagccatactggctcattggttccttgaacctgccgagcttattttcctgcctcaaggtccttgcacctgttattccttatctggaacaccatcctcccctcttcacatagtaagtggcttctccttcagacatcagcgtgaatagcatttgctctgagaggctgttcccagtcacccagtctaacggatgttgcctgctagtctgctcccttttttctgcccatctcctctactacaacttcagcttcttgagggcagaagccaggttcagttcattccctactagacacaaagaggctggcaaatagcaagcagtcaaatacttattcaggcatgcatgcatatatccatataattcataaaaagaatcagtaagcatttctttgaagtgctgtgtgctgtacgcctgtccctttagagtttgcattagagataaccatttttctagtttgattccaaaatatctttccaacgggactcctgagcattgtgcaagcattagaatgttatagaaagatcatccatttggaaggaacatggcaaatatgcaaatattttattcattcccttatgtccaagcagacttgcttttaaatatctccagagaaactgtaacgtcctttgggtagtatgtttggtttcttggtattcctaatgctcaagaatcccagtgaattacttctacattcttcctgat

SEQ ID NO: 3781 - DNA, 1003 bp, Homo sapiens
cacaatctcagctcactgcaacctctaccttccaggtacaagagattcttgcacctcagcctcccgagtagctgggatcacaggtgtgcaccaccacgcccggctaatttttgtactttttggcagagattgggtttcgccatgttggccaggctggtctcaaactcctggcctccagagattcacccacctcagcctcccaaagtgctgggattacaggcttgaggtaccatgcctggcctagaattgcatattttcttaattcatctaacgctcagtaaagtatgtaactcttaatctctactacatagtaataaccattcctacctacatattctttctgtgtgtctactgaaataatctggcctcagaagagtgctgcagtcactggtgagctgatggccctgtgcagagcagagagtgctctggcacaggggagaaaggagccagattaaaaagttattcgtggtgctgttgaaacccaaagctctctacctctaccctgtaagccatgtggcagacttcctaaacggtattgccttctcagatcccgctgtcactgccagcattggcctctcatcagtaggcacaattcttccattttttaaagtaacttgcaaattgatggcattctatccacaagaaaaaagaaaagattgctgagagttgcccctaacttggtccttgtagcacagggagaaggattcagaatcaccctggagaacactctcttgtcattagctctacctgacccatccctcctcctcttcctcttctgatcgtctgcatcactctgacagtggggccaataatgggtttagcctccattcaccacagctgatactaccagaatgacgcgttttgttttggtccttaaattgcaatgtgttaataaaattctgtatactcataagttcaggaggcatcacttaaaactgtaacttttcattccaacagaaaatggggagagaccaaatttttaagaatacatttcagggcatct

SEQ ID NO: 3782 - DNA, 1072 bp, Homo sapiens
cattcttctcctctgctgtttctattcctctcttttccagtaccttcccccagtggatagcaggtccagttcagggtttgtggggctgagaaatggtggtgcaacttgttatatgaatgcagtcttccagcagctgtatatgcaacctgggctccctgaggtgatttcttttttctatcctttttggtacgatagataatacgtgcgttacttgaaaattgtttcatagttttttattgcttttggggtttcctaaaacaagacataacttgcaattctttagtagctcctgaaatgtgtaaagacatgttgtgtataatcacacatttttataaagttgctgttgtaataagctgcctgtattacagatggacttgacctaatgtgatttttgaactccaaagttgtttttaaattatattccataaagttactgacagttttagtattttagaaatatatagggtctaccatgagcactttacaataatatggtcagtggttttgagagtattccatgtgtactgggctacgcttatttcctgtagagaacctggtattactagaccagtttttcataatcagagtttaaggacatgattttttcataattacaccagctaggaattattaaagttaaatatctgcagcattatagccatgtccaaacatacataacattctaaaaaagcaatgtgggtactaacatgtacatatgtcagagtttcctgtgaagcattttaaatatttcaagcttgatatgtttcttttctgtgcagtcattactttcagtggatgatgacacagacaatccagatgatagcgtgttttaccaagtgcagtctctctttggacatttaatggaaagcaagctgcagtactatgtacctgagaatttttggaaggtatttcacccagtaactcttgagatttaaagatgttaaatatttggctacattctttctctaatggtaatggttttttgtttttattaactttagactaatctcttgccaagaaactgtaaaaggatttggtataccattgttgaaattggtacttggtttcaaat

SEQ ID NO: 3783 - DNA, 1009 bp, Homo sapiens
gataggtgctttagtgcatgaaccttgtcgtttgctgagtgctggctgtgttctgttaactgcaactgcttgtgatttattacagtagtaattttggaatcaaattttgtattagttttatgggtacaaatttgaaagatctctttgtaatgttgaccctccttgagtggtatttatactcttggaggtaggaagaagaggcagagctacaagctgctatttcatttgctccaaatctaactaactttgttcctttctcatgaaaaccagagttaattgagtaatcctgaagaaactatttgctgtttatagtgaaaagggttcctgtacaatttcagtggttattgaaatggacaaggcataataagcagtattttgtggaatcctaagaggtatcttatcacatataaatatttctctacttaaagttgcctcattagcaaaatctgttttaggtaagaaaaaaaagtaaaaccctttattagaactcttggggtattcctcaggctgtgactcccatcctcattgctaccccagccctgttttggaagatttggtgctaggtctatggtagtcttttattaaagcagcagaaacaagtgaatattttaattttcagtaaacacaaaagatatatctttagcagttttattattaataaaagtagttcctccataaatgaagaaggaaggagtgtttttgtaaaaatcatatacagtgccttgattaaaaaaggaaacatttgtttcatccctccccattgtactgaatggtgttgatttatcacagtaattcccagtcttttcccaccaaaaccttcaaggaagaaagagatttaaaatacacagaaactcttttcagaagtaatgctattttgtatcacagtaataaagcaacttttagtgtttagcctgtgtaaatggcacctccctattcttttcttactgtcctttgcaaccctgaagttcagataagaagcaaaggacagtgccagctccatggccattgt

SEQ ID NO: 3784 - DNA, 1097 bp, Homo sapiens
caccctatgaggacaccaaaagccttacatagccatagctgagttgcctctacttaccaaaacacgtaacagaaagtaaaagtagcaagatgtcctcagtacagatactttcacatgatgtggttagtacaggaggaaataacttttagaaattgtcctcccaagcaaaaatttttgctgtggtcctagatagaaggataggtctggaaaaacaagacagatgaggaagtggggatgttcaactttgagaagagagaactcaagaaaatgtgaaagctttttttaaatacttagagcattgttatagagaagtttcattcaacttactttttatgtctccaaagaagttatgcagaagcatgtttcagtatcaatgaacttttatatgagaacagtctgaaaacagaattcagtcccttctgaggtagtgagttcctcatcagtggaaatactaagtcagtcattgtataaaaaatgaataaagagaatttaggcataggtttgcaggctaaaccaactgacctctaaggcttcatctaatgttgagtccaatttagacatcccatcaggtcctacttatgaaatctccactctgtgacattatcagatatcttcattgtaattggagaagagtaatttaaatttttcttataacttgtcaccacgtcatagataagatgaaataaacaacatctttcctgtttgctaaactttaagaaggctatatcagaaataattcttaaattttagttttatagactttttctttgaattttattgtataacaagttaccttcaaaggataattttcaatattaaataaaaatattgttaccataattgacttaattggccatcatgatactttttaatatatttgcttcttgctgaagagttcatatttatgtcccaattttgtaatccttttgggaaggtatctgtttggatataaaccttacagtttttattactgtcattttgcaacttttatagtgtagccagaagtagtctagctagtctcacaagtagttgacctttaatatataccttatttctgtgattctaagatgccagtgattgcaccctgcatctcagat

SEQ ID NO: 3785 - DNA, 1032 bp, Homo sapiens
caaatattgtttatctctttcttcatcagctaagttttaaatattttcttacttagatggaagtggtaatttagatgtattaatagctaatactttaccattctcacatactcttcagagttagttttctggttgtgttaccattctggagcagtgtattgtatgaatttcatctataggcctcattcacatcagtaagcaaaaatcgttcatatgacagcataatttccatggtctgtgtttatattcagttttaaaaatcaagcacaaaatatttattataaaaacaattcatgctgtgttttaaaagttagactgtgtgtcttgagtcactcttcaaaattacctttataagatagtaatgacagaaaatgtactcatattatagtaaagaagctgaggcacctaagattaagcagagtcagttaagggtttatttggcagtattagctagttagtagctgctctgatatgaaaatttttatcttttcattgcaccttctcctttgtgaattgtagatgaagaagtattctctctctacttttgggacagcttcgggagttcttaactgtagcattttatttctacagcccatgctagacccagtcattcttactacaatccaggatgtacggagtgtagaagagaaagacctcaaagacaaggtaaatgccttctccagccagataggccccagtgccagttagttcacagaagcagagccaggacttagcagggttcacacaccatgctctttgaattctggtcacatgcattcacatcgaattaactttacatttcctaattaaaaagtgctgtttctgaagcaccattggtggttgttacctctagtcaatagagttaatacagtgttctcagtaagtgataccattcagaattttactaacatgattttgatggtatcacaattggcatagagaaagttttaaaataatacagtgttacaacttacccagagttgtttaaagcaattttaccatttaaatttaatatgacttattttgtctacc

SEQ ID NO: 3786 - DNA, 1030 bp, Homo sapiens
caatacctagagaatgagatttctgagttgaagattacagtcattccttggtatactgggggattggttccaggattctgggtataccagaatctgtctatactcaaatcctgtaggcagccctgcagagctcacgtatatgaaaagtcaaccttcaatctgggatgcagattttgcatcccaggaatattgtattttcagtcctcattttgttcaaaaaatctgcatgtaagtgaacccatgcaattcaagcttgtttgttcaagggtcaactgtatatttgttttaaaattataattgacagtgctaaatgtctttctaaaaagcttttttgcccatcagtactcccacaaacccatttcataatagtctcattagtgctaaatattttcaatctttaatgttccagtatgatggacaaaaaatggtattttattatttaatatgtaatactctgatttcttgtgaacttgagcattttgtcatatgattattggttatttgtatttcttctgtgaattgacctagtttatttaggtctctttgggtgacgtgttttgttaatttttaggaattatttttatattaagcttatcaatgctgtatctattttgcatatttgtaaatcttttctcctagtattttgcttcttttcatttttattgatggtatcttttgctatatagaagtttcagacttttacgtagtcaaatttttccttggtgtcttaaaagttttctaacttgcttagataatgttctcccacctcaagtttataaaaatatattttttctttttatactttcatatttttatttttttaacttagtccttgaattcatttagaatttatttttgtatatttgaaaagatagggatttaattttattttcttccaaataggtagccaattgttgttagatcctctgttgaataatctctcttttccttattatttgtagttgctggcttaataatatcaaaggcccgtgtgccaatggatttgtttctggacctctgttccagtcat

SEQ ID NO: 3787 - DNA, 1106 bp, Homo sapiens
ttctctaatggatttaaatgtcatatttatgccgatggccctccaatttatatctctgtggcccaaacctcttctctgagtataccagacttgaagagtcaattatctccttttggttgccatacagagttctcaaacttagtgtgtctgaaatggaatttcattttgcctctccagcctttattctcctttttagtaaataacatcatcatctatctagatgctcaggccagaaacataggagtcagccaggattcattccttgaataaagaataaccaaaccataaacaagtcctttgatttaatctctaatatgtctccatttgacctctctcggcgccttctgctgccatccttctccacacacagctgtgaactatctagacactgcactggcgttctgactggttgtgtctgactatgtctcattctcccattcatctattccattccattcttcacagaactgcaagagtgaccttaaaatataaaacactctcttcctgaaaacgcttctgttgctttctttctaattatggtctgtaagtgtctccatgatctacattctttgcctctctgtacaacctcatctctgccactcctggctcaccgtgtcccagctgggagagttttttaaacacagcagagtcttttctgccatcccccatcaggacctttgccattttagcctctctgcctggactgttctttaaacggctacatctgtcttgtcctttaaagattatgttttcagagaagtctttcatgaccaccaccccaagtagaggaaggtcctatttttctttcgaggcctttttgtttttcctttcgtgggacttagcacaatttgaattgtcttctgtatatgatgctctacttggttttgttgaccctgctagaatgagcttcataaaagcaggtacaacatctcttcgtagtcactgttctgtatctagtccctagaacagtgaatgctcaaaaagaaaagaaaaagaggagaaaatagagcttgcttaagagcattaattaatgatctaactgggactaaaacttttaatctctgctgatttactgcttcttatgttaataattaagttttaatttc

SEQ ID NO: 3788 - DNA, 1048 bp, Homo sapiens
cacttactatgtgaattgtgccagacacaaatctgtgtaatggagttcattggtttgttttagggaagaagagtaatttaggcatttattgcaaatatttgtgtggttttttggtttttgtttttgtttttgttgtttttttttttttggtttttgatttttgagacagggttgcttaggctgcagtgcaatggcgtagtcatgtctcactgcagcctcaacctcccaggcttaagtgatcctcctacctcagcctcccaagtagccgggacaacaggcaagcaccaccacacccagctttttattttttgtagggacggggtttcactgtgtcgcccaggctggtctcaaactcttgggctcaagtgatcctcttgcctcggcctcccaaagttctgggattagaaaatatttgtgtttctatagaactttttagggaaataataatggctagtaagtagctgctgttggtgttttattagctatttaatcagatcattgaagttactctgacatggaaatgtaagttcaatcatttcagttcaattggtatttatttaatctaatgctatggttatttctcagcctttccttcatcaaaggtatatattctacttttaataatttcgtaagaactaaggttcctatgacatagttccatatgtatggatttagaatgatgtatatgatttttacgaactaccaaagacctaaataacgtgtattatttcattcattttactaaggtctttctgagtctgacttaaataaagtatattatttcatgcattttactaaggtctttccgagtctgatgagaattgtagaaggtttatggacaggtgtatgcctgaagcatttaaaaaggtaagaaaaatgtgctgctgtgatattttgtgtgtgtcggggtgggggcagggtgaaggaagagaagctttttgttttaattttagttttttatgtataagaccagtttatgaatcttgtttaactgaggaatcctctaatatgaaaaacggaactctgaatttggggcttataaatgatt

SEQ ID NO: 3789 - DNA, 1048 bp, Homo sapiens
gattggcttatttcacttggcataatatcttcaagatcttccatgttgtaacatgtatcataaacacattttcttaaagtttggataatccatggtatgtttatatcatattttgtttattcatttgttgatggacacttgggttgcttccaccttttggctattgtgaataattcggttatgaacatgggtgtacaaatatctgctcaagcctcttctttcagttttttggtatgtgtgtatccagtagagttgctcaatcacatggtagttccatttaagtttttgagaaacctccatagtgttattcattgtaggtgcacagttttatactcttatcagcagtgtacaaaagttccagtttccccacatccttaccaacatttttttctatattttttataataaccatactaatagatgtgaaatttccttgtccatttttaatatcagggtaatacttgcctcataaaataagttgggaaatgttccttgcttttctattttttggaagactgaaggattgatgttagttctttaaacgttttgtataattcactggtgatgccatctggtcctgggctttcctttgtgggaagttcttgattacaagtcattctttttacttggtacaggtcttcagattttctgtttcttcttgagtcagttttggtggtttatgcttttctaggaaatgttcattttacctgggttatctaatttgttagcatacatttgttagtagtatatcttaccatatttatttctgtaaggtcagtggtaatgttttcttggcctggcgaggtggctcacacctgtgatcccagaactttggaagcctgagctgggaggttcacttgagcccaagagtgtgagaacaggctggacaacatagtgagtccctgtctctacaaaaaaaaaaaaatcagaaagatgaaccaggtatggtggtgtgcttctgtggtcccagctactcaggaggctgaaatgggaggtttgcttgagcctagaaggtcaaggctgcagtcagccatgattgtgcctttgc

SEQ ID NO: 3790 - DNA, 1050 bp, Homo sapiens
gttgtggaaaagtacttagtaaaatattagaaaatggtctgctacaaatttaaactgggtataatttgatttgatacttgataaagtttggaaacctctgtgtccccacccacatctcatcttgaattatactcccataattcccacgtccacgtgttgtgcgagggacccagtgggagataattgaatcatgggggcagttatccccatattgttctcgtggtggtgaataagtctcacaagatctgatggttttatcaggagtttccgcttttgcatcttcctcattctctctttgcctgctgccgtccatgtaagacgtgacttgctcctccttgccttctgccatgattgtaaggcttccccagccacgtggaactgtaagtccaattaaacctccttcttttgcaaattgtccagtctcgggtatgtctctatcagtggcatgaaaatggactaatacaatactagatatattttttccaagtttttatgttgaacaatttatagtctacagaaatcaaaagaacaatacagtgaacacttgtatacccttcaccttgattcattatttgcaaacattttgtcacatttgctttagcttctctctctgtctgtctctctctctctcacacacacacacacacacacacacacacacacactttttctgaaccatttgaaaaataagttgcaaatgtcaagacatctgactcctaaatactttaatgtgaatctcctaaggacaaagacattctacagaactgcagtaccattatcctaccaaaggaatttaacattaatacgttaatattgtctattatttagttcatattcaaattctccacttatactgcaatatcctctatagacttttataaaaattgtaatctaggattgaatcaaaaagtatgcattgcatctgttaatcatgttttttttttgttttgtttttttgttttttggaaacagagtctcgctctgtcgcccaagctaaagtgcagtggtgcaatcttggctcactgcaacctccacctcccgggttcaagt

SEQ ID NO: 3791 - DNA, 1058 bp, Homo sapiens
tgacaggatcacaggaaaactgttggggttaggagtgaggttggggttttagccaagggtcggaaagggggggcattgagtaggatttaaaatgaagagggaaggggccgcggccaggaatgaggacttgaataaaatcaggtatgagagcagtggggattgcactgagagggcagaggtgggaggcctgggcaggggtgggagctgaggagggtctaggcagggatggggactggaattggaagatagagctggcaccaggtctgggtaaagagggagtactggtcatcgataaggtcagaaatgagagaaaattagaccggggaaagagatggtagtcatactgagggtgctatgcagaggggcgcggaacagggtgggagcgcagtgggggtggaggaggagtcttgaggctaatggctttgatcagagacctcaagtctaggtggagaagactatgcctgtttagtttggggtgtgagcaaggaacgtgggggaagaaaacggactcttctataataaagaaaaaagatcgaccagaagcagcagtgcttttgaataattactttgcagaaacatagtagctcatggcaggaattttggtcagattcgttgggtagttcatttcaggggccagtagagcagcttggcctgaccacagaaaagcacagatctcaaattattgggattgcgttattaggtagagatacgaatttggttcgttcttaatgaagaattaagcttagtgaagctaagccttttgaaacactttttcctgagcagtgttatatccttttaattgtatgcttttgcaacagttcctcgggctgaagtagcttgaacaagaaggtggcacttaaaaagaacaggtttctgcacaagatttctttggcttccacacttagacacagttgctagattgccctctgtaacccactaacttagctgtatcgttgactagtatatggaaataaagattgttactattcctagtttgggaatttttttaaattcccatataattgagtaaccatacttaagtcattttaagaaatcag

SEQ ID NO: 3792 - DNA, 1028 bp, Homo sapiens
aggtctctaaggaatcaaactgatccacaaataatttaactactcgtcaaaataaaacacaacactctttcaaggaaaacagaaaactccagaacctcattgacataatagtcaaaatgtctagaatctagtaaaatatttacaagacataacaagacagaagaaaatgtgactttcagctggtagaaaaaaaaatcaaacaaatgaacactaatccattagtagaaacagacccagaaataacagagacaattatgagctattagagaaggacattaaaatagctattataagggccaggcacggtggctcatgcctgtaatctcagcactttgggaggctgaggccggcggatcacctgaggtcaggagttcaagaccagcttggccaacatggcaaaactcccatttctactgaaaatacaaaaaattagccgggtgtggtggcggtcacctgcgttcccagctacttgggaggctgaggcatgagaattgcttgaacctgggaggcagagtttcagtgagccaagatcgtaccactgcactccagcctgggtgacaaaatgagacttggtctcgagaaaaaaaaagcaattatatctatgtacaggtattaaaagacaaacatggagttaaggagagaaagagaagatataaaatagacccaaatgaaatttctaaaagttagaaaaaaaatcccaatatctaaaatgttaatttcagtgaacatgattaataacagattaaatattagacaaaaaagatgtcaacttgaaacgaacttgaagacatagcaatagaatctaagttgaagcacagagagaaaaattctctgaggaacaaaaaccagagtgttaataaattgtggaatattattaagtaggctaataaatgtgtaattgtagtactggaaaataaaaggtggggggagggacaaaaaacgtgaagaataatggtcaacattttccaaatttgatgacaactctaaatgtttaaattcaagaagatcaaagaaccccagcgcacgag

SEQ ID NO: 3793 - DNA, 1027 bp, Homo sapiens
cccccaagcaagagggaactcttcagcagatggccttcagccttaaactgcaacattggctcttctctggatctctatcttgctggccaaccctgcatattttggacttggaagcctccataatcctgtacaccaattccttgaataaatctctctctatatatttgtgtgtgtgtgtgcgtgtatacaaatcctattggttctgtttctaattaagaatcctgattaatacaaagtctgaaacaatacaataccgtgttcttgctcaccttcctcactgatatttacatctcccatcttttacagtgagaatcatggtttccaattaaagtcaatatatttactcattttttgtcctagtccaaatatacataacaagacaactgtcttagaatctttaaaacagtcaatatcatgaaaaaaagaaagtaaaaaggcaggagaaatgttctgtgttagatcaaactaaggagatctggcagccaaatgcagggtgtgatacttgtttggattctgaacattactggggaactttgaatatggaatgtatattaaataatattttatgaaattaaatttcttgggtctgataatgatattgtaaggaagaatatcattgtaagagatgagagattcatgttgaattatttaggaatgcaatgtcttgatgtttgcaagctattcttaaatggttcacaaaaacatatgtatgtaaatagatatagatatagacagattgattaatgagggagggaaagactgtgtgtgatggggggaacatgtgaagacatggcaaaatactaacagttaagtaaatctaagtttaggaaaaataggagttacttggattatcctttcaacttttctgtttgaaagttttcaaaataaaaagatgggggaaacagtagcaagtgttatgtatcaagtatttatatatccttgtgcaggtattatataccaaatgttaactttgttttaggcatgtgtcaaatactttatgaacatcattcattaacttgtttccgta

SEQ ID NO: 3794 - DNA, 1026 bp, Homo sapiens
caatcatagtataaatcaagtgcagtaagtcctggtaaaaaactaggtttgatcttacctgaaccacttactggctgtgtcacctgggataagacatttcacctttggagtcacagttactttctctgcaaaatccagaaaataatactatttactgcacagcattgcaatgaggttgatgcattcattcattcattcattcattatctattaagcacctactccgtgtcaggcactgtgtagttcattctccagtgtttctttagtgcctgggcacagagtaggtgccaggcactaaagagacactggagaatgaaatggacttgattgtgccccacccccaccaccccatgaagcttacaagggaaggaaggcattaaacatatgcttgcacatgtaagtattgcaagaagaaatacagcttgctacgagacaggacttcactgagtcttggctgggggtgggacaatcagggaaagcgcccccagaaaagcgatgctcatgttaagatttgaaagacatggataaaagagcctggtccatgagagatggtctgaaaatattagttcccaccccctctgccttggatcagatccctcaccaacacctgctgggtgtgaatgggcttaagaagctccccctcccctctagggaacttagctgaaaagaagtggattctgggaattgcttccaggggcctggaaattgatgaagacacatacaagggaatgaacatggggccagctgtgacattttctgtgtgccttaatgagaagtgctggggctgtactacccggagctgaactcttggcccagcttgccaggctggaggaggagggggagttgcttcacagactgcagggctttgtgaggggaaaacaaatgggtctgtaacttgatggaggcagaggggaggctgccagagctgtgagcctgaagaatagctttcagaggagtgtcaggggaggaggcagcctcttccctcaagctaggggatgtgcagagcagagctggctcttggatcat

SEQ ID NO: 3795 - DNA, 1029 bp, Homo sapiens
gaatgacaggtgaaaatcagtgtggtttactgaaaacacaggtgtggaaacaagctgagcatgatgagtgagtacctttaattttaaaccagttttgagatattataccccagaatgctttgtaagcttgaaggatgtttttcacacagggaatggggctgactgcagctcctggatctgaccttgtcctctgggggttgaatccatacccttgaagtggggacaaaagctcagggcagaccgtagactattaagcaacgtggacagccaggatcgaagtcacagggactgtcagactgagaggagcctttggtaactttgcaggccggctgtgctgggcctcctgcgctctgcctcttcccgctaggaatgctgggatgtttaggttacacaacaaatccccctctacaccagaagggggaggaaccttttgaactctgcccatccgtgccttcattcccctccacttccacgtgcttctcattaaacgactgatagaaggggctggggttgttggtagatttatcatcactctgtcctcctccaactcaatcctccagaagagcttatggtcttaaaggaaaaggggctttgaagaataaagtgcagctatcagggaaaaatggattttagggctatgtctagatattggtttccttttctttctctttttgcctctttattttgttttaaagggcaggtgttttctggtgttttggggcagaacagcatctctggtatttctttggagctagtgaaatcctgagacacctcttcctggtctggtggaggttggactagatgaagttgaaggtcctctcggtcctgagcatctaagatacggttctaggcgtcagttagttgaggaggcaccacatgctctatgtgactgctttgagaccctgggaaattcattttacctctctaaatctagattttctgatttttcaaatgaggacaattatcctgtgtgtatacattgtaggctgttgtgaggatcaaatggaaatgttaaagtttagtctgtaa

SEQ ID NO: 3796 - DNA, 1085 bp, Homo sapiens
actaagacgacgctctccctgcctgcccctgctatccggaaggaaatcctttcacctgtggacattattgacaggaacaatcaccacaacatgatgtaggtgccacccacctcctgagctgtttttgtaaaatgactgctgacagcaagttcttgctgctctccaatctcatcagacagtagaatgtagggaaaaacttttgcccgactgatttttaaaaaggaaaaaaaaaatgttttactatgtggccttccaaaataggtagtgtttgcctatgtggaaacaacagcaaactaacaccaagtgccagagtcctggatgtgcaattggtttaagtgttcatgttctagtgaacacagcttgttcaggaacaaacactaaaacgatttgagtagaggctgctggtcaccttttgtgacctgaggaatcccaggcctgtgagaaaagcaaaaattcacattgcagcacatgatgccagaaatagcactgaatcaagaaaatagccattgcggagctgccctcttgagtctttctgtccatcccattctattctgtactgtgactttagttcaggaagttttgttttgtgttttaaataaaaggaaagagcaagtttgctcagtcaagtgatcagatcccgaatctagattcccagttctaaggccttatcacctcccctgcccataggccaacaaccatagttcctcacattagtgattagcagactctttgtggacgagtgaatttcacaaacagcacaatttcagaagaaatcgagggcacaggccctcacttttcttcttttgacgcatcatcctgtgatgttgaaatgtcaattgcaggatgctgatgttgtgcacgtcaatcaccgggcacttgcatactcttagaaacagttcgacttcggttactgccttctcccttgaaatccttgctgcgtgcccaccaggatttcctgtgagggcccaggaatgagcaaggcatggtctgccaccagctgacggaaagcagccttctgtacaacagatgggagggtgaagggggcagaatgaaaatcgaaccaaccttttagctgttgcaaatca

SEQ ID NO: 3797 - DNA, 1046 bp, Homo sapiens
acagagacatcacctgaggttaagaggattgataaaaaagcagcatgtatggcacaaaggccaccacttgaggtgccaagaaacacagaatccattttccagtctgccagataacctcctgagccaagcctttacggactccctgttaattgagttgtaatcttcgctgacatttgctgagagcccaagcactcagagagaaggtagcaaagctggagttgaccccagacagcctgacacagagctggcactccaagacccaggctttggcaggtctcctctcatctctccaccccttcacctcccggcatgtcaaacatttcaatattttccaacacctgagtttctgtattagatacctgtcccctttgatggaacacagttccagtgtcacctcatctctgatgaaaccttctgtattagctgcctctggctgctgtaacaaattaccacaaatttagtggcttaaaagaatgcaagtttcttttcttacagttctggaagttgggagttggaaaagggtctcactgagctaaaatcaaggtggaacacattccatctagaggatctaaggggagatctgttttcttgctttttctagctttctggagctacctgagttccttgactcatggccccattctccactttcaaagctagcagcatagaatcttcacttctccctctctctctcacacacacatatactttctctggcctttgcatccattgtcacaccttcttctgtgacttttgtccttttgcctccctcttttacagatgctgggaccaccttgataacccaggatgatctctccatctcaagatcttaacttaatctcattttatcatgtagcatcattcattgcttctgggacttaggatgcgggcatctttgggggacattgttcagctttccacaacttccccagtccctggagacagtattgtctcacttccttccagtcccccatggccttttgcactttcttcctaccatggctttaggcctcatctactcatggcctgctcatatgtctgtctct

SEQ ID NO: 3798 - DNA, 1013 bp, Homo sapiens
catttggcagtagtttcttaaaggtggactaaggatctttgtgtttgaaaactgaaaaatgaaaggtctagttttcctgtgtgctccaaattgacagttgtgggtttgagtttctaggaagaatggctttccctgaaaaaggtgtttgttgtggaaagcaaataattgcacagtatcatgtattgaggtttgaacaggtgtttttgaaagttggaggatcagttaattgaacgcttcaaaggagcccgctatacccaagagtgtggtgagataagaaaagcacagggacaggaatgtcacatgctcgtcactctctgtggcattattcccagcttgcctagtgggctgctcccagacacagggcagtggaaagagacactcttcagagcctctcgtagctatgtgaattaggtggatcattgatttctttaaccttcagtttcctcatctgtaaaatgagattgctgtttggattccctcaagaggattgctgtaagaatcaaatgaatgccataatgcctggaattgcactctgcagcagtgggctcactggaacgttgagagtcttttagttgggaatggttctggttttctgacctggccccaggatgggcaaaggaaaatgctaaagtagcttctttagagttcatgtgtctcctcccatccttccttccccaagcagagcttcagatcagcagctcttcgcttgctgcttgccaaggccaatccctttctccttaagggatgtcagcatttcttagaaaaaaatgtgctattgagagcttcattgtggcttgcccctttccttgtgttatgttgatattttaattacaatgcttcctgacctcccaggttttcttgaagcagtcatgtgctgtggcctcattatacaatgagcaacagcattgcttccccaacccatacaatggcagcaaaatggattagatagtgctttcctatagttccggagaaacacaagccaagaaattactgcaataattgttatctcttgt

SEQ ID NO: 3799 - DNA, 1081 bp, Homo sapiens
tgtctacagcatcacctttctcatagattctcatatacgtggccaaataaacaactccatgttttctaacaggcctagagaacatctatcgggtgcctctcctctttccctttgtgtttgtcattttggtgaattactggaagatggcagttccagctgaaaggccactgtgtttttggtggtcttccctagttccaagatttgtaaaagaactggtccttttactttgcgaagtgtcattggagcttggtattgcagttgggtagttggggaggaagaggtattttggtctaagagaatagcatgaatccacagtctctgtgtactggtttcttggaggcttactgaagaggagcagcagagcatgaagctggagagatgtccaggtcatgggaactcctaaagtcatacttagggactttatttcaccctgtgtcatggggagccattgaagaggctttagcaaggctttgacatgctcatggtccaagcccttcaggaagcaaactggtggctatctgtagaagggaatgggggccatgagcctgattaggaggctcttgtagcatccagacaagagttatcatgggcctttgctttttaagtcaaggttgtgagggacttttcttggcaggtgatggaatccatttgccatgacctttgagagaatagtatctgagctggccactgataaccagcagcaactgcaagagtcacttggttctcctgggtgccctgggccctctatccaggtctgcaggcagcagggccaagctcagctctgctcactcttattggtagttctttgaacagtgaaagaaaagcctggaaaatggcattcatgaagcagctactatgtgccaggcactgtgctagaggttgtgtgtgcgttgatctcctttagtcatcaccacaactcattttactgtgggaaaaaactgggactcagggaaatggagtgggaaccagaggaagtgctggatctggggttcacatccagatttttttactccaaggccttcactaccccaggcagcacagccttagtgaacttctcaaaggggaaatggttaagagctaa

SEQ ID NO: 3800 - DNA, 1052 bp, Homo sapiens
gaactcaaaatctagttcatcaaaactggaggattgaagtaaaggagacaatctttctttctcttcctttcctttcctttttcttttgagaaggagtctcgctttgtcaccaggctggagtgcagtggtgcgtctttggctcactgcaacctctgcctcccaggttcaagcgattctcctgcctcaacctcccgagtagctggggttacaggtgcctaccaccatgcccagctaatttttgtatttttagtagagatggggtttcaccatgttggccaggattgtcttgatctcttgacctcatgatccacccgcctcggcctcccaaagtgttgggattacaggcatgagccaccgcacccagcctctttctctctctctcattttttctttctttctttctttctctctctctctctctctctctctctctctctttctctctctctctctctttctttctttctttctttctttctttctttctttctttctttctttctttctttctctctgtctctctctctctctctctctttctttctccctccactcccctcccctctttttctttcttctctcactatgttggccagtctggcctcaaactcttgacctcaagcaatctatccacctcagcctcccaaattgctgggattacaagtgtgagctactgcacctgcctgcccagggacagtccttcttgataaatacttcacactacattcacctatactgtccctccctgaaccacccagaccagtttttaaatttggcctttcctgaagtgaaacttttttttttcttttgagacagggtctcaaaaacccaagtcatttttgacactagcataacaatgttgctttttttctaaaggtaaattaatttatcattattgatgctttaaactataccacctaagatttggaaaagacagggaacatcactcataatctaccataaatactattgccattttggcatatttctttttactcatgttgattttctttcagttattaggtatatatacatatgatcttctatgttct

SEQ ID NO: 3801 - DNA, 1048 bp, Homo sapiens
aaagtcgaggaagtagagaggacttgcgtcatgggaacctggtctgcgctggaaggtcagggaaacttgcaaagagaagagacatctctgctgaggtctgaatgggagaaaggagttgagctttctaggcaactggaacagcatatgcaaaaacctgagcgtggtgcatttgagagactgtaaaacaccaaggtggtggggaacaagggggcctgtagtgagtcagcatggggaagcagccaggtcctacagggggctctgcaggccctggcaagtattttggtctttatcctaagagccatgggaagcttttgctgtgttttaagtactagaaagatgtatcagatttgccaggttttcttctcaatctcttcatcctgtggtgtgactgtcagaggagaggccagcataagtggatgaggaaggactgaggatactgcggtaatccaggcaggaaatgatagctgtgtgacctggcatctgctggtggagatggagaggagtggacaagcaaaaggtacttggaaggtgaaattgacaagatggacttgtttttgggggataagaatgagggagactgaatgggctcaaggagggttagtgacagtgcaggcattaaattcgaatatgaaagaaaaaaccatcttattaaacagcattttgattgtagcaaaaattagcataaataagaagaaaattactagtaattccaccactcaagagagaactcttgttatgtacacatatatggatatgtgtacattttttcaaaaacaggatcatattgaacatagtattttgtaatatgcttttttcactcaacaggatgttgtgaatatatcttcaaagcaaaaaataccacttccacaagatcattttttcggtactgcttgctatttcatcttatagcaaatccattttcttcagccagtcagctaatgctcaacatttttggacatttctaacttttcaccatcctaacagcactgcagggaatattttgtactcaagtttttgcccagatattacattctttctggataagtaa

SEQ ID NO: 3802 - DNA, 1046 bp, Homo sapiens
atttagatgaagaggaaccagtgaaagggactgagaaggagtgagcattgagggagaagaagtctaggagaatgagaggccaagaggagaggtgtttcaaggaggcaggagtgattggctgcacccattgttgtgggaatgtcaaataagatgacaaccagaatggaacaatattaggtgatatgtaaatttttttacattattattaaaagttaatgatgtagtagagcttgactcagcaaacttctgaaaaaccattttataaaaaaaacaaaaacaaaaacatcactacctccatggtaatgtctaaaatgttaatgccccatgcttttcatagagggttgatttacagctagacacacttgaattaactatcaattagctttgctttttaggaatgtatctctatcactctgtctgtacagtaatacattgcaatcttgtatcatacccattatgactttatattgaatttatctgttgtcatctcttaccgtacaccgtgagcttcttgagagcagggactgtggctgctatcctcaaaaaagctgtattgagcagaactgaagtcagataggcctggttgtgatgtatgctgtgtctttggtggcatgggtgggtggtgaaaggtggaatttgtgattacatttcagtaccaattcttcagcaccgttctctgacactactgaattgtgtccttcaattcagttcaattcagtctagtccaattcagtccaatctgacattacacaggttaagcacagaccccacaacttaaggatttagttctacaagactgtccccactccagaccccagtgacaagtcttgtgtatcacaaaactacctgcacttctacccagctgactacaaatttgtgagttcccatgaccccattctgattgtagaattccctggaatgactcacagaactcaggaaagtgccacacttagattgtggttccttttatcacaaaggatacaaatgaacagcccaggaaaagatacacagagtggcaagatcttgggtgggtgggccacagtagc

SEQ ID NO: 3803 - DNA, 1032 bp, Homo sapiens
ggcaagttttgaatacaattttgtctccttcaggctcatgctgatatgttattcgaggtaaatttatattcctgtgctgctcaaatacccttgttgatagttccaggtcatgatgatcaaagagccaactattccacctagaaaggaacctggaaagtttcaagtttaattcattttcttgaggttagaatgaaagtaaatgaattttcttacagttttagaggggtgatggaaccccaaagctcatccctaaacagcagtgtagtaaccccctcatcttacctgacatctcttgcctactgtgcacttgctccttttagcagtaacttagccacagtactattgggaagacaaatctgccgcttaaaaaaaaaatcttgaaatacagcctaaaaccaaattagaataggcctttggattagctatgccatttcagtctttcattagtgctgataattagcagaatttaggatgggcatttaaattatggcttggacaacaaaacatctctaggaatgaaattaccattcaacttacattttcaatgagatcttgaaatcacttaaatataaatgaggctgaagagtgctttgatgctgggggctctgaaccctggaaccaaagtggatcattggaataatgataaaagtcacaattgtgctgaccattatctcatacatttgtgcagcaaattagagtttacagagctctttcataccattagaatcttagcaaattagaacgggaagagatcatagaaatcctgtaataccaccccttaatatattgggtgagaaaaatgggatatttcgctgctggtcacagcaggcctattttgcaaggtaggcagggcaagtattattattcttactgcataaagtgaggaagctgaagattgcagatgagaaatgtttgggccgtgagaaatgttttgccccatttggggcaggactttgccactgccctgctgaccccaaatcctctcctagtttgtataagcatatttgttgacagcttcacctccccagaagt

SEQ ID NO: 3804 - DNA, 1032 bp, Homo sapiens
cctaaccccaacagcaacccagtgaggtgggagccattctgtttcccatgttatcctgcagaaacagtcactgagtagcccagtcactcacccaaagctgcacagactggggagtgacaccatttggatggaaacctttgctgttgctaactctataacccatgctcttaactcactcagctgtgcctcttccaagaggcagctaaggacacatttaaataccttccaaggggagtgatcaatgaacaatcattcctttgtaagcaaaatgagatcaatgataaagtgcagcacgatttggtagactccatggtaccttgccattctggggacattttaatgagtaacactaccacatggctagagttaaattgcattttgttctaacacagtaagtttttaggccctttctccctagatccttgccttaatgcctatatttcacccttactgaactgtttactctttctctgagtatgtcatgctgtctcttgcctctggactctgcacttcctgagatgtaattacaggctttcttttctgactcctcaattcaactgtgtctccttcaaggcaggggctatgtctcattttcctacatatcaccaaccaaggctagcatatggtagttgctaagtaaatgtttgctgactgaatgcattacagatgatccagaaagtgatttttatcctgcccagaaccacacagaaagactacatggagctacttcctgccacacgtcttcttgctttacacaggctaacacatgcatatgcctatgaagttctctgagattctgaagcagtaaaaggagctaatacaaattcaagaaataattttatgtgaaacatctagactcaaggttgtcctatttctctttttccaaaatgtagtaacatattttatttgcactgattggcagtgtttgaataatacctaatccctaagtttttatctgggcaatgggagtatatggtctgccctggagactgagcagctgtgtcctgctgctgctgttgatcctgggcagac

SEQ ID NO: 3805 - DNA, 1034 bp, Homo sapiens
taacagtatagacaatttgatgtctcacagtaagcaaatatttcttttaatgcctcctgtctgccagatgtagtgcaggtttccagagatattaagatgacatgggacacattttgagagcttcctgtgcataaaggtactatatgcactattctaagcatttcacattaactcatttaacccttgcaacaatccggtgaagaccctgttattctcatttatggacagctacgataagacccccctgcaacccagggcttcactgttttcactgactaaatacataagtagagggtactaagagcagaaaagagaggcacccaattcagctgtaagattagggaggacttcctggaaaaagtgacacctgagcgaaatcccagtggatgaaaaggaattatgagcaaaatgtgtacagtagtgtttcaggatgaagaaagaccttgagtaaatacaccaagaagtagaatcccctaccaggtgaggagaagagtaagcagtgaaatattgcccggcagggcatgagtagagttgaggttgagaaggaagacaagagactaagtcttagagtatgtgtctattctgctggatagcttggaccttggacagggaaagagggagtgatatggtaagatctgagttatgggcagacatgttgacacagtgcagatgacagatgggaagtgtgaaatgaggcaataagactagttaggagggaacagcaaaggtccaggggagatttttagggtcccaaactaaggcagaggcagttcaaatgagagaaagtcatgtgtgttaactggcaggacctagagactgagaaacaacaaggctactgcatttcttttctttcttaaatgtatagtctgagccccagggcaatgaaagagaagggatttaaggggaatgctctaaggagaagatcatgagtttggctacagtaccctatgatgtgaatcttgggaacttgagtttgccaataaagcaggaaagatagaagaaccttaccctttattgtagcagcattcatctgc

SEQ ID NO: 3806 - DNA, 1070 bp, Homo sapiens
aaagctttactggaaattcttttagaattataccagtgatgaagcacaagcaagggggcaatgcatttctctctctctctctctctttttttaatatcttcacagcatgttggttgtatgaccagagaacagatataaatttacacatgggagagaaaatcatagattgtcagagctggaggtgatcttacttttcagctgaagacacttacccagagaggttacattgtgtatgtgtgtgtctgtgtgtgcattcaattttaatatatttatagtctgttttgtatatattttatattacatgtcatatgtgtatgtatatatatgtgtgtgtatacacatatgtacagtcatatctcccagggggtgggaggtgtagcctagagtatagagattttttctgggtatgtgcatgcctgggtcttcaggtattataagctgcatatgggagtagaggaagaagaaagggcgttggctgtccagcagttatttttgccccatgttgcatgctctgtcttacctggcaaatctgaatgctgacccctctgtggttctgcctggctggtgactatgcttgtcagctgaatctactccactcctgacagtcattactggactgtttaatccaggacctatcacccatctgccttcagactttcttaaatgtgcttacttctctcatgtgctgatgggccctctctcatttattatcccctctgtctttttgttagttctttaattttaatgacatcatgggagaaagaggaaataaatgtgtgtgatgcaactaaattctttacataaacaagattcatttgagtggtaaaataaaatttgaactgggcggtgtttaacccaaaccagaaagacctaaagtaggagcaatgcaatggtcaggcgagagatgatgaggctgacatagggcacaggcttttgtataggatgcaaaggaatacattttaggtatgtttccaagatcaaattcaaaagatttcacatgactgggtagacaataactcttaaaaatagggaaggcagaaggaaaaacaagtttgaagagaagataaaga

SEQ ID NO: 3807 - DNA, 1068 bp, Homo sapiens
tcagagtcatgttgggagcaagccccccaaaatcctgccataaactggccccaaaactggccataaacaaaatctctgcagcactgtgacgtatccataatggccctaatgcccaagctggaaggttgtgggtttacgagaatgagggcaaggaacacctggcccgcccagggcggaaaactgcttaaaggcattcttaagccacaaacaaatgcatgagggatctgtgtcttaagaaagtgttcctgctgcaattaattcagcccatcccttcatttcccataagggatatttttagttaatttaatatctatagaaacaatgctaatgactgctttgctgttaataaatatgtgggcaaatctctgttaggggctctcagctctgaaggctgtgagacccctgatttcccacttcacacctctatatttctgtgtgtgtgtctttaattcctctagcgccgctgggttagggtctcctggaccgagctgctctcggcagagtcaggtgaagctcggcacacacctgtaggccctgctcaaacacgttctccatgggtgatacctggaaagtacccagggctggcccctggatgacctcggtcaaggtacctttcacgcgcatccgtgtggagagaccaccaaacaggctttctgtgagcaacatggctgtttatttcacctgggtgcaggcgagctgagtccgaaaagagagtcagcaaagggtgatggattatcattagttcttataggtttggggataggtggtgaagttaagagcaatgttttgcaggcaggggtggatctcacaaagtacattctcaagggtggggagaattacaaagaaccttcttaagggtgggggagattacaaagtacattgatcagttagggtggggcagaaacaaatcacgatggtggaatgtcatcagttaaggctatttttacttcttttgtggatcttcagttacttcaggccatctggatgtatacgtgcaagtcataggggatgcgatggcttggcttgggctcagaggcctgacagtaccctttctgaatgacacccttg

SEQ ID NO: 3808 - DNA, 1037 bp, Homo sapiens
gtgattcctgcattggtgcccccatgcctccacctgacatccaacagaaaggcaaaggctgagagagcccaagaggaaaaaggtagtgaccatgtccagtgctatttcatgacctcaaataaacttggcccaggagctttcacctgctctcagctaccttctttcaaggggacattcagcccagggagttcataaatacgatgactttaaagtccattcaagggaaagaaggaagggcacagcatgttaaacacaatcctgtgctcattttctgctattaaaagaaagccttcaaaactaatcttaaaaataatacctgtcatttgtggagtgcttcctctgtgcagacactgtgctgccctcataagagctctgtaaggcatgcccgaatcatccccatttacagtcagggaaactgaggtgtcaagaagaaaaataacttcctctgggttagatagctggaaaacactatgctgagaccctcagtcctgctctagaattgtactcttcactaaggtgctgtactgaaattctgtctccatagaagaacatgaaccagcactcaaagaatgacaaactacagatacatggcctttaggaaaacccaccacacaagaagaaatggagagcattaatttaccccatagttacttattgaaaatccactatggtcagacatcgtgctaagttctgaggatgtaaatgaataggagagatggtctcggagttcaccctgtacctgtgaagaggagcggtaacagtaacaacagtgacagctgctattaggttggtgcaaaagtaattgtggtttttggcattaatgtacagctaatactatactaattattttgtatacgttattgcatttagtcttcatcatcaatgaagaatgagtcataattatctgcattttataaatgaagaaatagtggcaagaaaagtttgtgtccccacaaaattcatatgttgaaatcctctgctctcatgaatgggatcagtgcccctatgaaagagaccacagggatctagctggctcc

SEQ ID NO: 3809 - DNA, 1038 bp, Homo sapiens
aaacctgatggttggaagtttcaggacaggttttagttctattttaaaaatatttttgtaactatcagagccatccaacaaaggcaatatagaacagttagtgcatgggccctggggtcagaaaacctgatgtgacattttcagcactaccccttacaagctgagtgaccttgaacaattcatttaaagtctctgacctcgtatacttacctatgaattaagggtaataatagtaactatctcatgtggattttagtgagaaataagacaacgaatgtagggcccagggtccagcctgtaataaacagttaataaatggtagctaattataatttgaataataatggttactaaagcctttgagagatagaacgttctctgtggagagtcatggagaggacgtggctttggagttagtctcaagaaatgactttggaagacactttcctgataaggtcaaaaaagaggaagccttcagttctgtttcacaaaccaaaggacttcctgaattgcggtttctcatttaatgttagatgagaaggtaaagcagcggagaacacgtggtcctctgtaagggagactgcagagaagacagaatgggtgtcttagtccattgtggctgctatcataaaataccatagactgggtggcttagaaataatagaaatgtattttgtacatgtctaaaggctgggaaattcaagatcaaggcagattcagtgtcttgtcagggcctgatttctggctcatagatggcacatttttgctgtatcttcaagtagtagaataggtaagggagcactctcgggtcttttttataagggcattaatcccaatcaagaagactctaccctcatgacctaatcacttcccaaaggccccacctcctccaataccatcacctcaggggttaggatttcaatatatgaattttgcaggcacgcaaacattcaggccatagcagtgagagtcaaggctaggtgattccttctcctcctcccccttttagctcccaggttgagggcagagctgagcaac

SEQ ID NO: 3810 - DNA, 1050 bp, Homo sapiens
tagtctattcaacatgtatttgctgagcatctagcatatgtccatcactggtcaaatgtatagtggtaaacaaagcaaacaaaattctctgccttcaaggagcttacattctgataggaaaagtagatagtcaacaaataaagaaaatatactgactgtcagaagatgattaagtgctatggataaaaacaaagcggaaaagggaaagagggagtacgaggggtggggttgcaaatggaaatagagtagaatgaaggtgatatgtgagcacagatctaaatggagatgagggaagacaccattctgatacctgggggatgagagtttcaggtagaaggaaggtcaagtacaaaggctataagccacagcatgcctggagcatctgagaagaatcaaggatgtgcatgctaggaactgagtgtgatgagatcagagaggtaacaggagccagatctgcagatcctgtgatctttgaaggtctgtgttctgcatgatacaacagcatattctgaaatcctggctgtcccacatgaacattgctctcccatctgttaaatgggaataagagtcctcattttgcttatctccagtggtgtttgtaagggtccagtgaaaagatgggttatggtatagctttgaaaatcattaagtatgaggtaagataatgtttgtattgcttagtaattttgcctcaggccacctgctgctgagtagaaaggctgcccatgccttcacgaatgtggctgtgctggaccattgcttgacagcgggttgtcatcttttcacacagaatctcatcttcgtcctctcctgggcctccaactccaaggcctcgtttttaaaacagcaatttctccccactgtgtttcatgccccaaacctcctaagtggaattacagaccagtaactcacagtggcctgttatttatcctatatgcaataaagactttctgtaggttataggaaataaatgtgctttttactatcatctgtagttcttattaaacttatccccatggtgaggaaatatctttgtgagaccaagcagtt

SEQ ID NO: 3811 - DNA, 1026 bp, Homo sapiens
tcccaaccccaaaccacaggccatgctgaataaatactcccattcctcatgatttcccctacccctggctggtgtgtttaacactggaattgtgtccacttccttttctgtatcacagtgtctcatgttattcatttgttgttttgaggatctgccttttgtccactcctggaagagatgtccccctgtgtaggctgctttgagcctctttcatcacttgctcttccccatcttatttaggaatcagcttagttgtcactgcctcagagattcctctaccatcacccttgtggtggacactgtgaggtgccatcaagaaatcccttcaagatggtacttgttggtccagcctctgagagtgcagtgggcagacagcttgcacttgctaaccttccctgggattgcctcggctacagggagctgccttgcccaaggtcagatccttcctctgatagccttcatccaataacttgttgatgtggaggttatcaggtcaggacaagtctgcatgactgttcaagctccaggactccctcagggttggccaagactgtccctggcctacactgcagctcgacatctccctctgctgacccctgcttccttttccccctccacagatgtagattccaaaatcaccacgcatcctaatacacatcctgcatactactctgtcttggtgtctgcttcaggggagcccgccaacttgaccatggccactgcgcactctccgctgggaggggaccatgttgttccattctcaccctttgtatcgactcatgaagtacattttcttttcagtacaaatcagagtctgtcatgaactgaatttgttgattgcttgtttcccctcacacccagttccctttactaaaatataagtcttttattttagactcttttttaaaaaatccagttttattaaggtatacttgtatggcatgttgactatagtcaataatactgtattgtatacttgaaatttgctaaaatataagattcttatcttcctcaaaggcattcaat

SEQ ID NO: 3812 - DNA, 1072 bp, Homo sapiens
attctatgaacaactttatgccaaaaatttagacaacttacatgaaatgaagaaattcctagaaagatgcaaatttaacacaattgactcaaagattaaaaatgtgaatagattaaaacaagcaaagaaaatgagttagtaattaaagattttctgacaaagaaaagccccagcctagatggctttactggcgaattctaacaaatatttaaaaaagaattaatgccaatccgttgcaaactcttccaaaatatagaagaggaggaaacacttcacaactctttttatgaggccagtgttaacttgataccaaagtcagaaaaagatattacaagaaagttaaacagtagatccatattcctcataaatatagatgcaaaactcctcaagatagtattaagaaactgaattcagaaacatatagataaagagattctacttcacaatcaagtgaaatttatctcaggaatacaagattggtttaacatccataaatcatttaacataatataccatattaatacattaaaggacaaaaaccttataatcatctcaatacatgccaaaaaagtatttgacaaaattcaacacccatttactacaaaaactttcagtaaattaggagcagaaggaacttcttctagctgataaaccatatctaaggaaacctaaccttctatcttaaaagctatagctaatgtcgtacttaatggtgaaagactgaatgcctttcacttcagatcaggaacaaaataggaagtctggtctccccatctctgtttaacactgtactggagattctagccaggaattggcaagggttaaatttggcctgcattcagtttgtgtacagcccacaaacaagaatggattttacatttttgaatagttgtaaacaaaaaaacagagaagcagaaaacaaaggagaaaatgtgtcagactttgtcttgaaaaaaagatattttctatctgtccctttttagaaaagtttgctcatctctgactataaaacatcagaaagcttctactactactactaatagctaccatttaccgtgcttactatcaacca

SEQ ID NO: 3813 - DNA, 1902 bp, Homo sapiens
catggctgaatatgagacctcataaacttacggaggagatgcaagaaggcatgtcagaaagtaaactgtatcagatttgtaaactgcctgaaggttgaaagtgttctccaacccacaaacagatccattgtcaaagggtagaaatgttactgaatcaagatgtttaagtactgcctctgaccactcaacatgatcactacactatgcttaccaggggtaatctctagaatccaggcttaaaatgaaaagaggagtaaaagaaaaactgattggaaacattagtggctgtgcaatctgggggagacaaattctacagaaatagtcaaacaaagtcactgaacaaaacaacaacaataaaaatcctagaaataatgacaacttctgggaagaatcagaatccagaattcctataatatgttatctaaaatatcacttgtaaaacaacaacaacaaaaaaaacaagatgtgcaaagaagcaggaaaatatgacccatactcagaaaaaaagtagttaaaacatactatatttgacgggtacagatttggacttcgcagaaaaagacttcaaagcagctattataaatctgttcaaaggtgaaagcaaaccatgtttaaaaagtgaatggaaagtattattataataattcactagagaatatcaataaagagatataaattaccaaaaaaaagaaccaaatggaagttctggagttgaaaactacagtaattgaaacaaaaaatttactcaaggggctcaacagcagattcaagatgtcaggagaaagatttagcaaacttgaagatagataaataggacttatccaattggaagaacagaaaacaaatagagaaagatgaacagggcctcagagacctataggacaccattaagcacagcaacatatgtttcatgggagtctcataagcaattgaaagaaagaaagaggggaaagaatatttgaggaaataatgcccaaaaactcaccaaatttaatttaaaaaataatcctcacatccaagaacctcagtgaactccaaataggataaacacacacacacacaaatcacatttagatatatcatagtcaaacgattgaaaaccaaatataaagaaataattctaagatcagcaagaagtaaaaaaacactcactgtatacagaggaatgaaaataagattcacaactgacttcctactagaaatagaggccggaaggcagaattattgacatattcaaagtgctgaaagacaaaaacctatcaaccaagaattctatttccagcaaaactattctgcacaaagatattctcagataaacagagactaaatgaatttgtggctagcagacccgacttacgagaaagagtaaagaaagttttctggactgaaagaaaatgacactaggtgatagcttgaattcatggagaaataaagagcacttgtaagttaattatgaagataaatataaaagacaataaatatatgtttcttttctcataactgatttaaaagacaattgcatgaaataataactttaaaatctattgttgggcttataacatataatgatgtatatgactataataacacaaagaaggagaaagaaaatggagatatattttaacaaaatttccatattttattagaagtaacttagtattaatctaaagtatattatgaaaagttaaggtgcatgttgaaatctctggaaaatttattaagaaaacaactcaaaatgtataaataaatccaacaaggagttaaaatggtacagaagaaaatatctatcttacacagaagaaggcaattaaggaggagcacaaaaatcatgagacatacaaaaaagtatcaaaatgcagatataaatccatccatatcaatagttacattagatgtaaatga

SEQ ID NO: 3814 - DNA, 1026 bp, Homo sapiens
tacaataatcatggcactggcatctgcttcaggtgagggccacaggctgcttccattcatggcagaaggcaaaggggagccagaacgtgctgagatcacatggtgagaacagaagcaaaagacggtgagaaaggaccaggttcttttaaacaatcagctctcaatgaaacagtgagacttactcacttccctcttcccagggagggcactaatctactcatgagggatcttcccgcacgacccaaataccctcccattaagccccgcctccaatattagtgactaaatttcaacatgagatttggtggggaaaacaagccatattcaaaccatagcaaataataaatattagatatcaatttttaaaagaaatttaattggtaaaatacaaataacacaaaatttaccatcctaatcatttctaagtgtacattcacattgttttgttcattaccaccctccatccacagaagtcttttcatcttgcaaaacagaaactctgtacttatttaaaaataccatttaatctagcaatcccactactgggtatatacccaaagggaaggaaatcattatatcaaagagatacctacacttatatatttattgcagcactattcacaatagcaaaaatatggaatcaaaccaagtgtccatcaatgaagtattgtataaagaaaatgcgagacatacatacacacacacacatatatacatatatacacatacacacacgcacacatggaatactattcagccacaaaacaaatgaaatcatgtattttgcagcaacatggatggaactggagaccgttatcctaagtgaaataactcaggaacagaaaatcaaatactacatgtctcacttataacttggagataacaatgatacacatggacacatagagtagaataatagacattgaagactatgaaagatggaagggtgggggagaggtgagggttgaaaaattaactattgtttgcagtgttcactattcaagtgatgggtacattaaaagccca

SEQ ID NO: 3815 - DNA, 1027 bp, Homo sapiens
atgaacaagaaataatatttggtggtgtgaagccactgaaaattcaaggttgtgtgttgtagcaatcaatctaccgtaattaatgtaaggtgatgagaaacacatgactttaagaggcaattctaattacagtaagttccttcttgataacaatgttattttcttttaaatataatttaaaaatatactattagttgtactagtagtagcattatagtaaatatttaaatgacatgtcaggtactgttctgagaagtagacattgttaaactactttaatcctcagaacaatcctataagctggttctcttatcctcattttacaaaaaaggaactaaaaaaagagagattaagtaatttgcccatggttacaaagctagtacagatcataagtttatcttactagaattttatgagattagaaaggtcagacattgttattcctgccaatttatgaatgaggaatatataaactagagctcttcttattggaagttttaagaaacctgactgaaattgacttaagccaaaatggtaatggagagttcacataactaaatagccagccaggaccttacaagacatcatcaagaccagtctttttcacattcttggctcacctgtttttgaggctgcctctttccatagcttcttatgggatcaataggactgcaggcagttccagtacatttgttttttgttttttgtttttgagactgagtcttggactgccacccaggctggtatacagtggtgcaatcttggctcactgcaacctctgcctcccaggtttaagcgattcttctgcgtcagcctccccagtagctgtgactacaggcatgcgccaccgtgcccagctaattttttgtatttttagtagagatgaagtttcaccatgttggccaggctggtcccgaactcttgacctcaggtgatccacctgggcctcccaaagtgctgggattacagatgtgagccactgcgcatggccatccagcatgtatcctttaaattcatccaagctagc

SEQ ID NO: 3816 - DNA, 1113 bp, Homo sapiens
ccagcaccatttattaaatagggagcctcaggttttaaaaaatctactaaatggggattaacaaatcatgtcttgccccctttttgaggttcctgtgagggtcaaatgagatgataatgttaaatttttgggaacactgtggctcagaacatgtcccgtggcatttcttggtgtccccactagtctacaagatcttggaagagattgatagttgcctatattttctcaatgcttacaatattactatctactcagaagatgctcaataactggaaatggagaaataaagcattgttgctgttcatcttatcaataagcatcattgttttcaccccctaaattccctgccaaaaaagtgctgttcctttagtgaggttgcctttaagctttactcattgaggctactgctactgctactacttgttactgcttattaaatacctgctacatttaagctcttgtgctagacacttaatatgaattgtctttagcactcctagcacttctgtgtggtggatgtggaacctaggctcagacaacctaggggaaacttgctcaaggacaaacatcctataattggaagagcaaggatttgaacctggtttgtctgactgcaaattctaggcttgttgcctcataccccactgccactagaaatccagcaaggagcccaattgtcctttaatagcccacagttgaggcaggtagtggcttctcctctgagtggattagaagtaattcccactttgagaacgcaggagacaggaggagcagataggccaaggtaaaaagctagggaagcaattcttctttcaaggggaaaaaatatatgtatttggcttctttttcacacatccaacccagcagaaaattggtttgtggaagatgtaggtcgtggctctggccccagcatctggatgccttatattgtacactatattaccagagtaatatcgtgcactttattagcaccagcaggactggggattcccatggggtctgttctttgctgtcagatgtgtaaggccatttaatctcctttatcagatctagttctgcctccccgatccccacctcctcttgcagagcaataaagaaaatttcttcagattc

SEQ ID NO: 3817 - DNA, 1525 bp, Homo sapiens
atgtgtgccctgctctcgttcacttctgagcctttgatatcctgggacagggtttgttgagtgaatggtggtgagtgacttagagcccttccagctttccagggctgtgattctagcattcctaggggaatagataggtgggcccagcaggaggagggcccactccttccacgctgccagccccctgccttgtccacccttgtccttctcctgatgggtgagcacattgcctgctgggaaggtatttctgccccgcatggctgtttcccactcagtgtgaaatgtcatttttgtggggctctcttgctctgcctctgagcatcctgcatttttcccctcatgtcacctactgcaaggtatgccagtgcctgtttacctgtctgggagtgccagaaggcaagatcatatctgtttttctccctattgtagctccagtccttggcagtcaataatcgatagatatttgctaaatgaatgaaagaatgaatgaattcaggattggatcagtgtcacggaagcagacaagcatgagttaggaaaagaacgtgtggtctcaagtcctggtatatctgacatctctagctcagctgatagtaaactttgggcctagcctttatttttctcattatgtttaaaacccaacagtcacccaatagtataatttcctaagtggtttcatttcagctctgctaattgaagagaactgagctctttttgaaggctgactttgtgtgtggctgtcactggtgagagtcgagactggttgtcaatcactgacaatagcttgccgttctggaataatttaagtttaggtctttctttcactcaggcgttcatactctgttatatgttttcatactgagctgagaacaatctggggtgagaaactgtcatgtgttctaggagctgaaatggagatttcttttttgatttcaaattcttatggtctgtggctcagagtagcttgaagggaagatcagattttggagtcagaccttctggactccaggtttgaatcctttgctttcccacctgccttgctagccaggtgaccttgacacagtttactcagtttctgaacctatttccttatacaattacaggggatgtaaatactttgtattggagattatcatgagaattagagagagaatgaaaagacctgggtaagggcagaccctggtaacagcagcagtcctcaccagctcctcgcactgcaggcagtttcctcaggcatctcattgtagacagcactccaaaggggctccatatggtgatcggagggccctggggagcaagcagacctgggttcaaatcctagccctgctacttcacttaccatctgggagactgcataaatcacatgcttctagtattcccttactatgaattggggataatgatacctactcatcaagttgttatggagattgaaattatgtgaactatcagcataatcaatgctcaataaatgttatttcctttctcctcctcctctctacatttcaatatacttaatttacat

SEQ ID NO: 3818 - DNA, 1028 bp, Homo sapiens
tgaaactctgtattaagtaaacaactctccactccttccccacagcccttggcaaccaccattctattttctgtctctatgaataatctgactacattaggtatcacatataagtggaattatatagtatttgtctttttgtaactggcttatttcacttagcataaagtcctcaaggttcatctatgttgtagcatgtgtcagaatttctcttaagactgaacagtattccactggtgtatatacaacacattttgttatctgttgttagagatttgggctgcttccacctttgagctattgtgcataatgctactatgaacattgatatacaaatatctctttgagactatgctttcaattcttttggatatatatccagaagtgaaattgctggatcaaatggtaattctatttttaacttttgaggaaccaccatactatttctgtagcagctgaaccattttatgttcccacaaagagtacataggctttcaacttcttcactctgttattttctttctttttaaatttgttttattttttgtttttaataacagccattaaaatgagtataagttgctatctcactgtggttttgatttgcattttcccaatgattagtgatttggggtatctttacatatttttattagacatttgtatatattctttggagaaataactattcaagtttttgccaatttatttgtttttttgttgttgagttgcaggagttctttatatattctgaatattaaactctgtatcagatatatgatttatgaatactttctcccaaaagtttgccttttcactcttttgattttgtccttttgtgcaaagaagttttaattttgatgtagtccaatttacctgtttttacctttattgtttcttctttcggcgtaatatccaagaaatcattgccaaattaatgtcacgaagctcttctcctatgttttcttttgaaagttttatagttttaggtcttatatttacatctttgattcattttgtgttaattt

SEQ ID NO: 3819 - DNA, 1052 bp, Homo sapiens
gagtcatcagagcattcacgtttttgcctaaatctacctttgtctactcagtaaatttggtttctaaacgtgaccctttcttttagcaactccatggagctaagccataaatgaagtagaaatcatgggagagacaggaaggcttttatcctgtccttgagcctaggggcttgtgccactctcccctggagagagttgcttgcctctgcctccaggaagcatgtggagggacagggcctaggtatgtggcagatgaaggtatgtactagcaagcccagtacatcacaatcagtctttggtaggcaagaagacaaatgcacaggccctacatactctgagcagaagtgtttaatcctcctgcagtaattctgctcattcgtctcttgctctggctcctgagaagtcccagaaagatgtgttacattccacatacagcatctttaaggtgcatgggtgtgggcactatcacagataaaagaaagctaaaccagtggtcgtcaaaggctctgactgtgtgcccctatcagtaaggcgtttttgaggaatcaccccatatatgtatgtttatttatgcattatgtgtattcatttattcattgcatacatgcacctctgcacctatgcttgtatgccataaacatacaaaaataaaattaagaaatgctgtattaaaataaatgtgaatagaagttctaatacgttccttccacatctgagttgattatcttgcacacctcattgaaagtgcacagcctacttagataccactgaagtaaaccatcatacctcctcgcttaggactgtgggaaggacatactctttggagtcagtcaaatctgagttttaaatctggcttctccaatctctaggcaggtaattttggataagtaatgtaatctcttgtgccttagtttgagcgtctgtaaaataaggtatgatactctgagccagaccctctgctgggtgctacagatttagagatagggtaaaagttcctttatcagtagtccaatacagacagaatttcccaggatctgtgaatgactgccctc

SEQ ID NO: 3820 - DNA, 1047 bp, Homo sapiens
gctatgccctgcccccaggggtggggtctacagaggcagcaggccttgcagagctgcagtgggctccgcccagttggagcttccccagccactttgtttacctactcaagcctcagcaatggtggatgcccctccctgggccaggctgctgcctcgcaggtggatctcagactactgcgctagcagtgagcaaggctccctgggcgtgggacccaccaagccaggcacgggatataatctcctggtgtgccatttggtaagactgttggaaaagcacagtatttgggcaggagtgtcccgattttccaggtgcagtttgtcatggcttcccttggctaggaaaaggaaatctcccgaccccttgcacttcccaggtgaggtgatgcctcgccctgcttcggcttgccctccgtgggctgcacccactgtccaaccagtcccagtgagatgaaccaggtacctcagttggaaatgcagaaatcaccatcttctgcgtcgatcaccttgggagctgcagactggagctgttactattcgcgaatgatgaatattaagagaactctttccagacactgctgcagcataaagaggaaggaagttatgtcagttaggatctaaactggaaaacagaatttacatgtattctaagtgtataaattggaggacatttaatataaggaattgactccatagttaatggaggctctgagaaggcaagaggggatgatgaggtgactcagagatcagtaacaccaggaagccactacaactcctaaactagggagtggaggtggtcttactagagccaagggctaagtcacctgggcagagctggaactatggcatgcctgccaggtgggagtcagagctattaagtaggttcaatcactgccaaagatgctgctccaggagagagggaggaggagaatgagctggctttttttctttcctcctcctccgatctcttgcctcccattggctgaacccatctgaaatcagctgatgtgggatctgggaggaagcacagtctcaggtctcagatcctct

SEQ ID NO: 3821 - DNA, 1020 bp, Homo sapiens
cttatataatgaggggctgcaacctcctgggatgggggtgggtgaggaagcagaggccagaggtcctcttaggcacgagggaagctcaggagaggggattggagtatctctggcctcttaagtacagagaaggtgggggaaggggctgctgattagaatgaaaatgtgacagtcatgcaaatcttcccgttggatttatgcatcctttgccaggattccaggaggaggatacctgacagcccccattagagccagagaaatggggaaagttacacattgttctgttaagggaagcccgaagaccagggaatggaggcatccctgctgaatttgttactgagggaatattgatttcaggagaaaaacaaataatgcagaaatgtttccactttgatgtagcacattctgatttggactgcactgtggtgaaacttccttgtgtggctctcagtattccaaagcagacataattcttttccattgaaggatgttattggtggcatgggggtggtagaaaaaatgagcttgcagttgattttgattcagctgggaaatgggttgttccaagaagtggcgaaatgagactactgaggtaggctaaggtctgggagggccttaaattgtgggctaagagatgtggtcagtgtttcagggtaatgaaaaacaatgaaagtcttttgaccagcagactgataagatcagaactgtgcttttgaggttaattctggcagcccagtggaaggtgggctgaaggggtggaaagggtccttttcctcttttcacttcattgatgagcaaatgcatctataggtgctaggctgggatgccagttagaagcctattacaatggccatataacagagaggctgaaagacctagctgaatttgggaaaggtagtgagaaaaagatagagaataatattttgagtattcaataagagcctatcttgtgcccatcattagatgcctatcacctcatttaacccttgcagcaatcctgcaagctaggcagtaatattc

SEQ ID NO: 3822 - DNA, 1100 bp, Homo sapiens
ttatgcaccaattcctgttagtacttggttgaaggctactttttttttgagacaaggttccatctaggctggagtgcagtggcttgatcacagctcactgcagccttgacctcctgggcttaagctatccttcagccccccaagtaactgggaccacaggcatgtgccaccatgcccggataatttttgtgtcttttgtggagatggggtttcccatgttgtccaggctactgctaattccctgatatttctgcttgtcccatgtgtggacagagaagtttccagtggccccagagaaccatgagacagagttgcagatactggcagttggatagagggcttgtataagtggagatggtcaggctgaggatgctgacaccgtatgctacagtccaccccttacccaggcccattgctgcccaggtttactgcatcttctcactgattcttcaagaatgtggcctgtcaaaattctaaatacaaatgaatgagcaaaaacaaacaattaaaaatactctaacagaagggctaatgggaaaacaagagtctctgctactgtgattgccactaaggccatactgataatcacatcaccctcccctctacttattctacatttcatttatccttgcccagctcttctgctaggctaagttgcttgcccagtggggtaaccaaaactttaaccctgagatgtcagaactctcggttaccacgctttcctcaggctggggtcgctgcaatttctaattcattgttattactgggcatgaaagtactaagagatgtcccagtaaatcctatgaattccagatatcctcctccagcccctaatatgtagctatgtagcaccaacctcattggcttatgataatcataatcaattacccctgccagcccagtaagtacattttaaattctgcttacctactagaatgaggagttaaaaatatccagaaagcaaacattttgtaaaagttccccaagtgtgtcactggggtagttatagtgacacagaccattccttctatccttttgttcttgaatctatgtattgtacctattaggcaaacagtgccatgtaatggcattggttcaaa

SEQ ID NO: 3823 - DNA, 1053 bp, Homo sapiens
tgtacaggttttgttttatttttatacgctttcatttttctctgagtaaatactcaggactaggatttctatgttatatggtaagtgtatctttaattttaagagaaactgacaaatagcttccaaagttctgtagcattctccattagcactggcaatgcatggaaattccaggttccacatctctgccaacacttggaattatcagtctttttatttttaaccatgctatggtgcaatcatatctcattgaggttttaatttacattcttctatgactaatgatattgatcatcttttctttggtaaagtatattcaaattttttgtccatttttatcaggttggttgctttcttattactgagttacaagtattattttcatattttttaaattttatatttaattgacaaataataattacatatatttatggggcatgacatgatgttttgaaatacgtttacataatggaatgattaaatcaagctaattgacaaatctctcagctcacatactttttatgtgtggtaaaaatatttaaaatctactcttttagcaatttgaaatatacaatggattatttattatagtcactattctgtgtgatagatcactaaagcttatttcttctgtaaaactggaatcttgtgcccttttattaacatctcccctttccccatttacccccctgctccagcctgtggtgtttaccatctattctttacttctatgagttttacttctttagatttcacatataagtgtgatatgtatcttcttgtgttttcaaagtaagttcttcatgatgaatataatattttctcctagtctgtggcacttgcaagtccagcaccatttatttcatcatggccagacctgaggttcgttaattatctctctgagcctcagttttttaatatgtaaaacggtgttataaatgtgtctacttcttagagtttgtgaagattaaaaggaatagtgcatataaaactcttagcgtaatgcctagaacttaaataagagcttgaatatcatcaactaactgttat

SEQ ID NO: 3824 - DNA, 1048 bp, Homo sapiens
tccctttacctacttctctcttgccctctctgtttctttttcttttctttctttttttttttttgagacggagtctcgctccgtcgcccaggctagagtgcagtagtgcgatctcggctcactgcaagctccgcctcccgggttcacgccattctcctgcctcagcctcccgagtagctgggactacaggagcccaccactacgcccggctagttttttgtattttgtttagtggagacggggtttcaccgtgttagccaggatggtcttgatctcttgacctcatgatccgcccgccttggcctcccaaagtgctgggattacaggcgtgagccaccgcgcccggactccctctctgtttctttatgtccctgtgctttgctgctttgtttctgcctatttctgtcctactgtcattctgttgctccctctttccctgtctctgaccctttttgtctctctttgcttccctctttctctctgtcgccatgagtctctctctgcttctctctttgtctctgcatgctggtttctgtctgtgtctccctccttgcatatctctgtgtctctccctttgtctctctccatctcttgtctttgtgtctatgcactgcccgcccccaccgccacacctctgtgttttctttctctcctttccctcctccctcctgtctcctgcctctgggaagagggcagagatcactgggcaggattggatgtcattaaacgaaaaaaaagagaaaggactccttttctcctgcttgcctctggggaatgcctaacaatgagaaacactttggtgggtaatcgataggaacaagatgcaactagacatctttgttgggcagtgcagccggcagttccctctgactggagcccctgggaatggctggcctcttgaccagcctcaaacagagtgtatcacagtgcagcggacttgaagtgtgagcccagcacatcctgacctgggggtgcctcatttccatccccccctcccctccctcccctgccctcttctcgcctggtaatacttcacaaatatcatgaa

SEQ ID NO: 3825 - DNA, 1049 bp, Homo sapiens
gtggagagagggaggtggcggggagtagcaggaaatgatcctgaagtgttaaatgtgatggtgtgtgtgaatggtgcttcatagactgaccacaggggattaggatgctcaatatggctggaaagcctaatagggcacagccgggaccaccagcccaattggaagattactgtgggctgaaaggtcttggaaactgggggaagaaggaaaaacaaggagagacagggaagaaggaaggagagtggatggactcctcctccctggacatgactgtttcctgggcactgtgctaacagtgtttcttctcttcatcttcctagccaccctgtgtgttacatatgaggaacttaacagtggaaagggttagtgatttgctcccatcatacacaccatttgaacctagatccttagggtccctgagagtgggcttacaacttttgtaacacacagcttcccactttgaatctgtggctcttggtcaaagggggttggcttttcctaacagtccgctctgggccaagcactctcctgggaaagctctgaaggagacaaacttaatctaggtaagccctgaaggctgacaagggatgctgccctgctggtccccagctgccctgtgaggctatgtgatgatcacatgatcggtcctgatgattagagagatgagacctatagaatccaggactcacatcaaagatgacaaatggcgcagcctgtctactttgctctgtaatattccactaaggccacaacttttcgacaaggattcatctgcttgtgaaagctgatcctcgaggcacagtgtcttgtcaggcaatctcaagtacatctaagagtgtacctaagaggctcttagactcttagactcacagggcttggaggaacttaggttccatgcctgcattctgagtaggtccccgagttggcttgctcagtgccagtgacatgtctcaccactcccctggatggctgcactgttggccctgaaaaagttctttatactaaacagaaacccagtaacttggctctagttctacctctgagaacac

SEQ ID NO: 3826 - DNA, 1032 bp, Homo sapiens
tataaataaatcaactggctttgtctaacccagtgttctggtgttcatttcaccaaggaaacccttattttaaaaaatgaatattaacagcttctggaaggaagatattttaggaaatgctgatgtgagcaagggtggttactaggtactcttatctaatatttactgagaaatttatttattcattcatttattagagaaagatatattgagagactcctttgtgtaacgtaatgggctgggagcaacgaacacagatttggccaatgcctgcctgaagcttataatctagtgcacaagacgaaatcaatttcccaattaatttcttttttattactgtggtgagtctacaatgaggagcgtaagatatatgtaaatttaaataatggtataaaatagatggttaggggtaaccagggaagccatgctggttgtccgggaccggggatgtcctgtgatgggtgactttcagttctaaaacaaagacagtcctgggcaaatcagaatggttgcttaccctaatagaccatgactcctggagtgccatctgaaaatcttattatggcagagagaactctgccaggccggagacctgttctctggggttgcttcagctccctgagcctgactttctgtctctggggagtggaggtgatgaagtctcctttctcttatgttttttgggaataacaagtggagtgattcctatagaaagcctttaccagatatcacacgcttcctaagcacaagggatgagtattcctttagggaaactgtagtttgtcactccttgaaggaaagcccctatttctccagaagagggttttcagagcacatctctcgccacacatccaggtttctaaatcctccagcaagaagcgtttttcacagatccaagaacagaagcacctgcgtaagttcacatgggaggtgtaaatcatggaggggagccattgagatgcttcaagacagcacttcctccaggccagagaaggcctcagcccaagaagcagcttcctgctgctaggcagg

SEQ ID NO: 3827 - DNA, 1094 bp, Homo sapiens
cagttgtggattggtggccagagcactttgcttccacatttctgcagtgtgccgttccctgctcttcaactgtcctccttacagcccaggctctgcacctcctgtcgttcagtatctggtcttccttgacccctctggctggatgcaagatccatttgcttggagctgtgagctcagcttctctcatgcaaaccttcctatctcttcctagctttggggcattcacccacaatcttggagacccagctccacagatggtcccagtggacaaccccacagtctgtctcagattctcaaactctactgaaacacatgacaaggacatgtacagaattcatatatctgtgatgccatggactcacacaggtgggtccacatggccatccacatctgtaaatgtccaccaggccaagtgcagagacattgaggcacatttttgcccatggaggcagaagcagcatccacatgcaaacccatttatgcatgcaggatgtgcccaggccgtagatacatgtacacacagactctcaagcatgcatatgaccttatgcatatgagactcagtatgtgggtgctcataccccttaggatgtggataccagtgtatgcaaacaccatatgccttgaacatgaagatttacacactgccatgcaagggccaggaaggcagccttagcctccttctccccagggtgccacacacaaaacagatttcatcacagatcatggcctttcaaagacacaggttcacaccttctccttggagccagctcttcccttgtcaagttgtctggccctaggaaggtgacagagcttatgtctaggagtccccaggcactcatacgacgacctgtcacctccacactcagctactcctctcaccaggagctctctgctctcagtggggaaggcactaaggctcaacgtaattaaatctctctcttttcacttcagcaacattgatctgtgcagggacacactcttgactccaaaggaacaaagcttttaatttcttggctggaatacactgttcttagacttgtttcgtatgtgagacataggagtgaaaattgcagcatactttctcatcttca

SEQ ID NO: 3828 - DNA, 1041 bp, Homo sapiens
tctacacttagttgcagaactactttgttcctgtcaatacttttcatgtgcctataggatttagatgataggctggttaacttagttgttaggagcatgatgctaataaatccaaggcacaaactcaacccgatcttttctataattcagatagggtgagactatcctctaaaactaaaggacagtgtgtatatttactgctatatacttataatgctttgcacattataggcattcaattaacattgacactgtacaataattatctgttcaaaggattgaaaaaaaggagaaacaatcatactctgtaaaatctgcttctgtagttgtggaaccctggacaagtcatgcaaactctctaaccctcatttcttaattgtaaaatggggacaaaaaaaatcctcctaggttgaccaatgaccaagtgaaatgatatacttaaagcatttaacacaaagtctagagctgcaaatgtaataaaaattgttaccatatactgaatgcatactttgtactattagtccattttcacactgctataaagacatacccgagactaggtaatttataaagaaaagggatttaattgactcacagttctacatggctggggaggcttcaggaatctcacaatcatggcggaagggtaagaggcatgtctcacgtggtggcaggcaagagagagtgagtaagagcagggaaaactgccccataaaaccatcagatatggtgagaagtcactcactatcaggagaacagcatggaggaaactgcccccatgattcaatcacttacctttcttgtcacatggggattacaatttgaaatgagatttgggtggggacacagagtcaaaccatatcatttatgtgtggtgctaagcatttttcaagcactgttgaaccccacagtgaccctatttatggtaggcattctattctactatgccctattatagatcacggaactgaagtttagaggggtaatggaagttactcaagggtacatggtgtatttcttaaggtttttttacttgtaaga

SEQ ID NO: 3829 - DNA, 1030 bp, Homo sapiens
ggatcaggagaagaggtacggtaacatgcaagaaaactgaaatatttgggagaatgttatttttagttagataatgttaattaatagctcaggtcaaaatcagaagtaattaaagtatatgtgtgttgaggggggaggggaattgctagagtggatgcagctaggagtagaaattatagctagaatgaagcttctcaaattactaatttacaaattacaaattactaaattactttagaaagaagtaaggtataaataaatcaaatttaaaaaactattagaacccatagagtcataataaattagcaaagaaaaggacgcctagccctgatgggatttaatttggagaattttttcagaagttcagagaacaattgcctagttactaattagttctaccttcaaaatgtagaaaggtatgttattaagtttctgattcattttacaagcataaatgattttgttttgacaatttgataaaaacaataactttaaaagaatttatggactggggtcattaattgacaatacgatattatattacagtaattatttactgtgagcaagttaattatcctcaaatgcatgagcagcatcataaaagaaaagctattaaaacagaagaggaaatttaggactcatcttcagttcctctttccttcacttctgtgtcctattcatgaaaaaatcttgactgctttaacaagtacattaagaatctgtgggcttctcaacttcgccactgctcctttcctagtaaaagtcaccatcatctcctcccaagttaccgcagtcatttcctgttgtcacttttcacctcacgatgtcacgtttcacctcaactcctaacaacctattttcaatatgtagccagagtgatcattgtaatgtcctttccttggttaaaaccctctagtggcttctcatctaacttagaataaaaatccagactcttcctatgtcttccaggcacgtaatttggccactgcctagctctccaacttcaccacatgcccctttccttaggctt

SEQ ID NO: 3830 - DNA, 1040 bp, Homo sapiens
tatgtaacaaacctgcacgttgtgcacatgtaccctaaaacttaaagtataattataatagaattaaaaaaaaataaagtagtagtttttaaaaaatcctcaaaactgagctcattgtgtggttttactaattttggttttaggcttgtgcagacataagagccagttcagtgttttggcagcaaatggagttcgttgatagcctgcatggccaacccaagatgccagaatggttatctacacacccttctcatggcaatcgagttgagtacttggatagacttatacctcaggtgagctgacaccgtagaaggcgggacattatttttactgtatcatttatttttaatgctgtcacttcttttgcttagtaaaagagagttctagcctattaactattttgattactataattatggattatcagttgtcacagaatttgactgaaaagcaaaattctgcttgtccacaagtcttggagaataaattactatgtacagttgacttttcttaatagtgaaggtttaactcctttagtatgagactttaattttaactgacttgatgaaagtttaaaactcaaggcatattaagttttttaaacatgttgatgataatttaatctttccttggtgatttaagctttttgttaaaaataccagttaatgagttgtacagaagttttgggtcaagtggatattaattgtagtagtggtactggaatttgtttttttaggaaaaaaaatcttcatgtttgtttctggttatttatttctttatgaagataagagtgaagcatttgctctctggcttttctttctgtagaattcataagtgggtcaagctgaggcggctttctgccaagtagttttcagtatcctctgaaaatcttttgatttgttgacatcattcagaatgtttttatggtttccatatcaggacaaaatggatgttaggcatctctgagccacgttacacgctctcttctatctcacttgtattaaatttggtggcttgttatgaaagcggaacatttttta

SEQ ID NO: 3831 - DNA, 1025 bp, Homo sapiens
tggctttttttttttttttttgctagccatagagagcagctctgggcctttacttttatttaagttgactttgttcctgtctacttaacagggcacctggcagctatttttaatcacctgtgataactgagtgttattagtagcatttaagattagaagtaaaactgcattttaaaaaaatgagtgaaagcaatgccacttcacatattaaattcaagttttaattgatcctttgttatgtttctggtagttattaaaactattaatcattttatttgaacctctcataagttttatggatttaatttcataaatcaaggtattactccttcacaaaagcaaaatcagttctttgaatgttaaataaatgtgattaagtgaattatcagactgcgtgcactaagaagttcccacataagggggccacagattggctgtattaagaatttcctaattttcatgtactccagtctgtcagattttccctatatgttaagtgtgttctgtgttctggttaggaaatctttgtttatctcagtaagttattcctgctttatttctaataaactttactatttttaaaatatataatatgaggaagagggcaacatcttttttttcccctatggatagctaatagactcagcactgtttatggaaaaaagtcacctttttttcaccagacttcagtgtctctttgtcataaaggtgggagtatatctggggtctctttctagacacactattctgttccattggcttgtttatgtttcagccagtaccatattatcactataactttgtagtaagtgttgatacctgaagcttctgtcctccagtgttgttctgcagaattgatttgactcttcttggatctttgcatttctatatacattttagaaatagcttattaaattatacatacatagaaaaacacatggggttttgattggaattgcattgcatttatacatgaatttggggacacttgactagtgtctgtagtattgattcttcccatccat

SEQ ID NO: 3832 - DNA, 1029 bp, Homo sapiens
tttttaaggagagtgtttctcatttgagcattaggaaatgtgaggtctggaaagggacgaaatagtgatagtaatgcaaaccctcatactttttctgtatttaaatataaaacttttcttttcaactagcttttggagtgtatgaggaagactctgagcaaagtgaccaattgctttatggctgaagaattcttgactgaaatagaaaatttgttcctttccaattataaaagcaaccaagagaatggagtaaccgaagagaactgtacaaaggaattgttaatgtgattattttaaagttaagacattttaatcttgacacagtagatcttactttcaaagttataaacttgaagtgattgtagttaacattggcacagctttggtattttttctctatttcacaaaatccaaactttgccacataaatcatgtgaaaaggaagagatacaaatttgttttcatatagtgattatcagagtgttctgcaaaccagggtccaccacggtgttctagtcctttactgagcaatgctgtaggctgtgaaactaagcaacctggtcggctttactgttgtgttcagcttgggatttggactatgtctctaagtcatttcttccctgaactagtcatttatgttccattgtggtatctcctatttcatttaaaagcacttccattctttccatatattctgctgagatttgtttatggctataaatgagatatggatgggtggtcactgagataattaatatggtttagaactactgattaataaatctaacaggagaccaggagaggcatgacaagaaaatcttaaaaacaggaaaaacccaaaggagagaactaaattaccagtttctaatcatagatactatcttccatttcattgtatagcagtagtatcataagatatgccattttctcagctatctgaaaatttttaaccaattttacacacataaaataattagcttcaattgtgagtccacttacattagtaggtgtgataaaacctcatttaac

SEQ ID NO: 3833 - DNA, 1058 bp, Homo sapiens
tttggagaagaggaaaattgagcaattaaataaaaaagatcagtcatcatcatcaggcttgctgtcccctttccttccaaacacctgaaaaaatgcctttttagagcatattgacatttaagctatgctttatttcattgtgaggaaataattgtatttttccccttttttttttccatgccttctgatttgctggcattttatttattccttaccatggtagaaacccagttgaggcagtattatgtataagttaaaagcagaactctcgagcctgactgcctgggttcaaatcctgccaatgccttttatatctgatcatgagcaggttaacctttctatgacgtagtgtcctcatcgaaaaaaaaaaaaggggggggtgaataatggcagctacttcatttaagtgatttcacattaagttttaggtggcacatagtatgcattataagtgttactatgatggtatcagcctttgctagtgaatcagctgagcttttaaaaaaatgctatagatgcatttgcatgggggtcttgaaggatatgtgaaaaattgctaagataactcatcgtttggtattttttcctttctagatgaatatatgatgttcaccccttgggcttctttctttcctccagagtttagtataacaactttgactcaaagcagttgctgcctccccagagttcatcctatcctcttgtctagtcttagattagctcttctagggaggtggaatgagtttgggctcagaagtgaggcaaacctgctgggttttaacatctgtgtcctgccactttgctagcctaaatatgatttttaatgtatctcagcttcagttttctcacctgttaaaaaaaaaacaataacttacagcattgttgtaagcttaataacctgtatatatatatatttttaattatcactaggatggcaatatgtcttagtttgtctaggataatcccactttaaacctgcggttcaggcataattattaatagtaccttctttcattcaaaaagtctcttggtttaggtgataaattacgtgatcatcc

SEQ ID NO: 3834 - DNA, 1042 bp, Homo sapiens
agaatctcatgcttttttaacttacgaattgtgaataataataatacctccctcaaagtattgttgtaagaaagaaacgagatagactatataaagatgctagtactaggtattcagtaagccttgcatgcacaaagtactcaaacttgagttctctttcctcctccgcattccctgccctcaacttctcacctgagtactattctaggcacagtaattagtaattcatccttcccataaggggcttgtatttctaataggaaagacaaaacctatggtaagttcaataaggttggtcccaagaattgtaagtttctcccaaaggctgtgatcagggcaggtttcgtagagtatgtggggtataatctgatctgaaggatctgcagaagaatctcaaaatggagatgaatacactttaggctgagggaacaaagctggagacatgggaaaatactagatatattctggaaaaggtgcatagttcatttggactagggtgtaagttggtcgtagaaatggaatagagatttactttattttataaacacttataaagggcttactgtgtgtcagacaatgtcagtattttataaacattaactcagtcttcacaataataccatgacagtggtattattgtttactttttattattaattttattgttcccatttttaaagatgaggtaactgaagcatgaaagctttagaatttgcctagggtcaccaagctagtaaataactgggccagacattctagatccagaatctgttcttaatcattactctgcactgtctctcagttgtgaaagaaaactcaacacagtagaatatggtaagtagaaatgggaaataaaagactcaggtgattctgacgtttttgaacctgggtgactggtaccattgattgaaatgggcaaatcaagagaaggagtaaattttcagtttgggatggccgtgtcttttgaaacaattttttaaaaatactgtccagtctttctacatgttggtagcaaaaaggaagcccatctatatcaatttag

SEQ ID NO: 3835 - DNA, 1070 bp, Homo sapiens
gcctcagcctcctaaagtgctgggatcacaggcgtgagccaccgcgcctgacctctactcttttattgaattaaaatgacacaaccattcatagctacaaagtgataaggtacataaaaccttgtaacccatggtttaagaagagtatattctgtgtttgtctatgaaagggagacaactaacaagaagattttctgtcagatatgattttcttttatattgagctagatagaatttagtttgcccgggaatctgtccttcatttcagtgtctttgttttcccaaagccttgaatattgagactagcttttcaggaaaactaaaggatttttgcttcctcagccaccaaaagaaaaattaaatcatgttttctgtattagactgccaaagttagcaaactacccattttctaaatattccatttattaagattttcttataataacagcattacttttaatttgaggggtgctcagtagcacatcaaatgtatgatcgtgaaataagagtcatagaagccccactatagtcagtgtacatgtgtcttactgtttaacaaatgagtttcacaaaataatagatggttttatctttcctgaattccaatagaacaggctgtgtataataggccacaaacagttgacaaagtacgaatcagagacagaaaagatgcagtagaagcataccaacttgcccagcgtctgcagtctatggtaagcagtcatctctctcagtgatctctccacattgctgcttactctgtttagtgtggtttacgtacttaccttgagctgtttaataaatgaccatttagtagaaaaacatgtttcctcttgtgtttcaccttagcaattcgcttttctgggtttcattcaatttcatgttgctttctgaggcaaaaacaaacctaaaaacccttaaaatgtactagcaaacttgatgcagaagcataatgttttcctaaagtggtcttgggatgcttcgttttaatttataaatctaatgtgtcttttaaaaatatatagttcagtttttttttctctcattgatttttcttttaaaattcttaa

SEQ ID NO: 3836 - DNA, 1033 bp, Homo sapiens
cacattgcctgtaatcccagcactttgggaggccgaggcaggtgcatcacaaggtcaggagatcgagaccatcctggctaacatggtgaaaccccatctctactaaaaatacaaaaaattagccgggcacggtggcaggcgcctgtagtcccagctattcgggaggctgaggcaggagaatggcatgaacccgggagctggagcttgcagtggcctgggattgcgccactgcactccagcctgggtgacagagcgagactccgtctcaaaaaaaaaaaaaagaaaagaaaaaaaagaaaagcgcattagaggtataatgtaccatttacatgtattcagtttaataacactgtatatttatccttttttgtgtgtaccagtgattaaatttttaaatcttaatattatggggattttattttgatttttaataaggtcaaatgcggtctggataaagaaacaccaaatcagaagaccggccataatcttcaagttaaaaatgaagataaagggacaaaggcatggacaccatcatgtttaaggggacgtgctgatcccaacttgaatgctgtaaaaattgaaaagttatctgatgatgaagaagtagacatcacagatgaggtggacgagttgtcttctcaaacaccccagaagaattctagcagtgatctcttgttagactttcctaatagtaaaatgcatgaaaccaatcaaggagaattcattacttctgacagccaggaagctctcttttctaagtcttccaggggctgtcttcaaaatgaaaagcaagatgaaacactttcaagctcagaaattacactgtggactgagaaacagagcaatggtgacaaaaaatcaattgaattaaatgaccagaaatttaatgaattgattaaaaactgcaacaagcatgatggaaggggaataatagttgatgccaggcagttgccttctccagagccttgtgaaattcagaaaaatttgaatgataatgaaatgctttttcattcttgccaaatggtagaggaaa

SEQ ID NO: 3837 - DNA, 1031 bp, Homo sapiens
ttggtggtacttatggggactacatttgcatggtttaaaattcaaaaggttcctaaagttatagggtattaagtcttctcactctcatcttagccttcagttcgcttcgcccggggtaaccagtgtcttctttgtgttttcttccagagatatttgtccatatataagtaaatatgtatttatttatatagagatatgtagacctctgtctatttacattaagggagattttaaacttggaatgttttcctacacaacaagcatggaattattagttgtattttcagcttttttttaaaccattgataaagtttgcttacagactgaattctctcaggcttgggagtagggacttgggtggtactgattgatgaagaaaggcttttttccttcccttttttgggcatgggactctccctttgctctattttgaaactggtgaatattttctttgctcctttttttatcttctttttttttttttaagaaacaaggtctcgttatgctgcccaggctttgaactcctgagttcaggtgatccccttgcctcagtctcctgagtagctaggaccacatacatgtgccactgtgcctggcttctttgctcctcttgttcgtgttctttccccaatttttctagtgcccaagtccctactcttctactaatcatatcttaatccagatctgtcctgtctccacaaatgctccatgctacctaccaatgttatctatttgtcttcatcccacaataaagataagtagtttttcatcaagttgatctcagctaggtgttaagagcaatcttaaataattaatttatatttactaataattttcagaagcactttgagtttaagaaattgtccatatgtcatattttctaatgagtatcagaaatttacttaaattaaggtttatcacttgggtgagatctttgaaaatgatttgctaccgtaaggcatgactgcctggcctgtaaatctgacaaaacttttcctaagttgtggctagttttttgtttttttcatagt

SEQ ID NO: 3838 - DNA, 1673 bp, Homo sapiens
aaagtttacgaatttgtgttgggccacatttgaagccgtcctgggccacatgtagcctgcaggcagaggattggacaagcttgatttaaacatggaggctgtttcttgtagtcacttctaattgggaagacaagggaactattaataacatttatgtagcacacgttttgtataagtaatgtaaaaattacatgactgtaatattgtttaaaaagtttccttgatagttacacagatattatttatctaaaaaatcacaaccggaaaaagtctggcttgatcaaaaggaagatgataaaaaatacatgaagaggtaaaatcaatttataatatttctaaaagtctggattgtagttttagaaacctcacacgcttccttattttcttttttcatgtgatgcagtctgcagaaaacagcaaaaatcatgtatgtacttatattttatatttataaatctgttttcattagttaaaaattatggaataatttttttttaattatagttggcctgtggaaaagccctcttgaccttaaagtagatataaaaacagtttttttaataaagatgttggagtggcacaagtataattttatggtgttatttacttgccagaatttctttcatggccctatgtaggcaattctttcagattgtgaaaaatatggttgtccaggggtttatggggaaattttgagaagctgttatgtgatatattggaattgacttgatttcttttactctgtcagttaattttcacttattttcaacaaaattttcatttggatttgtggctttcaaaaattatctggagaaattaactattttaaaaatatcctttccctataattgaaaaaacattatttagcatttatgactttggaagtttatggtcctttaaagggtggtttacgtatttgcaattgcccaagaggttgagtactgagcagccttttgcttttgtattttgctgaataaacaatgaaatgaagttaacaaaaggattaatgggttgcttaaattagtgagcttcatcagttttatttttaattccttgagataatgaattttaaaagcaataaatacaatgctgtagtttttgacttcttttctaaatatttacatggatttacatgaaagaactaaagagatagtatttgtggaaccaatttaaactcttacatgcctttcaggatttgggaatgtattaacacctgctgctttgtatccagtctaagggagcctatttgtttgttatcacattgacttcctttgatgtcttttagtgttaccctcactcagacccaaggattatgtcttttggggctcccatcatcctgagctagagacacgtgacagggtaaatctctgcccccaggtagaggctgtagccttcttgttttgtttgtttgtttatttttaattcctagactcaaagtattgaatttagcccatggctatctataacctttagttacataaatatggaatgttccatttcagaaattttttttgcaattcctttttttcccctcagggtacactctcctacaaaaccagccagttactcagtaaagtggacgatagaagaaaaagagctgtttgaacaagggctggtaaatagagcaattttaaatttttagtaaaataattctagaagcaaatattggtaaa

SEQ ID NO: 3839 - DNA, 1035 bp, Homo sapiens
aaaccttgaaagctcagaactcggagctggcgtccacggccaacatgctcagggaacaggtggcacagcttaaacagaaagtcatgaaccacgttaacagtgggtgccaactcatgctaacgcagcagttgcaaacattttgaagagagaccgtcgggggctgaggggcaacgaagaaaaaaaataacacagagagacagacttgagaacttgacaagttgcgacggagagaaaaaagaagtgtccgagaactaaagccaagggtatccaagttggactgggttgcgtcctgacggcgcccccagtgtgcacgagtgggaaggacttggcgcgccctcccttggcgtggagccagggagcggccgcctgcgggctgccccgctttgcggacgggctgtccccgcgcgaacggaacgttggacttttcgttaacattgaccaagaactgcatggacctaacattcgatctcattcagtattaaaggggggagggggagggggttacaaactgcaatagagactgtagattgcttctgtagtactccttaagaacacaaagcggggggagggttggggaggggcggcaggagggaggtttgtgagagcgaggctgagcctacagatgaactctttctggcctgccttcgttaactgtgtatgtacatatatatattttttaatttgatgaaagctgattactgtcaataaacagcttcatgcctttgtaagttatttcttgtttgtttgtttgggtatcctgcccagtgttgtttgtaaataagagatttggagcactctgagtttaccatttgtaataaagtatataatttttttatgttttgtttctgaaaattccagaaaggatatttaagaaaatacaataaactattggaaagtactcccctaacctcttttctgcatcatctgtagatactagctatctaggtggagttgaaagagttaagaatgtcgattaaaatcactctcagtgcttcttactattaagcagtaaaaactgttctctattagacttta

SEQ ID NO: 3840 - DNA, 1048 bp, Homo sapiens
caagagaagaaggacgtgcgctcagcttcgctcgcaccggttgttgaacttgggcgagcgcgagccgcggctgccgggcgccccctccccctagcagcggaggaggggacaagtcgtcggagtccgggcggccaagacccgccgccggccggccactgcagggtccgcactgatccgctccgcggggagagccgctgctctgggaagtgagttcgcctgcggactccgaggaaccgctgcgcacgaagagcgctcagtgagtgaccgcgacttttcaaagccgggtagcgcgcgcgagtcgacaagtaagagtgcgggaggcatcttaattaaccctgcgctccctggagcgagctggtgaggagggcgcagcggggacgacagccagcgggtgcgtgcgctcttagagaaactttccctgtcaaaggctccggggggcgcgggtgtcccccgcttgccacagccctgttgcggccccgaaacttgtgcgcgcagcccaaactaacctcacgtgaagtgacggactgttctatgactgcaaagatggaaacgaccttctatgacgatgccctcaacgcctcgttcctcccgtccgagagcggaccttatggctacagtaaccccaagatcctgaaacagagcatgaccctgaacctggccgacccagtggggagcctgaagccgcacctccgcgccaagaactcggacctcctcacctcgcccgacgtggggctgctcaagctggcgtcgcccgagctggagcgcctgataatccagtccagcaacgggcacatcaccaccacgccgacccccacccagttcctgtgccccaagaacgtgacagatgagcaggagggcttcgccgagggcttcgtgcgcgccctggccgaactgcacagccagaacacgctgcccagcgtcacgtcggcggcgcagccggtcaacggggcaggcatggtggctcccgcggtagcctcggtggcagggggcagcggcagcggcggcttcagcgccagcctgcacagcgagccgccggtctacgcaaacc

SEQ ID NO: 3841 - DNA, 1032 bp, Homo sapiens
atgtgggacatatactaaaatattattgttgcttatctgaaattcaaatttaactgggtgacctgtatcttttgttttttgttttgttttgttttgtttttgagacggggtcttgctgtgtcgctcaggctggagtgcaggggcaggatctcagctctctgcaacctccgcctcctgggctcaagcgattctcctgcctcagcctttggagtagctggaattacaggtgagcaccaccatgcctggctaatttttgtatgtttaatagagacaggggtttcaccatgttggtcaggctggtcttgaactcctgatcttgtgatccacccacctcggcctcccaaagtgctgagattataggcatgagccaccacaactgtctgtgacttgagtcttatctgggaattattcctaaatggatccagttgtcttttaagtgcaaagtccctgacgtttggggtattcatttagctaatcgcagagcccagtgttagggcctcttttgatcctaaggttactgaacaatggtagggaagggaatcctattagcaagtgtcccactttgtggagtacccatcatttccagtcgctttacttagacaattactgcttcagtcttgagacttgctgctccaagtgttgttatggatcagcggcgttccttgttagaaaggcagaaagaatctcaggcaccactctagacctacaaagtcacctgcagtacaggtgactaacatgtacgttaaagtttgaaaggcattgggctaggctatttggggtaaggaatagtcaagtattccttgaaaaaaagaatcactagtagacttgatttttttctagactggtttaggtgtacagcggaattgaacagaaagtacaaagttcctgtatactcttctctaccttcacctagttttccctattacaaacatcttgcattagtgtactacgtttgttacaatggatgaaccaatattacattattactaagtcaagtccatagtttacactgaggctcactctttgtgatgt

SEQ ID NO: 3842 - DNA, 1049 bp, Homo sapiens
cacccgccttggcctcccaaagtgctgggattacaggcatgagccaccgcgcctggcctaaattttttattttcttgtagagaaggggtctcactatgttgcccaggctggtttcaaactggcctcaagagattcccctgccttggcctcccaaagtgctgggattacaggcatgagccactgcgcctggcccctattttcttgttgttgagtttaaaaggtttttttgtatattttgtgtaacagttctttatcaaatatgtcttttgcaaatattttcccccagtctgtggtttgtcttttcattctcttggcagtaacctttgcagagcagatattttgaattttaatgatgtccagcttatgaattatgtctttcatgaatggtgcctttggtgttgtatctaaaaagtcattaccagacccaagagcatctagattttctcctatgttttcttctaggagttttatagctttgtgtctcacatttaggtttgtgattcattttgagttaattatcgtggagggtgtaaagtctgcatgtaaattcactttttctatgtggatatccagttgtcccagcaccagtggttgaaaactcatcctcatttttaaacttatttcccccttattcattatgacaggggaaatagcagcacgtccaccaagaaagaagcccagaagttatctttgatgccattttctcccttccttgggtggatcaccaaacctttaattccacctcataaatactctgaaatcattacttcatcctcattgcaaccctgctatttcaggctcctgaatatctctcatctaggatcctctgataaactcctgccttggttacctggccagagctccaccttcctctccgtcacccttcctactcctaccataccagactgatggttccgaaaagaaagcgatcatctctgtctcttgcttaaaaccctcaagaagctacctatgtcatttaagataaaatccagattcctttttctggcttaaaaggtttatcctgattgagtcccagccaccctgccctg

SEQ ID NO: 3843 - DNA, 1028 bp, Homo sapiens
tagtagagacgggatttcaccatgttggccaggctggtcttgaaatcctggcctgaagcaatcctcctgccgtggcctcccaaagtattgggattacaggcatgagccaccgcaccccacctgatagatacatttaaaaggaaaaggtaggatgccatattagaggtctggcatccaagcagcatgggatgataaaagtatagacttattctgagtcctgagtgcattctgtttctcatcccttaatttgtgactgagcacgtaaccattcttaatccctctgtcttcatataaatagaggtagtgacacgtgtcaggtaatgttgaaagattaagtggcagatactaattatgtattgaacacattttaaaataatgggataatggcatcaagtactggtgaggtctgtctggaacttgcaagaggttctgcacaactgggctatagcatggttatttcttaaataaaatgccagtgggctcaaaagtctcttttacaaaaggagggtaagacacttcgtttggacattgtttacctgtttttcttattatctttatccgtatctgtagttactggatgtaatatgggccaaaagtgtctttttttttatgaagaattagtcttattggcaccttcactcttttaagactctatgtaagaaaaagccgaaatgttacagattttgtttttgttgctttttcatctaaagttcgctggagatagttaataagttttaaaatgttgctgtgaggcagctgatcagcctactttcagcctaaattatggttaattgcaagcaatcactatgcatacaacagtgttgcttttaacctgtcaatgttatcagaatatgccaagcatgtggagattaaaacttgaaaaatgattaaggatagagctatttgggctgcatatgccaaagaaaaacgttttaccagaatactctagcaagtgtggtgtttggaactttttatcatgtgagctaattttgtgtttaagaaggtatgattatgaaggctcaagatcc

SEQ ID NO: 3844 - DNA, 1049 bp, Homo sapiens
taataaccatacaagcagcagaaatttagcataatgtctgaaacatttatgaattttataaatacatttaacagactggtaaagtatgtttcatgagtttgatatttattataaaccactctaacactgggttatatactgctttgtattagtttttaacttttaaacaatggatttgacttttcacacataaattttttgaggaaaaatgacttttattaatctgctatagtaccagttatgttaaacagagtatgcccttaaaaatttttgctgatttgaaactgtatgcagtatgccttatacaaagtgtggctttgtgcctagtgcaagcaagatgagatgcaaaatgtagtttttaaaaaagtgattgtttttatgtaggacctgttttagtccatttggggctataacaaaatactttagactgtattatttctttttgttttgttttgtgtttttttttttttttttttttttttgagactgagtcttgccctattgctcaggctggagtacagtggcgcaatctcggctcactgtaatctctgcctcccggcttcaagcgattctcatccctcagcctcctgagtagctaggattacaggtgccaaccaccacacctggctaatttttgtatttttagtagagacagggtttcaccatattggccaggctggtcttgaactcctgacctcaaatgatccacccaccttggcctcccaaactgctgggattacaggcattagccactgtgcatggcctagactagattatttctaaaccatggaaaattacttcttatagttctggaggctgggaagtccagtatcaagacaccagcaggttcagtgtctggtaaggactctctgcttcatagatggtgccttctatatgtgcccacatggtgtaaagggtaaggtcattaatcccattagtggatggtggagccctaatgacttaataactttccaaaggccctacctcttaataccaacacatttggggttagacttcaacataggaattttgtagggacacaaacattc

SEQ ID NO: 3845 - DNA, 1065 bp, Homo sapiens
tatgatcagtttagactgctttcaaattgagggagattataataaatccatttcaagcatagccaaataagatgggtagccttattcttcatgtcatttaacatatttaacatttgatgttgacatcatcagttttagaggagaattcctgggcttaagcgatcctctcatctcagcctcccaaagtgttgggattacaggcatgagtcactgtgcctggccctggctcatctttttgtttatttttctttccttccccattcttgccatgactttctctctttcttttttttcttttctttctctttctttccttctttcttttctctttctctttctttttctttctttctttctctcttcttccttccttccttctttccatctttctttctttcttttttgccattaaatattattttccagtgagtagcaatgtgtttctgttggactgtgatcccataaacgtatcgggcatggattcaagacctataaaaacatactgtagtctagttatagtttgtctttgaacagaaacaatacaaagtataatgcccatattgctaaagtaagctttacatgttgctatgtttcctgaaaatacttttatgagtttgtctatttgttattaaactttggaattttctatcttttgttcctaaaaatatacagataatatgaatgatgatgcatggcatgaaataatacatagaatacagtccagaaaatctaaatcagtgatacatgtatagcataccatctttcagctgtgggtaactattgtatatataactactatatatatatatatggttattcataaggtagttttgaatatttaaagacactcattattttgtgccatatatatatacatatatatatatatatatatatatatattttttttttttaagttttttttgagatggagttttcgtcgcccaggctggagtgcagtggcttgatctcggctcaccgcaacctccacctcctggattcaagcgtttctcctgcctcagcctcctgagtagctgggattacaggcacacaccactacgcctg

SEQ ID NO: 3846 - DNA, 1025 bp, Homo sapiens
taaatatatttgtgtttattgcttgttaccaccagcctgtaagctacacggggatagggatctttgttgcttttattcattaatatattccaatagcctagaatagtgcctgacacacaggaggcatctaaaaaacattaactgagtgaaagaatgaaccaattaacaagtagtagttaataatttttttttctaaaatgttcacattggaaatatgatactcagattttaattttttgcagaaatggctattcctacaaagtggcagtcgcattgtctctttttcttggatggttgggagcagatcgattttaccttggataccctgctttgggtgcgtatgtttcattaaaaaaaaatccttatgaaacctatattttagttcattgtaggtgttcttatggattaaatctctgtgtatttattataagttctatataattggagttgagtagttaatgttcttctgtgagtatagagctatcaattagcccaacagttcagcttaggtaagaaatactgacttttcctatgttttcacctttatgaaaacacacacaagatagtggaggcatttacttacgatagtacactggaactgtcactgctagtgctgggcacacactggatgtttagttaatgttttacgaataaatgtacatcctctaccactccaaaaaatatttccttctgcccaaatctctttcaccattgccctgggattagaaactatgcacttctttcagaacaagttggggttggaactttggtgatccacttgagctggggtgggagcctgacttctatcacccttagcccccctttctatatcttccttctggctgtaatcacatttactatagttactaatgcttatgaaaactatttacattttatgatagcttttgtttaaacagtactttcacatgcctgcccttattgaagacttacaaccctctgagtttatcatcctctttaaatcctctttaacaggtaaggaaactgtcaccagagaggttaaggga

SEQ ID NO: 3847 - DNA, 1031 bp, Homo sapiens
cagtttcttgactttttctgccttcagtttcctgttttccagcacccaacataacttgtaaggattccagtggcaatgaaacacattttactgggaacgaagttggttttttcaagcccatatcttgccgaaatgtgtaagtacattactgaaacttaaattttcagattacttgcctatattatatcttcattgcatgaagagaggagataatttatggggactatcctgaaaatgtatcttttatctttttgcttgtgtcagaaaacctttattttaagtgtttgttttttggtttttgagataaggtcttgcttagtcactcaggctggagtgcagtggcatgatcacggctcacttcagcctctgcctcccaggctcaagcaatcctcccacctcagtcctgtaagtagctggagtacaggtttgtgccaccatgcctggctaacttttaattattttgtagagatgagatctctctatgtttcccagcgctggtctcgaactcctggcctgacatgattctcccatctcggcctctcaaagtgctgggatttacaggcatgagccaccacacccagccaagtgtgtatttttttttttttttataaatgcaattcaccaatcaagtagagctgagtagtccagtatgtgggacaaataaagactataaatggcctcgtgccatgttaattcaggtcagttagtttatgccactaattgagttatgaaaaaattgtcttcaaaatgtgggagatttctagagtacaaacagcaattgtgtacctattgtatcagaaaaatgctaattaattttttgcacataaagggcattttaaacttggttttattctttgtgataaatatggatgatgaatggtaatgttaaacagaattcaaaagttatcagtttggctagccagacacagtagtatatgcctatagtcctagctacccaggaggctgaggccagaggagcccggaagttcacgtttagcctgggcagcatagtgagacactgtcttttataa

SEQ ID NO: 3848 - DNA, 1099 bp, Homo sapiens
tattttttatctttttatttggcgatagtttcaaacctaccgaaaagttagaagaataagagtagtataaagcactccaccctaggctgagcgtggtggctcatgcctgtaatctcagcacttggggaggccgaggcaggtgggtcacctgaggtcaggagttcaagaccagccccaccaacatggagaaaccccgtctctactaaaaaaaatacaaaattagctgggcgtgctgacgcatgcctgtaatcccagctacttgggaggctgaagcaggagaattgcttgaacccgggaggtggaggttgcagtgagccaagattgcgccactgcactctagcctgggcaacaagagtgaaactccgtctcaaaacaaacaaaaacaaaaaaacccacaaaactccatccatataccctttacccagattgaccaattgttaacatactctctctctctctctctctctctgtgtatatacttttttctgccactagaaatacttttgtgtttttctgtagagatgttccaggtcagatgtggtggcccatgcctgtaatcccagcactttgggaggcttaggtgggcagatcacttgaacccaggagttctagaccagcctgggctatgtggtgaaaccccgtctctacaaaaaactagccaggcatggtgacgcacatgtgtagtcccagctacttgggaggctgataactgagtcagagaggtgaggctgcagtgagccctgattgtgtcagtgcactctagcctgggcgacagagcaagaccctgtctccaaaaaataaataaataaaaaataaaacaaaaaaatgaaaatagaaatattttcttaacatgcagttcagttaccaactttagtaaatttaatttattaatacacatgctttaatccatattcttattttatcaaatgacccaaataatgcctttttagcattttctcccagtacaggatcctaaaatcagattttacatttagttttctttaaattggtgcatttccacaactttctttgtcttttatggcattgacttacatgtttgatgactacagcctccctttattttaatagaatgttcctc

SEQ ID NO: 3849 - DNA, 1031 bp, Homo sapiens
ccgctcctgggcggaggcggaagcggaagtggcgagaaagtgtcggtctccaagatggcggccgcctggccgtctggtccgtctgctccggaggccgtgacggccagactcgttggtgtcctgtggttcgtctcagtcactacaggaccctggggggctgttgccacctccgccgggggcgaggagtcgcttaagtgcgaggacctcaaagtgggacaatatcctctgtggagaacacccccccatggaggcgaggtagagttggggtcgcaggtgggtcgctgccgtcaggactggctagggctgtactgagtgaaaacgataatctgatctgtggcttctaatgactgaaggatccctgaaggtgaacagagttgtggagatgggagggccagaggccaccctttgtgatttccttatgattttactagtcattggcgcttcctcttctgatccactttttttttcttttttatcagtgtgcttacttgttcagtaaaacatgtagatcctgaagtatgccaggccccgttctagacactagtaatacaaagatggatagtctcttaccctggaaatgtttgccaactcttcctagggggaagacaagtaataacgatctagccaatgtgttgcccatttatcattaactttatgtatattatgcatattacctcatgtcatcttcaaacttcatgagatggtagactgccagacaaatttctttctgttttctttttttgagacagggtcttactctgtcgccctggctggagtacagtggcacgatctcagctcactgcagcctccgcctcccgggttcagtcaattctcctgcctcagcctcctgagtagctgggactacaggcatgcgccaccacacccgggtaatttttgtatttttagtagagacggggtttacgccatgttggccaggctggtcttgaactcctggtctcaagcgatccgcatccccctcaccatgaaccaccgcgtggggactcagtggataaatttctgttgcactttgc

SEQ ID NO: 3850 - DNA, 1040 bp, Homo sapiens
agataagcagaaaggttacattagacactaaaagctagcttttttcccctccctaattacaccagctactattaaactttgtgttgttaaagaattataaatattccatcatggtccacacaagactccaattttgcttactttcagaactctcctctactttggaaagctcatcttcttgtactggcacactgatgtcttgaaaatcttctcttctttctgttaaactttcacattccaagcaacgcgtccttaataccagctgaccttgaaataatttctccactagctcaaaaccaatttgttcttcacctaaaatgaaaataggaaaatgtaagtctatacagattagtttctcattatagtccaaataaccaattttccatttaaataaagtatatcatgaataacagttccattttcatagatcagcttattagcattattagcttattagaggtaccctattaatgaaatttaaggtccctgtaaagataaaactgactatgaaattactgtctttaaaagaagtcagttgtaggccgggcacagtggcttaagcctgtaatcccaagactttgggaggctgaggcgggcagatcacctgaggtcggagttcaagaccagcctgaccaacatggagaaaccctgtctccagtaaaaatacaaaattagccgggtgtggtggtgcatgcctgtaatcacagctactcgggaggctgaggcaggaggatcgcttgaacccgggaggtggaggttgcagtgagccaagatcatgccattgcactctagcctgggcaacaagagcaaaactctgtctccaaaaaaataaaaaaaataaaaaataaaaaaaagtcagttgtattgtaactcccttcctacagacacctccccatagaataaacccagaataaggatgacatttttggtaaaactattcactatatcaatattacacattttccctgatatctgtagatctggacaaaactaggtaaaaatctagttcaagtatcgtgtaacttacagttatgcaccac

SEQ ID NO: 3851 - DNA, 1036 bp, Homo sapiens
tacaaaagctctttagtttaattgagtcctgcctatttatctttgtttttattgcatttgcttttgagttcttggtcatgaaatatttgcccaagccaatgtctagaaggatttttccaatgctatcttctagttatagtttcaggtattagatgtaagtccttgatccatcttgagttgatttgtataaggtgggagatgaggatccagtttcattctcctgtatatggcttgccaattatcccagtatcatttgttgaatagggtgtcctttcctcactttatgtttttgtttgctttgtcgaagatcagttggctgtaagtatttgggtttatttctggcttctctattctgttccattggtctatgtgcctatttttataccagtatcatgctgttttggtgactatggccttacagtatagtttaaaatcaggtaatgtgatgcctccagatttgttctttttgcttagtctcgctttggctatgtgggctctttttggttccatgtgaattttaggattgttttttctaggtctgtgaagaatgatggtggtattttgatgggaattgcattgaatttgtagattgcttttggcagtatggtcattttgacaatattgattctacccatccatgaacatgggatgtgtttccatttgttagtgtcgtctgtgatttagttcagcaatgttttgtagttttccttgtagaggtctttcacctctttggataggtatattcctaagttttttgaggttgttttttttttgcaactattataaaaggggttgagttcttgatttgattctcagcttagttgctgttggtgtatagcagagctactaattaatgtacattaattttgtatcctgaaactttgctgaatgtatttatcagttctagaagctttttggaggagtctttagggttttctaggtatacagtgatatcatcagcaaacagtgacagcttgacttcatctttaccgatttggatttgctttatttctttctcttgtctgattgctctggc

SEQ ID NO: 3852 - DNA, 1041 bp, Homo sapiens
atggttgcttgagctgcggccatcatgtctgtatttcattcagtgaaaagaaacagcagggacagagtacatttctttttttaagggcatgactcagaagatgtaacttctcttttgttcacctctctctgtagccggattcaaagtcttcagctaaaattcaggatttcaattattaaagaagaaaagaatggttatttgtgtaccaccaacattttttgctctaggcaccactcaatttttcagccttatctctagttattttctacatgaacctcaagtcaattcaaatttacttactaattttcctaaaacacaccttatgatttcttgccattgtatcttactcctgttttttctcatttaaattatatttattctttttcccccttttcttattcaaatcctgcttagctccttcttgaagccatcctagatcttatgttatcatttttttatcttttaaaactttacttatacatacagggaggcctttatttatacatagggaggcctgtaacatccataactaaattgcaagtacatctctattttatttgtttatttttaaattgcagaccgtttctgtaacggaatccaaagagagcattcttggtggagtgctaaaagtgctactacacagcatggcctgtaaccaaagtgcagtttatctacaacactgttttgctacacagagagccttggtttcaaaggtaggttattttgtacctgcagtgttgtcagactttgttttttttattaacattgtctaagatcatttgacacattcattggttaatatatgtagtaatatattaatgaatatgtgtagttaaaatttaaataataacctaagacccttaattcttctttgcctctctactgctgcctgccttttagaatttttcatttattcgaatcacctttaaccagttctggtttgaaaaacagtaacttggatgtggagaagggcctgaaattaatagccaatcttaaatatggggcttctcttgttttctcttcacttggttctgtttttat

SEQ ID NO: 3853 - DNA, 1022 bp, Homo sapiens
tgcatatggctaggcggttccgaacaccatttattaaatagggaatcctttccccattgattgtttttgtcaggtttgtcaaagatcagatggttgtagatgtgtggtgttatttctgaggcctctgttctgttcccttggtctatgtatctgttttggtaccagtacctgctgttttggttactgtagccttgtagtatagtttgaagtcaggtagtgtgatgcctccagctttgttctttttgctcattgtcttggctatacaggcattttttttaaaaaatgtgtatcttatttattcaacttagttgcattctcttacatcttccccaaatggtttcatcttctctctctcttttagccagttagtcatcccttctcatcgcctctaggatcacattgcctactacattctcccttctgtcatctgtgacttctaaattgtgagctgggggaacaagtttatcataatcaataggtagcattttcaagattcatctcagaatgactctgaagttcattatgatttcttcttaggcctttgagctatttaagaagttgtttttgtcttaaattttcagtcatgaaaatttctagatatccttgtttctgattttggccaaattaaatgatcagagagcataactctgtatgatatcagtttgttatgtttgtggaaactagttttatggtctagtatatggtcagtttttgtaaatatctcatgtattctaaaagaatgaatattctttcattgttagttacagcattctatgtcctgtactcttgttgtttaaatctttttggtctttactaaattttgcatgcttattctaatatcccactacaattgtggttttgtaatttctccttgtcattctgtcagatttttgtttcttttgaggcctgattatgaaacatttaacacttttatataatttttggtggattgcactttcatctacatgaactatgatgctttttaaagtagttataattacactaggttttctttgctctgt

SEQ ID NO: 3854 - DNA, 1069 bp, Homo sapiens
gctttgccaaataactggccacaagttttctttaaatagttagctttgactagtgtaattacaactgttcagaacatcagtattgtgtatataaatataattcatagcacaaagagatttttttattctcatattagcgattatcatatattgtagttttaaaggaaattattaaacagtaagttaagtaaatttaagagtacagcaaagttcttattctttttgtggaaattcatgagagaaaagaggacagttataattttgcaaaaatcaaatgctcatgttttgttatttttgtaacatgagtagtgactgtaaaaattgaatatggtaggaagaactttacacttttatacaaaaaagacataattttgggcttggacataattttggagactaatgagaactttattttaacttctatgaaaaacataagccttttggtttgcttttattcgaaatattgtaatgggattctgagaaggcagatattttattttaaacaaatctgattgcataatcttactagtattttgatattgtctaatttactttgatagaaagcattttaagaaaaatatgtatgggaaatttttataaagctgtttttgagagtttactatattcaaggcattgaacttagtaatttacttccattatttaatttgattcttaccatgtgaagggagacactctcatcatttttattttatagttaagaaactgaaaaagaaattaagtaatttatcttagattttacagctagtaagcaggagagcctggattggaaccttaactcccatattagacagtcactgtcaaaaatgattagaaatgggtgattattttaccaccatttcaatttctctatatatttgggaaaaaatgaaaaaaggtggaggaaatattctcctgaaacctaagcccttgagggttgcggtttttctttcttttctttttaaaattttctcttgaagtatttaaaaaatactgatgtctgggccgcactcacagcaattctgatttaattgttttaaggtagggcgctgcacatttgttagttactgtt

SEQ ID NO: 3855 - DNA, 1044 bp, Homo sapiens
cacttgaacccaggaggcggaggttgtggtgagccaagatcgcgccattgcactccagcctgggcaacagagctagactctgtctcaaaaaaaaaaaaaaagacttaagacacacacaaaaattaagtcattatgtcattcctctgagcacaatcttctaatggcttattctctcagtcctttaagtctttactctgaaggccgccttctcagtgaggttgactctgattatcttatttaaatgtataaccagtggctgtgtcctcagccttctaatcctgttattctgttttttgtctttttttttttgtctgacatttactaccttttaatgtagcatatgaattaattattcttatgttgatttttttttagtgtttatctccctttaacagagtgtaagcttcattgtggcagggaatatttgttccaaggcacctgtaatgtctaacttattcaaggtgctcagtagatatttatccaatgaagaaatgttagtatgagttaacaccgcaggactagatcacttgtttaagaacagaattatgcttttgtttgccctcttactattgggattaattatgtatttaaaggtctgcagagatttgactttatgaaagttttggttatattttattccccagtataaaatacagaactcctaaaatttaagaatatttatataacctgaacaggcttttattactccagtggctgtaatgtaaatgtgaaaatatttgtgagacttcttcatacttatattgccaaaactagctgtgctttcttaattctagtaatcgtcttttaacattcagttatgtaaatacatggttacatcaggtctgaactttattgctttttatcaaatgccagtggaattttgcactgatacgtttctttctcatatatcatctttttttaatttctcaaacactgagagcttactgtgtgctaggcactatgctgaggacttgtggatatgaagtaaaatctttgtaatataacacaagtgttgatgtcacatcaaatacagtatgggccttg

SEQ ID NO: 3856 - DNA, 1036 bp, Homo sapiens
gttaagtgagctttgaaggaataattttatctatcttactgttttgtgtgttcactattaacatgttaagttttatacatatatattttttagttgaacagccgtatctttggacatgtaaagattttttctttatttatttttgagacggagttttgctctttgttgcccaggctggagtgcagcgtcgtgatctcagctcactgcaacttccccctcctgggttcaagcgattctcctgtctcagcttcccgagtatctggaattacaggcacccccaaccaagcctggctaatttttgtatttttagtagagacggggtttcaccatgttggccagactggtctcgaactcctgacctcaggtgatctgcctaccttggcctcccagagtgctgggattacaagcgtgagccaccatgcccagctaagatttttaatgtgcaaagtacttattgtgaaaattcaggtatttcaaaaacctataaaaaataaaaatctcgactctattaacattttgggtctatcataccagaccctttgaatgactaaacataattttttataacacaagtgggatcttgttatgtataatagctcatgatatatatatcattcaggatcttagtattttaaaatttattttcctatgaatgtctatagagttaccacgtcctttttaatagctgcataatcctgttatatagatgaaccttaatttaatcagcccccttttaatcatttgtttccaattttctaattataaacagtatgtatagaaaatgcttttatggtggtgatgtatgtatataaatattttcatatacattcatagatgttgacttgtaacttacgattgcttttgtcagattgtccttcaaaagggttgtaccaatttacatccctgccaggagtatatgagagttcctcttttcctatatccttttacaaatgcttttaatgaaaaaggcaaaaaatgttgataaatctaatagacaagtatatatctagtttgttttgctggccatctctgttgc

SEQ ID NO: 3857 - DNA, 1032 bp, Homo sapiens
gaagggcagttttgttcttctgtcctgagaattataatatgttcagttaggaagcgtttgtagagattatttacttaaaggaatgtgaaaaatgacacggaagaacctgtttttaaaaagtatatacatttgtttagaactttatagttcataaagctattcaaatacattatctggcttgatgattacaatcccatgaagtattaatagatttgacaggattattattcccatctattgggtgtggaaactgaggtttgactgtgtattttaagataaatagctacaaccttacatcttcaaggtagtaatttattgctctttcaaattatatacccagtcattttattagatgtatgactgttcttaggactaaacatgaatttaggaaaaacagcctttgtattttagatagaattcttaagtttattttatatttcctaaaatgtcattaaaacctcattttattaagggttataatagaggattgttagtgctactttcatgaccttgaactgtgcaccagttaagtaattttaccctagttgatttgccatgataatactttggactttgataaaagggccaattgttgggtcactttcttttcatttttaaaactgctgtgtttgataatcactcagtagtacatacataagtgcagagtttatggctgttagtgatggggaaaaaaatcacaaggaaatttgattatcctacagcagaaggtagagtatatatgagtacaaatttggaatatgttttttaaaggagacaaatagtagatgctcaataagtgttgtttaatgaataccatttctaaaattaatgaatgagttagttgacttccatgagttatgctattaggaagtaaagatacaagcatgaaaatatgctgattccaggatgacagagtgtatggaaatagattatactacactagattacctcataatgagacatgtgtgtacttggtttcagtaaaattcatactggttcaaaataaactcttgatatagaaatttttcagta

SEQ ID NO: 3858 - DNA, 1025 bp, Homo sapiens
tcattttagctaaagatttgtcgggtttatctttttgaacaaacagtttttggtttaattgatttttctgtatggtttttatagtttctattttccttatttccactctgcagttgcctcttgtagccttctgctggtttcggattttttttctcttcttttgtagtttgtagtttgttgaagtctgaggttatattactgatttgagatagttctttttaaaatagacattaatagctgtaaatcctcccccgagcactgctttagcaatgctttggtatgttgttcttgcattttcatacatcttaaatacttcctaatttctattattccttctttttccattagctattttttaaatgggctattatacttacatacatttgtgaattccccaaattttcttctgttattgatttatagtttaattcttctgttgttggagaacatttttatatgattttaatctctttgaatgtattgtatgttgttttatggcttagtatatagactgttttagagaatattttctaagtgcttgacaagaatgtatattctgctcttgcttagtgtactttagtgtagtgtaaatgtccattaggtctagtttgtttatagttttgtgcaagtattctatttccttgttaatcttcagtctagttctgttggttttaaataataggattatcttgcaagtactttgaatacaaattatcttacaattctctttcaaactaaagagctaagactgagggaagattaacgatgactaaaattttcctgtggtaaacattttgtagtaaatgcatacttcctctatagctgctctttgtggctcatcattggtcatgcccatagatctttgcatgttagaaacttatttttacacctgtgatgttgtaaaaagacaaccagaagatttaggtactttcttactaatctctccaaaagcaaaattctcctactatacttgatatgctgagtgggtaattttcaatttagtagattcttccttgtgtttggaa

SEQ ID NO: 3859 - DNA, 1087 bp, Homo sapiens
attcttaaggctttatataacttattcaagagaaatttaaaacatacacaataaaattaaaaggcacactgagattttcatagtgtcataagaactggacctggtaaatcaggggatgccttgatgagagtatatgaataaaagaggatctcctctgctaaacacagatttcttaaacaaaggaaggcttctttctttcttcagttacttaggaaataagcctaattttgctttcttcaataacactggctttatgactattaggaaaataatgaaatgaaaggttctttttctgtaagatttggatgtgaattttcataattattttaaatttgttatgctgaagacttaagacatatgaccattcagtgggctgatacagatgaaatgtcacattatcatcacatggtgaggcatgaaatttatttactttacataatcaacctctacttaaaacaacttgttacagatattccttagtcaatagatggcattatatagtagttaatattttcagttttttctgaagataattaaaaataccatcgttagtctatgactagtacttccaataaacaaaatgtttttgaaaagaatgtaagcaaattgtagagcagttgccaagatatgaaatctagacacttagcttcagtccaaaacatattttatctgttttgagaataattgtgtaggttgcagtatgcatattttaaatgaaatggaaccatctgaactttacattgttcagtgtttcagctgtttgtaatagaaaatatttcagaatttccaactttggtctgttttaaaaagcataaactacaatgttcctgtattctttagttaactttctgtattcttacatagtaaaattcgtcttggttatagattttaaagttatcagattcttagacaacaggacaaatttaaaactctttctgttctaacactataaaatagtttgatattgcctcttcattctaaccacccactgaagtattttttaaacataaaaatatgttgttctttccccaactcaggcttgaaaaagtattcatcatatcagctgaataatttcactcccagaaga

SEQ ID NO: 3860 - DNA, 1070 bp, Homo sapiens
atttgaagctaagaatggaaaataattgaaagaattgaaagtggccaagataggaagaacccagaactggtacagaatgatagttttgaaagtcaagttacacctgacttgagactgaagaagttaatgtagaaggaaggaaaagcagaattaatggatacatccaatgcttctcatggattttatttggctgatgcacctaatttcagttgtttttcagaataaagactttttctttgaggaatgtgagagaactctgaatttcacaatgcaactcttctaagcaaattggaaaactgcactgaaaatcctgaattttgacatgtagctccctcaagagaaaaactacgagatgctttaaaaaaatgctgctgggtttttactctacgatgaaaaagaaggttaattcaaggaggaccaagacttcagatttcttaggttgtgctacagtagtctttgaccacaatgcagatttgattaaatcttgtaaggatgccgtaaaactggcaacagtcactggatacctggatgtagtggcccattgacatctggatggctcaaagggtcattataagataaaggatttggtccaatttagtctagcgagaggcaaatctatttgagaaagaaatactattctgcaaaatatgaatggcacccaatgatgatacttttactcaccaacttgaaagagccacaataactttgaaattttgtaccataatgaacttgagaaatatattcttcaggcagcttgaaagaaatgaaagatcgttggttttcaggaataaacaaattagtaaaggaacatcaagatgatattaaaaaccaagggtctgtatgcaaaccataatgctatgttagggcaacaaagtgaaatttgaaccatgcattgaaaatacagaaaagggctctcagtagcaatgcatatctacttttcagcacaagtaggatgtttatgagaattccattttgtctaggatgaagaaagtggtagaattatttctcccaaaatctgctcagcaaatagtttatctccaaagattatgaaggcttcttcagtgattcag

SEQ ID NO: 3861 - DNA, 1033 bp, Homo sapiens
cctgcaatcgcaggcactcggcaggctgaggcaggagaatcaggcagggaggttgcagtgagccgagatggcagcagtaccgtccacctttggctcggcatcagagggagaccatggaaggagaccgtggagaggagagaggggagaggggagaggggagaggggagagggagagggagagggtggatcagttttaaatgatcataacattttatgttttgttttggcaatattctttttttttttttttgcaaaaatatcatagctaggagagataccagagacgaagcaaggcatctgcttctagaataattcctgtagcttcagtaccttgatggagtcactgtagattcagtgtttggtcctacactatacaaatttagaaactcaccatgagatgttgaagcataaggaattaatgaatactaatcagccttaggacaaaccgaaaaataatggaaatgccaatttattatgagaactttattgatatcagtagttttctcaggacagcctcttctgaaagtcagtctgttcagatttaaaaaaaaaaaaaaaggttattcactttgggaggctgaggcgggcggatgacgaggtctaggagcttgagaccagcctggccaatatggtgacaccccatccctactaaaaatacaaaaattagccaggcgtggtggcttgcacctgtagtcccagctactcaggaggctgaggcagaagaatcccttgaacccaggaggcggagcttgcagtgagccgagatggtgccactgcactccagcctgggtgacagagtgagactccatctcaaaaaaaaagagttatttaaagatattccacaatctaagaagtagaattaagggagtaagaagttttaacagataccttcatttagctgaattagttgtatatatccttttctctacaaaagatagcactgttatttgttatcagcatgggaaaaattttatctggacccttaccctcacaccatgcacaaaaatcaattccaggtggattggaagtctga

SEQ ID NO: 3862 - DNA, 1036 bp, Homo sapiens
gcccaggctagagtgcaatggcacgatttccgttcactgcaacatctgcttcccgcgttcaagcgattctcctgcctcagccttgggagtagttgggattacaggcacgcaccaccacgctaggctaatattttgtatttttagtacagacagggtttcaccatgttaggctggtctcgaactcctgacgtcaggtgatccacccacctcagccttccaaagtactgagattacaggcacgagccaccacgcctggtgtaatttctatttttgaagcgttataaataccagaacatcttacatacccaaatagggcaatatgtattccaaagctaaatataaattttaaaaaattatctgcattttagtttgtttgtacctctgttttcttcttgcctcattgggaaatcagattaaattgatattaagtagatttctaaaagcataaataattctttaaaccagtttaatctcaagaaataatgttgtgatagggtaatgtggatatagtagcaaaataatcttttagatagattaaatttctgtactgtatatttactgttcaatgattttcttagattgaccatctcttctattttttcttattcctgtcctttgtaaatcaatagttacttacgaatagtcattttctaagatcaatacaaacttttgggggatttctgtaatataacatagtacaatctttttgctttatgctctaattctttaatattttaattctatttctatttctcaagaatcaggaagatacttttaacactgcatttgtcactgaaaaaactagttttaatttatattgacctttttctcctttgaacatttagtctgcattgaataaaatgttgatgactgctctttagaagacagctgtatgaaataaagtattataaatattcagcttccctttctaagcattgtcaccaacagctgggcatccagtttagcagaacagattttgcacacagagagcctggcatattcctgaatcagtttagtgaaggaaacaaaaaatagt

SEQ ID NO: 3863 - DNA, 1024 bp, Homo sapiens
gcatacgtaggtggtcctgtacacgttctgtttattattaccttagagtataccattatgtgtgagatcacacacgtatcagtatatctgtgtcagagttatgtcccactgtagggctttagttactaattgtccattatctccattccatctatgccttagaactgccatagagacaacagagaaaggggacagtgcacagccccaggcagatactgtgtggaaaaaaagaaaatgaactggccatttttagatggtctttttggattcagcttcccagttttgtgtatccatagctgagatttattctttacctttcccgggagcagaggtgtaaaggaagagtgtgccatacttgaagaataagcatggcgttagattgaccttttggaggctcaggaataagtgacttgaggtagctgtacagtgaatgtttacaaaaaaaccacaggccaacaggacagtttcaggttttcctttgctcttcacacattactggcatagatcattgttcctcagaagtttttggaatgtcagtgacctttcctcacctgagagaaacaagatatcccatggtgaaaagaagagaaacgggagcagtgggagccctccatccaaaaaccattaatctgaagttcttcagggaaagagagcatctcacatatgcaggaacacttctcccaggctttgtgcctgccctgctccaagctggagaaaggcttaagagttcacactttagtgttctatgtactttaagtcatttgatgaaaaccgaatgtggctgtagcacggcattgaacagtggtcctggccaggtctagatttaatcccagcctaccacttgctaagccctgggcccccagggtactcaattcttctacttgacttggggttttataactgcctgacgttagatactcctagtcatttattcttttctttctccttagagtggaatctccaggagatcaggaacgtggtttagtttattgctgtttccctagcacctagaataacatctagc

SEQ ID NO: 3864 - DNA, 1030 bp, Homo sapiens
atagattttaatcactgacaaaaatcactttggttattatttattctaatatgcattttgcatactactgccaggaatttgtttgcatgtctgatgtataatcacgagcgtgttagaattgtttaagtgctttctgtaggaaacagatggaagatttccccaactcccagagtgtttccgattagcaaagtgcacatcaggcaggatctgtgaacctctcagataggggtttttttgaagctggatttgataaggctctgtgacggatacctgtaatgagaaatatcatcagagttttatttttaaatgatctaaatttggtttgccaggagctacagtgcatatttctggggagtcatagttcttgatgattatgatcaaaacagcctgaccgaacctggtcggaagtctgtttgccctaagaggatatgagtgacccagattctttgtggatgagagagttccttatctttgcatatattgggtttagaaacagatggccaaatgtatccgccttgattttctgatgtgtttttttacttttcctcaggtatctctcctctttgtcacaacctctttgccctgtatgacgagaacaccaagctctggtatgctccaaatcgcaccatcaccgttgatgacaagatgtccctccggctccactaccggatgaggtatgggaagtactgacctggtacctgcctggctccctctgcactgagggacagtggtcagcctggagccctgagtcacttaccaagaagtattgtagtcatttttgtaatttgtaacttttgtatttgcttgatgtgagaaaggacttcttcagtatttggaatacaattcaagatgagtttgatcaccttcctctgccacattttagaaaagaaatcttgataaggcagaggatattttgaatagaattagtgtcctacagcagagtttttcaaatgggtaatcatagttatgaatttaatttagtggattcacagttatgaattcaatttaatttagtgaatttaagaaaaag

SEQ ID NO: 3865 - DNA, 1002 bp, Homo sapiens
aagaagattttgacattctctgttcaagaaacttttacagtgagagtaatttagtgtatctcagacaatgttggagtgatcgatggttgggtttccttgttccaaggtagaatatcaaatgttcagttgacttgttgatggatcagtttgacctcgctttaaggatatgtctgaaaaactgaaataatgaggtcaacattttccaggtttttttttgtcattctatgatcgactaagtctgctttggttttcagttactaatcagtgttccactaatgcctatttagaaactttattttgaaataattatagattgacaagaagttgtaacagagggcctgtgttgtataattgaagtttaacagtgatacgctcctttctttctagaaaggctttcaatttatggaaaaattagcaaaggtaaaagatgctcggcgttggacctttgaaacttctttcggaattagtattttgaatgactccatacaactagaataatggctgaaatttctatggtgctggtcaggactgtgactgtggcccgagcatgagatgattttcctggaaaccaaaagtactactagaaggagaagaatgctgtggagctctctgggggttggagcttatgcctctggagactttgagttttctgtgggtgtaagttttgcaaatggtcctggtagccctgaagctagagttgtcaaagtaacaggtggtagctgggagccagcttggcagtggatcagctacccaaatagccaaagttgctcaatctacatgaggtcctgtagaccaaactgggggtggggaggattagccccatacaaatagttgatccttttttttttttttttaaacagtcatttgaaatattttctgtaaaaggcctaagctttaggcatttaggatgattgtaaatgcactgctttgtattctttttcacatatatttgatttattaatataaaattgccatttttgtacataaaaatggtcaaatatt

SEQ ID NO: 3866 - DNA, 1035 bp, Homo sapiens
gaggccgagtgcggtcgctcatgcctataatcccagcacattgggaggccaaggcaggcagatcacttgaggtcaggagttcaagaccagcctggccaacacagtgaaaccccatctcttctaaaaatacgaaaaaaagaaaaaaagaaattagctgggcgtggcagcacgcacctgtaatcccagctactcaggaggctgaggcgggagaattgcatgaacctgggaggcagaggttgcagtgagctgagatgatgccacttcactctggcctgggggacagagcaagactctgtctcaaaaaaataaaaaaaaattttttgttttttaggttttggggcagggcagttgggttcatttagctgtcctaaagtaagtttggtatatttttgtgaaatatttagtttaaaagttgtattgctgtttttgacattttaagtcagacgagatttactgttgctttatattacctgactgttatataacacgtcctgtgtttacctgtgtgggtctgagcgtaccagatgtggtgttatgaaaagcgtgctggacttggaaccaggacgagccgatgtgaggctgtcctctgccacttactagctctgtgactttgggctcataattgagccttatttttttctcaattgtaaatggactgtgtagacctgtcacagaggaagttttgtgaagcttaaatgaggtagaacctacaaaatagcttcagacagtgcctgggatccagcagcatttaacgaaagttacccactgctaccccaaatactgaatattgccagaaaatctgtaaatgattacataatgtttacacctttataagtggtaactttgtaggtaaatattattcaagttatgaacctctgatttaggaaacctccttatgcaaatggttggcttcccactacagaaacatcagtaataagatagtggtttagactcccaaatctgcgaccagtctgtatgtttgaatcctggcttatgatcagtcatagctgagtgatcgtgggcaagttattcaac

SEQ ID NO: 3867 - DNA, 1012 bp, Homo sapiens
gtgctaggtaaattaggttttactcttatttttaaggaaaaatgactaacaaaggtgcttttatttaatttaaagtgccatccaaggtatataatttggtaggaatgtatttgactttctgggaaagttaatgtgaagatactgtgttgacctcactgattcagtttacttagcaagttgtgggctattggcagaggcaccatgtatacctgtttgtaaaacggtgtcttcagagttgtgtggaaattaaatatcttgtaaatcagataatactccagggagttttgctggtaaggaattataagagtttaaagggactctcaaatatgtattcagtttctatggaatgcccttttacagtttctgtttccataaacatattttgctttcctaaagcaagatttacccaaaatgtaaaagtgtgcaaagagttggcccttcctcctaatcatagatgtgtgttttaaaatattttaaatgtatttccttcttggtgatgtatatgttggactggtttcttgggtctgggcattatttatactcaagaacagttgttgccacgtgattggaaaagcgctattgatgtcattctcatcccatatgctttgacagcaaaggagttagctgtatcttcccttgtcttcccactctagaatgagaaagacaagaaagctccctaatttgatttgtatggagggggagtgggtaggaaagtccacttcagctgaaaaggctgacctgtaggtatttaaaacataaatttaggtctgttattttcacatacacttggtaactcagactggtctgaatataaagtagaaatagctaagaaccatttgtaatgaatgcaactcttatttgtttttaatggtgttttaaggacttaagggtattagaactgacaacagtttattcagttaagcacaattttatctggaggcttgcttgcacagttaatttgatcaggttgtagtaaggctatataacagtttttttcaattatgatttaaaa

SEQ ID NO: 3868 - DNA, 1047 bp, Homo sapiens
agacccgcccccatgatttaattatcactgggttcctcccatgacacatgggaattcaagatgagatttgggtggggacacagccaaaccatatcaacatcctcttctctttttccacttaaaagagaatggctttaatactaatcttacggccagagattacttcagtttcctgttgtaataggaaaacaaatccaagactttcaatgagtctaaaaacatgttacatagattttagtatgtgaaagccttttgtaaactataaagtagtactcaatgaaagacatttttctggacggtagcttaagaaaaacttgtacaaagggttaaaaactcaaatgcctgctgtgaccatgtaagtatggtaattactttcaacaatgcttggaaattcccagctgttgtctcttttactatttcctctccctcattttctctatctctttggagaattgtgattacatgtgtattagacattctaatatataatccaagtcttgtaatctctctttcatattttgcatctcttcatactctttggactgcatttaggacagttttttaggatctgacttccagttcatgagttttttctccagctgtatccaatcttctttttaacttgtttgactttttaatttctatctttttgttctatttctagaagttctatttcagatctgtttggaaaagtttgtatagtcatttgtttcttcaccatatttacaggcttttatttcttgaaacaaaagttttaaagataagatgagaggctgtctcgtcttgtggctctgggcttccatcagcaggaaacaagagggatccctggggtaacctgtgccttggagaagaacattccttctctatccttcacataagcattgtcaagaatgaagagggaggcccaggactctgtatgttctggagaagagactcctccccacaacagtccccgacagccccacactcccacactcataccaccattctctgcaaccattataaacccattatgccgttgtccttgtttatgtcagtcacacaaaa

SEQ ID NO: 3869 - DNA, 1001 bp, Homo sapiens
caaaaaaaaaaaaaagaatagaataatagattatttattattttctttcaacccatggagtgtgttattgtattgtcatttggcttccattgcagctactgagaagttagtggtccatctcactgccattcctttgataatgatctccacactttccctgacctcaaattttttcctttgatgttcattagttttattgtgatgaatttgagtgagaatttttctttctttttctcctttctttcctttcctttccctccctcccattctctctttctttcttttctttctaccttctttccttttcctccttttttccctttccttccctcctttgttctttttcttcttctccttctctcctgcccacctttcttcctgggatttgtttggcctcttgagtatgtgaattaatttcattaataggttctggaaaagtttaggccagtatttcttcaaatactgtttctgccatataatctctggtcttctagtgctctaattaaatatatgttagactttctcactctatcttctatgaattttaatttctctttcatatattgtatttctttaaatttctatgcttcattctgtaaaatcttgtgacccaaccttcttgttctctaattctcttttcagttgtatgtaatatgctgttaagctgttggtttttgttttgctctcaatctcagtaatggtaaattttatttctagaagtttaattttattgttcttaaaaatttgttggtcactttttgtagtttccagtatcttgaagatattttcaagctcatcttttatttctttaacaatagtaggcataattttataatctgtgtctgataattccagcatctgaaatctttttgactctgtttctactctttcatttcttctagctctcatacgtgatgcttattatgtatgcttagttgttttttttaccagtactgcttgttaaccttgaaaacttatttgtgtaaatacattgaggccca

SEQ ID NO: 3870 - DNA, 1061 bp, Homo sapiens
gtcccccacgatggagggcagtggcgcgatcttggctcactgcaagctccgcctcctgggttcaccccgttctcctgcctcagcctcccgagtagctgggactacaggcgcccgccaccacgcccggctaattttttcgtatttttagtagagacggggtttcaccgtgttagccaggatggtctcggtctcctgacctcgtgatctgcccgcctcggcctcccaaagtgctgggattacaggcgtgagccgccgggcccggcctttattatttttttcaaatgctctcttagcagaatcatgttcatgtttttaaaatatctttataaggtttgttgatttttccccgatgaaattagtccatatagtgtactttgtcaaatggattagatttaagtcattcattatatccttttattatctttccagtgtgtacaacatctggagtaatatcccctttttcactcctgatagcgtgtgtgtgtgtgtgtgtgtgtgtgtgtgttctctctctctctctctctctctctgtatgtatgtgtgtctctcattagtttcaccaaatattttacaccttttttagtcttctcaaagaatcaactattggctttattgttcctgttacatagtttttctattttacacatttttgttcttatttgttatctctttcctacttctttatttctgtttatcttgcagcttatttctaatatcctgaggcagatgcttgacttacttacttttagccttttttcttttctaatataaaatgtaaggctataaatcagctctgtaaacactttttagctattaccctatatgtttttgatatgaagtaatttttaagtcactcacacattttaaaaaggcacagttcacagccaggtgcagtggctcacacctgtaatcccagcactttgggaggctgaggcgggaggatcacccgagatcaggagttcgagaccagcgccggccaacatggtgaaaccccatttctactaaaaatacaaaaattagttgggcctggtggcagacacctgtaatcccagctacttggg

SEQ ID NO: 3871 - DNA, 1064 bp, Homo sapiens
tttaagttctgaaacttgaaaattctatcaaatattttaataaaggggatttttaagagctctcaaatttttctcaagaacttaatacaagctgggcacggtggtgcacacctgtagtcccagctacttgggaggctgaggcaggaggagttgagccaggagtttgaggccagcctgggcaaaataatgagaccccccccatctctaaaaacaaacaaacaaaaaaacttcatatgattttgaacaatatagaaaacacacacacacccctttttcctaccatcacagcttttgatatatttgcatagcttttttctcaattgtttttctttttctttttgagatgaggtcttgcttgctctgtcacccaggctggagtgcagtggcataattacagatcactgcaacctcgaactcctgggcttaagtgatcctcccacctcagcctcctgaatagctgggactataggtatgtgctaccacgccctgctaattattaaattttttgtagaggtggggtcttgcaatgttaaccaggctgtcttgaactgctggtctcaagtgatccacctgactcagcctctcaaaatgttgggattataggcatgagccaccacacccagcttttctcaatccttataagcatgtatttattttttaagactactgtaattactctagttatgcacagtttttatgtccatgtactgtaatgattacataatagtccattgaatggacatagtacaatttattattccctagttattgggcaactcagttctttccaaagtttcattattataaagagcaatgctccagatatttttgcatacacagctcttctttactcttgaaatactttgtagaataattagaactcacttggttgcaaattgcaaagctcattggagtagcctaagtgaaagcagttatgttaataagcacatagggcagtcacgaagatacaatgtgcaagacacatagaaattggaaagttgtcagacaatccccctcacccttctctggtctcttatttccttcagacttttgctgcccatacc

SEQ ID NO: 3872 - DNA, 1034 bp, Homo sapiens
agaaattatttatttagggaccactagatttggaatgctaccaaatcccattactagtctataatcacacaatatttttacctgcatcattccatttgttccaacaacctggtaatgtaggctgggcaacagttcattgttatgttttacaaacagagaatcaaactcagagaaaagacttgcccagggcatcacagtctccaagggtgacagcaggacacagcctgctggagctatgaatcttgctgttgcactcagttgtcctcttttgcttcactcctctcttgtactgccgcccaaactgcgtgtacatctctccccttgccgttggcctgttggctacaaacagccaccagctcagcaaaaacaacaagaccaaattggaactactctttcaggctccacttcccaagccatctggtcaccctgactttccaccacacaggtgcagtggtttgcagattgtcatcaatcttcaccttcacttaaaagtcacgttgactctctacagcaccaagctgccataagcattctttttctacaggcaggtacgtaggtattaatcctaatgtcacactaacccatttgaaaaacttgcaacttcatttactttctctaaggtagacaataagctcagaaattgtcctgaaagccaaggatttcctgtgatgggctcactgaaaaacatctgacctaaagctcactctgcactttgccaaaaagcagaaacaaccatctccacatcaccagttcagggtcccagcctgctgagcctccaaacccagccccatccatatctctaacctttgccaaccactagtctatccttgctttctaaaattatgtcctttcaaaaatgttacgtaaatagggctgggcacagtggtttacacctgtaatcccagcattttgggaggccgaggcaggtggattacctggggtcaggagtttgagaccagcctggccaacacagtgtaacctcatctcttaaaaaatacaaaaattcagccaggtgcggtgactcacgtctgtaa

SEQ ID NO: 3873 - DNA, 1034 bp, Homo sapiens
tggttgatggggtaacatcttttactctggttcgggtttaaaagaatccaggtgacagagacaggatacctgccctaatatggtagccactagccacgtggctattaaccacctgaaatatggctagggtgaggaagagctcaattttaaattttatttaattttagactttgataacttgatttagttattggaaagcttatttatatttggaaacatacttgagcttacgcatctacttttgaaactaagtgttttgaaatccaaacgcaaattaagtattttgatgaaaatttagaattgggatatgtaagtgcaaagtaatcttcagatttcaaagaatgcaaaaaaagtagaatagcccattaattttatgttgattccatgttcagatgataatattttagatatattgggttaaatgaatatgctattaattccacctgtttattagtgtggctactagagaattaaaaattacatgtgtagcttgcattatatacttcattggacagctcaggcctgcattactccttttcatctatgaattaatttcttttctttttttctttctttttttttttttttttttgagatagagtctctctctgtcttccaggctggagtgcagtgacgcgatcttggctcactgcaacctccacctcccaggttcaagcgatcctcttgtctcagcctccagagtagctgggactacaggtgtgtgccaccacgcccggcagattttttgtatttttagtagagatggggtttccccacgttggccaggctggtcttgaactcctaagctcgggtgatccatccgccttggcctcccaaactgctgggattacaggcatgagccactgtgcctagccccatggattaatttcaaaagtggtgactgtatgaaatattgttatttcatgtttgtgtttctattttccactgctgtgttccatgtgatgattggggaccccaagtattacattattactgttatattagggagattagtgtaaaagtccagggttcta

SEQ ID NO: 3874 - DNA, 1030 bp, Homo sapiens
ttgggaaaaaaagttgttcacattggtgaagggaagcagtccgaacatatgttaacagtaatacttcatgggggtaaggcctgaatgctaatttctcagtgcaaaccttcactcaattacatcagacagttgagccattaaaaacaagaccacagaagctttattttaaaaaggcattggctcttgaactgatggctgaaaaatgaactggaagaagcatttggagtatgcctgtgtgagaaaaacaagaataattaatattttataaaagtttggatataggttggtctatcagctatataaaactacattatttaacaagaatttagcactaaaaataaaatggcacttttacaaggctatgcagatggataatcctatctgtaatcacacagagcaatgattattgtgtatcttattttcactttggaaaagcattatcaaatctgaaaaattggattgtaactagaaaagtttgaaaagttttcaaacttcactttctcttcataaaatcgatactgcctgccaacagttgttccttgtgtgtgccaatatctaagtatcacttgacccccctcctctgtttatttaatgcagaaatgggaaattttatgatgcatataaaaataacaggattctggtcagcatgatatatttaagcacttaagctgacattaaacttttgtcttgcttcaaaaataattttgaaaattatagcaaatgcaaaacaaactgcaatctaagcatcatgcttaatttcagaattctcaaattacttgcccttaagtagaaatttaaaaaaaaaaaaaaaaaaaaaaattttataatcctttatgaatgctttaaccacctggataagaaatatgacttaattactacacaaacacttaaaaattcattagaaaaaccttagcaaaataaaatgaaagctgacagactcagaataacaattcctctcataaaagtttaccaactgtacaagttaagaaaattatacacgcttttgtattaagaaaggacagctcagtca

SEQ ID NO: 3875 - DNA, 1023 bp, Homo sapiens
tagacattctgactggtatgagatggtatcacattgtggttttgatttgtatttctctgatgattggtgatgagccttttttcctatatttgtttgctgcatgtatgttttcttttgagaaatatctgttcatgtccttttcccattttctaatggggttgtgtttgttgaattaggttgcttatcaattctggatattagacctttgtccaatgcatagtttgtgaatattttctcccattctgttggtagtattcttcagtattggcaaaagcatttatcttctggagaaatcgattgggaagaggctaatgtcactgattccttaatagtgttcttccttatactattattagggttggtgcgttttcattgtttgtcttttgtttatttgtttttgtattttaaggacagatatttggatgagttttatatatatttaagaagctcagttaaacctatataacagtatattactatttttatttttagaatatattaataacttatattggaatggtctttggtggagattatattttcacgtggacaaacttcattggtttaaatatcaggtaagtaaaaatatttaattaaattgcaaaatcggaattggatattcaaatagtgtcacaataaggttaggctattaaattaatggaacatttattcattattaaacatatgtggagtgccttctatgtgctacatatttaatgtctctacataatgctttttaagaagcagggagaggttgggcataatggcttatacctataatcccaacactttgggaggctgaggtggacagattgcttgagcccaggagtttgagactagtctgggcaatgttgtgaaaccccgtctctacaaaaaaaatgacaaaattacctgggcgtggtggtggacattaggactgttgttccctggccacagggttgctatattgaaagcatttttagtgtatatttttggaatgggtatctcattgtcgggggctaatgaatatgtccatgactgtag

SEQ ID NO: 3876 - DNA, 1051 bp, Homo sapiens
ttgaatcccacatccccagaaagaaaaatgctatgaaaccaggttatgcaatgcttgtatagtgtactttgatacagacatttttaaaagtatttaaactacatcttttaaatctaaactcacaaagaaacaagtagtctcttgtagtaataatcgtttactataaacagctgttaccagtcacctctaaaactgtagctcttaccgtggtgatgactcaccactcatctctcacacacacacaagtcacatttctcctacagtacaagtaagaggtagatggcacctttttttgtgtttcttaagggatctgaatcattagaagtgccctctagattcttttatgttgtaccaaagacagcaaagaggaggaaggaggagtaggaagaaataagagtaaatgggagaaaaatatatattttttgagacagggtctcactctgttgcccaggctttagtggcacaatcatggctcactgcagccttgacctcccgggctcaatttatccccccatcttagcctcctgagtaactgggactacagacacttgtgaccatgactggccaacttttattttattttattttttatagaaacagggttttgccatgttgcccaggctagtcttgaactcctgggctcaagtgatttgctcacctctgcttcccaaagtgctgggattacaggtgtgagcctctgtgcctggcccaatttctaagaaaggaagtaaaatttaagagtctaattttaaaaacataattttgagagagttttagtctactgaaaaaaaatttaagaacaggatatatatatatctccaggatatatgttcttaaattatatatgcatgtataatttgaatatcagtttttaattaagctgacttttaaccacagagctctttttaaaaaatcttttaaaatctattgtcagattttagctggggggacaaacagatgatatttttgccttttgaattttttttattgaagataccttcacaagtgaaaccagtaagacttaaccaaagttatgacttaactaaggatg

SEQ ID NO: 3877 - DNA, 1046 bp, Homo sapiens
tatttgcaaattagcacacctctaaataattcatagacaaagaaaaatcacaaagaaaatcagaaaatattttgaacaatgaaaatcaaagcacaacatagtggctgggtgtggtggctcactcctgcaatcccagcattttgagaggctgagataggtggatcacttgaggtcaggagtttgagaccaacctggtcaacatggcaaaacctcgtgtctactaaaaatacaaaaattagccaggcatggtggctcacacctgtaatcctagctacgtgggatactgaagcacgagaatcacttgaatccaggaggcagagattgcagtgagccaagatagcacctctgcactccagcctcggcaacagaccctggttgtttttgtgtctgtctcaaaaaacaaaaaaactacaacataggaaaatttctggaatgcagccaaaacagtatatagagggaaacccataaaattaattatataaattaaatccctaaatgcttattttagaaaagaagaaagatctaaaatgagtgatctaagcctctgtcttaagaaagtagctgggatgaggtggctcatgcctgtaattccaatgctttgggagcctgaggtaggaagattacttgaggtcaggagttcacggccagcctgggcaatatagtgagacctgtcttttaagaaggaagaataaaaaaaggaaactagaaaattaaatccaaaataaacataagaaatgtaagattgtaagataagaatagaaatcaatgcaatgaaaaccaatgaaactaaaagctaagattttttttaaaaaagattaataaaattgctaattcatagccaattaatcaggccaaaaagtgagtttacataaattatcaatatcagaaattaaagaaggacctcattacagagcaggtatattttaaaagaatagtaagagaatattatgaacaatattatgccaataaacttgacaactgagacaaaatagattcttggaaaagacaaactatgtaccaaagctcactcaagaagaaataggtaa

SEQ ID NO: 3878 - DNA, 1086 bp, Homo sapiens
gttcttacatagagatggaagaacagaccacttgctgtagatctcacaaggctagttctgtggtacgctgtataatgtctccattatatcactggctaaattacatggtttaggggagttataggaaaggttgctgcacaaattgtctgcctggaagtgtctcatactaagcattgctgactaaataatgaagaaattttaggctgttaagttagcctgtttagagttattcatcttttctggattgctctgtggaccacacagattgattttcagactctgaattattctcaccacatagagacagattccttctgttttctgggccttggtgttcccatatgtaaaacaggtgggttggatcaattattctttagttatgaatgaatagaactttctctttgccagtatattatttgactgacactgttatgtttctaaccattcttacctctgagatatctctttttaaataagagcaagtgacctacttggcaagctggaatgtgtagttttgacatgatctgtaggttttattttatataggtggcaccactgacattatcttctttctgccttagcaagtttcctaacagtttactttcagataaggattcaatttttttcttagtaatttttcagggaaagaattttcaggaatagaatatcatttattaatcttttttctttaccatgacatgcaaactcagtggtttatttttagacttcatggtaaacagagatgtgtcaaaacactaagaaaatatctgtcacactttggattttagttcagatttcaaatgaattgatgattcagaaatggggaatggttgcctcaagtggacattgaaacttttccatacttctgactagattagggttggtaaattgtaaattggtgctaagttatcctgtgctcattgtagacattaccaagtagtcacaatattttcttgctatgcttacacatagcctgagactgtttaccaagacaggagtctagacagccagaatcagttgatcagagctggtacaaaagacaaaatctgattgcatccctggatgagagtttagcctttgtattga

SEQ ID NO: 3879 - DNA, 1059 bp, Homo sapiens
cacatcagcctccccagtagctgggatttacaggaacgtgccaccatgctcggctaggtttttttgtttttttttttgagatggagtgtctcactctgtcatccaggctaaagtgcaatggtgcgatcttggctcactgcatctccacctcctgagttcaagcgattctcccgcctcagcctcccaagtagctgggattacaggcacccaccatcatgcccggctaatttttgtatttttgtagagacagtttcactatgttggccaggctggtcttgaactgctgacctcaggtgatctgcctgcctcagcctcccaaagtgctgggattacaggcgtgagccaccgcgcctggctgtttttgtattttttgtagagacagtgtttcaccatgttgcccatgctggtcttgaactcctgggctcaagcaatctgtccgcctcagcctcccaaagtgctaagtttacaggtgtgagccaccgtatccggcctcatccatctttcttaaatgacactgtgctaggcttctgaaaagcccaagacatactcagtcttgattcagttctagaaagagaatggcttcagagagatgttttgatattgctgtgtgtgtgtttgtgtgtgtgtgtatgtgttcaaaataacctcttttctacttgctattttgaggcagccagtagtcatttttatttctctgatcttaagcacttgaggaatttatttcaagtaagtataaaattttgtaagtttgctttatttggtcttgaaagtttagattatttcttaatgtttgcaaaacttctaacttaattcatttgctgtgtatgttgtaggggagggtgtgtgtgtttgtgtatttatgtgtagtttgagtggtattttgtacagtgttgtatctgctagaacaaaacgcagatgaaacacctaattatttactgtcctaggagctgggaaaatatggactgctctattacaatgcactgttcatgattctgcccaccctggccattgcgtatttcacaggagatgcacaaaaggtaggactttctaattacggtt

SEQ ID NO: 3880 - DNA, 1032 bp, Homo sapiens
gccaggcacagtggctcatgcctgtaatcccagcactttgggagtccgaggcaggcagatcacgagatcaggagatcaaaaccatcctggccaacatagtgaaaccccgtctctactaaaaatacaaaaattaaccgggtgtggtggcgtgtgcctgtaatcccagctacttgggaggctgaggcaggagaatcgcttgaaccagggagttggaagttgcagtgagccgagatcatgccactgcactccagcatggtgacagagcaagactccgtcacaaaaaaaaaaaacgagtaattaaagtttgtattttgccttcacttattttttccttgatgttcttcctttttctatatagttccaagtttctgacctatctcattttccttctctctgaaaaacttcatttcacattttttgctaggcaggtctgctggcaacaaatttcttcaatctttatgtgggaagtccttatttctccttcacttttaaagtataatttcacagcgtatagactgctaggttgatgggctttttttctctcaatactttaaatattttactctactctttccttgcttgcatggtttctttttttttctttttcttttttttttttttttttttgagacggagtctcgctctgtcgcccaggccggactgcggactgcagtggcgcaatctcggctcactgcaagctccgcttcccgggttcacgccattctcctgcctcagcctcccgagtagctgggactacaggcgcccgccaccgcgcccggctaattttttgtatttttagtagagacggggtttcaccttgttagccaggatggtctcgatctcctgacctcatgatccacccgcctcggcctcccaaagtgctgggattacaggcgtgagccaccgcgcccggcctctttttcttttttgagacagagtctaactttgttacccaggctggagtacagtggcgtgattttggctcactgcaacctctgcctcccaggtttgagcagttctcctgcagcagcc

SEQ ID NO: 3881 - DNA, 1804 bp, Homo sapiens
agtgggttttgaggttcattttgccaactttgaggttgaggttgaaaaagaaacacaaattacaataggatctgtgacctgtgctgaggacctcaatatttaaaaaggaaagagaggggaaactgggaaggaaaaaaatgggtggggggtggggaagataggcaatgaggcaaagtggtcttgtgaggctttgattagcattcagtgaatctacattttacatgtgaaaggaggggtaaagggtcaattatgcatttttctggaactcagtaaatctatgtttgacataaaataaagtaagcatgtgaagttacagctatctgtttggtaacaaaagaaaggcagtttttgcatgactcagctcccaagcttatcttttcttttggcatagtgagtttggggtcttgagagtttattttcctttcacacctgctagctcattgagatgacttcatctatgctggtgatcacagggaaaactagaactcagcgtcatatactcaacatatactggctcacaaactccagggcaagtcagagatgtcttgcatgctgaatttatttcaacagtcataaatatgagtgcctacactggacaaggcactgacaatacaaaagcaaagaatctgcctcaaagagtccactatctaatggggaaaagagaccccttccattatcccatccctgcttactatgggtaatcagcaagatgaagtcctataatattacctctactccacccaaaggggttgaggcccatgcagataatttattcaccatgactatcacagaatttctatagtttacatcctgttgagaaaagtccttgtggaaaattctcaagtctactctagcctggtgagattgcttgcatagacttaagctatatgattgagctcaaaaagccctttctctattcctaacacaggggattaaaaaattaattttagagagaccttctgttcctcctgctgcagcagaacatcagcaagtgtcagggaatcaactgtccaactctgtgagggcatccttaactctgggagtgaaatgagatattggaacagaagggaagggatttgtgtgggttgctgggccaataaagtttatccaaacacacatacacacacacacacgcacacatattaggagaacaaaaatagaagctctatgggaagaggcagtgaggaagatgatggtgtcagcagtttggttggcaaaataggctgaatagaagaaagaagtcaagaagtcaagcaggaaatactggtcctgctccctctgggctgtgatctctggcagagataaaagaggccattcaatccttggcggtctgaaaacttacactcagggtgattcaatgataaaggcaccagtgtaggaagatgtgatagttgccagtcgttggaaaagctgtagataggaaggtcaagtggtactagacaaaacagctgcactgctactggaaacaagtttttaacgatctacattggatttcacaaagcgtagagtggtattcagctgtttatttttatgaagcacctaccatgtgtctggctgtattctaggtatgaggagacaatggtgagcaaattgccatggcttcttcccttaagatgcttagagactgttggcaaacactactaggcagtagcaaagtataatgtgttctccagtagaaaaatgtgctggccagccaggcgcggtggctcacgtctgtaatcccagcactttgggaggccgagatgggcagatcacgaggtcaggagattgagaccatcctggctaacatggtgaaaccccgtgt

SEQ ID NO: 3882 - DNA, 1098 bp, Homo sapiens
tttagatgaaaaattttgaattgaagattgcagctgtagctgatgaaatgacttactgattatccttgcaaattattttaatctcacaagcaggttaaaagtgggtgtaattctttttaagccatctctacagctactctgccaaagacagattagagtcggtaaagagactctgaagtgtttacaggaaggcaaaggaatccagtcaatttaagtatgagagttggaaaaaaaaaactttggaaacaagtgttgtgaaaagaaggaaatgctctttgttactaattttcatccaattttgtaagtgtttttacagtttttctaactagtgaaaatgccctgagggtgagtgggtgttgtgcccttccttgaagtgtttccttgggtcctattacttataggtggtaaaatgcctgaaattggaaggtatcttgaacctcacctgtcacggtcttgcataggcaatgccaaggtctcttgatggaagaattccttaaagttgtggaattgaaaagaggcctgaattgacctacagggaccctttggcagcgtatgagaggtttgtatcttagtgatgtgattgaagtctcagaggagccaactttagaatagtgttgacacttgtaaataagaaaagaagtgaccactagcaaagtatggagccacttatcacagaatgaaggaaaggcacttatttgtttcaacagctcagcaacaaaattgagttaaatacagccctaattcctttttgtttaagaaatagcctttatttttagaaaaagtcaagtaaattgggtggaattctagatatttcaattaaagagggaagagcatattttctggttcctgtttaaaagaatgtttttattaatgacttaaaatactccatttatcagtttacttcaaatagttcttttcaaggagtggtgcttccgttttcgtggcctacctgtaccttgtattataggatttagattagctgggtagataagttagcaaattcaagagtgccagatttgtcctagtgtcaatttgtttttaaatttatctgtttttttaggttgatttctcaagagccaagaatgaactagaacttca

SEQ ID NO: 3883 - DNA, 1032 bp, Homo sapiens
aataaagatttattttcatgctcacttcttaaaagtcataaaaacaatcaaataggatcatgtttattgtcatgtgtttcctggtttctgacctgtgtgcacacccctgtgtgtttataatttttaaattgaattttatatggggtttttatttgctaaaaaccaggctgttgaatcacatttgggaagggtacttatcttaatgactaatgacttaattgggaaagttgaattcttgtaaaatacaaaatccaaggacttcttggatttaatctgattgtcacttcttagcagatcacttttttgataatgaaagttaagcatactgaatgctacttttgattgacaaactggctataatagtctaggggaaaaatccctaaacagataaagattcctaaagtaatggtggcagctgatgtttcagtgaacttttatcttgatgcgtttaaatggaagtaatgccagacctgagatttttaaggcatttttacagcttgtattgaaatgattggagacatggtttctttattagctattttgagacctgtggagttaagcaagacttttaaaaattggcaccatatacatctagttagttcctttactcttatttttttaaataaaagtagtacacatcatttccagggttgtaaatatatttggggcttgtttttggtatggatttaaaaggaggatattaagtattcattctaattttgttatttttctagttgccagagatggttgcactgaaatagaacagggagttgcatacaaagcctaaatgtgtattggatttcgaaaatactaggttggtgcaattggttttgtaccaacctaacatgtctttaggaaagtaccatcatgtggaaggaaacaacaggtgttaaaaggttcaaaggaatgagaaataggaagttactagaacctaactgatgttgaccttagaggtaagattattcaggtatattagtggacctccagtccaatggtatagcaaattccagggatctcaggtgcatgcaattt

SEQ ID NO: 3884 - DNA, 1607 bp, Homo sapiens
agagtaagactgtctccaaaaaaaaagagaaaaagaaaacaacccatattattactctggaatgaaaataggccttggtagaaatttaggacagggctcattgcaaatacttgtagtttttttgtgatccataattttgtcttgatacattttacctagaattttaacagtaggatttttttttttttttttttgagatggagtctcactctgtttcccaggctggagtgcagtggcacagtctcggctcactgcaacccttgcctcccaggttcaagcgattctcctgcctcagcctcttgagtagtgggatcacaggtgcctgccaccacacccagctaattgtttatatttttagtacagacaggatttcaccatgttggccaggctggtctcaaactcctgacctcaggtgatccacccaccttggcctcccaaagcgctgggattacaggtgtgagccactgtgcctggccaacagtaagatttttttagagttctgtcttaatgtagacactagctaacaatgtaattttgaagaactgagaactgtggttaattttggtttttctttttcagtcaagtgcttctgctcctgatgtggatgacccagaggcattcccagctctggcttaactggatgccataagacaaccctggttcctttgtgaacccttctgttcaaagcttttgcatgcttaaggattccaaacgactaagaaattaaaaaaaaaaagactgtcattcataccattcacacctaaagactgaattttatctgttttaaaaatgaacttctcccgctacacagaagtaacaaatatggtagtcagttttgtatttagaaatgtattggtagcagggatgttttcataattttcagagattatgcattcttcatgaatacttttgtattgctgcttgcaaatatgcatttccaaacttgaaatataggtgtgaacagtgtgtaccagtttaaagctttcacttcatttgtgttttttaattaaggatttagaagttcccccaattacaaactggttttaaatattggacatactggttttaatacctgctttgcatattcacacatggtcaactgggacatgttaaactttgatttgtcaaattttatgctgtgtggaatactaactatatgtattttaacttagttttaatattttcatttttggggaaaaatcttttttcacttctcatgatagctgttatatatatatgctaaatctttatatacagaaatatcagtacttgaacaaattcaaagcacatttggtttattaacccttgctccttgcatggctcattaggttcaaattataactgatttacattttcagctatatttactttttaaatgcttgagtttcccattttaaaatctaaactagacatcttaattggtgaaagttgtttaaactacttattgttggtaggcacatcgtgtcaagtgaagtagttttataggtatgggttttttctcccccttcaccagggtgggtggaataagttgatttggccaatgtgtaatatttaaactgttctgtaaaataagtgtctggccatttggtatgatttctgtgtgtgaa

SEQ ID NO: 3885 - DNA, 1050 bp, Homo sapiens
gttaaattaaaatattgtgagggcaaaccctttcaataaggtattagttatttttattttttttttttgagacagaatctggctctgtcgcccaggctggaatgcagtggcaccatctctgcttaccgcaacctccacctcccggattcaaacagttcttgtgtctcaacctcctcagtagctgggattacggacactcgccaccatgcccggataatgtttgtgtttttagtagagatgaggtttcatcatgttggccaggctggtctcaaactcctggcctcagtgatccccgcctgcctcagcctcccaaagtgctgggattataggcgtgtgccaccatgcccagccaataagcataattttttaaactgcaaaatggctataagacaaacttggaaacattttaaaataaaatggaggttaaaaagattaaaagtttttttaggtttagagatgatttttaacatttacttcatatgagtagtaaatgaggacattgtcttttttaagtcctgtagaaaaaaaactgcattagaacacgtggtttcagccaggcgcagtggctcacacctgtaatcccagcacttttgggagactgaggcgggcggatcacctgaggtcgggagttcaagaccagtctgaccaacatggagaaaccccgtctctactaaagatacaaaattagcctggtgtggtggtgcatgcctgtaatcccagctactcaggaggctgaggcaggagaatcactttaacacaggaggcagaggttgcagtgagctgagatcacaccactgcactccagcctgggcaacagagcaagactgtctcaaaaaaaaaaaaaaaaaaaaaaaacaacactttaactttcacatgtcttcattctcgtgacaaatgtgaggtagttaaggggaaggaagaaactatttacaaatggagaactgtgttaccgtgttattgacagagctcagagtttctgttttctgctcctcattgtctgagtgctctagaaaaaaggtcggacacagtggcttacacctgtaatcccag

SEQ ID NO: 3886 - DNA, 1351 bp, Homo sapiens
tctctaccaggtataaaacttgaaaaccttttcacagggagaatgaagttgaagaggtaaaagaggagggtccaaaagagatgactttggatgagtggaaggctattcaaaataaggaccgggcaaaagtagaatttaatatccgaaaaccaaatgaaggtgctgatgggcagtggaagaagggatttgttcttcataaatcaaagagtgaagaggtaaaattaagttttgtcgtgtttgaaaatgttcagatgtgacttgaattgtatttataatttttgttttaaaatttcacatgggttatttgtctgttaaagctttacataggatcatttggggcagataatttgctttataaggaaaataaactgtattatcacatattctaagaaatttagtcctttgatcaatttgtaattatgttttatgtggtagagttactttttcctaaaaagctgttagtggagtatcttgtagttattggtgttcagaaatatgatagttcttttcaaagttgtggttgtatttttgaaatcttgccaaactggggatcattaaagggctgtggtattatggtgttaggttgaaatcttgacattttcatatggtttaacctaaaatgtaagtgacttcatttagaattcaacttttgaaactgtctgcctataccatatataatggccaggacactcagtaaatggcaatgtgcattttgtctaaggaatgacgactttaaaaaccaaagtatatgtgggttttacttaagaaacatggaaactagtgaaaatacagttgacttgttgaacaacatgaggatgctaggggcactgaccccgcagatcaatgcacatgtaacctttgactctcccaaaacttaactactaataacctgttgactgaaagtcttagtgataacataaccagttaacacattttgtatgttgcgtattatatactgtgtttttacagtaaagtaagctaaagaaaatgttgagaaaatatatttactgttcattaagtggaactggatcatcacaaaggtctttattttggataggaagaaaagggattgggcttgcttgtctcaagactgacagaggcagaatgttcaaagccacgttgttcaagggtcaactgtattggagaaagtcacattgatggcttttgatttggtagcttccgtttaagctttggggtgtgttcttagaggaatgtttcagtgcggcttcctgtttggctttaaaaactcatacaagccctaactatattatttcttctcctaaattcattttctctatcagcttcctttaaccttttgacatttgtgtttgatttattcatatcataaatt

SEQ ID NO: 3887 - DNA, 1978 bp, Homo sapiens
gacctaaaatcatgtttactttgccagttatttgttacagtattgtggtttaaagtcttggattacaggttatttaggacagtgattcctaaccagaagcatattcaagttagttggggggtgggaggggcagatgttttctaaactttttcttttttcttttttttttttgagatggagttttgctcttgttgcctgtgctggagtgcaatggcgtgatctcggctcactgcaacctctgcctccagggttcaagcaattctcctgcctcagctcctgagtagctgggattacaggcatgtgccaccacgcccggctaattttgtatttttagtagagatgggtttctccatgttggtcaggctgatctcgaactctgacctcaggtgatctgccctccttggcctcccaaagtgctgggattacaggcgtgagctgccgcaccttaaactttttcttttcttcagaaagaatttgctcttatggtgagcactgttaatgatgggaatatcatattccgtggatttgttgggataaggaaaaatgatatactattggagggagtagataaaaatacatggtattgggtgatgttttgaacttggtaataaaaatttatgcaaaactataatggaatcataattttgcatgataaacaatgaagttgtgattggtgccttaacaaatgaaccctatgcaacgttaagtttctcatagtggtcaacacaacttttttttgtttctttgagacacagtctcctgtctcccatgctagagtgcagtggcgcgattttggccattctgaagttcaagcgattctcctgcctcagcctcccgagtactgggactacaggcatgctccaccatgcctggctaatttttgtattttcagtagagacatggttacaccatgttggccaggctggtcttgaactcctggcctcaagtgatcctcccgccttggcctcccaaaatgctgggattacaggtgtgagccaccgtgtccaaccacaactgtttaatagagcccatgttcaatcactcagtgatatgcaaagattataactgtttaccaaaaggtactaatgtattgataggctattggtagcaaatccttagctcagtgcccaggagcgaaactgagggtgtttggtttaaagaaaataattatccatcacattagaactgtctgtaatcttattccagactaggggagaatctgggcatagcatatggaagtataaatttaagaaacacaacattggctgactttgatgaactaacttatatatagcttccagagcttctgtttggtttttatttaatccttgcagtaattcctgaaaggtaggtgtcatgcctccatgatatgataaaaggtatgctaagttctattcctggctgtgtcataacatatgggtaagcaggactttttttatattcttagatttctcatctgtaaaatgactaggtggactcagtacccaagatcccaagatcctgtcaattcaatataaacttgctctaggaagttttttgttttttttttgcagcatagatgtaactggaggaacttttaagatagcatttgtcaaacagtaaagggcagcatccagggagatatttgagctctaaggctaactgaatcacctgctatctttggaaagaagcagggctccccaaatagcaaatgacttgtttggtgacaattgcagattgagattatactaaaataatggatccttaggcctgtgctttgtttctgtaaaaagaggaaaggatcatattctatagttaagacctgagaattatatttggaaataaatggtttagtattaaataatgaaaccagtgtgtgtttgtggatagttctattagtagtgaatccatggcctcctttccatatacaggttggtttgaaaattggagtataaggattttaggatttgtagaaacacggctattgttttgatttgct

SEQ ID NO: 3888 - DNA, 1477 bp, Homo sapiens
ttgttctggtttcctttgtgtttagaaacagactattttgaattttctgaagtgtatgtatttaactattggtttttgagccagtaaacatgttctgtatttttgatcttttggatgaattttcctcatttcttctggaaaccatggaagtataatttatttgtttatattatagaccgattattgaccgacctattcgaggtcgtggtggtcttggaagaggtcgagggggccgtggacgtggaatgggccgaggagatggatttgattctcgtggcaaacgtgaatttgataggcatagtggaagtgatagatcgtaagtcttactggtttttattttactttaatattttaatctatttaataaacaaactttgaatttctagaactaaagagtattatgttaactcagttttgttagttctttttcacattacagtggcctgaagcacgaggacaaacgtggaggtagcggatctcacaactggggaactgtcaaagacgaattaacgttggtattctgattttcttaaaaattctatacctaactagaggttaatccatacctctgtcaaattttacttgtctctgagataagaatgaatgctctcttctgagagttactatattacaagataatgtcttatgggatgggtttgggttatagtatattgaatgaccggttttttaatatttcgatatatttgttactcattttttcccccccatatgtatttgtagcttttcctgaaaccccacaataaggttatttgggtattctgattatcttagtgtccttaatagttcctattctagcttttgactttgttgtcattacaaaatttgataagctagtaaagcttcattttataattaactgccttgttctgttactttttaagtatgaagtatatgaactaactagtttatattgtttacttttcgacgtcttctggggagtatatttagtaagaaaggagttagagaatgtgagagcttatggtatttttgtatgaagaacttttcagctacatgtaaatggacctagatgcctttctttttctttctttccttagagagtcccccaaatacattcagaaacaaatatcttataattacagtgacttggatcaatcaaatgtgactgaggaaacacctgaaggtgaagaacatcatccagtggcagacactgaaaataagtaagtggtattgcgtgtaatagtaatgacccagaattgaaagcactggagttttaccaataagataacccatagatttaatgctgttacttgatggctttttgtttttgacaagggagacttactgtaccctcatccctcaaagagtatttgaaagaatgctttttttttctttttttaatagagacagggtctcactatattgcctaggcaggtctccaattcctgggctcaagcgttcctcctgccttggcctcccaaagtgctgggattacagg

SEQ ID NO: 3889 - DNA, 1031 bp, Homo sapiens
tgttcactcattttgaatgttcaaaacatgaagcatggtttaaatgcctgagttattttgatcatgaagcccatctatgaaataagctcttacctgaaaagtagtattttaagttaacaaatgtggggaatgatttcatgaagttagaaccaagacttaggttcaccgttcaatgagtctttccatgggaaaactattccatgttagcaatcagcattttccttaggtcagtatttcagagcactactgttaagttgcataaaatacaagcatgtaaaatacaggaaaagtgttgaatggacaatacccgttttgagattctactgtcctgattactgggaataaatctgtaaacaaagtcgctgcatgtagtaggaaggttaacctgattgtgttctgtgattttgataacacattgtgacataatacttgacatactttagacagatatttaatgtttatgttttatgaattaattttgtacattctcttgcccatttgaagaacttgagaattgacagcagaatgtcattgagagtgtagaccagggattttctaaaaaagaatgaatgccttgaaactagtgcagttagtgagcttgcaagttatagataagtatatcaaaagaagcttgcatttttaaatgtcagtctttttcattaggtaggtttaatacgtttttaagattctgtaaacttgatattgggtggggacgccaactattgttcacttgggtgtgtttggcttggatattattgcaaggactggttccataactccaccccagtgcactttattactgatgacatttatttaaataccttggtgtaaggtctaatatttgtagtctatcttgagtatttacagggaatgaacttcaaaattctattgaagagattgatagttactgtttggctccagttaacaggcagcagaacaactgggtgtgtcttgatggtgttctactttcttagaaagaaccaaagtgaagcagcttaaaatcttgtaaaaccaattcctcagctgcttta

SEQ ID NO: 3890 - DNA, 1059 bp, Homo sapiens
caaatcattgttagtcttgagtttcctttcactccttggggttgtggcagacgtaaagcccactagaaagcaggaattttcaaccacaaactggatatgtattagagatcctaaattatagactttagctatgtcacccacattgaaatctttttgatttagtcctgctagtttattcgcatcgtttcatttacacctgctactaacaactgccagattcagtcacaggttgactaggtagtagttatttcactactgcttcctatactttttgtgtatttttaaaagaaaaatgcaaaacaggcagaagaataagggttgaaatatacaaacctttctatgtatttcatcttctgttaaaatatgatcttgttctaacacctttgttaagcgtttgttgattattcagctgcttttaattaccaaatctgacccaattacttagcttctaatgtgttccctttataaacaaagcctttataataaaaatcttatctaccatcttttgtctgtaggtaaatatgtttatcatcttcattgttctagatcttcatccctcaagtgcaatatacaatcatagtgtttatattagtaataattttaatgttttttttctttctctgctcttagaaacactgaactgtacttcagtatttgatggcatggcattgttaagagatcgttactcgtgcatcagcttaatcgcctactgggggctgtttcccttagaaggatgtgaaaagaaaagagtgtgcatacattttatagattattataagttattttttcagtgcttgacaggggcatctaatgactattgataatattcttatatattttgtctactttaatttttatgtattcttatatattttgtctaatttttcatctcatgcaaggaaataattttttgacaatataatctgttgctttttgacccaagtgtttggaaactaattgcctgaaataccaaacaggctttgtttggagaaagacggatatatttttcccaggtctagttcctggacgattcctctgtgttcttgctacttgactcac

SEQ ID NO: 3891 - DNA, 1031 bp, Homo sapiens
tttaaatttttttatggagattgggtcttgttatgttacccaggctgatctcaaactcctgggctcaagtgatcctcccaccttggcctctccaagttttagcattgcaggtgggagtcactacccagccacagctgtttttgttaaataatattaaattaatcttatttatcaaagaattgcataaatatatatcactttgctttaggcctggtttatagcttcatgaccttaatagcacaggcaaatataaaactgaccagtgctggtgctcagaaactgatatgccaaaacatggtatttgacacgctaaactaaagaagcctcaaggtctctctgacttttcctccaaccccaccatccttcccaaagaagctgaagttcctttatctgcctaacaaccagacccaccaaggagagcaattgttggttctcctcctcctgttatctcatctgttaaagaaaagaagaccaaaatgtaaccacacccaagcagacctttatagaagtacaatgactgcctccaaggattatttaaattccaaagaaaactatttacaagttaatatctgttgctcaatccaatcattctctcaccaatcattcattgcccctcaataaattcctcttctcctcccataatctgttttaccagaatccaagccccccattctttctgtaatttcaagactagtgtataaacttctataactcattgagaagttgggtctttattctgaaagctcctgtgtatacacattaaatacatttgtatgtcttttctcttactaatcaatgtggcccatgtcagtgattttccagcaaatctttggggggctgagagccatagcccccacaccagtaaacacaggcaaaaatatatattgacaattagaaagacgtttttaattttattttatcaacaattttaaaaccaattacttttttaaagattaagttacatgaactaaaaaaattaggttaattactatgtttttgtgtgagtgcccatctatttaaaccaatcagat

SEQ ID NO: 3892 - DNA, 1049 bp, Homo sapiens
ctgcagaccagcattatgagaagatcccaggccttataatccaagcttagtcctacctgcagtccagcactgtgctgagccttctacgactgccccagagcaaaccaggtgtcccctcccaggcctaccactgaggtcactccagcctatacctgcccaattagggctgcttcacacctaagtggcacccccagagggggttctctgttcttgctttaccctattccagaaggaataagcccatagtatgataactggcagttttgctaaggcacaaatatgaatcttgcccacttctgggacggggctctgagcaagtctctcagccttcaggggctggctcgagggataaaggggaccagtggtcactccatcatctggccagtttagtctgcaccagtcagatgcctgtcacctaggtctcagaagtcacatttagcatgaaacggattaaaacgaggagccagctctgtgcctcaatttcttcatctgcagaaatgaggattataccacttagcattgctgttgggaacatatgaattaggacagtgcttggcatatagtaagttttaaaaaggtatctatcattgtctttgccatcatcatcatcattatagattcttgacacctgtggaatatatatagcccatgaaatgacaaataaggaatgcttatattggctcctaaatttctccaaatgacatatttcagctatagaatccagtgttttctgtatatatcctccttatgccacaagttaaccagtagctggcagtctccgagtccctctatctttccagccttctgatcctcaccctatcccaagctgagaccttggcccagagcctcagcctggcagtaggcatgattcagatttgttcctcagcaaaactgccagttatcaccccatgggctcactccatctgcagtcattgaagccaagaaagttgaatccgggaatgccagaaggtccactactggtttctcaaggtgtgtttcacaggatgctggttctgttgagtgattacagtcggtgatttgttgttgag

SEQ ID NO: 3893 - DNA, 1035 bp, Homo sapiens
gcccttccctgagctgaagggtccactgccttaacagagtagaagagctgccatattgccatattctctcttgcagctaggatgcgtgacagcctagcctcccctccttaatcacatacagaagagttctctgtgttatgacagcaggtacctgtatttctggaaactatcttaatgctttcttttcctttccattatatgcaataaaaatcatcataagatgctctaagtaatatagtttttataaagttagtatattctgcacttaaagaagagcgacatttggagacatttctaagaagtcctaagtagcttgaatgctggtacattgtcctaaaattagtaatggttatgaaatccatctttgccagaaaacacttctgggcattttatataaaatgcattattttccaaaataaataagagttcataatagtggtttgtttatgagtcacaaaaagtgaagaattatgtatcaccaaggccaaactaaaactgctaagtctataattggctaatgtggttaactgacactcctggtctttcagaaaaaaatacctatacttagaccttaatttggcctagggccccaagtgggttatggattatacagaagataatgaacacagacccactgtatcataaacaggcaatgaaatccacctgcttgttaaagttcttaacatttcaatctagcctgccatcttacaatttaaaagtgattcctagagaaagtttatacaacgcagcctcattcagctgtcaaaggaatatttacccaatactttcttctatttccattttaagtgtcccgtagtaagcagaagtggtcaaaatcatttcatttgtctcagagctggcacaaattagtcacttagctcagcagctctgttgacagttcttagtgtaatccatatatctttaggcagcccttaagacaattaccaaatcattaacacagacaaaagcagcttcaaaacatctcttgcagaattttgaagcatatgaaagcttcataattattttcatgagtgg

SEQ ID NO: 3894 - DNA, 1100 bp, Homo sapiens
ttctttgttctcatacctagaatctagcatagtgcttgatacacaataggtggtcggcaagtgtccttcgaatgctgactcccccatagaattgcttggtcttcctctcccctctatctcccttctcaatttggttttcctcaggatcagcacgagcggaaccacatcgcagggtattggaagcaagtcggacccattgccgttggctccttctgcctcttcatatttgacatgtgtgagaggtgagcaagtgtttgtgggacactgagccaaactgtgcatcaccacgcccactcctgtcattttaggaggagtgtttgaaaaggagaatggtggtcgggaacctttggtttggaagcactggacgtggtcacatcctcagacaaggtctgggatcaaatcaaaggcacagctctttacagttgaaaaatatttgggccgatgtattctacaagcttcatttctctttaggatttctgtaatgttttttagcctaaatacagccctcacccctgcagctgaaaagctaagaatatgtgaaaaggaaagttcccgttgcctttgtattaattgtgtcttgcctttccatctcattttctttgtagaggggtacaactcacgaatcccttctacagtatctggactacagacattggaacagagctggccgtatccttccttgatgggctcagggttttatttcttcccctggccacccagtccccaagatcattttctaaggctctgctgatgctccccatatgtactcagccagggctttgattctcaggccaatcataacagcacaattaaggctaataataagaagaattactgcttgctttcaagcctgggtgagagcaggcaaaatgagaaggtcacagcctatcctcacagcagagggatccgagttgctaggcttactgcagcctgtctgaattatctgttatacactgtttcctgcagactgaagcatgactagcttttccctggagccatggaggttcatctctgggcccctgtggaagagcctgtttctgaaaccacctatgtgtgagacttcttaagtgaccttggtgtgctggcaaatcacactgctg

SEQ ID NO: 3895 - DNA, 1047 bp, Homo sapiens
tttgctgtatcagagcgactgcgtctccttgcactgcaatctcaacgaacataaccaccacctcatcaatgactttaccataaagcagatgaggcagggagcattccttgtgaacgcaccccgtggtggcctggtggacgagaaagccttagcacaagctctcaaggagggcaggatacgaggggcagccctctatgtgcgtgagtcggagccctttagctttgctcagggtccgttgaaagatgcaccgaatcttatctgcactcctcacactgcctggtacagcaagcaggcgtcactggagatgagggaggcagctgccactgagatccgccgagccatcacaggtcacatcccagaaagcttaagaaactgtgtgaacaaggaattctctgtcacatcagcgccttggtcagtaatagaccagcaagcaattcatcctgagctcaatggtgccacatacagatatccgccaggcatcgtgggcgtggctccaggaggacttcctgcagccgtggaagggatcatccctggaggcatcccagtgactcacaacctcccaacagtggcacatccttcccaggcgccctctcccaaccagcccacaaaacacggggacaatcgagagcactccaacgagcaatagcagagaatgccggaaggtaatcattcagatacatttgggaccaagagatagtgaaaaatgatgaactaagagaaaaagaatatgatggtctttgtaactgattctggacttatgcatcattgatgctgcagtgttaaaactacaagagctagaaaactgaagatgtcgtctgcttacggaagcgctgaaagactaggatgtgatttattaacgaccaacttctgttattgtgtgttaagtttttcatctgtgcatcaaatcacaaagaataaatagagctttttcctttatcagtcccttgggcacagcaggtcctgaacaccctgctctacaatgttgcatcaagagttcaaacaacaaaataaaaaatattaagaggatatccccatcctgtgacttga

SEQ ID NO: 3896 - DNA, 1034 bp, Homo sapiens
ggagagattaagtttttgtgttgtgtgtccctgtgtgcgagcgtcattttaaggtggctcgggagcggcccggaggagcgagggaccgaaaagggagccatgctgcgctgaggggaggctgcacagctgcagccaccgccaccgccaccgccgcagggtggggtgggaggggcgggagccaccgccaccgcggcctccagagtgggcgccttttgccgtggacgctgaccgtccgggacgagggtttcatcaccttaaatggttttgaaccaatgaagctgtattcccttaaaaagacggacagcccatcgtgtgaactatagatttatagtgtacagatttatagtgtgtacagatttatagtgggttcatagtggcgtcatgcacggagactcctgcgagttcccctaagttcttagaggactgctttgccttttgatctgagagttgcaaagttccataaagtatggcccttgtggataagcacaaagtcaagagacagcaattggacagaatttgtgaaggtatccgcccccagatcatgaacggccccctgcactcctgccccctggtggcgctgctggacggccgcgactgcactgtggagatgcccatcctgaaagacctggccactgtggccttctgtgacgcgcagtccacgcaggaaatccacgagaaggttctaacgaagccatgggtaccatgatgtaccacaccatcatcctcaccagggaggacctagaaaagtttaaggccccgagagtgatcgtgcagataggcagtggctacgataacgtggacatcaaggctgccagcgagctcggaattgctgtgtgcaatatcccgtctgcagccgtggaagagacaccggactctaccatctgccacatcctcaatctgtaccagaggaacacatggctgtaccaagcactgcggtaaggcacacgggttcagagcatggagcagaaccgcgagttggcctcgggatcggccagcatccgtggggaaatgctgggcctcatcggctttgatcg

SEQ ID NO: 3897 - DNA, 1055 bp, Homo sapiens
aggggcacgcaggtagattttcacaacgatcaaatcagctattctaaatgctctgtgtactgacagtgtcctggagagaaagcaaagaaacccactgtgtgttttcctcacttgctttcaggtttgttttctttccacattgatgttgattatggtcaaataggaaagtgctgttgccacatttgctttccagtgttttaacacttgctaacttagatggttctgagttctctagctttgttagcgaaagattggttcatcattgggttcagattctttggtaaacaaattccttagaaaatatcctcctggcagtattttccacaaggttaaatcgtcttaagcacactgagaactgtgttagcagtgggcctcagtttccttaggatgtctctttgtctacctggccccccatcccagtccgtcttccgcacagctgccagaatctcctcctttgctttaacatcctctaagcaaaatgctgcagcactcagggcaagcttcttccctttgtcattagacccttcctgttctctagccttccctgttccctccagtccctctcacattccctgccatattgaattagttgctttccctgctattttgtgcttatgtgactttttatacatggggcttcctctgcctgtaatgccttttcctatctcgctgcctagtgaactcctattctgcaattcattggtaaatatcacctcttctcagtagggtgagccagaagattgtgtcttctgtgctacaattcttgaccttctactcagaactcttgatctttttgtgctgactgtatacttcatatatacttctaatgcagtacaaactacatggaattatacttatttatatacctgccttcaccactttactgtaaacaatttgagggcaatgactttgccttatatgcctttttatccctactcttttttttatagaagaagtttaattgtttcactctttatagacatatataaacatacatttttatgtttatatacatgtatatagttccaaatcctatttctatataagatttgtat

SEQ ID NO: 3898 - DNA, 1028 bp, Homo sapiens
gaccctccagcttctcagcattttctgcccttgattttcctaaagcactcctgtatccctccagctgatttctggttaagttagtgggggtgaagtcctgttacttgcaaacaaatgttcgctaattaagacaacgtttatttcatctgatcatcggaacaattatatctggcagagtgaggacactgaggatgacagagtttacatgatttgccagtctcccagctgggaagtcgagaggctatgagtgtacatgatgttaggactccagtgccttgatcccaccatgagtctattgacagggctatggagtgcttcctgttctgagtgggaaattatactagacgacccctaaggtcccatctactctaactctctgaagttgagagtccatgactcacttaagattctctgactttataaaaaatctcattggtatcctttggttttgtaaatagatgacttcagagaccctcaagtgaaaaccattctagaagatagtgctcagtcaagacagatgctcttgttagagggtgagcttagtgttgaaatgagtgaattttcttttcttttgttacatgcgaccttgtgttcatttctactccttaggtaggcagacagggttggtgtactggaagtgtatttttagtctgacattaaaaaatgtatcatagacaccaacacaggaagcagtttttaggtgagtcagtgtataaataacctcaaagagtttcatgatgggatggtagatctttcagtttagcagttcagtatctgaaaaccctttcccaatttcattcattcattcgataggcattattgggacttgtactacatgctagcattttgctcaggatttaagaaataaagataagtccttattcttcataatacaatttcagaaaccatcataaccctcttttgtttagttttctcttttcttttcttttttttttttttgaaatgtagtctcgatctgttgcttaggctggagtgcagtggcgtgatcttggctcaccgcaacctcc

SEQ ID NO: 3899 - DNA, 1016 bp, Homo sapiens
gttttattgaaattttttgccattttttaaaatgaggagactgtagaagaaaagtatttaagtccatggtataaacgcacagccctaccaacaaagaactttgtctttttcagcagtgatttcctttgggaagatatttggagtatataaaatattgctaataggacccctgtatactaattctgaaagaatgctcactctcagaagtttatatctttagaatctgtcattgttgcggcttgaattaaataatatgaaaaccattaaccctctacttgttcatgctgctgcctttttccatctcagggctccagtctgtaaagtgtgcctgtctgctttttggattaattttggcatctcccccattattgtctaagtttcaacagctagaaacacagcttcagccaatttgaatgtagagagggcctgcccttttgctgcagagaaactttgcaaacaaacatctggttttctgaaatgactgcagggaaaaggacatgagggtaatggaggagccagaggcttgccatgaactctcccatgctctgttgtgtgtttgtgaaatctgcgtaatgcactgatacacctgatacctcacatttgtatagtgcttttatccttcttgaaggtactttagtagaaatcatcttatttgatcttcccaacaacactctaagataggccagtccatcagggatatttacattttaaacttatgaaaactgagatggggagtaactgtttgtggtatggtttatttggcaaggcagtagctatgtttgtggaaggaataactcgggatttgaatattaattgctacattatgacaagttgaagaacaagaaaaaagagtagttttaaaaaatatgaactacttgtgatagaaatcactgtgtattggccaaacatttctttttgagctctcttccaggacaagtaaatgacagttgtggtccatcttcttcaccctcctctgtgtagcaagccattcccatgaacagttgttgattctctct

SEQ ID NO: 3900 - DNA, 1026 bp, Homo sapiens
gtatgtttactttggaatttcagcagtcagttcctcttctcttccttcaatactcttctctgatacttaactcaagattgtggttgagccattgaaccatgggaaattcattttcaaaatctgcttaattgctgtgagacttttaatttgttctggatgatggtgctaatgtctgggaactgggactgaagccctccaaagttgttaatttaatcaaccgctgtgtccttgccatgcctaatgaagcagggggcggtgggggaaccagacccctctcacaaaggggctgggttcctcctgaccaccttgtcaaagataaataagaggggccccacagttaagctgaacagttggagcaaattaccagagtgtcagcccacgttatccaaagcccagggttatgcttcccaaaataattactgagtaggttttatgtaggaccccggagttttaaggcatgggttttgtgtgcgtgtgttcacacctgccaatctgcagaattcttcagtcagtttggggttctgttatggctttgtccataatctgtaagatcataaacatcacccccagactattgatgttcccgttaaccactgaagttttccatggcgagactggtgaaagcttgctctgtcctcatgataaattagcttgtttattcctcttctgcttatttctatcctgctgttggttagtgtaatgaagcagaagtccattgtatgtgttcattgggtagcgatcctctggcaccaaagggggtaattgagtagaaaggcggaatgctgttggtgcatgggagaagttaacaccacatgaggtcaccaggcttcaagctttaatcaatgtggacacaatgcaattgagattgtgaaaagggtttgtttatagtgtgagagtaagggtcagtagttaatttgaaatgctgtaggtgtgttttccttgaaccaagaaggtacagagcatgtgtcatagaggactgtaaatatcctcaagggagggacgtaattggggtggggatttaaaaag

SEQ ID NO: 3901 - DNA, 1036 bp, Homo sapiens
taatgggattttgcaaaaaggctctgaaagcaacatcttacatagtagaacttagggtatttataaattcactgatttatataatgcttttttaaaaactttgagccactatgaaaccatacatctgatacatctactattctaaatacatctaaatacattctaaatatttagaaattatttaaaaatgcggtagtacctgaaggaaaagataaatatttttaaaaatataactttatcctccttaaaaataagcctgcagaaaacttaaaaataattctcttttgatttcatgttgggtgaatttagctcctgaaaaggcagctttgggggtggtggtagaagcagggagggaaggagaccatgtaccctgaaaagagagtgcagactaaaaatcatgaacttgaatcccattatgtgcaatttgctcagcttcaaattagtcatgtctcagaaatataatggttgaaaaagcaggtcactgttctcagctcttctaaaactgctaagagtatgaagatcagaactggattaatagaaaattgttgcattgttttcagcatacccataaatgagactattccaaacataaactgtaagtatcaacaaatcaccaattattatttctttagaaaagatcattgtttcttccaaaaggtaacttatgtgagtggcctttttaaatttttaatgttgaggatgtaatgtatactgtataagatataacatacacacatatgtaatcaattttctcaaattgtgcatggattatctacttctttcaaggatgtagcccacacgattgtgctagtattgtttaagtggaggcaactggtctttactgtgacccatttatgtgagcttttgtttctgctgctgttgtttatttggaagttgcagaattttaagaaattaaattacagttatgcagagtatatgtgtttactctccaatttattagattttaagcttgttgcatttcttttaatatatcttaatgatgcaatagttgtaatccttcagtatttgggtgtct

SEQ ID NO: 3902 - DNA, 1026 bp, Homo sapiens
tttgtttattacatacaatgtctcagacttttgtattcatgtgttttcattaggtttctgatttataactcggaaattcctgcattcatctttagatcttagcagtctccatctgtcttctgattgctcagtaatctgatctgtcaggcagcaccttatgcccaagcaaagaatcggaatctctttcttttctccaacttaatggatcttcatgtgtcccatccacacaggcttatagtctaccttttactggatagaaatgctactaagcattactctactcattcattaaagtgaaaattaaatttcaacatcaaccataaactggaaggaattacacaaattataaattactcaaatattggttgaaatttaacttttggaatcagcattggataatttctaaagtaattctttatgcatttttttaagtgactctcaggcagcagtgccatctgcaggcctcctctgatgcagctctttttagtttatggaaatttcttcttaaaatggatttggctctactaaatatagctttataatgtcaaatacaaagtgatgttattcacaaattttaaaaaggtgaatttacaggtacagatctctgatagaaatcttttaaccactaagctaatatcgactgtctatattaataatcaaaatatcaaacataatgcacagcatctggaatatatatggaatgagcacggattttggggatcacacagaactgcgttcttgggactcattacttaccagctgtgtgaaacctttaaaatgttacttaaactttctgagatgcaggctttttatttaaaatatggggataatattttcttcattaaatgtttgagagttctcaaatgacatgtataaagtgcctagtacagaatgtgcatacagtatgccttcaattgataatagtgcccttttccttgaaattaaaacagaaatatctctagaccatttattgcttttgtgcccagaaaatttaaaagttgtgaacatatcattgcccttttagag

SEQ ID NO: 3903 - DNA, 1052 bp, Homo sapiens
acaatgctttaataacaaactctgccagtcaggtttgaatcctactgtgctattaactagctagtaaactcagacaagttacttaacttctctaagccccagttttgttatctataaaatgaatattataatagtacctctttttaggattgcgaggattaagcaggataatgcatgtaaagtgttagcacagtgtctcacatagaataagcactctataaatattttactagaatcacctaggattatagcactagaagagatcttagcaaaaatgtggtcctttctgttgctttggacagacatgaaccaaaacaaaattacggacaattgatgagccttattaactatcttttcattatgagacaaaggttctgattatgcctactggttgaaattttttaatctagtcaagaaggaaaatttgatgaggaaggaaggaatggatatcttcagaagggcttcgcctaagctggaacatggatagattccattctaacataaagatctttaagttcaaatatagatgagttgactggtagatttggtggtagttgctttctcgggatataagaagcaaaatcaactgctacaagtaaagaggggatggggaaggtgttgcacatttaaagagagaaagtgtgaaaaagcctaattgtgggaatgcacaggtttcaccagatcagatgatgtctggttattctgtaaattatagttcttatcccagaaattactgcctccaccatccctaatatcttctaattggtatcatataatgacccactcttcttatgttatccaaacagttatgtggcatttagtaatggaatgtacatggaatttcccactgacttacctttctgtccttgggaagcttaaactctgaatcttctcatctgtaaaatgtgaattaaagtatctacctaactgagttgtgattgtagtgaaagaaaggcaatatatttaaatcttgaatttagcaagcccacgcttgatttttatgtcctttcctcttgccttgtattgagtttaagatctctactgattaaaac

SEQ ID NO: 3904 - DNA, 1053 bp, Homo sapiens
ctgagatattagctaatgaattagttgtttggggttacttctttgtttctaagtataagaatgtgaagaatatttgaaaactcaatgaaataattctcagctgccaaatgttgcactcttttatatattctttttccacttttgatctatttatatatatgtatgtgtttttaaaatatgtgtatattttatcagatttggttttgccttaaatattatccccaattgcttcagtcattcatttgttcagtatatatattttgaattctagttttcataatctattagaagatggggatataaaagaagtataaggcaatcatatattcattcaaaagatatttatttagcaactgctatgtgcctttcgttgttccagatatgcagagacaatgataaataaaacatataatctcttccataaggtatttattttttaatcaagggagatacacctatcagatgtttaaaataacaacactacccactgaaatcagggcatatagaatcattcagctaaagagtgacttctatgatgatggaacaggtctctaagctagtggttttcaaactggtacacattagactcacccgaggaattttaaaacagcctatatgcccagggcctaacttacactaattaaatctgaattttggggatgttgtatagggattagtattttttttaatctaggtgattccaatattcagccaactgtgagaatcaatggcctaaatgctttttataaacatttttataagtgtcaagataatggcacattgactttattttttcattggaagaaaatgcctgccaagtataaatgactctcatcttaaaacaaggttcttcaggtttctgcttgattgacttggtacaaacttgaagcaagttgccttctaatttttactccaagattgtttcatatctattccttaagtgtaaagaaatatataatgcatggtttgtaataaaatcttaatgtttaatgactgttctcatttctcaatgtaatttcatactgtttctctataaaatgatagtattccatt

SEQ ID NO: 3905 - DNA, 1053 bp, Homo sapiens
taacacatccttttactaattactagtttaaatataattatgatgtactcaatgatagaatcattaaaagtaaattattctttaatatttaaagccagaactgaaacctcctaacctacattacattctaaatatgtatatataaaattgtttgtaacccatagaaagaataataaaaatgatagtgagacataattgaaaacaacagttatataatttaagtgtgttttggtttaaattgatttgagggtggtagggacaactgcaaaattaaaaactccattaccatattacattatttctttgggagatactttatagctccacaatggactgatagtaatagaattattgttgctttcaatatttaaaaaatttgagcataacagattaaaccaaaataatccttttttcaggaaaatggcgagaaaataaagcatgaaataatcaatgaagatcaagaaaatgcaattgataatagagaactaagccaggaagatgttgaagaagtttggagatatgttattctgatctagtaagataaaattaagctttaatgaagttcctgatgtgttctgattattaatttgacattttcatcaaaatatgcaaatgaatcagaacagattaattctgaaagcttagaatgcaacctgtatatgtgtttttaaataaatactcttgttatagctctagtagagtagaaattgaatgtttcggtatgattcaccttttctttgaatcaacattatggccatagtttgggatatatattggaatccttttaagattattgagataaatgtatttgaaaggggatactaaatataagtcttagaaatttggttaaaaaaataaaatattctgatggctttgtttactagtcatattcatatgtataatctatttatgaagaaaaaaagttaatattctttcttctatttagcctgcaaaccattttaggtgtgccatccctagaagaagtcataaatccaaaacaagtaattccccaatatataatgtacaacatggccaatacaagtaaacgtggag

SEQ ID NO: 3906 - DNA, 1033 bp, Homo sapiens
caagaactatctgcttttttttttgtagccacccactccatccttaggggttatactctacaggcctggctaacacatttagtagttttcctaaggttcgttcttccaacccccagcctgttgcctcagaaaatgatggttcacttagttcctctcattttaagagtaatacaggataataaaatcaaacgttaaaaaaatctaaaaaatgaaatggagaagtttaaaagatggcaaattcttttcaattcttctactattgaaaagaacttgtaatttctcactccattctgaggtggttactctcttgggaattaccctcaacacatactgctcccataaaaatacattcaacatacatatattactgtacttaccatactattttgtaatttttgtttattttgtccactagatcgagttcatcttctgtcttcgtctcttacttataatagtacctaccagtttatgtgtgatggataatgttatagaatgaaggaacaaataaataaccaaatggactctagttttttactcttatttctaagagacaggatcaacagcttttccaaccccttctaaaccttctggagaggcagagtgatcagtgcctatttgcttcaaagggataagttgaagctctgaagacttcgttctaggtgacactcgttcaactaaatcacccatcatgccctccaaactcaccaaatgaatacatttgaaaatttctttctttctttctttttttttttttttgagagggagccttgctctgtcgcccaggctggagtgcagtggcgcgatcttgcactgcaagctccgcctcccggcttcacaccattctcctgcctcagcctccctagtagctgggactacaggcgtccgccaccggccaaaaatttcttaaaaaggtatctccatggctgggcgtggtggctcacgcctgtaatcccagcactttgggaggccaaggcaggcggatcacgagatcaggagatcgagatcatcctggctaacacggtgaaaccccgtc

SEQ ID NO: 3907 - DNA, 1035 bp, Homo sapiens
tttcaatataatgctggatgcctgaatgtctttttctcctcactaatcaatacccagaactctccctgaaacacacactcagtactacatatatttgaattcttctggttcttgagtatttttttttttttttttacattttaaggagtatggacatctccaatagtactttgtagtctatgaatattaacatttgattttacaatgctatcattgatgttctctctgtagatatacctgtgtttcccacaatcacagccactgtgacttttcaggagtttcgatacgatgaatttgatggctccatctttactatacctgatgactacaaggaagacccaagccgttttcctgatctttaactgacgtggaaaaggatgccgtctaaccaaggaaagaaaatacagagaccctagaagtggatccaaatagaagggacaaatgctttcagtgaagaaaagggaattacacattgaatcgacacatcagtaatacgatacagtgaaatgggcctctaataagaatttcagcgagttttctgatgtgccattttttgtctttttaaaaatatacatattataaatgtaatagtttgacacattaatgaccctaagacctgcgtatgtgaagcagctatgagtgctgtgatttgtttttaaaaatttttacacttcttgttgaaatatatatgcatataaatatatctatatctatatctatatctaaaacactcctggaccattaacgtaaattaaatgtcttaagagatatggagcccttttaaacttgtcatctttatgcaaggtgacatttataaatattccttcgagctttgttttcataaaatgtaaactatgtaacattatgtatagttcagtaatttgaatgtttgttcaatataatgaactagaaggaatgcaattttctgtagatgaatgaaccaaatggtaaccattaaacaattgcatttatatgttgcaatacatttcagaaggagcgttcactctgcagggaataaggtacctcctttagcac

SEQ ID NO: 3908 - DNA, 1054 bp, Homo sapiens
ggttcaagcgattctcccgcctcagccttctgagtagctgggattataggcacccgccaccacacccagctaatttttgtatttttgttagagatggggtttcaccatgttggccaggctggtctcaaactcctgacctcaagtgatccacctgtctcagcctcccaaagtgctgggattacaggcgtgagccaccacgcccagcctaattttcacttcatgaaatactattcttttttttccctaaacatttaaaaatgtaaaatactttcttagcttatgggccctaccaaaataggcctggcaataggacttagtgtacagacccctggattaggatagcatctgcatatagtaggtacaaaggaataattttttcccccagaaataactggaaactctataattgttatgttgattattgtgtttaaatctaattaaggtattttgttttcctttttacataagaacataactttctgcaataaaatactagcttatatcagttagacttaatttactctgtgcccttaccctaggtagacacttgaattagctttcatatactcatttcagagtttttttaaaaatgatttattattattattttaaatagagacagggtctccctatgttgcccatgctggttttgaactcctgggctcaagtgatcctcctgccttgtcctcccaaaatattgggattataggtgtgagccaccacacccaacctcatttcagagttttaagggaatttcagagtttctttattttacatatgaaatccctgaggctcatgagtaaaatgatttataggaatctgaatccaggctttatgatttgtactcatgtcagtaactcatatgaggaataaaactaaacatttaatttaatgtgtatttgttcattttatttattttactctttctgattcttatgtaatcattaacttgctcattttaattgctagattttacttaaacaatttcagctagaaatatatttcatttggaagattaggctgtggtggtatgatatttttccatttctgatga

SEQ ID NO: 3909 - DNA, 1030 bp, Homo sapiens
tctagatgaaaaatgacttttttttttttttttgaaaaatgacttttaaataagtgattttcaaaatgtcactctagttgccctttgcaattcaaaagcactaggaacccagtgtctacttggagaaatcagtgataagatcttaggcagaaatggttagaaaactaatgcaattcagagctgtgtgccatagccataagggatctttgtgttcgcatttctgcagaagtttaaaactccactgccattttctatggtgagggaaatatttcgagttttagactcccttctaggtactgttaagagacccatgacaaaccagaatagagaacaggagttaaacagttgagaatttcaaactatctctgtattcacatctatttttaagttctaaacaaacccaaatcaaaccccacaatacatttatttttatgcaaaggaaatattttcattatatgagaagaaaaaagtctgcagtcctttttttgcaggcatttctctgatgtagaaccacatttttaacaaggaataatattttgcttgtatacttaaagttatggggtatttgtttaactatttctcttttgtttctctgtccttcttttgaaccaaccctgtaaaacttcctcctgtgtatgtttactctttcaccgtttctttttctacatttaggataaaaaacacaactgggataaattataaaaatttggaaattaggggggaggggggagggatagcattgggagatatacctaatgctagatgacgagttagtgggtgcagcgcaccagcatggcacatgtatacatatgtaactaacctgcacattgtgcacatgtaccctaaaacttaaagtataataataattttaaaaaaaaactaaaaaatcaaaaaaaaattttggaaattattgttaacacaattacatgttttcagaatcagccagagctttaagtgctgattatgaatggtcttttctctgattggcttcttctctcattttgctcaaagactaaatttgaccctcttt

SEQ ID NO: 3910 - DNA, 1050 bp, Homo sapiens
acacacagacagatacacacacacttatgtacacatgtacctctgatatggtcttaatttcaagaattttgagcttcacatttctttcatttctttgtacgtggtagtttattatagcctgttatgcagctttatttgtctgtagaataactcctatctccccaaaatagcagataataaataataaaaaactatcagaatatggcttgtggcatgtatatgagctatagatagcaacataggaatgtagaaatctatagataaatagtatgattcccattttacagattttgaaactcaggtacattgagtctaaataaccaaggcacatatttgggattcaaactcaaatttaactgtctcacttcaaagatgtctctttctattatacacattactttactgcaatttttccaaattatatttacaaaattagataaggttcaggtctatctggttacccattcaggagggtttagttaccatagggttattgtttactcatctataatatgcagtctgtacctgagtggcatcatattgactctgctacccttgtttgtgggtgggatgggagtatagtaaactatacagaaattacaagtaaatagtagatatttgaagttgctcaaaattgccttttaaattttatttatttttaaatggaaaaatactatttgaaaggaaattattataatttgataacagaatgtcacattactcttttaatttaaaagtttgtaaatatctcaaaatttaggtagttattttttaccttttgtttttaaaaatacagtgcctttactttcccgaattctgccttccgatgcatgtaaaatatacaaacaaggtatcaatatcaggtaaggtgatttgatttttttctcagtaaaagaaagttgagatttagaggaagatttttttccctgtaatcataacttacatgtgttttatgacgttaaaatgctgtaacagagtcacaatattttatctcattcgagacataatagataaaaaaccaaagacatagaacctttttttattttttta

SEQ ID NO: 3911 - DNA, 1120 bp, Homo sapiens
aaatgaggtaagcttgacttaaagacatagtgtttttagagaaggaagggatagatcagaaagtaattaaaagaaaggtttagccgggcgtggtggctcatgcctgcaatcccagaactttgggaggctgaggcaggtggatcatgatgtcaagagatcgagaccatcctggccaacatggtgaaaccctgtttctactaaaaatacaaaaattagctgggcatggtggcgcacacctgtagtcccagctactctggagactgaggcaggagaatagcttgaacccaagaggcagaggttgcagtgagccaagattgcgccgctgcattccagcctggcgacagagcgagactccgtctcaaaaaaaaaaaaaaaaaaaaaacaaagattgatttaacagaatggattatctcttggatatgggtaatgataaaatgattcagagtaactctaaggtctctattatggattgatggtgatttcattacttaattgatatatagactataggagcaagagcagtatggtctttaatttgtgttagatttgttgggtttgaatcaactgtagtacatcaggtagaattgtccaggtgggaagcaggaaatagattggagcttagaaggaagaggagtgcaaaaggtaacagatttaagtaatacttggagcagtagggcatagttccaaaagctttaggtcaaactgtaaacttcagtcggagaaggaggaaggagaaagtaaaattagttgtggtttatggacttttgcatttgagtctttgtatgaattcttttatcacctaaatcctctaaagctaattttaatcttcattgttaatcagtattaataaaattcttacaatatgggaatacaaatactgatccctaaaaaggatactggtaattggtaattttgtgtaattgctttctgaatgtgcatccataagaagtttgagtttatggtatttttcaatatgaagtcatatagaaaagggaatctcttcgcatatgttattatactgtgctatatacagtggttgccattacctttttaatgatgtttggtcgttatttattgaatgccttcagctttttaaatgatgtttggtcattatttactg

SEQ ID NO: 3912 - DNA, 1032 bp, Homo sapiens
cacaactctcctgagttttcaaaactttgttttttcttataagaaaatgatgacattcatcgtagaaaattaggaattatagggaaaagaaaagaaaataatatcactcaaagataaccactgttgggtcaggtgtggtggggcatgcctataatcccagcactttgggaggccgagacaggtgggtcgcttgagcctgggagttcaagaccagcctaagcagcatggcaaaaacctgtctctacaaaaaaatacaaaaattagccaggcatggtgatgtgcgtatgtggccccagctacttgggagctgagatgggaggatccacttgagcctgggaggctgaggctgtggtgagctgacattgtgccactgcactccagcctggagcctgggacaaagtgagaccctgtctcaagaaaaaaaaaaagacaaccactgttaatattttgttatattttagtttcgtcttctggtcatattattctctacataaaattctttaaaacctcctgttctgaggacaaagaccaaaattgctaactttgtttataaggtccagtatgatactatcacttccttgtctccttcctcatcttgttctttccatctggctttctatgtgtcagctctgctggctttttggtttctcatactcctcatacttatatatccccctctttttgtcacagctccttaagattcttcagatctcagctcaagtacaaggaagttttctctgctcatatattgtctcagaactctgcccattccctttaggcagagtgtatgaggccaggaattgtctatttgtgttctgaatacctactagatgtgtcagaaacatagtcaggatgtgccattaactttgatattgaggaagtcatcctacttaagggagagagaccagtgaatattctgtggcattctgaagtatttacaaagtcctgggggaaacagatgagtggaaaagttattcaggttcttagcaaggtgtttggttattaaagctgtctcaaagggttttagaagtt

SEQ ID NO: 3913 - DNA, 1038 bp, Homo sapiens
gaaattagaagaacaattttaagttgcttagtttcccaatttgagtttattttacccaaataaaatagaagtaataaaagagcaggaatgattaaattagaaaaatagagcaacaaagccaacactttgttctttgaaaagatgaataaaattaatagaccaggcaccgtgactcatgcctataatcccaatattttggaagggcaaggtgggaggattgcttgagtccaggagtttgagaccagcttgggcagcatagtgagacatctctactgaaaatttaaaaaaaattagttgggtgtggtggtgtgtgcctgtaatcccagctacttgggaggctgagatgggaggatcacttgagcctggaaggttgaggctgcagtgagccatgattttgccactatactccagcctgggtgacagagcaagaccctgtttcaaaataataataataataataataataataataataataataataataataataaacgtactgatcaagagaaaaagaaggcacaaataacagatattaggaatcagaagtgttacatcagtataaattcaaatgtcatcgtatatcattagcggatattttgaacaaattttatgccaataaatgaaaagagataaacaatgctagaaaaatttagtttgtcaaaatgcacataaaaaggaattagaaggccgagcgcggtggctcactcctctaatcctagcattttgggaggccaaggtgggtggatcacttgaggccaggaatttgagaccagcctgggcaacatggtgaagccttatctctactaaaaatccaaaaattagccgggtatgttggtgggcacctgtaatcccagctacttgggaggctgaggcacgagaattgcttgaaacccgggaggcggaggttacagtgagccgagatcgtgccactgcactccagcctgggtgacaagagggagactctgtctcaaaaaaaaaaaaaaaaaaatggaatgatagctcaaagtaaatctttggttttggcatagttggtgt

SEQ ID NO: 3914 - DNA, 1049 bp, Homo sapiens
tttgcaagttactgacttaaattgaatagaagaaaggatagagcttttacttttgtggtaaaatattggttgagtaggaattttttttttttttgagtcatcaattattttgtgaagtattgtattctgggtccaaacatatttcttgaggtatgtttaagtacagtaacagctataaaatcatgtatatgttgtattcaaatatgccaaatgattgtgactcatcacttaataacagctgttttttgggtggggaagaaatattaaaagtacacaaaattatggaactctatctttggttatataccacttttttctttagtgtaaaattaaaagattgaatctaagcctttttccatagtcagagtgtaaggatttttctgaatcaatttttgccattgatagtttggcaaaggatcatgatgacaagacattttttataattgataataattttacttattgagaattgagaatatgaaacgtatagaagattttcttggtttgactgtacttctgattggttagacttgtaattttgttttttcctttgagttaaatgtctttaagaagctaagcagcttctcttggatgctagtcagaagcttttaggtgccaacgtgatgaaagtcctgaacatatgaattgctcaagccagcctttcctagatgtgaaaaatttctgatttattctgagaaatttggcagtttctcctgcctttaattacattgcctggcaggtgacaagccatcttctctatatatggttaattttcatttttccttgttaattttcatatttacttgtaatattttcattgtaatatgttcttgaagttatttcacacaatgttagagatttcgaatttaagttaaaattcagttgagaatattcctgctgatgcaggtacctcagggaagtgacagtgaaatgattaatgtgtaaaatctctgcctcatggctggcagatttctttagccagtgattggaaaaaatctcaatttcagaaagattaaaaaggtgcaggctgggcatggtggctcaccacg

SEQ ID NO: 3915 - DNA, 1032 bp, Homo sapiens
ggccaccgctctaatcgccttgtgccgccgcagcgccagctccgtcgccagcggtgagcctcccgattcccccccttgcccctggcggcggcgatgaccggggagaagatccgctcactgcggagggaccacaagcccagcaaagaagaaggggacctgctggagcccggggatgaggaagcggcggctgccctcggcggtacctttaccagaagcaggattggcaagggcggcaaagcttgtcataagatcttcagtaaccatcaccaccggctacagctgaaggcagctccggcctcctccaatccccccggcgccccggctctgccgctgcacaattcctccgtgactgccaactcccagtccccggcccttctggccggcaccaaccccgttgctgtcgtcgcggatggaggcagttgccccgcacactacccggtgcacgagtgcgtcttcaagggggatgtgaggagactctcctctctcatccgcacgcacaatatcgggcagaaagataatcacggtgaggagtgctagcccctctccacctctctccttccccgagcctagggtgtgcctccccaggcttctggaatcctaggccccctccagcagactcttctttttgcccatcatccgggccgttcggtaaatcatgatcgactcagtaatagcgtgccagtggtcaaggggttggttcttgtgggtgcaaaggaatgtatcctccttgcccacttcaaagtttgtcgtgagaagctgttttgtttgagacaggccttcgatttgctgattctggactgtcagaaattttaggttgcctcccacccaacatggttttctccctttgtttatggagctatatatctttatttctctctcttccccctaccttggcattttaaattttgaacgcataaattgccctcctcccttcattgctcacatacagatcccatcttgactgcaactggttgtgattttgcctgccaccaggttgtttcttttttgtctgctttcagtaaacttagaatg

SEQ ID NO: 3916 - DNA, 1033 bp, Homo sapiens
aacatgctgtgtgatcctctgcaaaaatattaacctaagggacttcactatggattggtaaattgagttccctataaatgtatgatcctgaagtaagtgcattggggtgcatcattggcaaaataagcaacaaatcaaaaagtaatttacctaacttggaggagcagatgatagagttcaaaatgctttgttaggttaaaatactacgaacaggcatatcatgtactaggtagaaccgaattttataagtatagttaaaaagctttcaaacaagaaaatataaaatacattattgcttgataactagaccagtagatttttactgataaattgtttggacatttattttggcttatatacataacactaactgtaaatgagctatttctgtgaaaacacctaaaagtcaaaactaaaatggaagtgttcagtttggatgaagcaaatccagttaattatggtctatcctcgtattaactcttagtgacactgttacctctaatctagctgttgactgtgaacctgtcaaaaatgttgctttttcagcaattatttccatgtatcaaaattctgatcagggaaaacaagttatctgtattcttataatttgaataatgtattagagcctaagaattttaatgtggtatcagcaactgtgacacaagattgtgttgccctatatcacactcacaattatgtctcctgttccttattattgattccttagaatcacaaaaagggaaaggttaaggagaatgtagttaattctaccagaagaaactacctcagtattctcaggctgcacccatagtacctgtggcactaaaatcttaggatagaagagtgctaagaaggaagaaagaataataaaaataatgttttgtgttttttcctcatattagtgataatgaaaatgtgtttaaattcaggcctcccataaagtattgcgtatcataaagtctaaggcaggtacctgaccgtgaaaaactacattttgaagcactgatgactgataagagagacacaaaatgtt

SEQ ID NO: 3917 - DNA, 1053 bp, Homo sapiens
tatatatatatgcatgtgtgtgtatatattctcagatgcctatttcccacttactctttctagagcaccagatccatgtatctagctgcctcctgtgtatctccctttattttttttctttttgtcacgatgagtcttgcggtgttgcacaggctggtctcgaattcctggactcaagcagtcttcctgtcttggcctcccaaagtgctaggattataggtgtgagccactacgcctggcctgtatctcccttcacatgtcagacagccaattttactgtatttaaattcttcctaaatcctctattcaccaaacctgtatctcatgttgtatttcatattgataaacatcattatcagtacttgataatcctcttagatttcctttttgtgaacactaccactgctttgatttgtgggctaggatattgtagtttcttcctaaatggtcatttggcatttagtaggatttcagtaatatttgctaaatgaatttttttcaccaagcattgatcacttcatcactgatgctagaatgctcttaactaacgagcatttcatttcatgttatttctttgtttaaaccctttcagtgccttttcatggctttcagaattcaactacaatccttatgcatatagtaaaaagttcaggggttttttccaggactcacactacccccacctcccaattctaacctacttaggtgcacagaacctatacactagctacgttaactatgctgaactactaataggctttcatcttagtacaagtttcttatacctgggataccctacacataccccactaccatttcttttttcatttagctttcatgactcaattcagaacactaggatgccatccctgatgcctcttccctttcaatgggaattgggtgaaactcctaaaagtttctccttccccagtatccctctcccttagcatagtgtttgtcattatagcaagcactcaaatgtttgatgagggtcaatatctgttacctttctcaaagaggttttgatcagttgtattttttcctcattactga

SEQ ID NO: 3918 - DNA, 1636 bp, Homo sapiens
agtgattctcaccaaaaaaagttaaactatgttgtaagcagccaactgtaaatgtctattttgaaattccctatgctaagggtgccttagaatcattgtgtctcttttatccagctttacttttttgctccacatttaatgcaaaagaatcttgtgatgtctacaaggagagaagtgggatatattttcctttctgacacataatttggggcaaaaaagaaagtcttaagagtttatcttttctctgctgatacggttgcttgataaagacatctcaaaatgtttaccaatgttttaagaagctttgtgtgatattcttccaaatgtagttaccaaatataatatggtagaaaaggctaaatcatacttaatgagcaaattgaagtaagcttttaaagtatatttctcttttggtgaaaggccaatggagacattgtgaatttaagtgaacatttgcctcaagatgttaactataaacacactgcatacaattttcttctgaataacaaatgaatgcttattgctgcatgatgtaagcaaaagtcattatttttcctattcatttgaaataagttatggcttaaaatgcttttggagtttatttctcaaaattaaaatctggtcacatgagctttagtttgttttctggtttaaaaaataaaaaggtttctcttaacagtatttccagtgacaatgcaaggtaagtatatcaaaggaaatcaacagttgtgcttgggggctttttgttatgggatattgatttcttgttttttttccgtaacattgtctgctgcaatttaaataaaaattacgacattttaagatatttcatagacaaaccaaacaaaaatatatgtttttactttaaagtgaatgtttttctcttcagctgatctaaaaatgaaagcaagatatcttatgtagaaatattttgataatatttttacagtgagctttcccatgtttttatgtcttaagtttctttgctgcgtttatgtaggttgcacaagaacttttactcacttgtaattgtgcctcagactttttgaaagtctaccttctaaattgccccgacgatctagattctacatgttaccattggtttattcttgtgctttctgtatttaaaactttggctgtactaagcaaatgcaaggttataatttagctaatagtagtttacagacaattctgatgattatgatttcatttggtttaactaagctgtactagttcatttcataaggaaatgatactgtagacaaatgtaaataaagcctgtgagtcaagcatcaagtggtgtttgttagaaataaactagagatttttaaactctgatctaatgttcatttttaaactaattacagttttctgttacctttgatttgttaattttttacactctttatattcacctaccttttatatatgagtgcttggtattttaaattccaaagccattatcactgcaacctcagaatttttaatttaacctttttttcgttttaaatagagagctcctaaattagttgcacacttcttgccagaacattacatccctcattccatgtggtaaaataccatatcgtagtgtgcttcctgaattactcttaaactgtcaccttatataaagcac

SEQ ID NO: 3919 - DNA, 5308 bp, Homo sapiens
acagggtattattataagggacaaattatagttgtaaattagattaatgaattttgtgagttttaaaatttgtacgaaccatgtctcccttgtgtcatattttccaataatataattacctaacaatgacagaattatacattttccctttaattctctaagcattgagtaaacagaaaaatatagggatgaaatacacacatgccaacattcaaaactttgtactaactagaaacaaaaatagaaggggatttataaaggaaaatgatggagacattttagagaaattaagtataaatcgcaacattctgttttcttggatgtattctgggtagcttctagttacttgtaaacaaagtattcattgtttttgtaataaagtgataatgttttgttttatagttgagtggctttagggtaatttaatcacctggaaagtgatatttttttaattaccttttgttactaaatcttatctaatttaaaatactatgttttgaaagtatatatcttgtatagttatctttttatatgaaaatgaactctaatacatatctttctttcagtgttcatatcacaaagctcaattaaatggtcctggaaaaaaaaaatcgttccatgttgttccaggtcccgttcaagaagttcttccagttcgcagtcaagatctcgttccagttccagagaacgttcgagatctcgtgggtcgaaatcaaggtgaatgaggtagcatctctctgtaaagcagagagaaaaatatttaaaggctgcagaaggtgttgctgctttttttccccttattttgcttctacttgtcgattttattttagcattagaaaactaatgcacttgcctcagcttaattttctcaccatgaaatgtttccattgccagcagtgtgccaagacattcccatgattgaaatcaggtggctattttgcaatatgcagcgtttattattttggcactaagatgttatgaagtaggaagatgaagccaagtcttatcgccacatctctagtatattaagattatatatggccaggcacagtgattcatgcctataatcccagcactttgggaagctgaggtgggaggatcacttgaggccaggagttcaaggttgtagtgaaccttgatcacagcactgtaatccagcctgggtgacagaggagtgtctcaaaaaaaaaaaaaattaatagtagttcaaataaaattacatatgtaaataaaaagaaaaattttcttcattattaaaaggaagaaaaataaccctgcctcaaaacaggtcctgttttgcacggcagttgtttcaatattttcagaaacaaatttgccatttatatcagataaagttactagagtactgtatatacattttcctttctaattttacacacgctattatttatagagcacaaaacactcaaaactaaatcaggaagtatagtcggttagttgagataggatgtggtcttaagtagtaaacagtgttctaaagtttcaggttgcatgtagtcacatctgtagagggaaacataatttgaaagatgctcttgcaggaaatttttctttgtttagtcaaaatatgctctctttgtttttaagttaatttattatgacctaaaggcatctaaaaaataaataagaaaatgaaattccatatttgtggaaattcatattgaagtctaactgtggctgttttggtaaaagtatttgctgctttgaatcaaatttagcattaaagggctgccacagtataatcatgttaaggagaaaagaatgttgtgcacacttgcattataagccaataagaaatagataacaaggccaggctcagtggctcacgcctgtaatcccaataccttgggaggccaaggtgggcgggctgcttgagcccaggagttcaagaccagcctgggcaatatagtgagacctcgtctactaaaaataaaaattaaaacaaccagccaggcatggtggtgtgttcttataggctgaggtggaaggatcactggagccctggagattaagggtgcagtgagccatgcttatgctactgcaccacagcctggggaacagagcaagatcctgtctcaaaaaaaaaaaaaaaaatagaagtagagagcaaattattttttattgttaccattatttagtaacaatatttaagcgctttataggtaaaaatccttaagttctggtattccctttgggaaccattataattaaggtttacagaacacccatcatattcttcccaaacattttttcattgcttgtaactttccaaagaattctccttttgggctttctggttttattttaagcccaaaggtgaattttttgggaagtttgagctaaattccttcaaccaaaatatacaagtgaagaaaaaaaatttgtatttaaacatttgcacatttacttctacctgaagcatgtgaatgtcaacacttcatatttcataagtagtgggttttcataaaaatagtattgtaaatataaatcatcttaaagttagtttttatttcttcttgaatatttagcagttaagtacagttactagtcttttgttgctgtgccatatacctggtttttccataacagtttaatgagttgaataattccacatggaattatgtttattttcctcaggaagtggtatataagatacatattttaatcctcaaatggaaggatgtagttcctaaacgtaaagtcctgttaatgcagttatctgctgattttataatactataatatttgtgtatactttgaaaagccttaaaaaaagtttaaattctattttgatatagtaagcagggttttaattacacatgatagaattttaaagagacaaaattaaaatgtttaagtagaatgttttcatggttgatccagaagtcttctgttgaataagcagtaagtattcttccttataaaattttcatagttgttataaatcctgtttatttttggagctatctgataactaaataatcttccttatttcttcttttaatgaaatgtttgatttgtttctcaatcaatgaagatccagctccaggtcccacaggggctcttcttccccacgaaaaagatcttattcaagttcatcatcttctcctgagaggaacagaaagagaagtcgttctagatcttcttcatctggtgatcgcaaaaaaagacgaacaagatcacggtcacccgaaaggtttgggtttctgtagaaataagaatgggtgttcttaagtgtgtttaatagataaagtaaactttcctagtcaagggttagatttttattatctcttgtgttccgactttctacttttcaactttgaacttcaaaaaaacattactttgcttatcctttgtactttgatcaggttgtttagaattgtagatcaaaccattctttgatcattttattgtttaaatttttagttccatttataatttttatagccaactctcggttatttctgtcttttgagattgcaattcagaagctgtatgtcgaagtaatttatgagttgacttttatacttaggcttctttaaatactaatagtcaagaattctagagcatctaataaaaaattaactttcagatcattgggaatctgtcctcatttaaatatgtgtaaatgcatttccacagcaaattgcttcatgccctttgtctataaggaaattattccttgtagctaatacatttttcattttgcagtccaaatcttttttgagaaaggcctatattaggttactttatctgtactgacacttttaatattggaagaatgcaactgtcatctgtcagccttttctgcaacaggctaattactcagtttcattaattttctctttgttcccaattatatagtcattttaatggctttatttgtagtctttgcaaatttttcatattttattagcttgtgaaaataaagattatgtaaagtctattaattgctgggttcagtggtaggattatctcatgattcctacttgtacagaatgattagttttgcttcttcacattttggagtttagatgttaagatttcacacagtcttgtttctctgcatttgtttctttgtaaaaaaaattactctgtttttgagtggaattcattctgttgctttcttaccacttctgcaaatttttatcttagccacatataatccccctagtttgttgtcatctaaacttaatgaacatgttctctattccataagccaggtgattggtgaaaacactaaacaaccctgagcccagggccaacccctacggaacaccactactttacccaggttgatattgacttattcatactagctgcatgaatataaccctatagcaaattgtacaatcatcttgtgtgacctagatttccaaaacttatttatgagtatattttctcatacacagaagccttgctgtatcttttttacataatagacttcttacactttctacaccgtgtcacagggattggtttagtcacacttccattaccaagtttatatgcttttgttgtacattttctgtaattttacacatttttgcaaggcttttctttgatatcttaaataattgagaggtggctatattttgaaatgagattcttttgaaattgtagagaattttttattgtatttatatgataactgggctcatatccaaagtctaaacatcagataattttatgtgtgtaagttcctatctcaatttttaatttttttgctagcatcatggtactgaattttgtatactttcacagtcttaagaatgaatgctgagatttagctctagcttactagaatgcctactctctccattatgtcttacagacgccacaggtcatcatctggatcatcccattctggttcccgttcaagttcaaaaaagaaataatgtattaaaatttacatcttaaaaaaatccagtacagtgcatgaagcatatttttaaagaagttggtgtcttacttggtcagaagtgctaaatctgctagtagaggtgcatgcctttcattgcttttcaaaacaatacagctgtgtttatttgtgaagttaaaagtaaatagcattttaagccataatgtcccaaaatagatgttctgtcattcattatttacaaccatttgcttcatttaaaaccatttcagctataacaaagtactttgcttcctaatttaaacccatttttgtcatttccaaatacatcctgtccattggctaagacaggattacctaggcttgcctgaactttgggcatggaagaaagactggaaactagttgga

SEQ ID NO: 3920 - DNA, 1057 bp, Homo sapiens
atgtttacatttctacattttttgttgttatttaccactggaaattcaatactcaaccagaacttgtcacatggtaacttcaataaatacttgattggctagtaatgaacaaatttcttattttctgagtctcctcatctggaacacatggataacctccaaggtcctcagggactcctggaagcctggccttcttcctgcttttcccaagttctctccctgtttgtcaagagaatctctcataggtaaaagaacagaaacagggctcatggtctgtaaatttaccagaaatgattcttcactagagttcatcatactttgtggtttaagatagggctctctgatatggaatgcgtatcccccatcaaggaggttttaaaaggcctctaatacaccgatttcatagaggggttaataaaatgaccttactaaaacagctaaggaagtcaataatccaactgacaataaacaagtcttttctcttgatacacagagtaattgaatagatgggagtaatgctatcattttgtgaatctttgaacttatacattgcatctgttgattgtcttagtttgggctgctataagaagtaccatatactgggtggtttattaacaacagaaatttacttcttatagttttggagactgaaagtctgagattaagatgtcaggttcgggtgagggccctcttccaggttgctaacttctggttgcatcctcacatgtgagaaaaaggctgcgaaaattccctggggtctatcttataaaaaaaaaaacaaaatctcattgatgacagctccaccctcatggcctaattggctccccaaaaccccagttcctaataccctcacgttaggctttagaatttcaacatacaaatttgaggcggaggggggacacaaacatttagtgtatattgcactgatatactttattgtgagctgaacaatacagaaatcaattataagatgaaatctagaatgaataacacagaaaaatgaattctacatatttctattatatataaatcaggcaatagcagagcaaaggcacag

SEQ ID NO: 3921 - DNA, 1038 bp, Homo sapiens
cgtattaagcaattgagaaatctggcacctttgcaaataattctggcacagacttgaaaatgtggatttctggattctttggaccagttaaaaaaaaaatgtagtttatttctaaccaaggacgacaatagttattgccaaattaatgaataaataataaaacatctagataacagaaagaagctcattttatttagaatataatcatacatcaatttttccctaaacaaataaacaaacaaaaccttaacttatggcaattgctatacgtcacacactatgctgagtattttggatttagtgataaatgaacaattcctgccccaaggagctcactctctaatatagtgtaagagattgtaaaaacaactttcaacataatacagatatgcttatgatattttgaatgcatagagcaagaggcaattaattatgtttggctggagctgtgcagggatcatggaaggagatgacatttgaattgttattaaaaagataagtcatttggcagagagaaaaaaagaatgtttagcagtgggattttggacaagtcactaaaactgtttaggttaatgttactatgaaagagtactagaatatacagttttgctgctgtgctgctatagttattaatttacttccaaatctagctacagattttgaaaacatttcttttctgtattatgaaagaaagcactagttaagtattgcaaatagtttgttgtaacaaactttttcctcattatctattatcaaaggagggcagtcaccagggaggatcaaaccatcaaaactggcatatgtaaagttcatggctagcgtccccagcctgctctttgtaagtttgttttcctacttgttggcatctgctgccttctcctgccagaccccaatgtttccttgccttttatgtttgccattattaaaatatgctttcctgaatgatttttttgtttctaaattagtttcttcatgttggatatttctaatgagaaaaaaactaaatgtttctttctaaatatagtaaccaaactttgg

SEQ ID NO: 3922 - DNA, 1038 bp, Homo sapiens
acacacacacgcacacacacacattagttgccatatatatatatatatatatatatatatatatatgctatatatatatatatgctatatatatatatttgcaatatattatatatatttgcaaatatatatttgcaatatatatatatttgcaatatatatatatttgcaatatatatatttgcaatatattatatatatttgctcttttttcttttatatatatgtaaaatatatgtatacatatacttgctctgttttcttttaaatggatctcaattattgcaagataggttttgaacgtccaaacatttatttaaacacaattattgcaagatatgttttgaacgtccaaacgtgtatttaaacattaaatgaaaaaaaaacaaagcagtttttttgtttatttgtttcttttgtttctttgttttttgagacggagtctcgctctgtcgcccaggctggagtgcagtggcacgatctcggctcactgcaagctctggctcccgggttcacgccattctcctgcctcagcctcctgagtagctgggactacaggcatccgccactacgcccggctaatttttcttatttttagtagagacggggtttcaatgtgttagccaggatagtctcgatctcctgacctcgtgatctgcccgcctcagcctcccaaagtgctgggattacaggcgtgaaccaccgcgcccggccagcaaagcagtttttaatgtctgtaagcattttatgggatgagcgtttcttagatatggatgataaaaatgtattaataagaaaaaaataaaaagacagctttccctttctgagaaagaatgtattagcttcctcaatgacggaaattttaaatacctaccagactgacttcagtaatgtcattgaatacttttagccaatttcagaagaaagataaactgtttacagactcgcagtaattcctagataatgagtattctttcattattagccacagcacaatagtaactgtgatactggagaacttaaaaatttgttccttca

SEQ ID NO: 3923 - DNA, 1049 bp, Homo sapiens
ccctttgtcttcggtgtaactcctggctctttaacaaaacgtaagactcttcacagccttgcaaacgcccactctccatctccaccttcaaagcttccatgtacttcatcacttaatgctctgtcatcacttaggatttgatagatccctgcacactttaggctattttattcgtttgcctttgtgcctttgtgtagtgttcttctaggcagctactccgactcattgtttaagattatgcttagacatcacctgttctagaagccttctttaaccactgaatcagaagctgaacttagtgtcattcaccgatgtttccttttcacactattacttctgttacttgaagtgaacatgctgcattctaataatctgtttgagtgcctttttgttcccaaaaatgtcagctttttgagggcaaatattgtggctcattaattcctggcatccctttggtatcttgcttgatctatggcgattacttgtgactgacctcactaaatgttggaaatatttccattaggtggtttaaccttaaaaatctttgaaccctccaagtttcccttgtaatatctaagagtgtttgatctgtacatcagtatttctatgtgaatgctattatataacattgagagattgtcctttcaaatcctaaccttccctttccccaagatattagctcacccactgattttctgaattattctaataccaactgcatcttattcaggcacttgctggtaatgaacttcttagacatgctgagcccactaatatcctttgaattcttatgttctccctaagccctctttctgggtagagtctcagaatgttcatcagcccccacagtgctcaaattgatcttcattgacatgaccaaaatcatgcagagggtactatattagataattgagaaaaaaacaagaacttgaaaggaatatttagtttttaatatgtactaaatttttctcttgttactttattccttaatctgagtcagttattcttatggcatcacctttcaatttcccattgttaattgcactaaa

SEQ ID NO: 3924 - DNA, 1025 bp, Homo sapiens
ttggaaactttgttcattagatctctttataaatcaacttaccaaaaaaagaaaacagaatagaaagatatattgattaccataagcatgacactcaaggacttaacaattattttaagtatattttccagattataatctggaaaattatatattatatatattgccaagacttgaatgctgtttttgcaataaaaatttaaaacataatgtataaatatttaaattagattaactttagaaaattttgaattttattatataattattatttaaaaatttaaatgatagaatgtgctattgatacctaaaatatcatttaaaatcaaaatattatattttattacattctatcttaaatattatattatattttaatataatataatttgtacttatctgtgtgtaattacattactgtaaaccaaaaatgtcaattagaggtaatatatggattccaggatcaacctaatcattgtagtagaatgtgatgttactatttgtgtcaagactccatagacttgtttacaaatggagttgggaaactaattttagtaatggtttctaatactgtaaaattgatgatttagtaacctacatataacggaatgccagctccaacattttttcatccaatttggaatttaattttactgaatgcctgcattgtgacttgtgagagagagaggcatggaacaggatggattaaagctaaataatactcagacccttctttgacatttttaaaaattctggtagtagagatggttattagtaacatagtgatagcagtattcctaggaaaatgaatttttgtcatgattctcttgctctattttccattgctctaattctgacctccctccttaagaagctaaattgtaagaagcaaaactttgtattaaaatgccacagaattagactatttaactttcattttcctcaaagaagtacagctgaatgaaaacatgagcacattaccattcaaaagtccctggtcatcttttggtctatagatgtatcca

SEQ ID NO: 3925 - DNA, 1034 bp, Homo sapiens
tcttaaagcaggtcattgctatttcataattattctgctttcttaaataattctgaatctcatttcccaaagtcattctcttcatagacttcatataggaaatttaggtaggtataattatggattgtaaaagcctgaagaaaccctagagtttatggactcatttaaaagatgacaaaacagacccagagagatagtgacttgattgtaatataaaaaataatcaggtatattaatagtactataactgaggtctttccatttctgatgcagtagtctgtctcatgttctgcctttcctttgcttcatgaattagcataccattcttgatcttgagctttattactttggtctagtctttattttcctgtcaaatctactcttcactctgtgctggccttgttctctgcgtacaggctgtcctctacctggccctctggcttctggctgggctcaccccatggcaagcaccagcgatagttgggactctggaaagaatgagagatctgtgtttgtgttcttatggcttcttgcagctaggctatggttggtccatggctatacttttttctcatctgtgagggatactcctgtcccagcttgttgggttccggtaaccatctcttacccatatcccttacaggcctagggttagtgatgtcttcctgcattgctaattagatttttatagcctccatgtcaaattttgttcttcgtaacaagttatgtaacaaccttctgggtttgcttaggcctgtccacacctttgtaaatagtcttttcattaaatttttaaattgtcacctttgagtatatatctgtttcctgtccaaatcctgactgatacaaggtatattgctctgatttcagcaaaggggctacagtaaaaattatttgtctgtcaatagaagggctttgtagaaagaaatgggttctttttgtcgttacttggttatctctaaatgtaagctgttgaaggttgggttctccgaatgcagacatgaagacaaagtttgaggctcaagatatttatt

SEQ ID NO: 3926 - DNA, 1052 bp, Homo sapiens
ataaatagagtcaaaggtgctttttttctttatgtagtaaaacttttgattttggtcttctgaaggtgatgttttgtcattagtttagcatttcttggttaataaactcaacagagcaccccttcaaaaatatgttagattttccacctgtattgggtgtagactaagataaactggccttgtttttgccttcaagtagcatatgttataaaaatatttatttagaattttaaacagttctttaaggttgatattaattccatattcccttagataaggaaactaaggctcattaaagcttacctatgttgccccagacagcacggtaaagccacactgtgaattcttagtccttctatctcccttctgctgcttgcctgctgcactttgatgacatccatggagtgcacgtatacagccctgtccttaacaccacaacccatggctgaaaatgctaatgtgggggaatgggggaggaggactcagaacttaaaataagcccttcaatgaaatcacccaatgcagggctgtcagaaacctcttcgagaaactagctgccaatctgcctctcaggagcttagagggaaaagttagagctctgcagttagaatttaacaagaaatccacatgaactctgtcactggatgctttggaaattttggagataagattttgcattttaaaaataaaaggcctggggctagatgcttactttgaggaggctgttaaccatttcagagcactgtgtattctggagagtggattgaaagaagtaacctattaaatggcacatagtcccctgaataatgagtggtatcctgaaaatgtgaatttacctttaaaagtgcccaggtaatttcagtcctttttgtctctctgtttctttaggtagatgaatcacgaggtttcacacctagcttcctacacttcaaatagatcaattctaaaggatttcacagatcaaacaatttatgaaaaaacactaggattgtctttatggggcttgagacaatatgacagatataccttgtccaaaactcccactgtttaac

SEQ ID NO: 3927 - DNA, 1074 bp, Homo sapiens
tgtgttgcccaggctgcagtgcagtggctggagtgtagtggcatctctcagctcactggaagctccacctgccgggttgacgccattctcctgcctcagcctcctgagtagctgggactacaggcgcctgccaccatgcccggctaattttttttttttttttttttttttgtattttttagtagagatggggtttcactgttagccaggatggtctcggagatctgatggctttataaagtggagttcctctgcacatgctctcttgtctgccaccatgcaagttgtgcctttgttctcctttgccataattgtgaggtctccccagccacgtgaaactgtgatcccttaaacctctttcctttataaattgtacccagtctcaggtgtttcttcatagccatatgaaaatgaactaatacggtaaataggtaccattagagtggggtactgctgtaaagatacctgcaaatgtggaagcgactttgaaactgggtaacaattggaacagtttggagggctcagaagacaggaagatttgggaaagtttggaacttcctagagacttgttgaatggctttgaccaaaatgctgatagtgatatggacaataaagtccaggctgaggtggtctcagatggaaatgaggaacctgttgggaactgagcaaaggtgacttttgttgtgttttagcaaagagactggtggcattttgcccctgccctagacatctgtggagcattgaacctaagatgatttagggtatctggctgaagaaatttctaagcagtaaagcattcaagaggtgacttgcgcattattaaaatcatttagttttatgtattcacaaagatatggtttggaattggaacttatgtttaaaaggaaagcagagcataaaatttcagaaaatttgcagcctgaagatgcaatagaaaagaaaaacccattttctgaggagaaattcaagccagccgcagaaacttgcctaagtaaggaggagccaaatgttaatcatcaagataatggaatggggaaaatgtctccagggcatgtcagaggcctttgcggcagt

SEQ ID NO: 3928 - DNA, 1023 bp, Homo sapiens
ctaacaccatttaattacaggacttgggttctagctttgcttctgtgtgaccctgaccaagtctcttaacctcttgtgatgttttctcatccataaaatggatggcgattttatttttacttctgcataaaataatagtttaaataacttctctacctgttctgaaaacagttaagtcaatggaggtggaagacttatgctttttagaagaaatccggtattacaggattttaagtattatcctatttgccatcagtatgccacgttattttattctttgtgtaatctcctttgacaggcttcatcgttatgaagcatatgatgatcccgtggataggtgagttcaaaggcaatgagtgcaggttggagcctgatgaatcagaatgctaaaggctcagtgggagataagatcaacagaagcaaagtaggagatagtgtggtcaggccatgccccatcactttcaagcctgataggataatgtagtcagatagtactgggcaaagcagatgagtcttccaaatccagtaggatgagtcatcttcctttattcctttctcccaacttagccaatgccaaaatgtggggggggaaagatacagatcctatttcagagtaattttacttttattattacaacagtttttttatggtaatcatgagatgtgagtgaaagaaatatgtaggaagtaggtagatatcgaaaatggaaaaagcaagcatctcataggctatgtgtgtaggtgtgagagagagagagagagcacccagcttacagaagctaggggcagggtggggcattttcttcttgctctttgtgttctctgagtttaacacaccacttcatgtacagttaaggttcagaaaaatacgcattgcataacaaccaatatttagtattaatgttttgtttaagtcatcttctagaccgaattctttgagaataagagcttgttttgataaccagagttctgtaaatatcgttatattaaagatgattatagaactatagagtatattttttt

SEQ ID NO: 3929 - DNA, 1108 bp, Homo sapiens
aaattgttacataactcatgccttttgtctttaacccaaatttcttattcccactatatagaaaatcaatatgaatttgtttcagaagagtgattatatcttttcatgagtatacctgtatttctagattaaagagattgtgtggctttgttctacagaaggtttgattttgtctcacctttcagtgaggaaagagaaaagaaagacacttcagattttaccctaaggaaatatactgttggcgctccatcatctaatacctttatgaggggcatactgtgggttaggaactctctctctgcagggcttaggaggaaagttgttgccacctgccaccgctggccgcctgaggtttctgatagtcatgtgtaagttttgaatggcagaacaaagcatgaatcagacacacatcttgcctagccatcccctgtgtgcaaatgtgtatgatgtggttaaccatgtaaaaatgcaccccaaaaggagcattgaatcaatttgtattttcttggcttttaccttaaacttgtatataaggattatttatatattgacagaaaggaacatgttgatctgaatatcactcatatatccaagaaaagagtcagaaatgtattgttgtgttatagattgatctaaatacgtattaattatcttcaagtgtagacacctagatttaaactgactctgtggcagattaattaatagcaataagccaatgaatagggaagatttttaatatataatgactaccagcttgttcttggcttacattcttgagattattgtattcaaaagtgtcagttggcttcacattttggcaaagagccttctgcattcttattctccttgaagcataatgcagataatgacaacttatctttctagattagtcttttattattcaacaagacaaaggccacaacaaaggactagtagaatagtgacctctacctgagaatttgttataactatagatgtttgtgctctgcccaagagattctgatatactgtgatttgatgtgagccacgatgtgaattattataaagttctctagttgattctgatacacataaaagttgaaaaattggccatgtgtggtgtctcacg

SEQ ID NO: 3930 - DNA, 1807 bp, Homo sapiens
caaggctgcagtgagctatgatagtgccactgtattccagcctgagtaacagagcaagatcctggctctgagaaaaaaaaaaagatttttttaatattagtacctcacttgaaaagtcctggagaacctagtacctagcagaagcttaatctggctttcaccttccatgccatttctttggcaaaccaacagaaagtagagtcagtaagtaaaagagcagaacttgttagctgcacaactacacatcctgagagattatttctctagcacattgcccttaagagaaacagagaacatttactctctgacaggccattactgaacaatccacttgtataaaatttacagtttgcattttagaataacccacagcaccaacttcacactgggatcaagagagacgataactatagggagatatattcaaagaaaacctcctggaaaaaagtctggccttgttttttgtttgtttgtttctgagcctgttaaaatcaattctcaataaccggacaaagaattcaagagaactttatgtactagttagctcttcctctggttgtaaatggaaatgaaatgtttaatgttttcctagtgcttcagtggtctaaggaaagccatctatctacaaaatatcacatgaacaaacagttcaggtatgggatggaagaaggagcacgagtaaggtcaagcactaaaacatggtggacgcagggctctagaatgctcaaagatctctcctctcatctccaacattaaccatgggagcaataactggaaatcactatgtgaccttccccattcttgtagctgaaaatacttatgaaaatttgtctcaggaaatgtctagaacctactagcttccagtctttggaagttttggctaatatgtggattttaagtttggcagttgattttgaattttgacagtaagaaatgttttccaccatctttattaattgccaactccttgaaagccaggtacatcagcttgattcagtgtattgcatgttgacatgaatcatttcctttcagagacacttgtctgtgataacaaagaacaaggaaacttaaattgtgtttctcttcctcccctagctgttactatgggcaacatcacactttgtaaaatattcttcttaaatgatgccctgagccaaattctgaatgtgtagatttatttatttatttattcctattgtcttggctgccagaaaactggtgatttttacaatgcaaaccatttgtaaacacttcatttttagaaacatggaatctttttattattacaaggtactgagattcatcatctcagagtgggaaaaaaataatagttgtagatgcttattaatgtgatccaggccagacttcttaccagtaccttaagagtaataacaagatagatatgttatatacagcagtaatctctccttatccatgggggttacattccaagacccctggacatgccagaattctctaatagtaccaaacccaattgctgtcaattggaacatgtttccgtttatgtcttccatccacaaatgtaatgccttttccatcctaactaagcacttatcatacactgtggccataacttttgcagtttgagatacaacaaaactagcttaaaattcttttttcttcttcacaatttcacgtataaaaaatttgttttgccgggcatggtggctcacgcctgtaatcccaacactttgggaggccgaggccggcagatcacttgagatcaggagttcgagaccagcctgaccaacatagcaaaaccctgtctctacaaataatacaaaaa

SEQ ID NO: 3931 - DNA, 1082 bp, Homo sapiens
aatttcaagagctgtgaggcaaaagcatcaggtaacctataaaggaaaacctatcatattaacaggagattcctcagcagaaaccctgcaagctagaaaggattggagtcctatctttaggctccttaaacaaaaccagcaaaaccaagtttcataaatgaaaaaaaaagatacaagctttttcagacaaataagtgctgagagaatttctcactaccaagccagcatgacaagaactgctcaaaggagctctaaatcttgaaacgaatcctcaaaatacaccaaaatagcacctccttaaagcataaatctcaacggacctataaaacaataacacaatgaaaaaaatcaaggtatttaggcaacaactatcatgatgaatagaatagtacctcacttttcaatactaacattgaatgtaaatgatgtaaatgctccacttaaaagatttggattggcggaatggacaagaattcacgaacgaactatctgctatcttcaagagactcacctgacagataaggactcacatgaacttaaggtaaaggggtggaaaaagatattccatgaaaatgaacaccaaaatcaagcaagagtagctattcttatatcaaataaaacagacattaaagtgaccacagtttaaaaagacaaagagggatattatataatgataaaagaactagtccaacaggaaaatatcacaattctaaatatgtatgcacctaactctagagctccctaatttataaaactattactactagacctgagaaatgaattagatggcaacataataatagtgggggatttcaaccctccactgacagcacgaaacaggtcatcaagacaaaaagtcaaaaagcaacaatggacttaaactatatcctagaacaaatggactcaacagatatttacagaaaattctacccaacaactgcagaatatatgttctattccacagcacatggaacattctccaagatagaccatacgataggccacaaaacaagtctcaataaatttaagaaaatcaaaattatatctagtactccctcaaaccacagtagaataaaatcaga

SEQ ID NO: 3932 - DNA, 1052 bp, Homo sapiens
cctatatgcctctttctagaaaggatcttaagtgaaatgacttaaaacatctggatgcattagaattattaaaatgaaaatagaaattcaaagtccctaaagaaatttttgactcaagactaatacagtagctgatattgaaattaaatttatcagtgggcttcctacatgtcaatataaaaagaaaaacatagtggattatacagttctttttactggaagaaaatataccaattattcagtatataaggatttttcttagttttaaattacaagaggcatttttcatagagcatcttttatgtgcattcatgggcatctattacatgccccatgtcttctaggcactagagatactgtgatgagcaatatagataaggtggctgtcttcttggaagagggaagaaatagggcagaaaacatctgagaaatgaacataagtaagaggaagagagtaaaacagagtgatgtaacagggcctttgtaggggaggggaagtgttaatttagatttggtgatgaaggaagatctctttatggaggtgacaattgaaatgagacttgaatgataagaggagtaagtcaggcagagtctgaggatataacatgttagatagaggaggcaaaatgaagagtccctaaggcaggaatacacttagtgcagggagcagagaggcccgtgtgagtgcagcaaggtggatgggagcgggacttaggtagtgggtgggtaggagatgctctgcaagctaagcatgtttacagtgagtgcagtggaaaagtcatgtgagggttttagtaacagagtgagctaatctgtttttaaaactcatcctgactgctctgtggagaatttaagtgtccaaaatcagaagcaaggagattcacaggaagcttttgcagttgtataagtgaaggagtcagtcacttcgaagagggtagtgatagtggaaatagagagacttgtatagactcaagatatgctttggtggtagagggagcagcacttactgatgggattggatgtgaaaagcaagagaaaaaatgagtcaagag

SEQ ID NO: 3933 - DNA, 1046 bp, Homo sapiens
aactatttggtattgtggaaagacaaaaaaactaagactcttacttctggcactaactagctttgtgcctgacaccagttattatatttattgctcctgggcctcaattttgttatatttaacatggggtattgcgtagacaatctctcagattcttgacaactctactttgccatactcttatgagtataagccaaagtaaaatcagacactggaatgacagaattacacaggtggtatgtgtatcctgtatgtgtattttttcctaaacaaatctttctaaattggtgcttgtactggggatgcctgtcaggtttagtttattatgctaaatagtgccctcttggtgaagctaatttagcttccaaagtcatggattagcaacttccacaatgagaacatctgatcggatcacatttgcactctaaagcttcatttgagttagcagacatttcatgagttccaactggtatatcaagcactgtgctaaattctgagattcaaaaattaataggacgtactccctgtccttgagttgctaacaaggataattgatggacaaatacagaggcagtaagcaggatgattgcctataatggaaaaataattttattctttactggtattatcccactctaggtatttctgaggatgctagtcacttgaataggaaatattatttaattgaaatatccagataattgccatgctttctgcattagtcaggatacactacattatgctttagtaacaacactcccccaaaatgtcagttgcttaaaacaacagaggtttatttcttgctcatgtaacatacccatctcagggcagcaaaggaactctgctaattttattcactccagccctccagtctccaccatatcaaacattcctccttgccgtactcgagggaagtgagcactctggagaatctcacactgcctgttaaatacactaatgtatgtgactggttcattggccagacctagaaacatggctccatccaaccacaaggaagataagaagcaccatgtgctatagggaaa

SEQ ID NO: 3934 - DNA, 1089 bp, Homo sapiens
aatggagggaaatgtgtgcttttgtgaaatgtctaggaggcaaatagatttacctcagtgatggattagatttaggatgtgtgtagcagaaaccattaaataccccagtatctattattcctttcttccatttagagatagtgccacctacgtcactctgagtttgagctgcacaggtgaccacctagctaacgtcttcttttgtcaagttgtctttcagttacatatgatcgtgaactaaatttgggccaacattcgggccccctcctaaaatacaaagttgcttgccctggactctaagtgccttcccatgggctgggacatggacaccttgctgatgatcatgtttccatctatgcagacttgaacattaggacaagatagacaaagcccagattcttgaatagtcttgtggagcagagcctccccactgcctttgttctactcattttgcattttttatttgtgatagagcattttttggattcctttgttacagcaacttagccaaattgtttcagatggtggagaggactgaactggataaatggtgatgccattcactgagatggaaaacattcataatctttttcagcttttggtcttttatatatttaattgaatattattttatatttaatttgagtagttaataaaaatgttttaaaactttttcattccttgggttgtcacagactcattcttttttacaaaattaagctttgggaattataattttatctaactgtgctatcatttgcttatatttactaaaccattaaggtataatgaaaaacaaaactgacttactgaaacctagatatatttgtttctataactatgaactagcctatcaatctaattcaacaaacaaggtgcaaataaggcaaaaaattaataaagaggaggagagaaaaaagaaaagaaaaaattagggtatttttgtgtgagtttagtttttagttcacctatgagagcctctagaaatcatcactttcaattttaagaagggtttacatgctctacacttaatacagttgattttatttgaaatagaatccagactcagtattcagaataaaccctctt

SEQ ID NO: 3935 - DNA, 1035 bp, Homo sapiens
cattgttgatgggtatctgggttgatttcatgtctttgttgttattaatatgctgcagtgaacagggaagtacatgtgtctttttggtagaatggtttattttcttttggataagtactcaggtaatgagattgctggatcaaaggatagttctgttttaagttattggagaaatctccaaactgctttccacagtggctggactaatttacattcctaccaagagtgtttaaacattccctttctctgtagtctcaccaacatccactgtttttttgactttgtaatagtagccattctgactggtatgagatagtatctcattacggttttgatttggatttctctgatgcttagtgatgttgacaatcttttcatatatttgttggcctcttgtatgtcttattttgagaagtgtttgttcatgtcttttgcctacttttcaatggggttatttgttttttgcttgttaagttagttattgattctgaatattagaattttgttggatgtgtagtttgcaaatattttctctgattctgtaggctgtcctgtttaccttgttgatagtatcttttggtgtgaagaagtgctttagtttaattagttctcacttgttaatttttgcttttgttgcaattgctattgaggatttagtcataaattttatctcaaggccaatgtccagaattgttttgtctgaattttcttctaggattcttatagtttgaggtattatatttaaatatttaatccattttgagttaaattttgtctatggtgatatgtaggagtccagtttcactcttctgcacatggctagccagctatcccagcaccatatattgaatagagagtcctttccgcattgtttatttttgttgacttgctgaagatcatatggctttaggtatgtggctttatttctgagttctctattctgttctattgatccatgtgtctgtttttgtaccatgctgttttggttactacaaccttataatatagtttgaagtttggtaatgtgatgcttct

SEQ ID NO: 3936 - DNA, 1024 bp, Homo sapiens
atgttcgatgtgtatatagccattaattttaatatagtcgcccttactctcaggaacacctgctacctgaacaatccagttttaaaaccaactctccaagaattatttcctacttcttcttcctggttttcagggcattgcttaagcactgctttgtataagattcacgtgcctcctgtagttccaactgcagcaggaggatttcttgagcccaggagtttaaggccagcctgggcaacatagtgagaccctatctaaataatgataataaaagtaatatgtttttaagttacaattaccattatattggttgaacatttgaaagattctagatgctttacagactatgactattggcctgcattacatgccatgaattctaataattgtgtgctgataagatgacattctgggtttcaaaggaaagatattccatttagaattagaaccccagggctcaggtgctaactatgttacttgggcaagtcacataactctgaaagctactgtatttccttctcgggaaagggagggtgataataattaccatacctttcttgcacctcaccaaatgaacaaacatctgcgagtggttgtcaggtgctgggaatagaaggggatcctctacaaaggatcatataaaaagttttggaggatgaaagtgctttatatgttgatgatgttggtggctacatagctatgtacatttgtcaaggctcagaactgaatgtccaaaaaatggataaatttttactgtatgtaaattatacttaaaaacggaactttgtaaatactaaatactaaataaataaaggctattattttttctttccatgggatgtcaatttcgtaagacaggcaatagctttatagtgactattagaggagagatggttcttccttgtgcttggattagagcagacgtccttgtgactcttgaatcttcatctggataaattatctttctctatccttgggccaaaaagaatgaaacttttattaaagtgatttctccggggcacta

SEQ ID NO: 3937 - DNA, 1053 bp, Homo sapiens
cgcccagctaactttttgtatttttagtagagacagggtttcactatgttggccaggctggtctcaaactcctgacctcgtgatccgcccacctcggcctgccaaagtgctgggattacaggcatgagccaccacacccggccagtgtgttctttctatttctagttgtttgaggatttttatcatgaaggatgttgaaatttatcaaatgctttttcagcatcaattgaaatgatcatatgggttttgtccttcattctgttaatatgatatatcacatggattggcttacgtatgttgaaccatccttgcatctcagggataaatcccatttggtcatgacaaatggccttttaaatgtattgttgaatttggtttgctagtattttgttgaagatatttgtgtcaatattcatcagagatattggcatgtagtttcctttttttgatgtctctttttctgatttggatataagagtaatactggcctcgtagaatgagtttggaagtatgctctcatcctctaattttggaatagtttgaggaaaatcgatattagcttttctttgaatgtttgtagaattcagcagtgaagccattgggtgctggtcttttctttactggaagactttataacagcttcaatcttgttacttgttattggtctattcaggttttggattttttcctggttcaatcttggtagtttgcatgtgtctaggagtttgtccatttcttctagattttttaatttattggcatatagttgctcatagtagccactaaggatcttttgaatttcttcagtatcagttgtaatatctcctttttcatttctgattttatttatttgggtcttctctctttttttcttagtctggataaaggtttgtctattttgtttatgttttttaaaaccaactttttgttttattgatcttttgtattgttttcttcatctcaatttcctttatttctgctctgatttttattatttcttttcgtctactaattttggttttggtttgctcttgcctttctagttctttaaga

SEQ ID NO: 3938 - DNA, 1061 bp, Homo sapiens
gcctaggggagctgtaagaagagggccaccatcctccagaccctagaatggtagatacaccaacggcttgcactgtgcacctggaaaagccacaggcactcaatgccagctagtgaaagcagccacagggactgtacactgcagagtcacagaagtggagctgtctgaggctgtaggaacccacctcttgcatcagtgtgtgctggatatgaggcatggagtcaaagaagatcattttagagctttaagatttaatgactgccccactgggtttcagattggcatggggcctgtggcctctttgttttggccaatttctcccatttggaatggaaacatttacccaatgcctgtacccccattgcatcttggaagtaactaacttgtttttgattttacaggcttataggtggaagggacttgccttgtctcagaacttggacttttgagttaatgctggaatgagttaagactttgggggactgttgggaaggcatgattgatattgaaatgtgaaaaggacatgagattttggaggggccagggacagaatgatatggcttggctctgtgtcccctcccaaatctcattttgaattgtaattcccacatgttggaggaggggcctggtgggagataattggatcatgggggtggatttctcccttgctgttctcatgatagtgagtgagttctcatgagagctgatggttttgaagtgtggcacttcccacctcactctccctttatctctcctgccaccatgtaagatgtgccttgcttccccttcgccttctgccatgattgtaattttcctgatgcctccccagccatatggaactgtgattcaattaaacctcttttccttataaattacccagtattaggtagctctttatagcagtatgaaaatggactaacacagaaaatttcttagagatcatctagtccaataccctcgtttaaaatttattttttaaagtaacataattaacattttttgaaatgtagttgaaattaacaaattgtaaacaaatatttaaataaagaataatttcttat

SEQ ID NO: 3939 - DNA, 1058 bp, Homo sapiens
tattaagtatttgatgactgaatgaatgatcctggtgtcaagaccagaacctaatcctaggtctccagaatccctattattgtacattagtcactgcacatttacaataaaatatcaattaaagtatttcctatcttctacccatgtagaaaataatccttcacatgacctaaattcaaccactgtctaatttccatgatatatttgggaagcataacagagctaagtaattaaggcctctctatgaatgttattgaaataatacaatatcaagaacagtaggattcagaacagaaagaaaatgaaagcttttttctattgtaggaacccacctcttgcatcggtgtgtgctggatgtgaggcatggagtcaaagaagatcattttagagctttaagatttaatgactgccccactgggtttcagactggcatggggcctgtggcctctttgttttggccaatttctcccatttggaagggaaacatttatcccaaaataaagtttttttaacagttaaaaagtttctgcttttcaaaaaggctgatcgactctaaaccaatcaaaacttttgactttaagtcaatagttaccttctttaaagataaatcatttcttttgtttgtgcttcttttctctgaattttggaaaattaatagaataagagtaaaacatttgatatctgttcaattcagcttaagatctatttattttcatttaaaaacagaacaaaacaaaaattaattattcaatatcactccctctacacacacagacatatgcccatcctgcatttttttcaaacagaagttatcttggagacttacttcattaacttaggtgtgaaataattttcttgtctatatcaaggacagaatgacaaatattctcagattctcttagcaacaggcatttgatttgctgtcttgaatagagccttgtaaagtttcctttgtaggagaaataccatatttgaaaatgttgtcatattgttgttttagtattttcatattattattttattactaaataagtttatgtaactttagaaatagaaac

SEQ ID NO: 3940 - DNA, 1048 bp, Homo sapiens
gttttattaactttatttttttttaattttacaatttaacatcttcatgtggagctgaaattctaattagtgtgaattttagtgtccttattggagatcaaatacctaagcgtattgaacatataataatatcacctcttgttttttgttaactctttatatgggttagtgtgtaatgaagctgagtaaaggattaatattcctaatttagtaggtacaaattatttattttgcttactattaaaagtgagtacatctactgttaaaatagttggagacctaagttgttattggttgtaaatatccttccttgaatattaaaatctacttattttttgtcagtatctttggcaaatttttttaagttgtcttttgtgttcttgacttgccaatgtactccatttgttatttcattcatgccatcacctaagatatgatggagactcactgtgctaacaaaggcaggccattccatctaaagcttctacctgctaaaacatagataactgtttagtgctgcttctgattttttaaggacttacgcctgaaaatttcctgtcttaaaaacaaccaaccaaacaaacaaacaaatgaaaaacctagttattgaccttgcatcctgtattccatggttacagggtgagcgtaaagacagaatatctgagagctggctctatgtttttctttttcatctaactattttggttctagacacacttttgttagtgaagcaagagttaaggagcaaaaattctgaatatttttattttcagttcattaaagctttctgactcctcctctcctcacacacatgaatttatgttttttttaaaataattactctctaaattcatgtataaattctgggcttatttttagtaaggaaagggtacttttattttggattggagaacagctatcatagtattaaaattgacttcaggcctgtaatcccaacactttgggaggctgaggcaggcagatcacctgaggttgggagtttgagacgagcctgaccaacatggagaaaccctatctccactaaaaa

SEQ ID NO: 3941 - DNA, 1050 bp, Homo sapiens
caagaccaacatcatagagcttgttccctatgttttctcttagaagttttacagtttcaagtctcaggtttaagtctttaatccattttgagttgatttttgtgtatattgtaagataagggtccaattccatttttcttttctttgcatatggatatccagtttttccaacaccatttattgaagagactgtcttttccccattgtctgttcttggtacccttgtcaattattatttgacaatttatttgtgggtttctttctgggctctcttattctgttccactggtctgtgtgtctgattttatactagtatcatcttgttttgattaggatagctttgtagtataatttgaaatcagaaagtgtgatgttgtcaactttgttcttctttctcaagattgtttgggctatttggggttgtttgtggttctgtacaaattttaggatttcatttctgtgaaaattgcttttaaaaatttgatagggattaccaaaaaaaaggatgaatgagatctagtatttgatcacacaacagggtgactatagttaataatgaataattgtatatttaaaaataactaaaagagtgtaatttgattgtttgtagcacaaaagataaatgcttgaggggatggaaaccccattctccatgatgtgattatttcatactgcatacctgtatcaaaacatcttatgtaccccttaagtatatacacatcctatatacccacaaaaactaaaaattttaaaaattaaattttttgtggagattgcatttttacagagattgcctctgatggtgttttacaattaccttaagctgtcttcactctttttcatttttttctttttgcttttttgactgaaggatttccgatacttgtctttgagtttgctgaacctttcttctccttatctagtctgctgttgagcccttgtattgaaatttttcagttattgtattattcagctctatgatacctggtacttttctgttttctgtttctttgctggaattctcactttgttcatacattattctcctta

SEQ ID NO: 3942 - DNA, 1605 bp, Homo sapiens
aaatctgaccccatgatccagtcacctcccaccgtaacatatggttggggacacagagccaaaccagagttagtgcattttttgaagagaatgtgattcaagtactgagatagtgactccacaactataaattattaatatgtattaacactatccaggagaagtgttaattggcctgacttgagagaagatttgagaaagagttgaggtaaagtgaaactatacaggaatatctgtgtatttttgtaaagattcctgtggctgtattacttcgaataaaacataatgacaatagtaccttttgttcatgtaacactctaattgtcagagtatgtttatcttatttaattctcagaataactctgtgacgtaagcaaggaaaatgtgagtcagataaggaaattaaggctcatgagcggttgagtggtttgaggcatggcagagcaaattgctagctcagcaaggcggagcccccactcttaagttcccagtgcgaggcctattacattacaatactgggacttattcaaaaaatatgctaaaatcctatttgagccatttttgtaatattaatttttctaagtccatttataggtgaaaagaatataaatttttattttaagaaagtgggtactgttgtggagtagggggaggggggagggatagcattaggagatatacctaatgctaaatgaccagttaatgggtgcagcacaccaacatggcacatgtatacatatgtaacaaacctgcacgttgtgcacatgtaccctagaacttaaagtataataataaaaaaataaacaaataaaaaagaaagtagagatcttgaaatatatctttattttcttcatgcatgattattaattgagggtccatactgtagttggcactgtaaatgactaatttcttgtgagttcagacttcccatgaggccatgttaaggtaaaacgctgctggctaaaaacatgctgccagatatacaggcaaaaatgtttttctgtcctttgatcagtgtttagtcttattcagctaaatctgtgccctcctctgcaggaaaacaaggtctatcaggcacagaactgtcactgactttgaaacaagtagctctgtactcagagaagcttcatgtgtgtgtatgtgcatgttgtgcgtgcctgtgagtgtgcatgtgtgtgtagtacagaatttgaccatttacttggtgcatcaaaattgcggcctttcttctgttgcttttgttaacaaaactattgttggcacgtcactgggtaccatgtgctgatttttacacttgcttttagggcttgaatctatcttatgcattgtttcatcacaaagaacttcagtaattttattctcattgtatttgaattatcagctttgtatgtgtgacttgaacttgttagattcatttttagcacatgtgtgcctagacagaaagcaggtttttaaaaagaactatggaagttaattattttgctgtataacgctgttttattaagcatttggctttggcattattcattggcatctgtcatttctctatgcctgaagcttttgattcagataacaattcatcagataagcataattactcagcaa

SEQ ID NO: 3943 - DNA, 1051 bp, Homo sapiens
gttcttggcaatcatttgggaactaccatggtagttcttatgttttatcatttgtaaatggggtatggttgtgtagaatcaatgaatagaaacatgcaacttaggtcctggcacatagtaggtgctaaatatgcattcatttctagctgcacttgtactagggttatcttagccctctgctaatgagtctttgcagaactctaaggggaatcaaatgaagtgagacagagtatctttccttctttctaccttcaagagctgccctctctgctttcccttatgttgagaactcacacttagaagaaaagaacaggatgtgaacagactccaaggcatcccaaaatgaagcaagtacaatttaagtcacagaaagaaatgttggtccctctcatttccttctgtttcaaaagctgttcgttcataataagaaagtccttcaagctccagaagtagagcgctgcatatctagtttagttcaaggttgtttggggacaggttctaagccattatgcatatgactaaagagtcgggagaggaccagactgggaagagcaactttcacacattcttgtgctggagttaatccaccagcactgccagttgatgcctgagagatgagggggtgggaaaaagaatctggcagggcagactcttgaaaggaaaagcagagagataagatgtctgaatcacttttccccttgaaaacattacaccaggaaagaaaaaagtgacctggatcccaaatacagggatttctcaattattcttaacttattctttttttttttttaaaaaaaagtcctgattgttttcatgaatatattatgatacatatttacaaaatttatacagtttacgtcatgccataacacactggtgcattatacacatagaacactccagcagtttgctcaaaacattaagaaaccaggttctgttacatgtcgtttgtactaaagtcacaagcatcctcctcctctttggtcattttatccaaattaaaagaccttgaaaactattcacctgctgtagactcctcaggcagttgctt

SEQ ID NO: 3944 - DNA, 1053 bp, Homo sapiens
ctaaatattttaaaatgcattgacgatctttgcctgaaataattatttcattgggaggtataaaaagtgtgatttttctaatttatatcattttttctatatttagtagctgacattgttctgtgaagaataactttgcctcatcaactgggactgaattacatttcttcttaaagaagcaggatatatttataatttaaaaaaattataggcaattttgaatatagagaaaaaccaaaatcatcagctgtaatttcaacagccagtgaactaatgttaaaaatgctatgtactatatctttccattcttttttcaatacagataaggatatatattataaaatttgattcataaatatatctagccttataaagggctggatatataaaatacattattaacactttacaatgttgttaaatatcctttaaaatatttttgctgactacatatcattccataacaacaatgtgacatactttattttcgcattctcttataaccagggaaccatataaccttgtttgcccagagaaatcctgatatatgaccattatcctgaaaaattaataaaataccctcctttactcctcatatcatacaagtttgggaaacaaattgtatggttacctttcctgtaatcacttaatctacaattgacaagtagctgttttgaattttccaatctatttgctcttatgaaaatttttgggtgcattcatgagggtgaattcaccctcatgttgtattagttcattctcacactgctataaagaactacctgcgactgggtaatttataaagaaaagaggtttaattgtcttatagttccataggctgtacaggagacacgtctggggaggcctcagggaacttacaatcatggtgtaagggtgaaggggaagcaagcacatcttcacatggcagcagaagagagagagctaagggggaagtgccacacacttttaaacaaccagatcttgtgagaactcactcactatcatgagaacagcaaagaagagatctgttcccaggatccaatcacctcccac

SEQ ID NO: 3945 - DNA, 1050 bp, Homo sapiens
ctgtaccctccactggttgaatttcctgcccttgcaggagaaattttgaaaaggagggaatgaagtttttaaaatcaagcagaatattttgaattaagtagttttttatttcagagacttctagaggggattagtacagctttgagccacttttctctatctctaaatctaaagttcccaggatactatttctaagatgaggactctgagatcttataagctgcttagtcattccaaagagatgcaatttttcttattgtactagatttactaagacagaaaagtagactgattcattacacaatagaaagaggctgactgcctttggaaggagtacttttccttctaaaatgcttaatccatcctattgtcaggctaaaaattgtgggagatggcatttactgggccaccctgattcttctgtagagtagaacctggaaggttttggtggctaaatgagtacctctaaacaggtgaagatggactgtgtgggtgctaagagaaccccaactgctgaattttgaacatgatgggcatcttttatcactacaagcccttatggttagtaggaaagagataatagaggcatcaactgtcccatatcccaaaggtatcctgctaatgagccatttttaatgcacatgctaagggttgccagttcttattttggagagattttcaacaagaattgcaaccagaggttaaaattagaccttgggttactaaatatttgtacgacatccatccaacaaagcatttatcagtcttcatcaggtgctaggtacagtgccgggtgctgggatattggcaaaaatgataaatatttgtcattaccatcctattgcttgctgaataaagtgggttgcaggtaagtaaacaagataatgtaacagtgagttatgtgttatgataggagaaatacaatgaactataataatacacagaagcgagttgcttaatttttacttgagtcaggtaagaagaggcatttacatgaaagatgaataagcaatagacagaccaagaggagttggggcaggaaagagcatt

SEQ ID NO: 3946 - DNA, 1017 bp, Homo sapiens
aagaggaacaataaattttattggaaaccgatgtgaattttgtttccaaattagtgtgctagtaacaaagccaacagacatttaaacagtaagctgacagtttacccacactttctactttagctgaaattggagtgcctcaattcgttccttcttcatttctgtaatcgaaaagaagcctttatagtatgtctaaaagcacactaaggttgtatttgtattaacatcttaattttgctaagtgccaataaatgctatgccttatcttcacttttctgttaggaaattacctaaaagacaatgctttattgtaaaatttaaaaaatatattgtaagtagtatttccagagacaagaagctatctaaatctattttacaatctgcatctatatctacatttatatcatatctatatctgtgttttccagtggtcataccctcaagcatactgatatagaatacagaggttgagacatttagatgctattactaaggttaaaaattatatcataaacatacacacacataaaaaagactgtaacaaatgaagataaagacaataaacacttttttctcctaccctaagataagcataactcatcaagatccatctgtttattcttggatgttctattctacttctgtggttggtctcactcctgtagtggtctcattcctgttggtatcaacactggaatattacagagaagattagcatagcctcttgcaaagatgcctcacaaatttgtaaacctgctatatttttgcatagttaattacttctttctttgggttccaatagcacattgtatgtatattagctgtcatcttactgtattataattatttgtttacttctctgtccccctcagaaaacagaatcgctaaagaaagaaattattctttatattcctagtggccagcacagtgcctagatcctaaaacgcatccagaaaatgtttaataaatgaaaaaaaagaatgaaagaagttttatatttatgtgtaagaaacaagc

SEQ ID NO: 3947 - DNA, 1050 bp, Homo sapiens
gtgtactgtctttatttgttttcattctgtctttctatttttttctctctttcttttttctgccttcttatgagctggttgaatttgtatgtgtgtgttccattttattttctctattagcttcttagatataccttttattattgtgttttggtgtttactctagagctaataatatgtatccttaacataactgaatctatttaaaggcagtatcttatttttttgtatttcctacttccataataatatttattagtataattctatttacaccctaccctaaatttatatttttgtttaaaaccactcaaatgactgtccatttttttctggtactaaatttaaactcctaacatggcttatcaaatccattatgttttgggctctgtttacatctttaaccacatctactgtttcttcaactccaggaatacaggtactaattttctttcatttcttcaaatgtatcttgttgtttcaaacatctgtgtcatatgtattgttccttctgtctggactactaatccccttttggcatctgacacttcaattacattttttttttttttttttgacagagtcacactctgttgctcaggctggagtgcaatgagtgatgtgatcttggctcaccgcaacctctgtttcctgggttcaagcaattctcatggttcagactcctgagtagctgggactacaggcacacatcaccatgcctggctaatttttgtagagatgaagttttaccatgttagccagactggtctcaaactcctgacctcaaatgattcgcctgccttggcctctcaaagcactgggattacaggcatgagccactgcacccagcctgatacttcaattacttttaataatttttctgaggaattgtttgtgaagtttctgatccctttatctgcagacagaattaatcactctctattcagttctacttttgtgccttacatacacttttatcaaatgcttcttacacacggcttcaaatttcgttggcctcaactcttatcccagctgtggctgtggtgacca

SEQ ID NO: 3948 - DNA, 1030 bp, Homo sapiens
ctgtgtcaaatccatgtttctctggatgaaattttttctttttgcttggcatattaagatggctttggggagaatttatggagaactttattcgtataacattatggttaatagcacaggcctggggaataaggctagaccaaattctcactccatctcttagtagcaatggcagaaattactaatttgctgctctggcttctatctacaatcaccttcttcctagccatcttccagttaggggtgaccatgtaacacagttctggccaatgacaaataggcaaaagcctgctgggtaaaacccctgaggaagctaggggattcagccagtatgacccttatgtcttctttctcttcactttttcatatatattgtgtagtggtgaagtcttggctattagtgtactcatcacccgtctttctttatttattttacctggagtcctgtgattccagaagatatagcagcgatcatataactatgaggaaggtagtacactgtgcgtgggggtggggacagcaaaagaaacagcctacccgtccttgtccaaattacttagtaggtaaaacagacctgaattgcctatctccaatccccttttttactttttgaagaataacagccattgtttgtttatgccctgaagttggtttttctgttactcacaggtgaacacacttctaactctatgtcctcagtttcctcttttattatttgaaaatgttaatagtacctacttcatagggttgttgcagggatgaaatgaaaagatgcaagtgagtgacttaacaaagtgcctgtctcagagtaaacactcagtgggggcttgccaatatcattattccaacttgaatattttctttattatatttaatgttagaaatttagattttaatgtagatcatatgctactcagtgcagctataacataatatatctctttcatcttccaagattgttttcagtgtttttaagatagttttgttgaggtataattggctacagtaaactgcacatatttagattagt

SEQ ID NO: 3949 - DNA, 2837 bp, Homo sapiens
aaggaaatgggtcctgagctgttaatctctgtaactgcttaatttagttttacatttcccactaaaacaaaactattcttgagattttctgtgaaactcaatttacatcccaaattcttttattttcctaccaaaggagggattcttttatatccatacttttataaagagttcttgtataaaactacattatgatgatattaagatatatgtaatctatatttaaaatccacagaatgtaatgattgcgtatcaaagagaaaaggtaagaaacatttcagtagctgaaagaaacacaaactaacctcaagcagaccaaaacttttgaagtgtaatatacaagtgtttttgtaaaaatgtcagtgtttttccttgaactgtttcttgagttgtttcacatattgaggattactatggtatcatgacagctagaacagagtataggagcaaaaaataatagaccactaagaaagataagtgatcacccatttgaaagagagactgtgagaggatacagatcctgaattggcataaggtaaggattaaggaaaaattactcaagacttaagagacgaaaattatatatatttttttgtgacagagtcgtctcactctgttacctgggctgaagtgcggtggagccatcatgtctcactgcagactccatctccgggcttaagcaatcctccccccgagtagctaggagtacaggtgcaggtcaccatactcggctaatttttgtaactcttatagagataggggttctccatgttgcccaggctggccttgaactcctgggctcaaacgatctgcctacctcagcctcccaaagtggtatgattacaggtgtaaaccactgcacctggcctaaaaattatattatcttagcaatttctttaaaattctcacttacaaaaataataagaaaattgtagaaaacctggtgatatagtttttgggtttatttctaaaaacaaaatgaaagaagtctaagaattaaaaacattttccatagaggagtgctgatggatctggggtagaaaaaaattcaaataataaaaaatctgggaaatactagtatttcttatatgactacctccaagaaggagttcatcaaaattttatcaaaatatcctaaaattgtgtttcttttaattttttaaatttattttttaacttttatttcaggtttggagatacatgtgaaagtttgttacataagtatacatgtgtcacaggattttttttgtacatattattttatcaccaaagtattaagcccagaacccaatagttatcttttcttctcctttacctcctccctccctcccaaaattgtgttcttataacaaaaaatattacattaatgatggcttgataaaaagtacaactgcatcttcaaataaaattttctcattttgcttattccaatgcaaatcagattataactgtcactctatggtaaattacaataataatacacaatgaatttaaaataaccatagtttaacagtgaatgataacctcaaacatgtttgctgaccaagttgaaaatgccaactcttattctgcaaacagtagagatagggttatcaggatgttggagagattttgtgagataaaatagttaaaatgtaaaagcattttattttccttttaattttattcagccagcaattgtaggactcttccaatgcttcctaaatgttaaatgcattcagtgtttattgaatacctatgatattgaaatattgaggacctacagtattgaatgttataggtgttagtgacataggagtgaaaaataccaaagttcctttcctcatagtacttgtactcctctgggaagagacagacaataataaaagtaaaatgacaaatgcatgtaaagtatgccagtgggtattaaatactatgaaaaaaagtcagggtaagagtaatttgaaaaaacaactaccttatcctcgtttctttgtaatgaaatatttctattcttgtccttcttttgtcatgaaatttactaataataagctctgaaagtatactgggagactccatgtataattacacataattgatttctccactttttgacatattacaaaggacagattatgattctagtaaatttgtatcatgcagagaaaagatttcagataaaagtgatccatgaaaatagagactgacatcttgtttcctttaagaagccacaactaaatagctggcaaagtgttgaattaccctgtggacacatgaatgggagtcttggcgagaagtagttttaatcagaggtagtttttaaccttattattaggacttttacatcagatgtagctaaataggatgaggtacataatttgttatcaacatagttaatgtatttattggtatttattggtatatactgaaaacatacctttaaaaggtaactaaattagaaatctgagtaaaatgtcaactgatttgcagatatagtaggtgattcgtaataggtgattaataaacatctttttcagggacaagcctgtttcagtgagtagaaactgagcttcttccatctctggaggcactggctgagtcttggggcacagggaggcaaaggaccaaatctgccacagacaaaactttactgggacaattagaaaccaggcaatttttaaagtgtacttttgtaaaaactgctttatataattcccatgctataccagtcaactatttacagtgtccaatttcatttttcttttatgatattcacagagttgtgcaactatcaccagaatataattttagaagattttgtctcccctaaaagaaacccaaaactcattagcagtcac

SEQ ID NO: 3950 - DNA, 1849 bp, Homo sapiens
tgaataagtgagaacatgtgacactcgtctttctgtgcctgcttatttcgcttaacataataatcccgagttccatctgcattgttgcaaatgacaggatctcatccttttttatggctgaatagtactccattgtgtatatgtcccacattttctttatctattcatgtgttgatggatacttaggttgcttccaaatcttagctattgtaaacaatgctgcaacaaacataagagtgcatatatctctttgatatactgatttcctttcttttgggtatatatctagcagtgggattgctggatcatatagtagctcaacttttagttttttgaggaacctccaaactgttcttctttgtggttgtactaatttacattcccaccaaaagtgtacaagggttcccttttctccacatccatgccaacatttgttattgcctgtcttttggatgtaagtcattttaactggggtgagatgatatctcattttagttttgatttgtatttctctgataagcaatggttttgagtaacttttcatatgcctgtttgccatttttgtgtcttttgagaaatgtcaattcaaatcttttgaccatgttttgattggattaatagacattttcctttagtgttgagttccttgtgtattctggttattaatcccttgtcagaggggtagcttgcaaatattttctcccattctgtgggatgtctctttactttgttgattgtatcctttgctgtgcagaaacttttaaacttaatatgatcccatttgttcatgtttactttggttgcttgtgcttgtgggatattgctcaagaaatttttgcctagaccaatgtcctggagagttttcctaatgttttcttatagtagtttcatagtttgaggtcttagatttctttaatccattttgatttgatttgtgtgtatggtgagagacaggggtctaatttcattcttctgtatatagatatccatttttcccagcaccatttgttgaggagaatctctttcccccagtatatattctttgcacctttgttgaaaatgagttcactgtgggtgtgtagatttctttctgggttctctattctgttccgttactctatgtgtctgcttttatgccagtatcatgctgttttacttactgtagctctgtaatataatttgaaatcaggtaatgtgattcctctagttttgttatttttgcttgggatagctttggctattctgggccttctgtggtttcatataaattttaggattgttttttctatttatgtgaagaatgtcattgttactttgatagggattgcattgaatctgtagattgctttgcatagtatggacattttaacaatattcatatttttcaattttttggtgtcctctttaatttccttcatcagtattttatagttttaattttagagatcttacatttctttggttaaatcctaagtatttaattttatgtgtggctattataatgggattactttttaaatttttttttgcattgttcactgttagcatatagaaatgttactgattttttatgttaattttgtatcctgcaactttactgaatttatcagctctaatagttttctaatagagtctttaggtttatccaaatataagatcatatcatctgcaaacaaggataatttgacttcttcctttccaatttggatgccctttatatttttctcttgtctgattgttctagctaggacttccagtactatgttgaataacagtgttgacagtgggcatccttgtcatgtcccatatcttagaggaaaggcttttggtttttccctattcagtagac

SEQ ID NO: 3951 - DNA, 1070 bp, Homo sapiens
ctttcctccaatttattttttactctactgcaattaagaaactcctgcacttatgacactcctgaaagacaaatctggtcatttcacatccctaaaatccaataatggcttttcattggctacacaagacaaaatcaaaattctgtagcaaaccatccaagtctagaatctgacctatgattacccttccaggttcatttcccaccacttcccacattcaccctaattcttaatgatccgaccacactaaatactgggggccatacacattcttttatgcttctctgccttcatgatgttattgttttggatggtttgtatgtgtgtgtgtgcacatgtataattctgaaaatttctatttttttccaagattaagcacaaatgtcaacttctctgtaaaatttcccatcttctctgactaccaccttcaaattaagcacttctttctcattgctcccataacatctttcatatacctctgttagtgctcttatatcaatttaaatgtagactctacacatccatctcctttctcaatcttcatgtgggtcttcagccctacttctgcactgaagcaaaaggaaccaaaaacctgaccgcaaatcagtcagtggcttaacatcccaggttagagtgtcgctctggtccacttctgtctccaattgttctgttgatgcgctatcagttagttttaggccagccagcctgtacattgatgcttgaaaaaacagtgctctatttccaagctagttgtctagaaactgtcatctctttcttagcgttgctcccaatctttttgtcccttcctagatacccattactaggctgtgagcaatgcgagcattttgattgtgcgcaatttatcctttaatccaaaatgtcaagtgtaattttggacatatcacagatactaaatgaacatttattgaatgaatcaaacatttctctatatttttatatattttcataattttattttaaatggtttggtaatattcaattgcattaatttagcataactggcataattaactgagttttctgtggaaatgtaatagtctaaacaacat

SEQ ID NO: 3952 - DNA, 1028 bp, Homo sapiens
gcaatctacagattcaatgctatttctatgaagctaccaatggcatttttcacagaatcagaaaaaactattctaaaattcatatggaagtaataaagtaataaagagcccaaataggcaaagtaatcccaagaaaaaagaacaaagccagaagcatcacattacctggcttcaaactatattgtaaggctacagtaagcaaaacagcatggtactggtacaaaaacagacacatagaccaatggaacagaagaaagaacccagaaataaagctgcattcctatagccagctgaccttcaacaaagtaaaccaaaatcagcaatggggaaaggactctctactcaataaatggtgctgggataactggctatccatatgcagaagaatgaaactggacccctaccttgtttgatatggaaaaattaactcaagatggatcagagaattaaatgtaagacttcaaactataagaatcttagaagaaaacataggaaacaccattctggacattgactttgggaaaaatttatgactaagtcctcaaaagcaatgacaacaaaagcaaaaattgcaagtgagacctaattaaactgagtagcttttgcacaacaaaagaaactatcaacagagtaaacagacaacctacagagtgggagaaaatattcacaaactgtgcatctgacagaggtctaatatctagaatctataaggaacttaaacaattgaacaagtaaaacaccaataaccccattaaaaataggcaaaagaaagacatgaatggacagttctcaaaagaagacatacaattaaaaaaaagaagacatacaagcagcaaaaaaaaaaaaaaaaacatgaaaaaatgctccacatcactaattaccagagaaaggcaaatcaaaaatcacgagataccatctcatataagtcagaataactattattaaaatttaaaaatatttgggtgaggctgcagagaaatgggaatgcttataagcatatatacactgttgggaatgtaaattagttc

SEQ ID NO: 3953 - DNA, 1045 bp, Homo sapiens
agcaaagaaatgatatggctggggatgggagttgtggagttgaaaaaagatttgcttttttaagatggaagaataatagtgggttttattccttgttgtttgttactatctgtgtattgaggtgggttttaacctctcttttactattttaaattttgggtgctttttatgacagtttcctatggaggtaagatgaattaatgtagaatggtcttatgttgcctagttctaaggatgtttctcttttatcttcttttacgtctttaaatgtattatctttaagaaatattaaatggagtattaagagaggtatagaaatggattttctgacaaaataataaaatatgccatagtaggaaaaagtttccagaagacaagagtttgccagtcatcttgttgctgactgtggcagtccattccctcacttgaaaggatcttaaagaactaaagaaaaattaaaaaaaaaaattgtgcgggaactagcctaatgcttctcaaccaggggcaattttacagtgtctggagatattttgattgtcatgactggagtggcgctggtggcatccagtgggtagagaccagggatgctactaacattctataatgtacctcctcacaacaaaagattacctagtgcaaattgtcaatgttgccaaggctgagaagctatgggctagccctatcatctttcctttcttccagagagaagctaggaagctgcttctgaaaaagggatccggaagcaggagctttccctatcccattgttctgtgtttagatgagacacagcttttaaataaatgattagggttcaaaataaagacatttcttttttgcctttgctttctctttacccccttctgtggattcccatagtataatcgaattttataacttttggtagtttcccattagggcccatgacagaggaacattaaagtcatggtgaaaaattcctcattcagttgagaaaccacaatttcacattgctgatttctattctgcatctgtctgacaacttagtgaaggaaaggatgaagaatag

SEQ ID NO: 3954 - DNA, 1050 bp, Homo sapiens
actgctctcagatgtctgcttctaagctacaaccaactaaactgggactgcctggtaggaaaaatttctaggctttattggcaggggcaggctactggggtgaactttgctggataaaacactgtagatttagcaatattccatgctgtgttggttattctcttacaagagctgcttctctgcttagctacaccgcatgcagggagagatcattcgtcggatcttgtgacaggcaagttgctcattggcttctgaagtcctagcaagagagactatccataagcctagaaattggccaaagagaaatgcagtttcttaacattgatagaagaataagatctgttggcaggatttctcaagggacattagcattcatttgtgacatctcatcaaaaggacagtctttcagaaaggccaatggaatcttttacaatccaatattgataatgtttttaacgaaaaaatgctatagttcataatcaatacaagtcttataaatgcaagctggttacattggttataatcacgtcaccacccccacccctgccttttccaatattagtacaacaaagacttcttgctcaattacttaagtgtaaaacttatgtttaggttaatttattcatttattcatttagcacatatttattgagcactgaatatgtaccagattctgtgcaaaacactagggatacggtaatgaacatgatagacaatgaagtaagaggaggcctggaagaagcaggtgacaaataatatgaaccagaaaatttcacatagtgattaataccaggagaaataaaacaaagtgatgtgcgagcaaatgattttgaggttactttagattgtctggaaaggtggcatttgtgtcgggaaacaagtgatgaagagtaatttgcatgccaagaactggaacataacacttcaggccttaaggtagaaatgaggtggtagcttggcacattcacatacaaaaggaagaggtgtaatgtgtaaggaagagacagttagggagaagccaggcctttttggtcataaaaaggaatatag

SEQ ID NO: 3955 - DNA, 1100 bp, Homo sapiens
tgatctcaattatcaaagggatattgagttgctgctacacactggggagaaggaggattatgtggaatccaggggattatctggggtgcccattagcacttcttataacaaccaaaaaaaataaaaaggcagatgactaaggactttacccttctgaaggaaggtttaggtccctctgctggataaagaattgacccgctgaacttctggccaagggcaaaagaaatataagccagaggtatcaactatggccttgtgcccagctactgaaatgaggactgtagtggctttgtgtattttctctttggctattatatgtttatgtgtgtaggctgtttctcctttttccatttttgtttttacacaaactagtggtgcttaaccatacataatagtctttaggcaagaaaataatcaatgaaactatgatagaatttgaggagtaatgactatagctgccaatggatacagtgatggttaggactatgcatctctttattttgtgaagggtgagaatttcttcacttgtgagaatagcaatatcttgttaggtggaaacacagagttgcttcattgtacagaactcacatgagtgaagggtaaatatggaaaatgagtagctaaaggaatgtactgttcccagttatcaactcattgtctcaacccccaatccacttattaccattctatgataatggagctgacccctttaagaatttcttctttacagtgaacatgttgctaagctttgtcaatagacagtgctggaggatcacagaaaaaaggagcttttcttcttgtttcaggtgatcttctcctgcagggggagggagagagagagagagagagtacgtgtgtgtgcacacattctgtgttttctgcagtgcccagtggccggcagcacagagcaccttcctgtggacaactttatagtgggagggctaccagcaaagcatcttcacttgaatggctgcctcaggcaactggttccagccattttaagcaaggtacagatggtgggcacattctcatgaacatcttcccccagcatacctccttgcagagagctgctaacagggcaccttcctctggacaacttt

SEQ ID NO: 3956 - DNA, 1029 bp, Homo sapiens
aaaattacgaaagacattcatttgcagtttatgaaaggaaaatgtagtttggatacaaagctgattaaattggatcaagaaatattagaattaaatgcaaaaaataatccatgcatttatggttttgatttttatatattcccagctagttgaaaatgatgattcccacaagaagcataactcagcttgtttctgcttactgagtattttctactatggtatatattgataacatttcttccattatgtatgttgtataccagagttacagttactgtgggaatcataatttgaaattttgactcctgtgtttctggaatctttacaacaaatgttgcattaacatataacttttttcagttgactttaccaaaattaagcccatctttagtagatactgttttaacatgtgaaagaaatacgttataaacataccacaagatatggctataaaacaatgagatcagtatccatttttgctttaaagaattggccttattgcttcagtgtcacatctcatactcaagggcatttactacaaagaaagagttctccaatattgctgttctgttgctgcctgccctatttacacatgtacctgctacttaaataggaaagcctttcaattcatggacaatacaccttggtggtaaccaggcttttatttttatttttttttcttagtgtaaaaactgtactgttttggaaatgtgctgtgaaatattaggtttaactgtgtagatcctagaataaggggatttatatagatgaagttgtaaccaagaaactggttattaaaaatttatttactccaaacatggaaaggtggcagtgtcattcttgtgtcacctgcacagtttgcagtctcagagacttcagaggactctgagatttgcctgctgaggtatacccagtcatagggtctgccaggtgggaatcacatgatacgacccacgttcagttttctctcttttgactatggtagtgccagctttgactgtgctagagtttcagggacggacatgagcg

SEQ ID NO: 3957 - DNA, 1026 bp, Homo sapiens
atagcttctctgcatttgcagtaaacacacagaaatgaaaatgggaaaatttttctgtcacagcagtgaagagaactataaaataattacaattagatttaacaagtaaaccatagacctgtataataagaatcatggaaagtactatgtttcagaaacagaaagacataccaaataaacaacatgatgaaagtataagtgtaaattctcccaatttagcaattctaattagagtagaaacaagtttttcttttttaatgttaggaaaaaatgaccacatgatttatgtagaagaccaaatgtccaagaataaccaaagaaagtatgtaagagaggcactggttttaccggatatcagaatattagcctaacgcagctgtaatcagataaatattatatggacaaaggaatagacaagaggatcagtggaacacatggaggagtgaatttcaaactttatggattccaattcatgataagaaatatttatatgcgtaataacttttgatgtgtagggtggttctgtctctcacagtccactgactcaaatgttaatctcctttagcaacacccccacagacacacccaggaacaatactttgcatccttcagtccaatcaagtggacactcagtactaaccatcacaaacctagataccctaatacgtatatggtttatataaatgataaaggtgacatcacagatcaatgggaaattaaaagatcattcaataaattatgctgagagagttgattaactactggagggggatactatgttcttgcatcataatacatggaaaagtacattccaataggattaaagcttaatgcaaaaaatgcgaaatggcaaaacaattagaaaagtatgttggcaaaatttttggatgagaactttctaagcatgaaaattgtggcaaaaactacaaaggaaaattgatatatttgactttgtaaaaatgttaaatttctatacatcgaaatgaaaaggcaaaccagcctgggcaacagagtgaaaccccatct

SEQ ID NO: 3958 - DNA, 1071 bp, Homo sapiens
gaataatgctactgtgaacataggtatacaaatatcctgctttcagttcttttgggaagtagaattgctagattgtatggtaattttatgctaaattttttgaggaaccaccatactgttttccataggagctgtaccatttacattctcaccaacagtgcataaggattccaatttatttacatccttaccaacactggttatttatttatttattttttcagtagtagccacctactgggtgtgaggtgatttaacttttcttaatcttagccttgctgatcacatttaataatatccttagcatttaaatgcaaatctaaaaatttaaaagtgtttacactctttgcatttgcaaaatatctgaattaagtaaatttcattaagacgtgtcttactatattatctaattattcgggtcacttatttattagtgtatagcattacttaatgttgtctttctcagtggtgacatagtatggtaataacaatcatcaaacatctttagttgacaagaatttgaaatggatagtggggccaggcgcagtggctcatgctgtaatcccagcaataagtgaggcctagatgagcaaatcactggagcccagaagttcgagaccagcctgagcaacatgacgaaaccccgtctctacaaaaaaaaaaaaaaaaaaaaaattagccaggcttggtggtgtgcgcctgtcatctcagctactgaggaggctgaggtgggagaatcacttgagcttgggaggtcaagtctgcagagagccccaccattgcactccagcctgggtgacagagtgaaaccctctctcaaaaaaataataataataataaaataataaaaataaaaataaaataacaggaaaaagtgggagataagatagatgaagtgtgaaattgtgaagaatcttttattcagccaaagactttggacttgatgctgtagatagtcaggaaaccattgggaaattttaagtaatggtaaggggcaaaggagggggtggatactagaggaccgatttgaaagcgattgtagaaagtattaagaaatgacaggatttgtta

SEQ ID NO: 3959 - DNA, 1033 bp, Homo sapiens
tctttaaatgattaatacttaagaattgaacatttgtctttatctttcatgcagaggaaaaaaacagcagatttgttgatggaaaagtaaacctttaaaataggaaggagggtataatagagcaaatggaaatcatgagactaaaatcacattggaattatgtgacagtgtcatgtgtctctgggcgagaaaacatacctcagatttccctatttcaacagagtacaaccaagtgcctgaattgagtgattcctcctagtattaagattttatcattttaattatattttttttatctagcagtttcttaacgactttgattgttggaagatcaaaatgctcttttattttggtacttgttcaggttcaagaattaaaaacttaagatgggggaagaaggctttgctttctctaactcttattttctgtaggtacttcgtaactcaggaagacctcatttattcccagtaatatgttttactaaactctttcaggtaactcttaaaagactgtgtgacttaatagtagatcatggcttgaactcagtttttatttattgttgttactagaaaatttttgtgaaatatttttctttgtctctgtagttatcagagactattacagacgattgctgtactcgaggctcagcgttctcaagcagtccaagaccttgaaagtttaggcaggcaccagagagaagcactgaaaaatcccattggatttgtggaaaaactccagaagaaggtatacattgaactgtttttaagatttactaagatctatttgggaatagcttaagagaatttggttaattcttttttatgggtatatactttttaaaatgtttaatttttttcgtctataattagccgtactacttaaggcaagataccaacttcttccacctccaccaggcacacaataaaatatatccaaatgaaaatagctagaagcttttattggatatttgtatgggaacttgtcctattccttagccattttttttctagcttttcctgttatcttccccttc

SEQ ID NO: 3960 - DNA, 1029 bp, Homo sapiens
ccctctttttgttttttgagacggagtcttgctctgtcacccaggctggagtaagcaatggcatgatctcagctcacaacaacctctacctcccgggttcaagcagttctcctgcctcagcctcccaggtagctgagattacaggcatgcaccaccatgtccagctaatttttgtatttttagtagagacaggggcttcaccatgttggccaggctggtctcgaacccttgacctctggtgatccgcctgccttggcctcccaaagtgctgggattacaggcgtgagccactgcacctggccctcttttttgtttttaatgacactatttaatgagttttgaagaatcaggctgatattttggcagagtgtccttgatatggatttttaaaaatgtttctccattagtttttttagattacaaatgcccatggaatcttaagggttattaccacagtagaaatggaaatctagtttttttaaaaagattctgatgcagttgaatataaaatctttccttctgtttctgtctgcctgtctgtgcctccctcctgcacgccttccttccatccctccctgattattgtgtatgtaatattactgcctagaaattggacagtaaaattaacttataggccgagcacagtggttcatgcctataatcctagcactttcggaggctgtggcgggaggagtgtttgaagccaggagtttgagacgagcctgggcaacaaagcgagaccctgtccctacaaaaaaaaccaaaccaaaccaaaccccagagaacaaaattcgctgggaatggtggcatacctgtggccctagctactcgggaggctgaggcgagaggatcactttagcccaggagtttgaggccgcagtgagctatgattgcaccactgcccttcaacctgggtgagcgtgagactccatcaaataaataaataaataaataaataaataaataaataaataaataaaatcaacctccagattgctaattccttgatgttctcttcagatgtcagga

SEQ ID NO: 3961 - DNA, 1669 bp, Homo sapiens
ccactgtcatgtaaatgcttaagttggtctaatatgattctataaaaggactaccattactaaattgaaggaactgttgcccttgaatttgtcgtctctccagcctcctcatcagaatgtattaagaatatatagtagctgtgccagatataatggggccggtttaactactgtgctaaagcactaaaattgaaacagtagaagtgtacttacttaatagctaaagttatataactacagtaggtctaaagattagatttgttggagaaaggttttacaacatgggaaatgctttagcaactgtcactcttaagtaaaatagagataatatctaaaaaggtatttcgaataaatctctccattgagtctagatagcagctgagaattatttacaaattgttgagttccggaactggtggcatgattgcactatgtcttaatgtttaaccagaaataaatggcaataaatttgctaacataaaaaggtaaattttaaattaatcagacgggatctcttaaattgtgatatttcaactggtgcaatcttaaatatgtaccttaactaaatactttctcatttgctgttccaagataaagcaatagtggctacaaggaaggttgataaatttatatttacagtacatgggttcaaactgcgcaggtccacttatgtgcaaattttgtcctgcatctgacacccctggaacagcaagaccaacccctcctcttccttctcctcagcctattcaatgtgaggataatgaagatgaagacctttaggatggttcacttctacttaatgagtagtaaatatattttctcttccttatgattttctgaataacatattctgttctctagcttactttattttaagaatatagtatgtattataggtatcatacaaaatatctgttaatcgactgtttatgttatatggtaaggcttctgggtcaacagtagtcttagtagttaagttttcgggagtcaaaagtattttagactgcagtgggagcatctgtgctcctaacccctgttgttgctcaagggtcgactgtatttatttatttttaaaaatagacttttaaaaaagcatggttttagatttacagaaatatctagaacatattacagggttactgtatactctatacccaatttcctgtattattactatcttacagtagtatggtatggttcatttgttacaattaatgaatcaacattgttattaactcaactttatacattattgagttccttagtttttacctaatgtcctttttgtgttccagaatcccatgtaggataccacattacatttagttttcatgtctcctgagtcttcgcttggctggagcagtttttcagacttgccttgttgttgatctgaacagttctgaggggtactagtcaggtattacagatgcctctctatttgaatttgtctgatatttttctcatgattagactggggttatgggtttttgaaaggaaaacaatagaagtaaaatgccatttctatcacatgctaccagggtgcatactagcaataagatttattgctattgatgtgactttaatcacccagctgagggtagtgttggtcaggtttctccactgtaattattcttttttcctccccttttcatactgtattctttggaag

SEQ ID NO: 3962 - DNA, 1066 bp, Homo sapiens
cttttttggataattcattgttagtgtatagaaatgctactgattattgtatgttgatttttgtatcctgcaacttaactaatactaaatttgtttattctaaaagtgttttgggtagagtctttagggttttctatgtataagatcatgtcatctgcaaatggtgatgatttaattttttcctttccaatttagatgctatttatttctttctcttgactaattgctgtgtctaggacttctattactgggttgaatggaagtggtttggggatccttgtcttttttcagatcttagaggaaaaacattcaacttttcacccttgagtatgatgtcagctgtgggcttgttgtatatggcctttattgtgttgagggtgttgaggtacattccttctgtatttaatttgttgagagtttttttttttaatcatgaagggatgtcaaactttgccagtgctttttctgcaccaattgaaatgatcatagtttttgtccttcattctgttgatatgatgtatcgcattgatttgcatatgttgaaccatcctttcatcccagggataagtcctaattggccatgatgaatttttttttttaatgtattgttgaattttgtttgcttgtattttgttgagggtttttgtttcaacagtcatcagagatattggcctgtagttttctttttttaacgtgtctttgtctggtttgagtatcagggtaatacttcatataatgaatttagaagtattccctcctcctctattttttggtatagtttgagtaggattggtattagttcgtctttaaatgtttggtagaattcagcaatgaagccattgggtcccagggttttctttactgggagactttttattatggctttgatcttgttacttgttattggtctgttcaggttttggattttttcatggcttagtcttggcagattatatctagcaatttatctattccagattttccaattagagcaattagttgctctaatgatcctttgactttctgtggtgttgattgtaaagtctgcttttttttttttatctct

SEQ ID NO: 3963 - DNA, 1028 bp, Homo sapiens
gtcagtgaggaagggccacttaattctgcagtagttgaagaaatcacaggctatttggctgtcaatggtgttgatgacagtgattcagctgttataaactgtgatgactgtcagcctgatgggaacactaaacaaaatagcattggttcctatgtgttacaggaaaaatcagtagctgaaaatggggatacggatacccaaacttcaatgttccttgatagtaggaaggaggacagttatatagaccataaggtgccttgcacagattcacaagtgcaggtcaagttggaggaccacaaaatagtaactgcctgcttgcctgtggaacatgttaatcagctgactactgagccagctacagggcccttttctgaaactcagtcatctttaagggattctgaggaggaagtagatgtggtgggagatagcagtgcctcaaaagagcagtgtaaagaaaacaccaataacgaactggacacaagtcttgagagtatgccagcctccggagaacctgaaccatctcctgttctagactgtgtttcagctcaaatgatgtctttatcagaacctcaagaacatcgttatactctgagaacctcaccacgaagggcagcccctaccagaggtagtcccactaaaaacagttctccttacagagaaaatggacaatttgaggagaataatcttagtcctaatgaaacaaatgcaactgttagtgataatgtaagtcaatctcctacaaatcctggtgaaatttctcaaaatgaaaaagggatatgttgtgactctcaaaataatggaagtgaaggagtaagtaaaccaccctcagaggcaagactcaatattggacatttgccatctgccaaagagagtgccagtcagcacattacagaagaggaagatgatgatcctgatgtttattactttgaatcagatcatgtggcactgaaacacaacaaagagtatgtgtaaatatggtaaccatgaattctgctttgtttattattccccaagtttttcagtatcta

SEQ ID NO: 3964 - DNA, 1027 bp, Homo sapiens
gtaggagtcagaatggcatttggaggtttacatgagaagggagactgttgatgaccaaaggcaggaggaagggactgtgaaactttgcactattgccaccactggcctctttctctaactaatcatcctgcatctcattcaaagttaggaaataaaatgacagggtaccttgtgaaaactaaacagaagaggagtcggggaatagagacttcaaatattaacagctcctttattctgcttgatgggagagcctctggaaaatatcaccaaatcactagtttacccaaatggatcaatcaaggcatttttctatatcccttacatttctgtcatataaacctcaagcatccacaccagaatacctgctcatctcccaaaccacacattaaaactggcactggcatatgctatacacaggagttcaaagaaggaaagggtgggattacaggagtagtcttgatttcttaaatgtaagtatttgcttcagaggcttcttccccattttcttttctggtctttggaacactccctttcacttgctaatttatggctttatttctagagactaggaaggcttgggtttgctttgttttgttcttagccaatgcaagctagcattgtgatttttgtctatttagttatgaaaaattatactgcaataaaaaatttttggatgccagattattattaagggatttgatctgaaactcattttagcaaaagtaaattaaaaagaggagagcctgcctttctgtataccgggaacattttgaaagaacacgagaaatgattggaatagttttttgaaagatagctgctatataagttcaagattattattttatttattttatttatttatttatttatttttttgagacagtctcactctgtcgcccaagctggagtgcagtggcatgatctcggctcactgcaaactctgcctcccgggttcaagtaattttcctgcctcagcctcctgagtatctgggattacaggcgtgtgccaccacacctggctaatttt

SEQ ID NO: 3965 - DNA, 1049 bp, Homo sapiens
ataaaactaaatattatgataataaatatcagctaaaccattggtgtgatggaagattgccagctgctcaattcccaaaataaactgtaccactttggtgattatagtaggaacaaaagcttataggcaaggtctttgaaatatctttttgaaatttctttctcttaagtaaatagctggagaagtgtgtcattaggtgggccttttttgtttaataattattatctgttttagttcttatgcgtacagttctacaggtatgatcataggagctggaaatttatgacctgaaatgtagctgataatgcttcaaagagtgtttttcagaatcctatagttatatttgggtaacagtagattcaaatttatgagagggcaattcagcagcaaatatgtgggtaggatatgtgaaattataggtaggattgagggcttaatatgaatggacaagttgaaattcggttgactagtccttctcagatatggcctccaagaggatgagaatttatgaaggtggggaagagagggagggagtctggttaattctagttactgaccacactcttttttctctgaattctagaaagtgcaaccattcattatttggtagataacatataggaaaaactccagtgtagttgttagttagattgcgttttgcccatatgaatatgttaattaatggcttcccttatttctaaaactagattgattgcatttctaatttcagatggatgctggctaaggtttttaccatatacctcttattttgttagccaacagggttatttcctgagataatttgtaaataagttcatttttattccttaacaatatttggcagaaatataattttgtactctaagcttctttattgtattcttaagaaacattttgcaatgcagctaaaatgaggaaaacaactgctttagtctataatattttgctaagcttggcaaaacaatgttgagacttggttgagataatacagactttttattttttattttctaacagaaagggtctcactattgtccaggcagttctca

SEQ ID NO: 3966 - DNA, 1027 bp, Homo sapiens
tctgttgcccaggctgaagtgcagtggtgtgatctcggctcactgcaaccaccacctcccaggttcaagcaattcttctgcctcagcctcccgagtagctgggaattacaggcacacaccaccacacctggctaattttgtatttttagtagagacagggtttcatcacgtttgccaggctggtcttgaactcctgacgtcaggtaatttgcccacctcagcctcccaaagtgctgcattacaggcgtgagccactgcgcctcgcctgaatctgaatttttaagaatgaggtttagaaatttgtattttatttcattttcttctcattttgtttttaagagacagggtctgttttactcaaattggagtgcagtggctgttcataggtgcagtcccactactgatcagcatggaagtttagacctgctctgtttctgaccttggcccattctgccgtccttaggcgacctggtcataccctgctccctggagatcaccatattgatgccgaacttaatgcagacacctgattgacatagtgcactacaacttagaactcctggactcaagcgatcctcctccctcagcctcccaagtagctgggactataggcatgtgtgactgtgcccagctagaaatttgtattttaaacatgtacctagatttaatgcttatgaacactgaagttttatttcttttaattaattgattaattagttaattttttagagacagggcttcacttggttgcccaggctggagtgcattggtgtgatcataacttactgtagcttgtagccttgaactccaggcctcttgcttcctgagtagctaggactacaacaggtgcacaccaccatgccccactaatttattgtgtgcattttttttttctgtagagacagggtcttgccaagttacccaagctggtctcgaactcctggcctcaaagtgatccttctgcctcggtctcttaaagagctgagatgaccagcgtgagccattgtgcccagcccgaacactaaag

SEQ ID NO: 3967 - DNA, 1059 bp, Homo sapiens
actgcagcctcaaactcccaggctcaagcagtcctcttgcctcaatcttctgagtagctggaactacaggcatgtgcaactatacctggctaattttttaattttttgtagaaacaaggtcttaccatgttgcccaagatggtctcgaactcctgcagttcaagtgatcctcctgtctgtctaggcccctcaaagtgctgggattacaggtgtgaaccactgcacctggcctattcagggtattttatataaatgggaattttacaatatgtaaccatttgtgactgacctctttcagttagcataatgtttttaaggttcatccatgttacagcatttgtcaatacctcactgttttttatggcttaagtgtatttcattgtgttgatatgatattccttgttttgtttattcactcagcagttgatggacctttaagttgcttccactttataactattatgaataatgctgctatgaacatttttgtacatgtttttgtgtggacatatgttttcctttatttttgggtgtatacctaagaatggaatttctgggtcatatggtaattgtatgtctaacttgttgaggaactgccaaactattttccaaagcagctgcaccattttgcattcctaccagcaatgtatgagggtgcaaataactctacatctttgccaacacatgtttttgttgtcttttttattatagcaatactagtgggtgtgaagtatctcactgtggttttgatttgcatatccctgagggctaatgatattgagcattttttcatgtgcttattggctatttgtatattttatttgcagaaatatctgtttaagtcttttacccatttttagattaggtttatctttttattaagttgtaagggtttttatagatagagagataattacaaatattttctcccattctatgggttatctttttattctcttgagttcttggaagcacaaaaggttttaattttgatgatccccatttatctgtatttttctttggttgcttgtgctttttgaatttttatgttttaattgt

SEQ ID NO: 3968 - DNA, 1028 bp, Homo sapiens
agacaatttagcccttaattatgtggcttaagtggggaataaatgccaggatgccaaattaagtgtgtgttgtgtgaattctgatttttaaaattcacattgaaataagaatggaagagaatacactagtatgttgtgttttttttttttttttttttttttgagacaaagtctcgctctgtcgcccaggctggaatgcagtggcgtaatctcagctcgccgcaacctctgcctcctgcattcaagcgattctcctgcctcagcctccctagtagctgggattacaggtgtgtgccactgagcctggctaatttttgtatttttagtagagacagagttttgccatgttggccagactggtctcaaactcctgacctcaggtgatccactcaccttggcctcctaaagtgctgggattacaggcatgagccaccgcacccagacctacactagtatgttaagtggttgttgaaatggggtaagctatatttgtactttatattgtggatgtgtctaaattattgtattttgtataattgtccattcatttaacatttattggatactatatgcttgttaaataatttaacaattatttattggatacctatacttggggtcctagaaccaatcccccccacgtatactgagggatgactatagtctgttctcattattcttggattccacgtttgtgaactcatttactggctaaaatttatttgtaacccccaaatcaatatgtctggcactttcgcagtcatttgcggacatgttcagagtggtgaaatttgagttgcttgatgtacacatttccaaatgaggttaaacaaaatgactctctgctgccttgttctagctctcttgtctatttacttagtgctacatctttcccacttttttttttagaggtggtttcactgtttaaaattgcccctaagtgtagtgctaaagtgctgtctatagtgttcctaagtgcaagaaggctgtgatgaaaagttatagtgctgttgactgtgagttccgtg

SEQ ID NO: 3969 - DNA, 1026 bp, Homo sapiens
gttgaaattaggtattttggtcatgattaagagtgacgtgtatacttagcagtcctgtacttcagtcatcttttatttgctgagcttttgtggaaattaaatgattgtaaagttttagcctactttctaaaaaaaaatcacttgttttttaatctggagagtttaaatgtctgactttggggaaacatcatgcaataggggaacattatctcctgaagaatgggggagagatgaactaacttttgtaatggttatagagttacttctaaatttgaataaatgctgttctacctagtgaactagtcagagcattttccactttgacctaagccaagcacatgggtagctacttctctttctgtagttaagagaatttcaccaaggatattttgatttatttgtagctatatggcagtggttctcagtatttatcattcatcataatcgcctgaaagttgtttgttttaaataatagatttctgggctctgcccttagagtttcagatttagtacgtcaggagaccacactttgagtagcactacttgggtatagtcaggacttctgcattaaaaaacaaaatgaacagacaaaaaccctacaagtgattctgttacatatcctagatgagagaacctttgatcaatagttctcaatacagtatatggttctgggcatagcagcagagcatcacttgggaattttacaaatgcagattttctccaactctggagatggaacccagaaatatgtgttttaaactaaaccactagaggattctggtgtgtgctaaagtttgacaaccatccttgtaactttatagttccctggcacctatcagggaatttactagaaattcaaatttcacactgcactcggagctctcatataacagattctgaatatcagaatctcattttacagtagtctctactgcactcttcagtttcgctttccttcggctgaacatactaaatgggaaattcaagaaataaacaattcatgttttaaattgtgtgcccttttga

SEQ ID NO: 3970 - DNA, 1052 bp, Homo sapiens
acaggtgtgagccactgcacccggccaatgtgtcttttcctaaggagaaatctcctctttttccttctttttaaataaagataaatacaattaaagtataatacacacagaaagttctcataaatgtacacctcagtgaattttcacagtgtgagcacactggtgtaatcgtcactaagaagaacactgtcagaactccagaaacttgtgtgtttattccggtcattaatggtccctaggtgccacccctcaccaagagaaatcactcttttgatgtctagtaccacagaattattttatttgcttttgagcctaggatttatacagtatgtattgtttttgtgtttggccttttttgctcaatgttatgtttgtgagattcagctgttttattgtgtcttcatcctgttctgatacgagtaacctgagaaatcctataactcaacctgatttgtaccttgagatctcaacacttagacatttttctcatggcattcatggttttcaagaactcctaggaggggacatcaaataaaagccttctttgttttaaactctgtggtagacctttttttgtgttttaatgaccttttttgtgttttattgctatttgggtaaatagtagattttaaaatttatgtcactgatggcttatgcagtacctcagctgcttttttttttttttcctacttaaaaattttgttttaaaaactatggtacaggattcctggccagctaatggctttttggacttttatgacttggtagcttgcttttcattctttgaattcctcaagcagtgattcccattctaatttttatgataccatgtagtatcttcagttatttcaaagcatgttgtgagcctccccaccaagaaaaagattccaatttaagtttaagccactttactttcaaaatacttaacatttatgaacagtacaacttttatatttatgaacagtacaacattgtggtgtgtagattataaaatcaaataggctggtaaaaaattgggaatcagctaagagacttacctgcttattaacccc

SEQ ID NO: 3971 - DNA, 1044 bp, Homo sapiens
aaactattaacagtgataatataataatactgatttattctcacttgagttttttccttaaggtctgacaccatgccaatttccacagacctgtaactttaagttaccttaagctgggcctggtggctcacgcctgtaatacaagcactttgggaggccgaggtgggaggattgcttgagaccagcaacaacatagtcagaccacgtttctaccaaaaaagaaaaaaaattagcctggtagtgcacgcctgtagtaccagctacttgggaggctgagaagggaggattgcttgaacccagaaggttgagactgcagtgagctgtgattgcaccattgcactccagcctgggcaacagagtgagtgagaccctgtgtcaaaaataaaataaaaacacctaaatttcatatgaaaattcagtttggagtcacctacaagaaatagttgctagaagagtttcatttttatagtagtatttactagagatttggtatatactctggtgcaaatttctgtagttaatgctctgataaccactataattgtactctgaaaaccactctcagtaaatatttcccaaagtccaaagtcttgattattttgtttgaccctttcgttctcacctttctgtttttcttttcagctgatttttctcatttatgtaggtaatttttgtcttattagagaggagtgagttgactaacttgccttgaggagaatatcactttgtgattaatcaaactattcagatattattattactgttgttttggaacttcagtatatttgtaagttagaggcagtaattcagctgacatttattgctaatgacctcagccatttgaaacataacagcaatcctggacataaaaaaatctctaagccttcaaaatgactgcaaccaagtataataagccattagcctttattaggaaactactaattggaattagtccacagataaaaatcttcagtgttggccattggagttagggacattggcagctgaaatgtcatctacaggggaaaaggaagaactattaaa

SEQ ID NO: 3972 - DNA, 1031 bp, Homo sapiens
ccaccacctgcaaaagcatatgcacccctcagccaggtccttctccccacgcagtgatagttccaccctgtcccactcactggaagtccgggagccgtgctcgcgcagacctgatgattccattggataccgttcctcttactttaagatgttcttgtcagtttttcccttcttgccattttctaaagtattccagaccggttaactattgtgtcgcgttttctgctgcagtacctgactccagtctcctgaaacagaactcctcccatctattttctctgggtgtcatttactcatcaccctgacttcgtattttcagtaacttttggcagtatttggagggcccattatgtctctgacaacacctgtggtcagaataaaatcctgcttttcatcattttgtacgtgcctattaactcagttatcggtagggttttaattactactgtgttactgaggttgccatctttgaagtttagggatggttgttttaggttatatatttaaggtaacagactgtttcatgtgatttttttttttttttttttgagacggagtctcgctcttgtcgcctaggctggagtgtagtggggcgatctcggctcattgcaacctccgcctcccgggttcaagcgattctcctgcctcagcctctcgagtatcgagtagctgggattacagtcgcgcttcaccacgcccggctaatttttgtgtttttagtagagacggggtttcaccatgttggccaggctggtctcaaactcctgacctcaagtgatccacctgccttggcctctcaaagtgctgggatttcagcactgtacaggcgtgagccaccgcgcccggcctcaggtcaactttttagtaaagagcaaactcataaattttggcatcagagtttgagctttatttttcttaaatgagtttgaaatcaatttaatatttctctccaattccctaatgtctcagaagtgaatttacagtatacctttgttttttcgtattcttaagtagtatttggattttattta

SEQ ID NO: 3973 - DNA, 1030 bp, Homo sapiens
caagttttagatattagatgactgttttttttcccccttgtagcttaacagagcgttccaaaaagaggactctccagctactttttattgcatcagtatgcagtggtttagagaatgggaaagttttgtgaagggtaaagatggaggtaagtggttgactgaaaaatttttttttggtaaattatttgtttttttgtttgacaagtatttcttgaatatctgtgtgcacttgggattacactattgaacagaagagaaaaagatcctgtcctcagggatcttacgttctagtttatattctgttggttgtaaattttgttaaacttattttatgaattatagcaggaataagaggactgaacaaagtaaatctgtgatcttaatgttgaaaaaattttagaaatctttataaggaataagaggttgcttaaagtatggtttattcaatacagtggacttttaaagtaaaattgtatgacaatatttaataatatgaaaataagatattctgatatgtgccaggcacggtggctcacgcccataatcccaaaagtttgggaggctgacgtgggtggatcacctgacgtcaggagttcaagaccagcctgaaacatagtgaaaccctgtctctactaaaaatacaaaaattagctgggtgtggtggcagtcacctgtaatcccagctactcaggaggctgaggcaggagaattgcttgaatccacgaggcggaggctgcagtgaactgagatcatgccactgtactccagcctgggtgacagagcaagactttgtctttaaaaaaaaaaaaaaaaaaaagattctgatatgtgaaaaaggctgcaacaatatgcctagttaaagctttttgtatttatgtatttactttttaaaattttaaattaatagagacaaggtcttaaccctgttgcccaggtttaagtacagcagcatgattatggctcactgcagccctgaactctcagcccatgcgatcctcctacctccatctcctgagtagttgggactaca

SEQ ID NO: 3974 - DNA, 1005 bp, Homo sapiens
ttttatattactttgagaattttattaagaggatttatttttactgggtatttggccactgacttaaatgttagaaacaaacttcctagaacattaattcttaaatttttcatgctttaggtatggtggaggaccagctgtcaaccatctgtacatttgtcatacttgccaaattgaggcggagaaaattgaaaaaagaagaaaaactgaattggaaatttttattcgggtaaaaaagtgatgcttttcaaattgatctaggataaagatgaagacctgacaattatcagagttatatgatattaataaaatgattagatgaaagagttgtaatagatttcaagtgttctaggtgcataatggtgaatgacctcaggcagttcactacagttctgttgagttatgttctccctttgtgtgtgtgtgtgtgtgtgtgtgtgtgtgtgtatgagacaaaatcttgctctgtcgcccaggctggagtgcagtggtgcaatctcggctcacagcaacctctgcctcctaggttcaagcaattctcctgcctcagcttcccaagtagctggaactacaggcatgccccaccacgctaggctaatttttgtatttttagtagagacagggttttgccatgttggccatgctggtctcgaactcctgacctcatgtgatttgctgtcttggccccacaaagtactgggattataggcatgagccactgctcctggcccctttgtgggtttttgcttttatggattgacaatactttttttttttttaatgtattggcactggcagaaatcttattgaaatggaaaattacaggtttccttaagttagtgttgtctgtagtctatccagactgcatgtactactttgattcttttgtgagatataatattcttttgtttttttgagggactcctgggcttataaatatactcacttttcacaaactgagcatattatgaggtgtcccttaattgtaagcaacagaaagtgtgg

SEQ ID NO: 3975 - DNA, 1019 bp, Homo sapiens
atggtttcagaaattcacccttcctttttaattgtaggtaatctctagcttctttattgaacatatatttactgagtacatgctttctaaactttttgctagtgcctaaggacactaaaaatcctttttcttctgtgaaagctctaatttcatagtagagtaagatacataaacagctgtttacattacagtgagctcctctattatacatcatttttcctacctgaggcattcctgtgctggtgattttatctatcgactatattggtggttcttaaccccattgtctaaatgaatagctggcttttttcccaagtatggaaatgtatctgggatttaagaaaaaaaagcctcataattaaatataactttggcccttgtgagattggctgtgttaatgtttatttctacaataaataggacctttgtgtgatgccaattaaacttcaaggttgaagatgggatattcatggtaattatgtttgtagtgaaaccagaagggatagggatacctgtattggacatagaaattttaaggtgtatgttcatcttgaggaaacacaatcaccaaaaatgctttataattaccgttcttgggagagagagtgtaagaataatgattgagctgggtgcagtggctcacacctgtaatctcattgtctcaggaggctgaggcaggaggactccttgagccctagagtttgaggttgcagtgagccatggtcatgctgctgcactccagcctgggtgacagagtgagaccttgactcaaaaaaatggccagacacaatggctcatgcctctaagctcagcactttgggaggccaaagcaggaggatcacttgaggtcatgagtttgagaccagcctgggcaacataatgagagcctgtttctacaaaaaaaaaaaaaaaaaaaagaaaagttagctgggtgtgttgaagcatgcctgtagtcccagctactcaggacgctggggtgggaggatgccttgagcccaggaattttgaggctgctgtga

SEQ ID NO: 3976 - DNA, 1018 bp, Homo sapiens
cagaaaggtttatcctagtaataatagagattagctgttttgtgaaacaaatgtgaggtaaaaatttgacaaatttaataggcttattaagatgtgagagagtatattttgagggatgaaatctgtatgtgattttgcataaaacgttttcctaaataaggcaatattttcttctgaattaccattttaacaggctagattcaggaagtgaaaggtacaaagtttcatatccacataaaattcctaaaggttataccgacttcgatgttatctgctgttaacaatggcatacgagaaagacagctaaagtctgattttgtttacatctactaccagctgcctttttctgtcttgtaatcaatttagacttttaatgcttcttagtggtaagtcagaaaaaagtgttggaagacttggtgaaaagcaactatttgtgaggcaaagtgaactggaaatttcttctcaatctctgtaataggaatgcaacggcttgctaataagatctgggataatacagacttctagttcttggcagtaacctaaaggaaacattgatctgcaactgatcatgacatgacagaaaggaatggtatactatttggttgataaagatgaaaaagctgacttctacttttggagaaagtatcactttgttcttgaagccctagctgactgctgaaaaggaagttggcttggaaggggattgttccttgtaaagcaaagcatactaagaaaaagataacagtgaagatggaaaagaaccttgcatctacctccatattcaaagtagagatctgtcaaatgtatattaattttgattatataataataaccatcctttatctttttttccacatgtaagaataaaggtttttttttttttttttttttttttttttcatttgagacatagtctcattctgtcgccaaggctgaagattcagtagcatgattacagctctttgcaggctcagcttcctgggcacaagcgatcctcctgcctcagcctctcaagtag

SEQ ID NO: 3977 - DNA, 1031 bp, Homo sapiens
gagaaaaaaacagcacaagaaatacagaagtgttatttcagacatatttgatggaacaatcattagttcagtgcagtgtctgacttgtgacagggtgagtatgagggtattagaatacacagaaaattcgtgtcaaatgatttttaaaaatgtgacaagatgatgtgaaaagtttaattccttctctttgctattgatgagcatacatgcatttattgtgtttacatcaacacaaatttgattctaggtgtagaattttttttggaagtagcagcatcctgtttaaaggatggtgacccatcattggacaggcacatattatccttcgtcatctattttggttacatataaaggtgagaagttgctcagcaacaagaattggtaacacctgcatattctcccaggctgatgaaatttgtatactgggaatctgttgatattcacaggtacaaagctgtgaatgtatctcttacatttggtcatatatggtttgtaaatatttttccatgtttaggatgggactcagatactaaaggtagtatcaaattcatagacaataacaaagcatacattaaaatcatcatgaattttttaataacacttcttcaaagtttctttgagcttttcttaagtacagttttactttagtgcaatgatgaatatgaaataacatctcaaaaacaaaaagaagatttcaattattgtgttagaatctcaagtcaaatctaagaactttcaatcgggtcgttttaatgtaggttattttggtactaaatatttaagtggaattatcaggcatgtttttagctatttaaaattagatgccagattttgtctcacccttttaaaaaaatattttaaaactaccatcaaaggtcaattttcaaaaataaatacaatagtgcttaagagtttggacctcaagatgcagtggctggatttggggtgtttaatgctgcagtgtctgtgattgtaatggggatgctaatactactgcacaggacttacgtgaagatacctggtacagagca

SEQ ID NO: 3978 - DNA, 1067 bp, Homo sapiens
ttctagtaaaagagaaataaaaagattagcactacatttctttttctgtgttgtggttttgaatgaaaattaagaatgattaggtaagtattataggactttgtgggatcttcaaatcctcacagaggtttgaatgattttattctcagaatatttgtttaaagggaaagaaacagttatttaaaatgcttgtcagctgatttcttttgtgaaaagtctccctgagcacttactatggattgagaataaaataaacttttctgcttgttgttgcactcttcattgataacttccttccattcatcagtttttttggcttgcttttattgggtagcaattttcttccatgataaatatggaaagataagccataagcttattccttcattgtatttttgctaaagtgtaatatttcatatggtactgctggactagtactcgtggaaccatagtctagattgaaactgttgaaagacaaatcaatttttttataatcatagaatcttaattcaattctgagtttttagtgcaaagtgcttgctgtcctttgaagcacctctgacagttacccaacctctgtgtaacaattatggggaacatgctccttccatgaaagttcatctgtatttgaaccgaagtcttcaccgttgattgaatatgctgttctgactttctcaagttgcacagaaaagaaaggatccctttggtcatcatgttcaattggaacatgtgtatcaagtcctggcatcttttgccttctgctgtttaaacatccatgctttcagttcgtaatggttgacatttactgagtacttactatatcaccctcttctaagtattttatatatactaatatataatatgtaattatatattaacgtattatgtgtaattatataattagtttaaaatattatatattaatcttctccaaaactctagaaagtagatatttgtaattagatcagtgttttagatgagggagctaaggcaaagagaagaaacttaccactggtcccaaatctaggagatagtggagccttgctccagaaactttactcttagta

SEQ ID NO: 3979 - DNA, 2528 bp, Homo sapiens
ttgatcacttttcattttaaagtgctattcacttgatcttaaatgttccatgaactgttaaatttcttaagttacatagttactacaccacatttatgtgtatgttatgttttaatagtcaatgataggtatgtacaattgataatataaaggggctcattgaaacttgagagcctgttgagttttggttagttgtagattgcatttttataaaaaaaaatacagatagattgatgataatagatattggggcattgtttctgtctcatgagaattcttttattcattaccataagccttcactgatactataagcattattttaaatgacgctgatcttaagtctgaaataaatggaaagcagaaaaggtgagccagttgatttgaatgcattggatattagtgttagaaacaatgtatagtttagattgaaactgaactgacttatttagcacttaaacaaaaatttgacaatgtttttagttttttttaagacagcttagtgtggtgatacttagaattctatggtttgatgtttcttttagaaatgagaagtatagttttattttttaatataaaaaatggttttaatactaaaactagtaatttgatactagttgtttataaacattgtaaaatatatcttttaaacaaattatcttggtagttaattcataagggtgggtttgggtaggaatagcagagtactttcagagggaaaggggagtcattcagaagtgatagcattttatttgtttgaatactctgccagtaaaatcagctgtacttagaaagttatctgttgtgtagaataatgatgtagagtttactaatcagtgaggatgtcttgtttttattttctgcaaactctgcctcactttaaaatgcattataacaatacctaattaaagataattttggctctgaaagttaccttattttttgttgagttagtgacttcatttttcttgccacaatataagcttttgagggatttttttaaattggtgcttttaataagcaaataaatcccagggttttattttcttcagtgatacccctatagaaactcttaaatgtatttgcgcatatatatatatatattttcttatgcatgctcgatgcattttcgtcctgagaaaaatgttctctacagaaactacccgtgtgtaaaaagaagattggcttaaaatggctactgtgatgggaacagtgtcttagggagatgcagcttggacttgaggtaaattgaatactttacaactgtggtttagagtttgctttaatgacattgtatgtaaaaggtcacatgattgctgtaattttgtattcattatggtttcctcaataaatgtacattgatgactattataaaggagtgctttgtgttttttatacatatattacatggtaaaattttctacttgactgggtttttttttatgtttactgtgagaaaaaatgattttaaaaagttttaatgataaaagggtaacatctggttgcacaagtcttaaaatacagaaagacttttaaatacagaagttactttatttgggttcacgttgtaaaataaaattgtcttccagaaaattaaaatataaaacaacttaatagaacgtaatagctaattatttacaaactcattttaaagactagaattttaaatcgaaggttgtgccactttttccctaagtctgatacacttagatcttgaagccttcgactatgttgaaagtgttttctcttgcgtgaactattaatagaaagttttttcattaaaatataatttgttcaggcaagatcacaacataaatttgctttataaatttaatatatattacatacgtttgaaaaataacatgtttaatatcctcaacactcaacactgtatagccattctttaagtcctttaatttttgtttttctccatgctcctccccttttcctctgaaaggagtgacagttttccccaccccgctccaatcccaatatatctgcttcagaaagactttgaaactacaacaaccaaaatggtgtactactaaagaaaaagtccactcaaattgataggttccaaattaattatctcagctatttcagcctaattttaggtgtaaaaagctcagaaatgacattccttcatgcaaaataatgtattctacttaggtttgtgtgttttttttttgtttttgttttttaaacatagttgctgtaaacgtctatgggaaatacagtctttataataggttctgatagaataattgagtaattcccccccataagtacattttattgactgttactgcataataggcgataaatctgatgcttatttggaaaagaagtaggcattctttagatgagctgtgctttgaagactgttatgaaaaggaataagaagtcagcatagtggcactcctggtttccttttttggccccgccacagaaaagatggatgtagtaagaaagttggagtgaaagagaaagttccagggagaggggaggggagctagtagtcatcagct

SEQ ID NO: 3980 - DNA, 1026 bp, Homo sapiens
tcagtgtaaaatatgcatatcttctatatttaatatgaaagtcttgaaatgtatcagacagaaggggatttcagtttgcaaataatgagcaatgtagcaattttaacacatttcataaatatatattttgtcattggtggagagcaccatttgttgttttgaatatactttaaaggaagaggtacaaggacataaatgttgagattacctacaggatggaaatagcagtacagttcattgtagatattttgaaatgtttttgattgttttatataacctagagtgacttcccttacccttatttagatctgcatatatagttctagtatgaagtttaatagttaaggagttagctatttgttatctttaagagtagggtattgacgtgaacaattgcagtattttgcatgatactgttttatagatgaccttttaggaaagtggtgcatttattaattgaactgaagaagtagttcagttgaattcagtatcataattcacaaattggaggctgttgattttgattcatttaaggtttaaaatctttattaattgcaaacagtgcaattatttatacttcacagtgccttcccagaccttccaccttaggttctgctgcaaaaagcaccaggtaagcacaacctaaggacatatataaataaatatttcaatacattaatgttgtccctgtgaggtttttgtggttgtgtattcaaaggcaatctgctactgcttccccaaaatgtattttgttattttatgctaccatcttagtggaaagtctgtaagttgttaaagcaactgtttacatttctgggtaatgttttttattttacttttttttttttattaagacaagaaaatgatgagtagattgctgcagtaattgaactacatccaaatctttttgtattttttccccaaatatagaagtgttaatattaagaaaggacaattacacagttttcaagatttaggaaatcacttgtttagaaacttcaacagccttcacaatctgttttatat

SEQ ID NO: 3981 - DNA, 1140 bp, Homo sapiens
agcagcctattatgcccagacaagtccccagggaatgccacagcatcctccagcacctcaggtataatgtaattgctaatttgttgatttctactccagtctgttttctgcatgtttactgtttgtctgtttgggagtgtttgccttttaaatttttatctggcaaagtataataactatttaaatgaagtactacggtgtattgtttgggtttttttgttttttataatgctttccagcatctgagtggtgaatatttctgcaatgcctttgattttaaaaataaattttcttcccccagggatttgcaaatcatgcaagaagccaccaccatttatattaaccactttttctttcttaaaggattcactcctgaattagctccatttcaaggattttctttaactttttgtgtatttcttatgtatctcttctgcacagggccaataataagaagtggacaatacagtatttgcttcattgtgtgggggaaaaaaacctttgttaaatatatggatgcagacgacttgatgaagatcttaattttgtttttggtttaaaatagtgtttccttttttttttttttttttgaaaatgtacaaaatatctatcactactgataggaggttaatatttctgtgtagaaatgaaaattggtttgtttttagtatttagtgtagatgtacacattccagcaaatgtatttgcaattatgtggttgatgctttgtgatataaatgtactttttcaatgtatactttcacttttaaaatgcctgttttgtgctttacaataaatgatatgaaacctcctgtgtcggtaagttggatatgtgggtatttaaaggattcataatttcttagcaatgataaattaagatacatatacacaaatatataagctttccccatgaaatattgagtttttaaacactggcatgtttttccccccttgcagtatagtggtagattggaggatcttttccatttattgtattggctctttcagcacaagtaatcctgatatcttcattttttttccttctgtttgattaaaaactgcatgtgtgtacaatgatcttttggcatacttccattgcattaacagtgaaatttccttttatacatgaccactgtttca

SEQ ID NO: 3982 - DNA, 2042 bp, Homo sapiens
ggttatatggcaaggaaatttttttttctaattgcatttgtcaaccagttattaattgaaactagaaatgtccttactggtacatacaatattaacattactatacttttgacaatgacagttatatatattatcagtctaaatgacataaggttaaattttaatgtgtcaggcgaaaattgtgtgtgataccattatttttgctgcaagataagcaggtaagaagtaatctgcagtgacggaaagtaaccaagtgatggaaccagaatctggcttccaagagggtctgagtcccaagcttgtctcccaaatttgtctctttaggaaccatttggaacctgatactatacttctggacaaatcactatatttcagctgcttttgctcttagtcatttaaaattattacataccacagctagatgtcacaaatgaaagctaaattggtaagcttggttatccttcactagcagaaaaagaacctataggtggtagagttttgtcataagagaacggtctacttgggattttcaatgttttctttgccaaagaatgtttctcattctccacagaaagaaaaatttccagaaaggtgatgattttaatcttctagatgtaaaattacatatacctgatgataaagttgttttgcacaactggtttctttttaaagaaaaattgtttttcctcttagaatggcttcctaggagagtcatgttccgtctctttctgaggctttaacagattatgtttttgtgacctagcttaggcagatctacagtagctacaattcggcaaaaagaaacttttaacttaaaaacagcatactctgattaaggttggttacataatttattttctgaactgggatcctttttagaatgaatagggatgctattaataatcatgccctgacagcattgtggtcaggacctgtaatcaacttaactttaattaaatagcatcaccattttaaaagacttgagcatgagccacgtgcggtggcacacacttgtagtcccagctgcttgggaggctaaggtggaaggattccttgaacacaggagattgaggccagccttggcatcatagtgagacctggtcacgtgtttgggttaaaaatcactaacttcaacttctattttctcaatgggtaatgtcccctagatagggtccctagttattattaagtaggtaaaaataaaggcttgttaatggatttaggtaattatggaggaatgagtttggcttctgtgctttattttaccatattgattatttgtaatatggccattaatacatttactgtttagtcttttttgttttactttttatgttttactcaaaatgagtgggtgggtggaattctaatttttattgttaagggaagacattttaccttgtctttaattttttatttttttttaccatttccctgccagttagagatactatactatactgtcttgaatcctctgtaggaaaacatggcatagaaataattaaataataattagatgttaaataataatgctgtatgactaaagaacctccttaccccaccttttctgttgttgttctgtagtaccacaataatcacttgttaattttatttatttatttatttgagagggagtctcactctcgcccaggctggagtgcggtggcgcaatctcagctcactgcaacctccgcctcccaggttcaagcgattctccggcctcatactcccaagtagctgggattacaggcgcctgctaccacatccggctgattttttgtatatttagtagatacgggctttcatcatgttggccaagctggtctcaaactcctgacctcaggtgatccacctgcctcagccttccaaagtgttgggattatgggtgtgagccactgcacccagcctcacctgttaattttatgagcaaaacagattagttgggcaagtccttcacatgcatatctcgttgttgttgttttttttaagacggagtcttggtcttactccccaagcaatggtgcgatttcgtctcagtgcaa

SEQ ID NO: 3983 - DNA, 1092 bp, Homo sapiens
gaatttaattttattgtgccaactgggaaaactggattaataataggaaaaggcaatgtattttaaactcttaatgttttaacacattattcatttttctggacactttctgttgctgtcgtaaacaagtggcaatgctttttctctgaccgtattttagtagaaaagaattcttatgttaatatgtaacaagtaaaacataaatgagggatctcatgtatatttagagaaagagcaggattttaatcttactagcttctagagaaagcgaactaagagataattattagcataagaaatgtcttttgacccaaaaagtggtttgagtgtttttgtttgtgcattttggtttttcccgactcatattttaaaaatttgaatgtttataagtgtattagtttatatttacactgcttttaaaagcagttaattcaaatattttattataatcacattaagtttatgtttaaacatactaagtaaatgtaaatgtattttaagagaagcatgaaatgcttcctaaaatttgattttcagtgtagaatattaaatgaaaaatcttaatacaatattgtcaattaggatactgaccaaaccatatttttaatggcccatttaattgtgaccattttcttctaaatagctcctagtacacccttgaaacctttagagaaattactgtcttttgattttaggaggtgaaaccataaaaagcataagccagcagtctggtgcaagaatagaacttcagagaaatcctccaccaaatgcagatcctaatatgaagttatttacaattcgtggcactccacaacagatagactatgctcggcaactcatagaagaaaagattggtgtgagtatactttaaacttttaatttttagtgtagacccttagactgtagttaaattaagacgtttattcaaatacatcaaaggaaaatgtatcattactagtcagcatttatagatttcatgatatgtataatagatacaacgtgaagattttccagcaatgaaaataacctaattaaatgtgtagttacaggttttgagaacaaccttacatttgggtgtggctagataagagg

SEQ ID NO: 3984 - DNA, 1050 bp, Homo sapiens
accagattgttgaaaaaggaagaccagctcctggcttccatcatggcgatggaccgggaaatgcagttcaagaaatcatgattccagctagcaaggcaggattagtcattggaaaagggggagaaactattaaacagcttcaggtattgttatttttgtgaaatggctacttttgatctgttttgatgcccatttttgtccacttcttttgttaatatatattatttctatgattgtaacaggaacgggctggagttaaaatggttatgattcaagacgggccgcagaacactggtgctgacaaacctcttaggattacaggagacccatataaagttcaagtaaacttaactttatactttataaagaaagagtgggttgaatggggttgggcaaaatatgcatgaataattaaaatgttttgagacatgctttctaaattagctaactttttctgctttagcaagccaaggaaatggtgttagagttaattcgtgatcaaggcggtttcagagaagttcggaatgagtatgggtcaagaataggaggaaatgaagggatagatgtaagtaaaaatacccattcagaaatggttgtatgctaattcataaatataatagtgttttctgttttgtgttaagtagctctaacattgttatccttttatttcacctttatactttagaatacagaattctatatatcttgttaccctatttactataaatatagaattatatgtacttttatgatttgaggcagattttcaggaaatggcgcttttttaaaatacttttttttactttaaaccctgagaagctagctttcttaatacttagtcttttttacataaggtccccattccaagatttgctgttggcattgtaataggaagaaatggagagatgatcaaaaaaatacaaaatgatgctggtgttcgcattcagtttaagccaggtgagtacatataataatcttgtaagtgttggcagcagtgagttttgacatacatttattgtttaattaattttgtttctttgttttgaagat

SEQ ID NO: 3985 - DNA, 1520 bp, Homo sapiens
aatttaaattttgaatttttgttttatttttatttaattttttgatagcttttggaacacagttaccaccgatgcatcagcagcaaaggtatagtcacaagattttcaaaaagtactctgcaagttttggttgagctgtatgtaaaaacacaaccacattggtgtatattgaatatgtgtctgtgtattttttggtgtacctagttcatatcactccccttgggaaggtaccataaagtgatgatttttcttttgagtgagaaaaatttgtgatttggagagataggtggaattaaccacattttagaagaacaggggtgaattagagtaactgttaagatgacattctctaaactccacttcaacttctttacagttaatgccttcagactgttccattcatcatcccttcttcacttgatgtgtcatcttaaatttcttaatttaactactcaagtaataagatcatattttttgacatgagtctgagcctagaaccttagtttaagccattgggagacattagacttccatttttattaatagattatcttttatttgtaaacaaagtatctttcattgaaggaaaatggtgctttctgttatttcttagcagatctgtaatgacagaagaatacaaagttccagatggaatggttggattcagtaagtaacttgatttttaaagttttgaaaacatgatcaaaacatactttagaatctttcaaccaaaaaaaaaatttttttttttctaactagtaattggcagaggaggtgaacagatctcacgcatacaacaggaatctggatgcaaaatacagatagctcctggtaatgttacattctcatggtattttcagtgtgactagaaaactagcttttttttttttttaagccttctagtaacaataatgctacttttaatcttttgacctgaagttatctgtttgttttaaattgtagacagtggtggccttccagaaaggtcctgtatgttaactggaacacctgaatctgtccagtaagtttgaaaaatcttaaaaatctacttaagtaacaacagcagaactctttgaattttgtctcttctctttgttactgctttattttacactgtggtttcgctgccaccttccctcaaagtcctccaactcctttgaagtttatgcctcatgcctttctcaggtggggttcatcatctgaatcattaaacacagaaaatggttaaaacaactccatatctactccagtctctacttgtaaagccacgtgtagcctggagaagaatgcacagtcaggtcgactggtgacacttaaaactcagacattaagctcaagtggactgttgtgttgcctgcatttccctagttccattcacttttccactcctctcccaggctctttaatactgtatttccccacctccaaatcttcagcatctaaccccacgctctcccacttaagcttatttactgagaaaatggaagcaaatgataagaagcttttctttttccctacca

SEQ ID NO: 3986 - DNA, 1034 bp, Homo sapiens
tgttttttattttttttgttttgttttgtttgtaacagtcttgctctgtcatccaagaggggcatgatattggtgcactgcaacctccacctcctgggttcaagtgattctcgtgcctcagcctcccgagtagctgggactatgggcgtgcaccaccacacctggctaatttttgtatttagtagagatggagtttcatcatgttgcccaggctgctctcgaactcctgagctcaagcaatctacccacctccacctcccaaagtgctaagattacaggcatgagccaccatgacagcaaagctgggtatttcttaaattggttcagtcaggtgcaataaattatttgccctactctaaaatttaaaaatcttctaagaattatggttttgcagctgaggtttttttaagactcgagctccctggactcctacatatatccttagaacaacattgtccaatagaagtacaatgtgagccacatgttttgtttaacccagcatatccaaaatattaccccctttgcatgtgcttaatataaaaatttaagatgatttatattccaggttttcaatattcagtgagtaattttacacttagagcaagtatcatttcagactagtcacattttgagtactcaataaccacatatggctagtggctaccttactagatagcatagcctttgagtcccacaaagtgttcacattctatgtgtttacacacatcttttgaagtgtcatgacagagccagataggatccagattttctttaaatctggtctctcttccggattcctagttgattacttctttgttgcttcttatagggatgtatcagaagtttaataatcttatgattattatgttaactgcctgaagtattaatggtagcaataaattgaactataattttaatttttcaagtaaattttcttatgtgatactaaatatttcacatatacatgtatcaggaagtaaatgggggtaatttagtaatgaatagtatataatagtttatgatggtatttttct

SEQ ID NO: 3987 - DNA, 1085 bp, Homo sapiens
ggctcacgcctgtagtcccagcactttgggaggctgaggcaggcagatcacttgaagtcggagtttaagaccagcctggccaacatggtgaaaccccatctttacaaaaaatacaaaaagtagccgggcttggtggcctgtgcctgtagtcctagctacttgggaggctgaggcacaagaaccgcttcaacctgggaagtggaggttgcagtgagtggagatcacgctgctgcactccagcctggtcatagagcgagaccctgtctcaaaaaaaaaaaaattggattttattattaggctaagccataatttctttatacttcttaaaatatagaaattgttggcaaattgtgaaatttattgttgtataatgctaatagatcagttgtcctgatgtctttgctgtaatgatttctttataaaaatgatcttaaatctgagctccctaactttagtttttgcctggaattacccattacatttgatgatatctctaaatgtcagttgtagctgttactctgatgatataagtggaatatacagaagcgtacttagacaaaagttaggttaatatctgaactacttcctccttgtgtatttaagagaatattgacttaagtttctagaatcctcaactaatcctaagtttattttctttgtctagaatactatgctgtttttgtttttggaaggaagagatataggcatagtttcctgctctcaaggagcttcaaaggctgtaccagtggggatgccattggtatttttagctggatagttgttattcagaaaagcaggacaagtaattatgattcctggtccgtacctggtaatgccagtaatgttaactctagctggttgttgacatctggtcatttagttgccaatcttctttttttttttctggcttttatgtgaaatttttagatttttataatatcctgagctaaattcaacacagggacaccagattgctgctttagttcagggtttccagcctgtgcacttaagaaatttatttttgtgtatatcaagctgtaactccagagattgggattgtttgattgggtctttagcagtggtac

SEQ ID NO: 3988 - DNA, 1354 bp, Homo sapiens
catcaccgcgcggcgtctcggacgcacttctcctggcgccctccgggcggcagcgctctcgagacactgttgcttcgccgtcacgcccgtcgttgtcacgcccttccccgcggacaccgagaatgacccatagcggaaaattctaccgcactacctccctgaggcagcgaccggtaagaaacaaccttttcttcaggcttcccaccacccaaacacagtcgcagtcaactggccactatcacccaccaccctgcaggaacaattacccagcctcaccccaagaacgcgcggagaggaggtgccaaaagaaattctgttctcgcgaagtcttaaacttaatcctcgcgacgtctctgttcctgtcgttctttctcagccctaacccacaccagcgcgttgcctcggaaacatcgcgagattttgttccttcagtctccgcccctttacggcacgatggtcgcgcaagaatgtaatagagcttcgacggccgccattttctttctttcttagctgttagctgagaggaagtctctgaacaggcggcagcggctcttatagtgcaaccatggcagactattcaacagtgcctcccccctcttctggctcagctggtggcggtggtggcggcggtggtggtggaggagttaacgacgctttcaaagatgcactgcagagagcccggcaggtaagtgtggaccgcgcggcggaatcccgaaagctcacggtaattggccgctgactgagtaggccgctacccttaagcgcatgaggaagaggaaagaggtgttcttccgggctgaaatgtgaagagacacgtttccccatgttggtaataacgattagagaccagaacccagttttgtgttcttggtgcctaatccacttagaaccccgacgcgtgctacgcaaagaaggcctgaagtctttctcccgcttctgcggcactcgcgtgtctccagtgagctagtttagataaagatcctcttccaggggataaagcgcagttagtttcacacaatttaatggaaggttctggtaatgagtttgggaaagaactagggtctgtcctggagccatagcaagggaagggatttatcattaaagtagcctttacagctcatttccgttctctctcgcaattaaaaccgctttcagtaccattcaccgtcacacctctacaaggaagggacttgaaagcagcctttttctgggcgggatttacgtgtcagtctgttccaccagtccgccccccttatttctcaaaatggcctcaggcccattataccagaggtttcaatttgaatctgcctctcagttcagagtcgtaaactgaccagacctctttgtattacgt

SEQ ID NO: 3989 - DNA, 1147 bp, Homo sapiens
tagtcccagctactgaggaggctgaggcaggagaatggcgtgaacccaagaggcagagcttacagtgagccaagattgcaccactgcactccagcctgggccacaggagagactctgtctcaaaaaaaaaataaataaataaattaaataaataaataaataaatataaaaataaaaaaagtaaataaaataaaatattggtgatattgttgcttatattacttggcttcaagtccttggagttctatgaagccacatttggaaacctctgtcacagtggcaaaatgttgtatttattcttacatcaacttgtaaggtagctaatggctacaggtgttattaattacaaaagaattcggacttgctcagttacttcgataggagcatggtcgcaaaatcagatctaatcaattccagagacaatgctttgaaggtttagcacttcttgttttgatcattgagatatttaatcctatattcttattttcttagaatgctaaagaagcatatagatagatttaagtggtaaacaattttaatgctgttgatatctccctagaaattttttatctttaattacaatagaagggggataagaaggcaccaacatttacttagctccagttatgtgccaggtactctgcataacttaattgacatttattcattccttaaccaatatttttcaacagctggcacattacaaaaaagtgcactcttgtgataagcaaaaatagacatgctccctacattcatgaaaggtacatattccagtgttagacactaaccaaattcataattgtaaacaatgctaggaagaaataatacataattttatcctcaacaatcctttaaagaagtacactgtcccctattcataaattaggaggttaaagagcttgtccaaatctacaaggctagtaaaggtcagcatggctgccaggtatggctcagcaagtgttgcctgaaacccttctgagggcagggggcattattcacatccactataatgtagctgaggcttctagagttttgaagtgtatcacccgcacaatcataagtgtggccttaagtgagagcggaatcagccctcagtttctccatttgtccctaattattgtagtttctcagggtaattaaatttgaa

SEQ ID NO: 3990 - DNA, 1086 bp, Homo sapiens
acttttttttcatatgtttgttggctgcataaatgtcttcttttgagaaatgtctgttcatatccctcacccattttttgatggggttgttggttttttcttgtaaatttgtttaagttccttgtagattctgaatattagccctttgtcagatgggtagattgcaaaaatgttctcccattctgtaggttgcctgttcactctgatgatagtttcttttgccttgcagaagctctttagtttaattagatcccatttgtctattttggcttttgttgccattgcatttggtgttttagtcatgaagcatttgcctatgcctatgtcctgaatggtattgcctaggttttcttctagggtttttatggttttaggtcttacaattaagtctttaatccatcttgagttaatttatataaggtgtaaggaaggggtccagtttcagttttctgcatatggctagccagttttcccaaagccatttattaaatagggaatcctttccccgtttcttgtctttgtcaggtttgtcaaagatcagataattgtaggtgtttggtattatttctgaggcttctgttctgttccactggtctatatatctgttttggtaccagtaccatgctgttttggttactgtggccttgtagtatagtttgaagtcaggtagtgtgatgcctccagctttgttctttttgcttaggattgttttggctatacgggctcttttttggttccatatgaaatttaaagtagttttttccaattctgtgaagaaagtcaatggtagcttgatggggatagcattgaatctctaaattactttggggagtatggccattttcacgatattgattcttcctatccatgagcatggaatgtttttccatttatttgtgtcctctattatttccttgagcaggggtttgtagttctccttgaagaggtccttcacatccttataggttgtattcctaggtattttattctctttgtagcaattgtgaatgggagttcactcatgacttggctctctgtcttttcttggtgcataggaatgcttgtacgttttgcacattgattttg

SEQ ID NO: 3991 - DNA, 1024 bp, Homo sapiens
gtgatcttgtgtctccctgaccgaagacctctgatggtctgggcccaagaattattgctgtctctgcttaagggtagatatggatagattttattttatttctattccctacccctagatgcagtgagtcctcacttgtggttgatgccctttatttaaacagggtaaggcttgtgttctgtaggtaagataagggagtaggatcttgacagggttttgtatcttttctactagagcagttttgttttcccttcagcctgaaaccgaatagaggatttttcagctatctttccctgccccaaatatttctcatggatacttcgctgtggtccattgataagagcttgctagtaagtaaaaattaccctctgtatagacctgaagggtttggtacttttatactaattcatttttatgctagcctttagaaattcattgaaactttaattgaattacttttacggccttgcatagcatctggcatccatctcaaggaaacaagtccttgcatctgtgtctctttgaaggttcaaacttattgagatttttatttgtggttcagtataccatcaataaatttctacaagtagaaataaaacagacaacattatttcaccacaatacaaaagaacaaacagaaattattaagaaaacatgaaaataaaccaaaaaagctactcagcctataaaagtaaaaagtatctctgtgatggttaatgtcaagtgtcaatttgtctggattaagggatacccatatagctggtaaagctttattttgagacatgtccaaggtttttccagaagagatttgcatctgaatcagtgaactaagtaagaaagaccagctctcactcagtgtgggtgggcactatccaattggctgaggactcagacacaacagaaaaacagaaaaaaggcaaatgtatttggagctgggacatccatcttctcccatgcttgcacatcagaattccaggtcctccagccttgggactccaggatttataccagtcacctcccctca

SEQ ID NO: 3992 - DNA, 1049 bp, Homo sapiens
aatgctttctagaactatgcaatatttgaataatttctagaaatgtctaagaaacaaccttttttattttaaatcatcacttacaaacgtagtctgagactgcaaactagttttcacttgactaatccatcattatagattagttaccatttgctctatataatctattgaagaaactattgttattcatattttgattaattttactagcaacaaatttttattttagtagcattgcatttaccttaaatatgtaaaaatgaagttgtaacaggatcaaatatggaaatggcaatggtaactctgcctagaacatagttgaatgtccttggttgtcggtaagatgcaaagatctatacaaattttatcataggtcaaaattatttctaaatatacaaacagtttcaactatttctttctccctaaaactaaaaccaaaccaaacccaaatgaagaaacctaaacttcttttcatctaatagttatacccaactagataatagtagcttctagacatcaataaaaagatttcattttaactgtctttttaatttgtaaaatatatgagtatggaattttgtatctaacttgaaatttcagatgttttaataatccaaatacgttcttctttagcatgtcaaagtactaatagttaaaaaatttctttagatttaagcatatacattacttgactttttcaaaagtatcaaaaaattgatagctgcagaaatgccattatttgattttctaaaaaacattgattcattcttaaatgtgtattctttaaaaaatagtaaatacctcaagagtgacagaaaactttccttttctgttctgtaatgctaatttaaactttgagtcttagtttacatggtcataggggttaaataaaatgtataactgtacaattaattgtgttcttgtgacctgatgattttttgaaaatttgcttttctctttaagaaatttaagttttcaagggccgtattagttatctaaatattttgggctaatgttgacttataaataaataaaaatttagaaatata

SEQ ID NO: 3993 - DNA, 1057 bp, Homo sapiens
atttgtaaacatatgcttttagtctcaaggaaattcagaagaatataaattgttcaggatattccatcacaactgctgtgaaaacagaatctcacatggagggcatcagaattgatcctttttttttacttggatgacagaatgcaatttgagtacagattcaaataattttttaaaacattaggcttggggtcctcagagacaagaaaatataaaaagggttatatgtagaacaagtaaaagttcttttttctctaataaaaggaaaatccaatcattctgtgatggttttactgggttaataagaagaatctttttcctccataagtattctattacaatcattaaaatagaacctagaaaagacattcacaatcccatgaatccttgggtctgaaatacttgttaattagattaaattaaattaagttaaattgcctgtctgtcccttatttacaactaactcatgggctacaggcttgcagcatgagcatttaatgctaccctaccattgaacatttagcctcactggccttctctgacactagtctctgagtttacttaactttgagcattccttagtcttctcttatgatttctcttacactctgctccctacccatcattttctcactgtgttcttgcctcagccctcttttcttctgtgtcagtcttactcccttttgtggcatcatttttgagtctgacatgtatgtagcaatatggattggagtgcctctcgctagctttgacccactctggagctctagtccagcatttgcagctctctgctgaccatgtaccctggatgccctggtccgatagatactcaataaacatgtagtgagtgagtgagcaagtaaataaataaatgaatgaatggatggatagtgttctgttaacacttaaattcaatattgcccaagttgaattattttctccttcgatcatgttcctcctgggtttattatttttttctctgctaacaatatcaaatacctccaacccacaaaggttaaacctaatcactcatatgtatttactggatttttttttt

SEQ ID NO: 3994 - DNA, 1046 bp, Homo sapiens
gtaatcaaaaactgttccctatgtgtgataatttgtaaagaagcaacataaatagtatttgcctgaataattccctactccctactcccatccctgaggcagagttattgactcctacatgttaccttgccttatatgcctttagtgtacctatcacactgtttaatattaatagcctatgtatatattccttgggagcagagatgatactaatttatcttactatctccagtacctagcacagagtgtgtactctaaaaaaaatgtttttgatgtactaatatgtaaattagtacatattagggcaaggttgtttttttttttcactgatgaatccatagtccagaatagtgtctaacacttaataggtgctcagtagacatttgttgaatgaatgaaatcaatgaataagtaaatgaaggaatggagaaaatttaaatctttgtggcaaatatcagtagcccagagaaagaaaatatatgctagtttgaatagaaattatttttcctattatgtccaatttacagaatgatcaagtctcggcctctggattatacctttgttcctcgaacttggatctttcctgctgaatatactcaattccaaaattatgtgaaagaattgaagaaaaaacggaagcagaaaacttttatagtgaaaccagctaatggtgcaatgggtcatgggtaggtttgcttttatttggaatatataaaaataaaaaaaaatttgggagtggggagaataaatgtgcataattactcatgcgtgagtaccaatatgaaaaaataacgaaataggtttctaactattgtagttttggaaccaaatatttaatgatctctattcttttaaactctcccacaggcttcagtaattcaattaaaaatttaatcagcaggttgtgaggctttgaaaggagataacaaaatataaggggaaaaagctattctctgtttttttctaaaacataaaactcacatttataataatttcaataggcttggagagtaaaatcagttgctacagtagagctaaaactgact

SEQ ID NO: 3995 - DNA, 1044 bp, Homo sapiens
cgggaggcggaggttgcagtgagccaagattgtgccattgcactccagcctgggcagtaagagcaaaacttcgtgtcaaaaaaaaaaaaaaaaagtgggctaggtgcagtagctcatgcctgtaatctcagcactttggaaggctgaggcgaaaggataacttgaggctaggagtttgagaccagcctggtcaacatagtgagaccccatctctaaaataataaataaataaatacataaataaataaataaaaataataataaaagcctgttgtggtggtgtacacctgtagtcccagctacttgggaggttgaagcaggaggattgtggagcccaagagttcaagattacggtgagctatgattgtctctaaaaaacaatataaatgaataaaacaaaatacataaataaaatttttttaaagtgaaaagtaatatattgtaaattacatgtatttgcttctcagagcttgatgactatttctcttttctctcagctctcatgaattgattggttgtttgttttttaagacacgctctgctgccaggctgtagtgcagtggcatgaacacagctcactgcagccttgacctccctagctcaagctatcattccttcttagccacccaggtatctgggactacaggcaggcaccaccatgcctggctaatttttaaatttttgtggagatgttgctcaggctggtctcaaactcctggtctcaagtgatcctcctgcctaggcctcccaaagtattgggattatttataggcatgagccatggtgcctggctaattaaccgatttattaactcagtgtcttagcccgtgtgtgctgctataacaaaacgccacaaattggataacttataaacaatagaaatttatttctcaaatttctgaaggctgggaagtccacatcaaggtggtggcaggtttattgacggtgagggctgctgtttctgcttttaagatggtactttgttgctgcaccttctgaaggagatggatgctgtgttctcatggtggaagggatggaaaggtt

SEQ ID NO: 3996 - DNA, 1027 bp, Homo sapiens
tcaaaaatttgtatctgcataatgataaacattgtggtcatccagagccttgctactcaaagtgtggtctgtgaaccagcatacctaggagcttgtcagaaatgcagactctcaggctctacctcagacctaatgagtcagaatctgaacttgaacagtagtcccaggtgtgcacattacaatttaagaaacactaatgtagaactgacattaaatccaatctgaataatattcaaaacaaataagcattttaaattttgatgtttaaaagtggcatgtttcatttacttttattctctttcatatgagaaaaagcatgatttcatataagagaaagcatatatcaaatttggtttgggaaccaagtgctgaaatttaatgaaattaataatacaaaaatggacaaaatttcattcatgacctgatatttggaaatactactttttgcatatacaactgccttatttttataatttttaggaagtaatagatttctgactgttaattgtaatgacctctctgcaaataatgttaatgtgtgtggagagtgtttttgcctcaaagtaaaagcttacttggatatattttttgttacatttgttatttttctcttttttttggaagtgatagtagaaatgtctttcatccgataattacaatttagggatctggagaagattatcttgagacatatttgcaaaattgttactttaaaattttcttataacttgtttttcaatatcattgttcattatatctcttttctttaaacgattatcaatgaggataataatctatcttttagggttttgaaggtcagagttttatatgtataaacctcaaaaagtgcctggcacataggatgttttacataagtgatgatatcaaccccatccttctcttcctctttgttgtcttcttgctcttcctcattatcattgttacaatccatagcaagctcaggatagagtttaattatctactctgtgaagccaggggcagactggactcaatgtcttagtctgct

SEQ ID NO: 3997 - DNA, 1031 bp, Homo sapiens
aactgtggagataggaaaaagatcagtggttgccaggggttgggagggaatggggaaggatgaacagacagagtacagataatgtttaaggcactgaagataatcttttggatattgtaatgatggatacattggtccaaacccatagaatgtacaacactgagtgaaccccaatgtaaaccctatgtaaactatgtcagtaattatgatatatcaatgtaggtttgtcagttgttaaaaatgtatcactctggtggtggatgttgataatgggggagggtatgtgtgtatgtggcagggaggggtacagaggaaatctctgtaccttcctcttaatttttctgtgaatttataactgctcttaaaaattaagtatttaaataaatcaatatgaaaaatctttggccctaggctctgaaaacagttaggaactggagatagatgatctaaatcccttcttcccaatattcttctttgtcttacattctattattaagatggctaggactgtttttacaggacagggagactgaagtggggagtttattactagcaataacagaggcatcaaaacgttagaagcaaggagaaccaagaattatgtgccaagaactagaaggtaagtctgaatgacctgcaaaactactgggttcaaaagtgatcaatgatggagtacagaaccaagaggctagcaaactccagcaagtgcagtagagttaaccgtgagtgaaagattccagcagtaggaaactgagtggcatcctggggatgtgaaccatgtatggatcattctccaacaactctatcaaaatcactccaaaaaaactgagtaaatatggaatacctactatgcaagtacaacagatgaacaatataatcaactatagtgtacttgctgtgccttatcaaagcatttaattacatccaccaaacagattttaattcctaaatcctccacatagaaactagatcttaggccttgctaagaatcagtgctaatacttaatatgtgtttatataatagttggacc

SEQ ID NO: 3998 - DNA, 1050 bp, Homo sapiens
atcagtcagaatggcaactaacgaaaagtcaaaaaccaacagatgccagcaaggctgcagagaaaagagaacgcttatacactactggtgagaatgtaaattagttcagtcactgtggaaagcagttcagagatttctcaaataacttaaaacagaactactattcgacccagcaatcccattactggatatatatccaaaagaaaataagttgttctaccaaaaagatacatgtacttgtataatatgttcattgcagcactattcacaatagcaaagacatgaaatcaaccgaggtgccatcagcggtggattggataaataaaatgtggtacatatacaccatagaatgctacgcagccataaaaagaatgagatatcttttgcagcaacatggatgcagctggaggccattatcttaagcaaattaacgcaggaacaggtaaccaaatactgcatgttctcacttataagtggcagctaaacattgggtactcatggacgtaaagatgacaacaatagactctggggattactatatggaggtaggagggtgaagaatgtgggctgaaaaactaccaattgggtactatgctcactacctgtgtgatggaatcaattataccccaaacctcagcatcatgcaatatactcaggtgacaaacctgtacatgtaccccctgaatctaaaataaaagttgaaattatagaataaataaacaaatagggttatttgattttttcttgttgagttgtagttctttatatattctaggtatcaactccttgtcagataatatgttttgcaaacattttctcattttgtacattgccttttcactctgttgattgtgtcccttggtgcacaaaaagtttaaagttgatttagacccatttgtttatttttgcttttgttgcttgtgtagcatttgttgttattagcagttttaaaaaaaatcgttagaattgtttcaaattgctgtttactaattcctttcctccttatttaaagtccacagtagtattcttgagactatgtaatgatgatac

SEQ ID NO: 3999 - DNA, 1300 bp, Homo sapiens
gctataacctatatcctgaaccttggcaaggcatcttgtaatccaatctgtttaatcctaagggggacagcagaactggcatgaatgaataagcaaaaatacaataccactgctgttaaaaaaaaaaaaaggaaagtgcatgtcctggtgatggatggtcagcagcaacattttaaaacagagacagcacattttacttagatgacatcactgagagtatgaatataataccaacttggctttagaactgctctctctcctctgtccaatgactacagtctgcaaaccatctaaattccccacttcaaggaacttaaagtctagcaggggaaattttacttacacgtgagtaattaacaaataacttagaattggcttaataccagaaaagggtggtgcagacctactgctatagcggtaccttaagagaaaagagaaatagtagagccttggatgatcagaggatcaggaaagtcttcatgggttgaagtgaattaaatcagtctcagagactggaaggattctgataggcaaagagaaagccacataaaggttcagctaagaagtgctcatctactgtttggatacatggtgaaagatcatgaagaaacttgaatgtcagacagtgagatctgtttctgatctgttaatcatttctctttcttacattctccatatctgttgccccgagtccccttccaggaaatggtctgtttcctgggtactaaaaggattgtcaactaaactgagaaaaagttttctgtgcaagtacaatttttcctcttccaaaggaatttgccttttagctccggcccccattagataattatgaacaatttggaaagtttaagaatataaaaaggaaaaaaacaccctcataatttgaccaactaaagacaatcactattcatttttgacatgtttctttccacttttttcatgcgtagttttaattatggtatctatattacttttatattatttttaaatttaaaattctataactttagttttcatttaattacaactggcttaatactaggtttaaaatgcctaatagcaggcttaaaaatgactacataattttccatttggtagatgtattatcattgcctaattgttcctcattgtcactattgatgacatcataataaacaattattgatgataataatagcactgtgatgaacatctttgtgcgtatgcttttttttgtattttgaatattagttcctttgcatagagtctcagaaataaaatttctgggttaaagggtatgaggtcttgaagttgcactatt

SEQ ID NO: 4000 - DNA, 1050 bp, Homo sapiens
gaaaatagtaaagctgaggcttgaggaaactttaggcagtttgcccagctgtataaagagtgagatgatgagtttgggcactccttgcgcatctatgtgcccagccctcaaaataatggaacaacaacaaaaaccgtgcctggattagtttacgttttacttgagggaaacctaaaatgagcatacaaataaattatggtgagctacagagtaagacatggtatggaaaaaaaatagaacaggataaaagaagatgaagagacattcatctttttgagacggagccttgctttaatgcccaggctggagtgcagtggcacgatctccgatcactgcaaactcctcctcctgagtagctgggactacaaacacgtgccaccatgcccggctaatttttgtatttttgcagagatggagtttcaccatgttggccaggctggtcttgtactcttgatttcaggtgatctgtccgccctggactcccaaagtacgttgcaattttaaataggattctcagagtaggcttcattgaaaacgttacattgagccaaggtttgaaggaggtaatgggctaaactagttatctgagggaagagctgttaatctgagaaaagctggttatcaaggagaaaagctgtcctggcaaagcaaacagccagctccaatgctcctagtcagtagcaagccaggaaaggcaagaagtgttgagattggacaggtggtgtagagttttgtaaggactttggcttttattttatgtgagatgaagatctcttatagaattttgaggaaaagaatggtatgatcttaacatcttaaaagtatcaggctggtgcagtggcccatgcctgtaattttagcactttgggaggccaaggcaggaggattgcttgagcctgggagttcaagaccagctttggcaacactgtgagaccccatgtctacaaaaagtaaaaaaatatatatatctgtttgggcatggtgtacatctgtggtcccagctactcaggaggctgaggcagtaggatccattgagcctggaaggctagg

SEQ ID NO: 4001 - DNA, 1049 bp, Homo sapiens
aaattattgtcagtctttattttcttctttacatttattagtaaaagtatactttatacttattttcttcctaatacttactgatgtttctagaacttttaaaaatgaacacacactggcctctcatttaaagcatataaataaagctgactacagtctaagaatcaataggaaaaaaattagtttaacttttaacttttttaccatattacattaaaaaataaactgtgaaggaaaagcagatatactaaacatttacaaatgaaatgcatcccccagatgttgactaaagacaacatctattaaagctgtagaatatagtagttcttaatcagttacatttcttgtattctaaatttattctaaacccaacaatgttccaaagttagtacctgctttcatcttaggtgcatttaatatttactgtttattacttgacacccgttagatgctcagtgagtttaatttttatttaaacattttaaattacctatctttttttcctattgattcttagactgtagttagctttatttatgtatttatgagtttaatttttatttaaacattttaaattacctatctttttttttttttttttttttgagacaaagtctcgctctgtcacccagactggagggtgatggtgccatctcagctcactgcaacctccccgtccctggctcaagcaatcctcctgcttcagtctcctgagtagctgggactacaggcatgtgccaccagacctggctaacttttgtgttttttcgtagagacagggtcttgccatgttgcccaagctggtctcaaactcctgggctcaaatgatccacccaccttggcctcctaaaatgcttattacagatataagccaccactcctggcccctatcacttttgaagaattgagttattagtaattattagtaaattgataggtgtaatcagataaaaaatttaaaattctctgaaatacgtatgttccccaacattaaagtttttttgttgttgttgtctgtcttggtttgatactgttttcctgatccctct

SEQ ID NO: 4002 - DNA, 1070 bp, Homo sapiens
cttctttcaaaattggagtcaaccccatcaaactctgctgctgctttattaataagtttatagaatattctaaatcctttgctgttatttgaacaatgttcacagcattttaccaggaatagattccattctcaagaaactactttctttgcgtattcataagaagtagctcctcatctattcaaattttatcacgagattgtagcaattgagtcacatatttaggattcacctccaattctaattctcttgctgtttccactacctctgcagttacttccttcactgaagtcttgaacccctcaatgtcatccatgagggttgtaacccacttcttccaaactcctgttaatgttgatattttgacctcctcccatgcatgaatcatgaatgttcttaatggcatctagaatggtgaatcctttccaaaaagctttcagtttactttggccagatccatgaaaggagttactgtctttggctgctacagccttacaaaatctatttcttaattaataagagttaaaagttgaaattactccttgttccatgggctgcagaatggatgttgtgttagcaggcatgaaaataacattcatcttgtgttctccatcagagctcttgggtgaccaagtgcattgtcaatgagcagtaatattttgaaagaaatctcttttttttcttagtacatctcagcagtgggcttaagatattcagtaaacagatgtgctgtgagccaggctttgttattccatttatagatcacaggcagagtcaatttagcataattcttaagtgccataggatttttggaatggtaaatgaacactggcttcaacttaaagttaccaccctcattagtccctaacaagagaatcagcctgtactttgagctttaaagccaggtattgacttctcctgtctagctagcaaagtcttaaatggcatcatcttcttccaatataagatttatttgaagaaaggggtctctgccttttaaaatgtgtttgatcataattttacccgacatgggaggtttcagaatgaaaacccaaagatacaggaaaaac

SEQ ID NO: 4003 - DNA, 1031 bp, Homo sapiens
tatcgaagacactaccatatgctaaaggaagaaatctagctgggatataggatttttgttgtttttgtttttgtttgttttgctatttagcaataacatggtcaaaaaggcaatcagaaattttaaatacagttaatggatacatttggcaacaattttcccccgagggttttccatggtgtactttgcaagaaataagcactctaatttttaaagtaaatctcttattttagcaaatattatatttcatgacaatggagttctagaaagcagcatctgttttttgttgcgtgtttccattttaaagtgagttgagttctcaaattggaaagaaagattccttgagacgtacttttaaaatctaaagtgtgaaagaaacagcagagtaaaagccagactcattgcaccttcaatgtctgcatagatccagaagttgtacattttacctaacaacatcacttttgttgaacattccaactccagaatgatccccaatcaccctaatctcagaatgctggaatgatgtctgttggaaaacccaggactccacacacaaaactcctgggattttgtttcccatctctttctaggtgtttgcaatgtacaaataatacagctgtgctaatctcacatttagccatgatagatgatggttctagagtgtacttccatttgtaagtcctcctgataagtgctttcttgtttatcactatgtaaatctgaaatattttgtacttcatttgtttttatccattctgaattttcaaagcataaaaatgtcaaagaaaaattgagataaacattttgttcaccattaaatgtttgcatctgcagtctatgatgagaaacaatgaaattatgactaaaatttaacaaatagtattttcttatagaagcaatgtattaaatgattagatacacaggacagttcacagcaaattgtttacttacatggcataattgaaatactgttatttgtaaagagttctatactgcctaccttagctaaccagaattgttcatagacttgt

SEQ ID NO: 4004 - DNA, 1776 bp, Homo sapiens
tggaattttatataaaggctgtgccttagattccaggcaaggagacttgtgcgtaagttacctaaaaaacttagtttgatcatttgtacagggattctgatgaccgaattactataagtattggtaaataaatttatagtaatttggtcatcagaatcccttgtacaaatgattaaactaggcatgcactactactcccagctaattttttgtagagacagggtttcaccatgttactcaggctagtcctgaattcctgggctcaagcagttcggctgcctcagcctcccaaagtgctaggattacaagtgtgagctactgctcccagccgttttttttttccaagtaaaattttaaattatatttttggcctagatttttagaattaaaaggaacttattttttttgaagagtgccacattatgaggttaaagtacaaaagaaggagaggatagtcactaagatctgcctttcttttcccaacagttcaatcaatgtactgaatataactgctgaagaaattaaaccaaatcaggttggaggagaatgtacaaatcaaaaatggagtgtggcatcaagacctggatcacaggaaggttgctatagtggatgctccttgagctacacaaattctcatgtagaaaaagatgacttaccttagacatgtggactggaatttttttcattaatgtgttcatcaagtttcacatctaagttgaaacagggtgtgtcataaagtcagttatctctaataacttaagatggtctgagttgtttgtttggacttccctgtcttcccccaaagagttgaaatcttaaatctatttaaaaggatataaaagctttggatatgtatttttagtaacagaagcatctggttctgtgaataaaggaatgtatagatgtttggatggaaacaaaagcactagactgagtttcctcttataggtattaaaaatagcacttttaggaaactgattattgtaaatgtttaattttgtctcaaatatagttggcattggaagtttagcctttacttgaatgtatactgtagatttttaacaaagcgagttctatatttattatgtttagtgtggtttgaaattacctctttcatatgttttaaataaagtgaaatttatgtatgttttgtacatagatacacatgattatgttaagaggctttaagatttaaaagtttcacacaaccataagtatagtatttcatgccagtaaaatttttttagtggtattctgtttacagatgtattaggaccattgatgcattacatttaagaattctctttaatacatctgggcaataaatattgaaaggtattccatgaagctgagttctttagataatcaacactactaacattacatttttgagatttttatgacattagatttttattttgtatatgtagaatattataatttttaaaaggactattgatgatagaagaataggggcaagacgacaaaagtacctttgaataaaacaatttaagaaattggtttaagatattggatgatagaagatatttaagatatctagatggtgatattttccttacaagatgggtaccagtatagtaatatctgtatactaactagggctttgtattgtcaataattttttaataattttttaatgaggtatttaccactgaagaaatatgataatataaaaccatcaaattttataattgagatgatactctggaaaaacatgtcatttcattttcagaaaactcttaagctctcttcagt

SEQ ID NO: 4005 - DNA, 1032 bp, Homo sapiens
gaacccaggaggtggagcttgcagtgaggcaagatcgcatcactgcactccagcctgggtgacagagcaagactccatctcaaaaaaaaaaaagatccttttaaacatgggtggactatgcaacaaagataagcaagattaatgataattaatttgaatttgttccatctctttcctcactcagaaccgcagatgaatcatcctgatgatttaccttcactatatttaatgcctcaccatatgtactgcctttttctcttacttgttttacaacaggttctgattgggacaatcttatagtgcactcgaggcagccgcaaaagaagcctcacagtgtgtctaatgggtctccagtttgcatgtctaaacttactaaatctcttcctgcttcaccttccacttcagacttttgccagacacgttcctgcatatctgaacataggtatttgtctataggtgatcttttcacgtgtttctaaaaattgctaaagttgcactgctaagggaaaggtggcatgtctgtagtattagcaacaatagagattttggagaggaatttagtagatgatttattcattctacaaatattgagtgtccagtatatatagacactgtgctagatgctggaaatacactagtgaacaggtagatctgttgtcttcttggaggtaaatcatatgatgtgtgtctttttatttcacatttaagatacaatttagaatgtagtcttaattataggagttaatattttaagcactttaattgtattaaatggaaggatattgttttgacagtttttgtagagtacatatcttaacacttttttccggcatgcccattttattgttgttgaagggcaaagaactgagaaaagcctgttcctgttgagtgaaaaagatttgtgcccaaggatgacagtgtaaaaaaacatggctctccaccctgggaaacccatatgttgctcttaattgctacattttggtgttttcctgtatctcaagttattatatcattttctaagataagatcaat

SEQ ID NO: 4006 - DNA, 1073 bp, Homo sapiens
ctctttggtagatacttttgttattcccagtgtccaagaagaaacaggctaagcagttaaataatgtgccgagatctcattgcttacaagtggtggaactagaaactcgaaaattaggctgtttaagcccaaatcctaacctatataccaggttcactttcaccacttacgtgtatagaatgcattagagttttagatgcttaagcatgtatggtaagaattaattttatgtgttcatgtttgtagctatggacattttgaattatgtcgggagagctgatggaaaaagaggctcctggaggactggtaaaactgaagccaggtaaagtccagtttaaattgataaatgtaatcagacttccttctatcctgcattttcatactgacagtttctttctcaggaatgaagatgaaatgtataaaattctcttgaatgattatgaatatcgtcagaaacaaatcctaatggaaaatgcagaacttaagaaggttcttcaacaaatgaaaaaggaaatgatttctcttctttctccccaaaagaagaaacctagagaaagagtagatgatagtacaggaactgtaagtggctctttcctctctaatacagtcttcagattgctaataagaataattaaaatatgtggtaggcattctcaatggggacactattggtattttgaataggacactcaactgctatgctactttcaattactgtgacaactgaaaagactgttcctatgtgttttcagacatttcctgaaaaatgctggagatgattttccggggaattaatacatgtcaagcactgttaagaagtgctttataagcattgtctcattttataatattcctcataacatatgagattatttcatatattataatttgatgatttagatactataaatatccccattttatagataaggaaactaaggcataatatttagtagcccagtatcacacatgacagtgctaggatttgaatccaagtttctcactccagagctcacaatcataaccactatgtcaaatatcctttcagttgttttagtattatgtactctact

SEQ ID NO: 4007 - DNA, 1066 bp, Homo sapiens
atggcctcccctgtgcctaggaaaacgtagtagcacatagtaggagctcaattagtatttattggatgaatataaatttcttttttctttttgagatggggtctctgtcgcccaggctggagtgcagtggcacgatctcagctcagtgtaaccttgcctcccgggttcaagggattcttctgcctcagcctcttgagtagctgggattacaggcgcatgccaccacgccggctaagttttgtattttcagtagagacgggggtttcgccatgttggccagactggtctcaaactcctgacctcaagtgatccacccacctcagccacccaaagtgctgtgattacaggcatgagccactgcagccagactaaattttcatttaacactatattttgaatattttaccacagtcttaaatattcagaactgtggttgtgaactcttgatccacagtccagatctggcctaaagacacattttatttggcttattacatagtgctgttgtttgaggtataacttacagtcaagtgcacagatcttaagtgtacaacttgatgaactgatcttgtgtgtaccagtataaccacatctcagatcaagatgtaaaaagttttggcaccccagactcactcatttccttctctagccactcccctttcccacaggataacttaatacatagagttttttttttttttaattagctactagcattttaaaattgggagacttcacataaaaattcagagttccagtatctcataaaaacatcaaagatcaacacaaccgctttccccttgaccacaatttattgtagccgagaagcagctgtccacagtattgacatgtgttccccaggctgcctgcagtcttcacccttcctcctcttccccctgaccttgaaatcaattgccagttgccacttacaatttcatttgaattgtttttcttatgatggagaaatatttatctcttccattgtctctataaaaaagtgaaaacataaatgaaaacagaaaaggtgtcttatacttagtccataccattcatttgtagttttggc

SEQ ID NO: 4008 - DNA, 1049 bp, Homo sapiens
ttattagatggctatatacgtgttacctaccgctaatgaacaaaactatgtctcttatttatggattactttatacttttgctttgatgtatttcaggtttgttccctgacaatcttaaatgaatgaaatgccttttacaagatattttaattatttaatgttcaaggtttgctcataaaattcactcatgaatttgatccatcttggaatttgggtagctgtatcttggaatttagaaagcttattttgccaaggttaaagacacatctgtgacacagcctcaggaggacctgacgacatgtgtccaaggtggttggggcacagcttggttttatacattttagggagacatgagacatcagtcagtatgtgtaagatgtacattaattggttcagtctggaaaggcgggacaacttgaagtggaagggaaaggggggcaggggcttccaggacccaggtagatgagttgaaaggttgcattcttttgggtctttgatcagcctttcactgaatacgcaatttacatgtgagagggaagtagaggaatagccacttagaccttagtctggttcattgaatctgcatttttacgtaaataatagggcataggaagcaatcagatgtgcatttgtctcaggtaagcagagggataactttgagttctgtcctttgtcccacacgttggaaaataagctatcagcttacactgcaagagtgaaatccaacagaactgttttagggtaaaaaccttgaggcccacaaggaattttggacaaatgtagctttttaatctttgtagctattttatttaggaataaaatgggaggctggtttgcctgatgcagttcccagcttgacttttccctttggcttagtgatttcagggtcccaagacttacttgcctttcacatactctaaccaatcatattaatagatagaattttaggttacacattacttgaactaaaacatgaatcactgcttacttttttctcctaaggtaactatggtaacagtgctagaaaactaagtttgttctcatccag

SEQ ID NO: 4009 - DNA, 1031 bp, Homo sapiens
ggtgtcagacataaaaatgtcagactctagcaatgtaggattctgagatgagagaagaaatagtctttcaaattagcaaaaataagtttttaaatagaaatgaaactacaagcagttaaacattcagaacaatcttaactccagttgttctcatcttttaactcttgcttcacacatatccttttctcatattctcttgagtcacattttcggtttgatctaccacactactagctatgtgatcttgtgccctggttgtcgcatttatgaaggataataacaatacctgcttcgtaggggtgtgattagaaaaataggttagtatccagaacaatgcctggaaaaatagctcatacttactgagcacttaatatttctacttgatataaaaatgctgtaattgagtaagaacagactttaaagacaggattttttttttgtcatgctagatctatccatgagcgtctaataaagcctctacattcagagaaactaacattcttttaaactgagattcttgaacaagtgattttccttttcttatttggtgatcatctttctgaagtctgattttcatttttacccctcagctttgtcattaagtcactaatcaccgaattcaacactttttaaaattcaaaacctgcccattctatggcatttgctgctgtgtatcaccctttctctttaaaagtcttctcccttggctttcctgaagtccgttcccctgtctctttgtatctcttgtgtctgggtctgcttcactcgcttatgttgatgttctttggggtttgttctcctgccccttttttctttatgaattcatctatctaaatgtgctcggatgtcttgtgagttctaggcctagagtttatccccatgtgaatgtctcataagggcatctccaaacccagtaagctacacaaagctcattatctccacacatttgcccaaacccagttttactaactttactcctctgttccctttatctaaatgacactattatctgtcaagtgccaaagacaggt

SEQ ID NO: 4010 - DNA, 1031 bp, Homo sapiens
aggcaagagcaacacttaatcaagccttgccactttccccaaggtctttgagctttgccctgtctcattccccagctgacctcccaatctttgctttcttcatctggcatgaactcccttaatttcccttccttcatatctgagtccacctgcacaggtcacatccttaccatcctagcttttcactagggctcattccttccagccaggagctgggggatccacgagcctactcttgtccttattcttgctttcctatgagcttgatcgttcaaaaatgtaagccctgaccttaactccccttctaactactgctctgtctctccctcccttcactaccagacttttgttcttggtttttttttttttttcttttcttttcttatttagagatggggtctccctatgttgcccaggctggtctcaaactcctgagctcaagcgatccttctgcctcagtctcccaaagtactgggattataggcacgagccagtgtgccccgctgatttttttactcttgtttattttcttttcttaatacttcaaaccgtagtaagctagcttcttcctatactactctaatactactgtgtttgattaagccaccattgtcttcctagttgccagatttagtgatctaccttgaccttcctgttatgtgcctgcttgcttcatgctccctttgatagtgtcttcctccttctgttccttctctgctgcttgtccagtctctcccatttctgaccatctctgaaatgccctttgttccttctcctttgggtccccaagttctttccaggtgattttactcctgcagcttgaaccaacccctccatgtgaacgtctctcaaagcagcctctccatcctcagcctttcaggagatcccaatctctgtttccagctgctgtcacgtgcacacctggatgtcctggaggcaccacaagcttcagctgccctgcagacctgctctacctgttaaataggatctctgcaatgggtttcatctgccttgccttccaagctggaagt

SEQ ID NO: 4011 - DNA, 1028 bp, Homo sapiens
acttccttgggtgctggtaccttattcacagcagatggtcatgcttagaaaaccctgcttcagggtcagtgactgaaaaaccaggggtgccatgccagtgcctttgtcagggctgttttctgcttaaccactttctcagaataatgcagaagaaacccagtccgctaccttttgagtgtgtgggaagataagtaagtgttcaggtgggaatggtagttgcctctcgcatcagggtttgcatggagaaggaagaggtgcacactcctgccacagagattcatgtctttgatgtggcaatgtctctgcgtggtgggggccaagcctcagtgttgaagtaggttatctcattaagcatgaggggagggagtctttgtgtctgcttggaaaaaaatctctcttctgttccactaagcgaccaacttccataaaagtagaggaaataatgattactttccaagcagagtctacattgccaatgtgtgtgtggagtgggaggtctcatctagtcttgctgttagcattaaaagtttagactttttttttttttaaaaaaagagagagggtcttgctctgtttcccaggctggaggacagtggtataatcctacctcattatagcctccaactccagggctcagtcgatcctcctgcctcagcctccagagtagctgggactacaggtgcacaccaccatggccagaaaatttttgtattttttgtagagatggggtctcaccatcttgcccaggccagtctcaaactcctgggctcaagcgatcctcccttcttggcctcccaaagtgctgggattacaggcatgagccatcatacccagactagacatttgacttttgattatttccttcattaccttttttttttttaaaaaaaacctctccctggctcttctctgctttctttctgaagtttttctttggattgttctctgttcccacagtggccctgccttggtgttctgggactgacagattgattcatcattgtaaatatcagttcttggatctgagc

SEQ ID NO: 4012 - DNA, 1048 bp, Homo sapiens
gatgcggcaccgggtagtgccactgcagttgagactcatttattctttgggttctaatagctactttttcatttcacccattctgttctttttttcaggtgctgattttaacaatgcaggcctcactgccaaaagttcttcggttttgtgcttgtgctggtatgatttatctgggttacacattctgtggctggattgtcttaggaccataccatgacaaggtgtgtagctcacattcttccttctgcagatggggcacgtgggacccttgaacgtgggtttctagcacttacttgcttcctggtcttctctagcatgtacccttgacatcagtaatcacatatctttgtatcagttttctttttctttttttccttttcaggatatagaagtgactacaggatattgaaacaagaactgtacaatactagaaagcatgtattatagttgtctgggactggcttaaggggtcacatggttacccggtgatcatcaaatgggaaatgtttggacgtgagatcactatattaaaaatgaaaattaagtgaggaaaattattataaaaaatttccaatttaaagtattatgtttttcatccaagttaattgagaagaatgaagatgggcagagactgcctaaaacgaccatagtaggtttacgatagaaatggtgacacgtcttgtctctgcagacggttttgattacagcatcatctttctgccttattaaagatcagtatctgaattctaaactattaccaaacttcagttagcattataatctcagggacatcaaagttgtgctaagatgttcttgttataaaatgatacatttgattggtagatgcatcaggaaatgaaactaggtaagccttggttttaacccaaaaaagtaaaaggagttattttatcttatggcttttcctccatttgggcctgtggcagttggaacaacagaaacaacaaaaatagcagcagctaacacttactgcttgtgtgttagacactctgctgggcatttcggtgttctttcttatttactccccaca

SEQ ID NO: 4013 - DNA, 1050 bp, Homo sapiens
tcactcaacaaacctctggtgtgtagtcatcatgttttcatatcatactgtaataatcccagttattcaagccccgtacttgaagttgccaatttccccattttcactgccaccactgtcatccaagccactacttgtggtctccctgcttctggtcttgcctctacgagcccctgccctgccctgcagaaaccgcagtggtaaatcaggtcatatctcttccaggcttaaaaatcattagtggcttcccatcccatttagaataaaatccacaagtccttatagaaactagccccctgcctgcctctccagacccctgtcctcatttctctgttgtaacatcctttctgtttgctgagcaagccaggctctttcttgcttggaggtcttagtgcttgatttttttcctgtttggatctatgcatagctggttctttttcctttcaggaaaaaggtttcagttcaaacatgtttcgcaccgtgaaagccattccctaactatctttcctaaggtggactccccctctgtattagtctgttctcatgctgctaataaagacatacgcaataatttataaaggaaagaggtttaattgacttacagttctgcagggctgtggaggcctcaggaaacttacaatcatggtggaaggggaagcaaacacatccttctttacatggtggcaggaaggagaagtgcagagcaaagtgagaaaagcctcctataaaaccatcagatctcatgagaactcacccattatcacaagaacagcagcatgggggtaactgcccccatgatttaattacctcctactgggtccctctcacaacatgtggggattatggaaactacaattcaagatgagatttggttggggacacagacaaaccatatcaccctcttagttattcttgttcactttatcttcatagtacttctcacactgtgaaattaccttgtatatatttttacttactgttatctcccccactagaatgtgagctccatgaagatggtaaccatgtctgtcttgttcattgctttacctt

SEQ ID NO: 4014 - DNA, 1025 bp, Homo sapiens
cctgggccacggacctgttaggaaccaggctgcacagcaggaggtgagtggtaggcaagggagcaaagctttatctgtttttttagctgctccccatggcttgcagtactgcctgagctccgcctcctgtcagatcagtggtggcattagattctcataggaacgcaaacccaattgttaactgcacatgcgaaggatctaggtgcggctccttatgagaatctaatgcctgatgatctgtcactgtctcccaccacccctagatgggaccttctagttgcaggaaaacaagctcagggcccccactaattctacattatggtgagttgtataattgtttcattatatattataatgtggtaataatagaaataaaatgcacaactagtgtaatgcacttgaatcatcctgaaaccattacccacccccccccactcctgccccactccagtccctggaaaaattgtcttctacaaaaccagtccctggtgccaacaaggttggggatcattgctgtagttaaccatatttgaaacacacgcccttttaaactgattggggatatttggctctattggcaaataatcattctgttatcagtgtagaggtgtgtaaagatgttatttctggaacataaaaataaatacttaaaaatacctttagttttagaaatgggagacggtccctgccataactagagttgcttctttattctgtgttcataaagaggttttcagtatatgacatgccatgtgtaccagctcaagtttagggaaagcaagttacttcaaaagaaacaacaaggttgagatgcagagacattgttaaatgtgtatgcttattgttagcttatttcattctttgttttgaagttttggtcttggcaaccaataaaatagatacattgatacattgttagtattacttggaaggagaagaaataatgtccccttttttcagttggttaattttaattgtttcccaaaatcttttcttgctaaaccaacttccttcaattatttgat

SEQ ID NO: 4015 - DNA, 1087 bp, Homo sapiens
ttgcaccactgtttcgagaaaacaacttcttcgtccttcagttcagtgtttctcacccagaggctgtgtgtgtgtgtgttggggggtggggggagttggggggtagtttctatggctttattctcaagggcctgagaattcagtgtacaccatttcatatactctttttattaaatgaaaaagcatattttgagtcatcaggagggatgctttagcaacactgatccactacagtgatagcaattaacactaaattcagtattgctgaaacatgcccacaggggcttcttacaggcatgttctcaggagatctgaaagttcatgtttgaggatgttgctctcaggcacagttaagatgcacctttttcttggaaatgcctccctcaatgcgcccagtcacatgcccccgtagcacttaccacatcgtctattatgactcttatgggctttcccaccagctctctcacccctctctccagagtcagaactctgcttccgtaatatttacttattttacagcattcacggaactctttaataattatgcattgacaagtctttctcttctactggacactaagcatgtgcagttcagggttattcagccttgtgtacccagcacagtgcttgctccgcggactaagtgctcattaagttggtcaagttgagtcaagaggtgagtgtgtcaggctcaggacaaacacatgtttaaggccttcacattcttttgaatgagactcattgtggtgattgctttttcatttcttttttttttttttttttgaggcagagtcttactctgtcatccagactggagtgcagtggtgccatattggcttactgcaacctctgcctcccaggttcaaacaattctcttgcctcagcctccgaagtagctgggattacaggcatgtgccaccacacctggctaatttttgtatttttaatagaaatggggtttcactgtgttggtcaggctggtctcaaactcctgacctcaggtgatccacccgcctctgcctcccaaagtgctgggattataggcgtgagccaccgtgcccagccacctctggaacttctgactgtc

SEQ ID NO: 4016 - DNA, 1086 bp, Homo sapiens
ccaccttgaacaagatctagaagaattctttggattaccaggcagagactcttgttctctaccctttttgtctccctaacaaatggagtctctctctcagtcctgagccatctaaagctagggatggagtgacacaagcacccctgtggctactacctctgtgactacactgggtcagacctgaagtcagcacagcactgggtgttgcccaaggccggctgtaactactccctggctacttcctgtgtctgcttatggctctggggctctatagttagcaggcggcaaagccaaccaggcctgtgttcttccctccaggatgctgagctcccccaggaccctcctgggtccagaggtgctgtccaggagtcagggactacaataaaaaaccttagaagtctacctagtgttctattgtatcgtgcctgagctggcactcaaattacaagatgcagttcttcccactcttccctcccctcctccaaaagcagaggagaccttccccatggtcatcaccaccagaagcccatgggcagtactgccagactaccactatgttctcttaaggcccaaggtctcttaagtcagcttgtcatgaaggttgtctggcctgagactcatccttcagggcagtgggctcccttctggcccacggaaggtccagaaatgccatccaagagtcagctcttagaactggggactccaggagcccacttgttgctccaccccccaatagccgagatgaacctgaagccagcaagtctcagaggctcacccaaggccctagatgtagtacctgggtatcgctgctgattattcagtgcccaagggctcttcagttagcaggtgatgaatgctgccaggaatgggttcttcccttcaaggcagtaggttcccttctggcccagggtgtgcctagaagtgttgcccaggagctagggcctggaacagaggcattatgactctgaccctatcatgctgtggctgagccggtatccaagatgcaagacaaagtcctccccactcttctttctcctctcctcaagcagaaggaagggatcttttttggagccactagttgtgcag

SEQ ID NO: 4017 - DNA, 1048 bp, Homo sapiens
ttctgggttctttgtggttccatatcaattttagggtttttttctatttctatgaagaatgtcgtggatattttgatagggattgcattgagtctgtagattcctttggagtgtggacgttttaacactattgattcttccaatttatgaacatgaaatttctccatttttggtgtcctcttcaatttctttcatcagtgttttacagttttcattatagagatctttcacttctttggatgagttaatttctaggtattttatttgtggctattgtaaatgggagtactttttaattttctttttcagattgcttactcttgcacatagaaatgctactgatttttgtatgttgatattgtgtcctgcaactttactaaaattgtttatcagttctaactgttttttagtggagtctttagtttttttccaaatataagatcatctcatctacaaacaaggataatatgacttcttcctttccaatttggataccctttatatctttctcttatctgattgctctagctagaacttccagtactatgttgaataacagtggtgacagtaggcatctttgttgtgttccagatctgagaggaaaggctttcagtttttccccattcagtatgatactagctgtgggtatgctgtatatggttcttattatgttgaggtatattccttctatatccagtttattaagggtttttatcatgaagcaatgttgaattttatcaaatgctttttcagcatcaattgaaatgatcatattgtttttatttttcattctgttaatatgatgcatcacattgattgatttgcatatgttgaaccatccttgcatcccagggataaatcccacttggtcatgatgaatgatctttctaatgtgttgttgaatttggtttgctagtattttagttgaggagttttgcattaatattcattagagatattggcctgtaattttttttatgtgtctttgtctggttttgatatcagggtaatactggcctcataggatgagtttggaagcattgtttcc

SEQ ID NO: 4018 - DNA, 1466 bp, Homo sapiens
ggtgagaggatcacttgagaccaggagttcaagaccaaccatggcaacaaagtgaaaccctgtctctacaaaaaaattaaaaattagcccggtatggtggcatacctatagttccagctacgagggaggctgaggaaaaaaaaaaagaatatgcagggaggtaattgtattaagaacaaaagactacaggcttataattaaagatcttggaatgatagttgtggtgatttttcttttttttttttttgagatggagtctcgctctgtcacccagcctggagtacagtggcatgatcttggctcactgcaaactccaccttccaggtccacgccattctgctgcctcagcctcccaagtagctgggactacaggcgctcaccaccatgcccggctaatttttttgtatttttagtagagacagggtttcaccgcattggccaggatggtcttgatctcctgaccttgtgatccgcctgcctcggcctcccaaagtgctgggattacaggcatgagccaccacacccagcctcagttgtggtgattttttaaaagaaagacttttgcccttcttcaaatactaattggaagaccgtttatcagggcttctttgttgtcttaccagaaagaatgcttgaattatttaaatgattctaaaaagaagatgtcaccatattaatgtcccactacataagcactatgtaatcctctttgctttcagttcagaagaacactcattacatgatgatctttgatgcctttgtcattctgacttgcttggtttcattaatcctctgcattagatctgtgattagaggacttcagcttcagcaggtagggaacgttgctttctaggaatgctactgacattttgattgacagagacattcactgtgcctcccctcttttccctaaaggagtttgtcaattttttcctcctccattataagaaggaagtttctgtttctgatcaaatggaatttgtcaatggatggtacattatgattattattagtgacatattgacaatcattggatcaattctaaaaatggaaatccaagctaaggtaatttttttcctaatcatgctattgttagtgtcagatttgcactaatggtaatgtatttttccagaatgtaagaattttcagaatgaattgtttcttccaaactgtatatcaagtagacttgaaattggtaatggtaattttcttaaatctagtcaggaggtctcttaggcagagtttttcaaagtgtgatccacaaaccattgcatcagaatcattgggtgcctggtaaagtgtaccatgttagacctactgaattcagactcttcggcggggcctgtgaattcttacacacaccaaaattcatacacaaccaaggtaactaaggtaagagttttttttttttttttaatcttacaagaaatgctcgaatctttaacaaaaatgagtggggctatagg

SEQ ID NO: 4019 - DNA, 1050 bp, Homo sapiens
ggggagggactcaaagtttatctaggcttaaaaacgaagacagcatttatataacattaatgaaatagagttcagatctttgtctagcctccatccactccagaaatgtagccacttaggtcttaaaaacacatgagtcacggtaaccatgtggtatcaatgtttatttagcttttaaaattttaattcagaaaaataatagaatctgaaaaataatagaatctgaataactggtcttaaatgtatcagcctttcaaaatgcagtcttatttaagtactgtatcatgtttttgttcctttctatggcagagtgtttctttgtggagccagatgaaccttttcacattgggacaccagcagaaaataaactgaacttaacactggacttccacaggtgaggggagcagacaggagtgtaacttacgtttgcacgtatatattgccacagaactaaaatcacctctgttttctagactcctaacagtggagcttcagtttaaactgaaagccattaatctgcagacagttcgtcatcaagaactccctgactgttatgactttactctgactgtaagtgtgggccaggctgaatttggttccagtctggagaaaaattgttttatctggtaatgtttcatatccttggattacggtgtgataaaaaaatataggatgttttcacttgaatgtgcataagggaagcattgatacatctagctctattttgctataataacaagtttacttgttagttatgtcttctacacctctgtataagttctagaaaagcagggaccttgttttgttcactactatttccagtaccacgaacagtgcctggtatagattttcaaacccaaaaggaataggtgtttttaggttctgtgtggttggctctcagcaatctatggctggctgtcagctaaaggttactgccaagggttcttgttacttagtgtcttcaccatggatgtttccatgtttggggtttgtagtatacatctttaacttattacagtctaccttcaagttataccactgcacacagtg

SEQ ID NO: 4020 - DNA, 1048 bp, Homo sapiens
tgcccctgtctggaaagctctttatccagatgttacttaagcagttcctttttgtcattcgcttctctgctcaaatgtcacttcaaagagcctgcttctgaacagcctgctctgagaataaggggaagaagcagatggagatttctgggtttttttgtaataaatgctattaataaatacttatggtactatctgactaaactgcagatatttatcactttggtaaatgtttacatttaaaccaaatttaagaagaaaaatgtttaaaaaactacacccacatccattgtcactttttgtctatcacctgggcttcaaggctttatcattatctgaaattatctcatttatttatttgtttattcatttattgtctatgtccactcctgtagaatgtaatctccatggcagcagggactttgtataacaatctagttcattgccatatgcctagggactataacatagaagctgttcaattaattgttaatcaatgaataactgtaataagatacttgagaatggttgtctttttgttaggaaaagactaagtactataatcgcaatgtctacataattttaaaaatattcactcctgagtaataaattatttgtggttaagagagtaatgttatctcttttttaaaaatggcttgtcttttttatagttaaagtggtcttgggaaaattaatgactacaagtcggtgggtaaatttggggtgattttttgtagcatttctttgctgcagaacacagtcgaaacaattatttatgtgatatgtgtatgaaaatgcacatctcaccatgacaaagaaacatctttaagaaatattttgttaaaatgcatcatttctttatagaaatcataaagagcaaaatatatcctcttaattttgacctaatttacttcatatgcactttctctagaactggaaaaaactatttttcattttgttaaaacattttcataaacttgaatgaaccctataagtagaactcttccttattagaaaaaatagcagagaaaccactttgagggacaggcac

SEQ ID NO: 4021 - DNA, 1049 bp, Homo sapiens
aatttagaaggcttttgtattaaatcaaaatgtatttttttaacttttatatctacagaatatgtaattttaaaattataaatagactttaagttaccaacttttaagacatggcagccattgaaaaactggcttcctgatgtttttctaaatattaaagtacttaaaatatttctatgcaataaatattgataaacagacattatttaatttgaaaacccattgttaaaaaagataaatatttttatatgaaattttcattttttaaaactttgtgttaacaattcagaagaataccaagagaacatatatattgagtaaacagtcaaaggaaagtactcttgaatgttttataggaaagctgtctcagtttccttccttttgttgctatatcatgtatgaattgaataaattgctctagaaatgtaaaaattttattaaaatattataatcttcgtgttatgctattataatggttttaaggatcacttattttaatattctttttaagcaaaggtgttaaaattttggaccatcatgtattatccatcaatatatgtaaataacatttatttgtccagaattttccagaatctgaaatacttttaagggccatgcttgtattactatattactatattattttggatgagaatagttttaaagttgatctctgccctcttagagaattctatcatttttttgttgtctcatcaccgagttatagctataaactgcttttattgactctgctgtaccagaagtgttggataagtttagatgtctttactttaaatggcattttacttcaaatattttttgcgagtttttatacctgctttttataatttcctaggatctttctgtagtgtcaactgttgctcctttctgaggctgccagctttaatttttctttttcttttcttttttttttttaatagagacaagatctcagtatattgcccaggctggtctcaaattcctgggctcaagcgatccacccgcctcagcctcccaaagtgcaaggattacaggcgtgagccactatg

SEQ ID NO: 4022 - DNA, 1879 bp, Homo sapiens
cctttgacgccgaagtgcctgcggtgctgcctccaagacagtgtctgctgcagcctcctgaaggggtcagccttggcgtagtatctctgagactggattcttctttggtaactaaaagttattagctttattcatatagggaaccctttggcttttcacttaacagtattgtgattttgatggaaaaatgtgtctttcaaccttaaagaaaaaaaaagtcagcctgaacgataagcgaacggcagggagttgcatgtgcccacgtccatcgtaggaacctcggttcgtcacagtgcttcttaatgtgcttgcttaacagcctccaaaggaattcaaaatatggaagtcaaattatgtaccacctcctgagacctacaccactgagaagaagcctccgcctccagagcttgacatggcaataaaatggtctaacatatatgaggacaatggtgatgatgctccacagaatgctaagaaagctaggcttctaccagaaggggaggagacgttggaatcaggtaaggaaagtcagaatccgatggtggtctattttgatccccgtgatgggcttaaaaagaatgagatatttaatgaatgaaaattaaatctagcgaattgacaaactaatttgatggtctttggatacttactgctctgcttttgagaaagatcatacatatttggctttaacatgaagtctctgatagctcagctagtagtagttgctgtattttagtgaaagatcataaattattcaggctttaaagtaaaatatctgatatctcatccagtggtcagatttatgatgcattattagaacaacacaaatcaattcatggtttcttgtgactgtagctacaaagtactgaaggcttaattttcttttttttcttctttttctttttttttttctttttttttgagacagcatttcgctcttgttgcccaggctggagtgcaatggcgccatctcagctcactgcgaacctccacctcccaggttcaagcgattatcctgcctcagcctccaagtagctgggattacaggcgcctgccaccacgccgggctagttttgttttttttgttttttttgtttttgtagaggtggggtttcaccatgttggtcaggctggtcttgaactcctgacctcaggtgatccacctgcctcggcctcccaaagtgttgggatttacaggcgtgagccaccgctcccggccgaaggcttcattttctattaaagcagttgtgcttcagagctaaaattagtatgacaaaatgaatttaactgagcattactacatagtaataggaagataatgactgagttgttttactttagttcataatagcataatttcgtctcttacttggactgtcacagtaatctttgcctacacattcttatccaatctgtaccatccttcactgcagctagtgttgagtttctaaaagtcgtatctgattatataacttgcctgcttaaaacccttcaacgggataaagtcaaggccttgtattaataggccctttctccctgtccacagtcatttttaatggcccctttctagcacttgaagatcttgaaatccagaactgaattgtatggttccctgcctttcagtatacgttgcaccttattctttagtgttctttcttatctctggctagtaaactaattcatccttcaaaatccaaatcaaaagaagaaatctcaggtatcacctctaataattatttgctcctttgtaccttgtttatgctaatgctgttgattgccctcatcacttgtatgtgatttttttaaaagtctgtctgctttatgatgagttcctcaaacagcaggatttgaagtgtttgtatcgagtacattgtaagta

SEQ ID NO: 4023 - DNA, 1051 bp, Homo sapiens
ggggtttggtttgcatgcccattgaaccctaagaacacagaacaaggagtcaagaaggcctacgctgcattcttatctctgggtgtgcccaagcagactcaggcattctttgaatctgcctagtaagttccccttagaatattctttgtgtctcccgttgatggcactttcattctttttgacagtacagaacaacagtctgtttatctaacaaaataggcttttgtgaaaagttagatgtgtaaatcacacttccttacaatataactcttttttatcagaacatagccatgcaatgaataacttattgtaagcaggtactgttaacatttgaaatatggcttaaccaagctatgttcacaaccatttattttagcagctgagccagaaagaccccctaaaatctcctcagtgtgaaagtgcaacttacactaggagtctcttcttttggtcaaaggtctttccctagcatctcaagcccagtagttttgacctatcttcaaagtaggtactaagcatttaggcttgcctttgatactacctgtagactttttttatttgttatattcaatacttaagttaatgtgttaatagttactttgttcaaaactgagatgatgttgggatatctttacctccttggcactccattcacacctaatgtgtgttcctgccttctattttctacttgtcacttttcttcatctcttttattttattgcggttaaacacacataacatttgcaattttaaccattattaagtgtacaattcaagtgacattaattacattcataatgttatacaactattaccactcaatttttggattaggaagagttagataagaaataaggtctgtaacattttctatgtgctctatgtcctcttttctctgtaattcaaagcctcattaataatttatcaggaaatggacagaaggaaagctgctttccaaatccagttcctgctgggaaatctgtcagtcaggcaagcagctactggcaaaaattgtttcaataccatttctcttaaatagacagcaacttac

SEQ ID NO: 4024 - DNA, 1027 bp, Homo sapiens
ttggagagtactgtagctcctcacagtcactcgatttcattgtagatacctaaatttgttggttagtaacaatattgtgtaggaaagaataacacaaacttaagagcaaagctaagttgaaatctcagctctctgcttacttgctatgagactttgatcaaatttacttactctgccccagttttctcatctgtaaaacaaatcattcttgtacttgcttcatcaggttgtaaaagttaaataaggttaatatgagttcatagtagagtgcctggcacataggaagactatataaatgtttgctgttaccattgctaactaaattccttctgagagctttgtcctaaaattagaatatagaagaggatcccaatatgtttttatttagaaatttttaagaccggatcattgagtacacaaaatgtctgttcgatccctttttgttggtagttttggctagttttagtagtcaacacatacagccaggcatggtggctcatgcctgtaatcccagcactttgggaggctgagacaggcggaacacctaaggtcaggagttcgagaccagcctggccaacagggtgaaaccccgtctctactaaaaatacaaaattagccgggtgtggtggcacaagcctgtaatccaagctattcgggaggctgaggcagaattgcttgaacctgggaggcgaaggttgcagtgagccaaaatcatgccattgcactccagcctgggcaaaaagagtgaaactctgtctcaaaaaaaaaaaagaaagtaatcagcacatatggacaaatttaggaatgaaccactgaacaaacctaaggcatctccaaatcaaagggtagtaatgaatatgcaggtttttcttggtgaaacaggttggtgtggtttatatattctgttcatattacttagtgttcttaatcactctataacttaacatcctaaggccctaatatacagaaatttcatttatctctgatatgaagagatcatggaatacaaagtcaccttggcacagga

SEQ ID NO: 4025 - DNA, 1022 bp, Homo sapiens
atgtttccagactgtgtgccgcttgtacgttattgcagttgtcgttgttttgcattaaggacaggaatctctacagatggcaaccacatacttgatgcattttccagaaatcactgaagagaggtagatttcatgtgcgaaggtggagaagaaagccctgtctcctcgcccctgccaagctcaaacccctgctgctcctctgctgccctcttcctaggtctgccagcctgagtcccttgccaggtcctgggtgttttacctcctaattacaactctgcttggcacctcagcctttctttccatgaaaaatcactagtggcacatagaggaccttaaaaacaaaaacaacaaaaaaagattaaattatatatgtatgtatgtatgtatatgtatgcatgtacgtatgcatatatatgtatagtctggccaaaaaccagttttgttacatggattggtatcacacagtgtaaatatcatggtcatagagtagattcccccatctgtagttatcttctctgaactaatatatttaagccaaaactaaaatggagaattataaggtctagggtattgttttgtttattttgttttgtgggagttagtccaggtcttgatcagttcatgcccctaatttgctttcaccatgctatgccttcaagatgctgaaataccagaattaaaagtagaaagttcctgttgatttttagatgccttaaatattaaacatttaaattaactaatggaaggtgaagtagataaaccaaatcatcaagtaaactgagattcatttctgtttcgttctgcagtaagtcatgtgatattttcctgggaaaattcatattcttaattatctttggtttgcaataatattaaaataactgcatttcctgagtacaattcaattgtgccattaagggatgtggtgttctttcatcattccaggcacgatggaatctactgaaaaaagctgaccattccaggaaaggtggaatctactggaaattggtcagaaacaatacaca

SEQ ID NO: 4026 - DNA, 1102 bp, Homo sapiens
attttctttatccagttcaccattgatgggcatttgggttgattccgtgtctttgctattgtgagaagttccaaattgccgtctgttagatttgttgtgagaaataaggagttaatgagaacaaattacatgaaacaaatagaagtcctaacattaatggttaatctgtatttagtggtaaactatgcttatgtgtttattaaaattttataactttacattgaacatttaagagattaaatacattggcacaaaaaaactgcatataacttttgactcccccaaaacttaactacaaatagcctactgttgcctggaagccttaccaataacataaagtgcattaacacatattttgtattgtatgtcttatctattttaatcttataataaagtaagttagagaaagaaaatgttattaagcaaatcataaggaaaatatatttactgttcattaagtggaagtggattatcataaagatcttatccatgtcttcagattgggtaggctgaggaggagaaggaagaggaggggtcgatcttgctgtctcaggggtggcagaagcagaagaagatctgcatataaatggacccccctcagttcaaacccatgttgttcaagggtcaactataattatttaaatatccggcagttgatactgggaagactcggataactaactagaggctggcacagtgaggctccacaggcctctctcttcatcactgtgtggacatgccatgtggtctctccagtatggcagaatcagagttgccaggcttcctccatgttcatgttggctcaggttgcccagtgtgtgtggaggggctggtggcaggcagcgagagagggagaaccaggtggaagctgcattgtctttttcaagctagcctcgaagtcactcagcatcacttccatcacaggtttttttttggttagaagtgagccactaaaactggcccatattcaagggaaaggaaattagtcttcccattcctgggaagaatgtcttaagaatttgtgaacttgttttaaaaccatggaggcacctgtgaaccttgcttgagtagtgtctcccatgacacctgtttcaacttaaag

SEQ ID NO: 4027 - DNA, 1100 bp, Homo sapiens
tattcttctatcttcaattttctctgtgtgtatttattgttgaccatagaaatgtggataaacatgtggctcaccattaaccatcatctccaacttgctaaagctattgtggagtaatgataccaccaaactttgtccagctagaaatgagacccagccatagagaagacttcctgagtttctcaagtatgtatctgttctatcacatagcttttttctatcccatgtgttatgggctgaactgtagtctccctagcaaattcatatgttgaaattctaacccccagtacctcagaatgtgactgtttgggtatagggcatttaaggaggtcgttaaggtagaatgaggccatacaggtggtccctaattcactatgactgttgcgcttagaaaaaaagtggattaggacacaaacaacacagaaacaaaagggtgaccatatgaggacacagcactaaggtagacatccacaagtcaagaagaaagatctcagaagaaaaccatcctgtcgacatcaacttgatcttagccgtctgttctctagaactgtgagaaaacacatttctgttgtttaaactacccagcctgtggtattttgtaatggcagccctagcaaactcatccactatgttttaaatccaggttttttttttaagtttctctttttttttcagaagtttctaaccttaattttaaatttgtttttctttcctcctttgcttgagctagatttctacaccctaagaagtcatactcaggtttctaaattcatccacatactggagtacaaagattccacaaattttaacagtattcgaagagtgctcagtctttgagatgagtcttgactggtactttggatataacttacattttatacctctgtaaattccttttcttattgctcacctgtgtcagttctcaaatagattatttaattttataacaaaccaacaaataaaacaaagcactgaactatgtaaaactgacttctcatcccctacccctgccctatgaatttttctctttttcttactccttaccttgggtaaaatggcagcagcaacaccatgaacccaagttcaggttctcaaactgg

SEQ ID NO: 4028 - DNA, 1962 bp, Homo sapiens
gtttctggtgttctaatgatagctagtgaatgtgtgaattatattcttggccttacttgaaatgatgcgaggtttctgttgtatagtgttaaaggtgagcctgattatttgaagcccttccctaggcagtgggcacagtggataagaagggagagcatattgggtaaaatgacagtgctccaggattccattacatttagtggcattttgggatattgttttatttgattccactgtcgttcatgatatgccatctgtctttatttcctttcctttgtttgctttgggtttaattttctcttatttgtctagtttcttaatatggaagctgaggtcactggttgaaaacattttctctctattataagcacttaatgctataaatttccctctactcctgcttcagctgcatcccacatattttgacatgtttttatttttaatctgtttaaaagactttctaatttcctttttgattttttttgactcaggttatttagaagtgtgttatttaggatatttggatattttccaggtatgattctgttatttatttctagcttcattttattgtggtcagaaaataaactgtgtttaacttgaattcttttatacttcttgagactggttttatgacccagaatatagtccatcttgaaaagaatgtctagtctgctattgtgggtggagtgatccatacatgtcagttaggcaaaattgtttgatagtgttgatttttttgtctacctattctttggataattgagagaggaatattgaaatctccaactacaattatgaatatgtctatttttctttttacttctgttaggttttgctcgatgtattttgaacttctgttgttagatggataaacatttagaattgctatatcctctggataaattgactcatctgtgattctgaaatgactctttcatttcataattagtctgttttcacgctgctgataaagacatacctgagactgggcaatttaaaaaagaaagaagtttattggacttacagtcccacatggctaaagaggcctcacaatcacagtggaaggcaaaaaggagcaagtcacatcttacatggatggcaccaagcaaaaagagagcttgtgcagagaaactccccatttttaaaaccattggatcttgtgagacctatcactatcatgagaatagcacgggaaatacccgcccccatgattcaatcatctctcaccaggtccctcccacaacacctgggaattatggaagctacaagatgagatttgggtggggacacagagccaaaccatatcattgatggttaattttatgtgttaaatttgacagggctacagggtcccagatgtttggttgaacattctgagtgtgtctgtgtgggtgtttttggatgaggttaacatttgaatcagtagactgagtaaagcagatggtgctctctgatgtgagtgggcctcatccaatcagctgaaggcctgaatagaacaataagactgactcttctgtatgaggtaattcttcctgcctgattacctttgagctgagatgggaggtttcttctgccttcagtctcaatctgacacattgattcttcataggtttcaagcctgctggccttcaggctggaactacaccatcagctcccctaggtctccagcatgccaactacagatcctggggcttgtcagcctccatactcacataagccaattccttataataaatctctctctacttctacacatacacacacgtacacacatgtacacacacacacacatatatacatacatacatttttctggttctgtttcttttggagaaccataactaatctaatacaatttctttatccctagtaatattctttgttctgaaatctaatccctattctagttttcttttgattagtatttatatgctatttgaaaaatccttttgcttttaa

SEQ ID NO: 4029 - DNA, 1047 bp, Homo sapiens
gcaatatgataggaaacacttttttagggcatccatatcccgtgggaactcttatctgtttattttctccacttggcatctatccacaggaagccagcattcctaactcccttaccttacagaacttcttgttttgtgataacacagaaacattttattggaaaggactggaaggcacctctcccaccacaccctgcaatccatcttctagagatgattgagcaatatgaaatataataattgtaagtcattatcaaatggcttggctccagattgagagaatcagcaattaacctctgcctttcgtgttttatttctggagatacctgtctcttaaccaaccactaacatcacacgtagcacatccagaatttagaaaggatttgctctgggcacagtagatgagcacacagattctacagagagattgaagtgatttatttgtgacaaatttttgcaagtcttggggattgagtgtaagggagtattcaagcagttggacttactatgtgaaagaagacataagacatatttactgctcagcctgatgcctggcacatagtaagtgcttaattacaattattcctactgccaagcaccatcattatctttactttcactgcaattaacatagaatgagctagtcttattctctagagaatactttctattctttagaactctagttataaaatcaataaaattctttggtatatggtatatagatgatatgattaaaaggatccatccagccaggtattctggctgcactgagacaccagtgactatctaaaaaaccactcaaatgggcttacctctcatggcactgggactttgcctacaggcagtggtgagccatgtgatgttttgctttggtttcctcatctatgagatgataggattgcaccagctcaggagtggtacactcaagtgccccaggaatcagagaggtaaaaaatgccatgcctgagcgttagtgccggctgacacttggccttagcacttgggagacataggaatagttggaagcatctatggggcctgggc

SEQ ID NO: 4030 - DNA, 1034 bp, Homo sapiens
ggtccagagatgccatccaggatccagggactcgagtcaacaaccttagaagtctatctggtgctttacactacagtgcctaagctagcactcaaaccatgagacacagtccttcccactcttccatccccttttcagaggaagaggagcctcaccctgtagccaccaccaccacggacccaagaggagtattgccaagctaccactgatattcttctcaggcctaagggctcttcagtcagctagtggtgaatggtgccaggcctgggattcacctttcaggccagtgggctcttctctggcccagggcaggtccagaagtgccattcaagacccaaggcctggaattggggccccaagacccctcttggtattatactccactgtggctgagctggtacctgtgatgcaatacaaggtcccctttgctttttcatctgtttttctcaagcagaaggagtctctcatcatagtcacaatagctggaaatgtgctgagtcttacctgaagtcatcacatctcaaagtctcacccaaggcccacagcattctatctgggtatcactgctggttattcagggcccgggggctctttagtcagcaggtaacagttcttgccagctccgagtccttatcttgaaggtagcaggttcccttctggcccaacatgtgtctagaaatgtggttggcaagctagaacttggaataggggcctcacaactgtgacctgtgccctatcccactgtggctgagctggtatccaagatgcaagacaaagtcctccttattcttccctctcttctcctcaagtgggaggtaggggtctcttttggagccgcaagctgtgctgcctgggtttgggggaagggtgatgcaagctctcccttagctgccccaactggtatctcagtaagtcacatgcccttaaaatccacctgctctgagcccagctcagtgccaggacttgcagtccttacagccgagactgccttttaagtttatttacgtccccaaggcacttcagcccatggtggt

SEQ ID NO: 4031 - DNA, 1051 bp, Homo sapiens
tgcccttttgatgctattttctagatcttgtaggcatgctccattcttttttattcttttttctttgtcttctctgactgtgtattttcaaatagcatattgtattagcctgttttaatgctgctgataaagacatacctgagactgggcaatttgcaaaagaaagaggtttaatggacttacagttccacatggctggggaggcctcaatcatggtggaaggtgaaagtcatgtctcagatggtggcagacaagagaagagagtttgtgcagggaaactcccatttttaaaaccattagatctcatgaaacttactatcacaagaacagcatgggaaagacccaccccctgattcagttaactcccaccaagtccctcccacaacacatgggaattatgggaactacaagatgagatttgggtggggacacagacccaaaccatatcacatatcttcaaactcactaattctttcttctgcttgatcaattctgctattaagagactctgacacattctttagtataccaattgcatttttcaactccagaacttctgcttgattctttttaattatttcaatctctttgctaaatttacttaatagaattctgaatttcttttttgtgttattttgaatttcctcaaaacagctattttgaattttctgtctgaaaggtcacatatctctgtttctccagcattggtccctggtgacttatttagtttgtttggtgaggtcatattttcctggatggtcttgatgcttgtggatgttcagctttgtctgagcattgaagagttgggtatttgttgtactcttcacagtctgtgcttgtttgcacctatccttcttgggaaggctttccaggtattcaaaaggacttgggtgttgtgatctaagccatatctgtattagggggcaccccaaccccaagaatgctgtggttcttgcaggctcatagaggtaccaccttgttggtcttggataagatccagataattctctgggttactaggcagagacttttgttatcttcccttactttc

SEQ ID NO: 4032 - DNA, 1050 bp, Homo sapiens
agtgaccaatgcaaagtgcgttattaggtacaagtgtaaagtaacattcttagttttttgggttttgtgttttgtttttgagacagactctcacttcgtcacccaggctggagtatagtggcgtgatcttggctcactgcaacctccacctcccaggttcaagcgattcttgtgcctcagcctcccaggtagcgggaactactactattgctactaattttttgtatttttagtagagacagggtttcgccatgttggccaggctggtctcgaactcctggactcaagtaatccacccacagcctcctaaggtaggaattacagtcgtgaacaaccatgcctggccacattcttggttttcttgaggaatgaaaggagagaaattgcagtgggtctgaatatatatattcagctgagaaaacaacaacaacaacaactatcctactgtaatctaatggacttgagaactgaatcctgactaatatcaggtgtcagacaattttccaatacattccaaagacagtagtttccttcattcacatgaactcccttgagccacttggtcccctgtggactgttgttcttctctccagaggggcacttgtcctttctcaaagccataagcccagggaagaatgctactttgttcaagttatttttgattcttttggaacttcctaaaactcctgtcatgtggttccaagtttaaccatagtcattttggacatgattttgtttccacaatgatgtatgtcagcaaccacagagtgagcttcttgtatttttacatcaatctgataccctttgtttatttgttcctcaggtttcactttcacttatgtaatgggttatggcattttttggtcattacctcatctgggatctcctttttctttgtacctcctgatgcgtcatcttcttgactctactcccttggatctcttggatacaatgccctcagctggtgggtgggaatgggtgggagccagattgcatgaggactcctccacccttccccacagaagagctgcctgggtttgtcaccaagtc

SEQ ID NO: 4033 - DNA, 1021 bp, Homo sapiens
tacagtatgaagcctttgtaaatcttgcaagagactggtttactttgaaactgaagcctgtaaaatccaaaaaagaatgaaatcaagtttgctatgagaagcactttcctcctgtatcctacaatccaagttgactgagagcagtgatctgaatctttgactggatggaaaagccatattccttcctaaagttaagttaatttgagtaaaagagggagaagggagaagtgcagtaaggcaagatgggcgcctgggataagtgtgatttcccccaggtctcttctgtaatcctcttgttatacccttctaccctgtcaaatgggacatccatgccccttgaaaagatgcagctggcctgtagccttccagcaaagggaaagcagctgttcctcccctctccagctttttgttttgtattgacctgaaacagaggccactatggagccattaattaatagccatctgaaacctgtattgtagataataattttaaaataaaatcaagtagatctctaacttttattaccaacccgtcaaattgaccagtgttggttggggttctccagaaaaacagaaccaataagatttatatatatggagagaaagagattgattataaggaattggctcatacaattatggaggctaccacgtcccaagatgagggtttattggcaagctggagacccttgagagctgatgtttctgttcaaagactgtcaggaaggaagaatcctctcacttgagagatggtctgcatttttgttctatatggatcttgaactgtttgaatgaggcccacctatgttagggaaggcagtctgcttcactcagtcttccaatttaaatcctaatatcttccaaaagtactctcacagaaaccgcagaataatgcttgaccaaatatttgggcaccttgtggcctagtcaagttgatacataaaattaaccatcacaaccagaaacatatagatgggagccaactaaaatcatgagggatttctgtcacggagaaaccccc

SEQ ID NO: 4034 - DNA, 1029 bp, Homo sapiens
tctctcattcactctccttttcaaactgcttcagtcacataaaacatcaaggaccaatttcattctgcatgtgggtatacagttttcccagcatcatttattgaagagattattttttcctcattatgtcttggtagccttgtcaaagatagttgcatgggtttatttctgggatctaatctgttcctttggtctatgtgtctttttatggagaacaatgctgttttgattactatagctttgtaatatattttgaagttgggtggtgtgatgccttcagcttgttctttttgctttggccactcaagctccttggtggttccatcagattttagaatcatctttttctatttctgtgaaaaaaaaaaaaggcattggaatttttattaggattacattggatctgtagattactttgggtagtatggaaattttaacaaaatcctttcaattcatgaacatggtacatctttccatttatctgtatcttcagcttcttgcatcgatggcttgtaggtttcagtaaacagatttttcacttccttgattaaatttatttctaagtattctattgtttttgatatttctttttcaaacagtttattgttagcatgtagaaacacaactgattttttttgccaggcgcagaggcttacacctgtaatcccagcacgttgggaggccgaggcaggtggatcacaagttcaggagatcgagaccatcctggctaacatggtgaaaccccgtctctactaaaaatacaaaaaatttgccaggcgtggtagcaggtgcctgtagtcccaggtactcgggaggttgaggcaggagaatggcatgaacctgggaggcggagcttgcagtgagccgagatcatgccactgcactccagcctgggtgacagagtgagactccgtctcaaaaaaaaaaaaaaaagaaacaactgatttttgtatattgattttgtatcttacaactgtattgaatgtattagttctaacagtttttggtggagtcttttgggttttccat

SEQ ID NO: 4035 - DNA, 1021 bp, Homo sapiens
tgggattacaggtgtgagccaccgtgcccggccaacataaatattatataagagtctttaactatttcttggtatgaaaattgataacttgtaggctggtcatggtggctcacgcctgtaatcccagcactttgggaggccaaggcaggcagattacgaggtcaggagatcgagaccatcctagctaacactgtgaaaccccgtctctactaaaaatacaaaaaaaattagccaggcatggtggcacgcacctatagtcccagctacttgggaggctgaggcaggagaatcgcttgagcctgggagatggaggttgcagtgagccgagattgtgccactgcactccagcctgggcaacaaagcgagactccatatcaaaaaaagaaaaagaaaattagtaacttgttttagagctttcctaatgtcagaatatttgatttttttttatttagttttagaacctctataataatagctcttgtacctgcctttcttagaaggtattaaacttactatgctataaggaagtaactactgaattgtcatcacctttaaaaaatttttaatgtaaaatactctcatatatttatctattagtaattttgaatattaagagtgtttcctggttttttgtttttttttattaataagatattatgaactagatccttataaaagtctcctagacaatttgaggaacaaagtgatcattgagtatccaacattacatgtggtattgaaaggatccaataatgacatgaaagttcttcaccaaggtaagtgtaaatttgtttctgtaatgcttagaatagctttagagaaaccaaagcaaaatatgtccacccttatttctttatatgtgttttcccactatatttacacacttacaggatctactgtatagctagttaatgtgaagaaccaggtaaatgcaatgctgctactcttctgtttctaagagcgtataatcttataaaaccaattttaagtgaataaatcaaattgaatggctataaaagga

SEQ ID NO: 4036 - DNA, 1035 bp, Homo sapiens
aagtgcaagggcatggtatgtcataaacaaggcaagtaagtgatttgaggaggttggagtgtatagatgtatgcagagcagtattttttaaacttttttttaaaagttaaggttgaagagttagttcaagacccaatactaacgctgtctggatctggtctccttggcagtagaaaactgtaaaaatctagcaaaaaaaaagcagtaagacttggtgatcaagttggctatagggagcaataaataggaatcaaaggtgactacagtttctggcatgattgctgtttacagagagataaaagtaaggtctggagaggctaagagcatgttgagtttcatgtaggggtggcatcattttcaggaacactacttttgaaaagaatgaccttactctactaattattaggatatcttcagagtgaaactgtatactagtaaaaaatagtaatattatccttccagaatacataatctgtgtagtataccttactttactttatgaggctctagactagactttttagaccaaaagtttcaccattacaaatagtacatttattataataaataaaagtttattgtaactgcttcctaagcctaaaccaaatcatgagaacttccagaataacctttttgctcttatgcaaaaatgtacatcagagatttgctgtaaagtcaaaattgtgtttttaatttgatacataccttggaaagttactaagcctgttttcccatctaaaagtgggaatcagaacagaaatgatactgcatcgttgtaaagattaatttgagttaatatttgtcagctactgaatacagtgcctggcacccagaaaatcactcctgtgtattattcaagtattttgagtttcaactagaacatcatgctgaaatgattcaatgaacgtaagaggtgtttaagttccacatgtctggtagtagttaactgtatcgtgtattactttttttgtttatttgtttaacagcttcttttgaccaaattcattttgaaaaaaaaaaattttttttttaaga

SEQ ID NO: 4037 - DNA, 1045 bp, Homo sapiens
ttattataggttataaatgttaagctctaatttaagataagcattctaaatagaaccattttattaatttcctgaaaagtgcttagaaatcagaaacatgtagtttctttgtggctgtttaattctacatttacagcattacagtaacttcagagtaaagtctttttaccaaatacttgatgttgccagtttccattggttttactttccattcttggaaggtatatagcaattgtctcatgatatagatatacctggtcagctagagcatgcttaagttttttccaggttttagctttgccatacatgacttattttttaaattgcgatcctagaatgtatgtctaatctaaggaattcgctactgatctgtttgggagttttctttccagaatacatagggtctgaatttatctcttagaaaagctattatagctttttaaataaattcacttattcattcagcaaacagtgagtatgccaaagtctagatgctgttctagacattgaggctatggcagtaaagaagagtgttcctgcccctgtggagaagatcattcatgtaagatgcttgtgttagtaaagccattcttgccctttgccgccttatttcttaccaactttctattctcagaaagtaaatgagtggttttggactagaaaagcctatgttgctaaatgtcaggcactatcagagggcagctgttgtattactgcccacttaagttactactgactgaagaatttataaaacaaccaactttgtctattcaagtacagttttccaaatctattaaattttaagcctggattttacttttatggaattatttaccagaaagaaatttagatacattttgttttttatgtttactttgctgctttgatacttgtaaatcttcgtggttttttttttttttgtgatttaagcagttataggatgatcctttccaaatttattcaaaaaaaaccattaagtacatttaatcttctaggcatataaataaaaattggagtttatacaagaatgaataaaatacagttc

SEQ ID NO: 4038 - DNA, 1033 bp, Homo sapiens
ccatgcccccagtattctaagagactagttttcaatacttttttctattaacttttcaaaagttggttatagctttgactctgataaatgtaaattttcatgttgtctctactatttgattatacattaggtgaccttgggcaaaatctgacttaccaggttattgagaggattaaatgaaattttaataccaactaaagtagtacctggcacatactaaataatatacagtgacaatgaaaatttacattcccttcactgaaatccttaggaatatgccacatttactgtatattccattcacccctcataggtctgggatagcactgtgtaatcaaacagtactatttgtgcagtgaaacctataaatgtttaccttataatgggtaaataatgactatagatttattcagttaggttttgctgctgaaggagttaaaaatctttcagttttggagattttggaattgttgatatgagaagttggtcttgtcctaagattattaatactccctaggtattaaattgattgcttgtttaagcaacttgagttgcaatatagtcaaaatctcaagttgatgtcgcttaaaatttacatgttttcacttttgaggaatctgaatgaagaatcttttgtactgtttttgtaacttttctataaagtctacatttattttttttaaaaaaagttttaaatgtaaaagcccgtatatgaagtgtgatgaatgtgccattgtacctgaattactctgtagacctatcagaaggtgattgtagcagctgactgggataggttcattctaatccagacaccctttatggcaggcattttcactgactctcctaaaattatatgtgaaattatgtgatgtgtgaatttttctaagaataagtactgcaattttcactgaatagtcaaagtgaggtgaagtctgtgaagtcaaaaatagatgcaatgaggatgaattttagaggactattttagaggaatttgcaggagtaccacagtggatagctgtaatcaataaagttc

SEQ ID NO: 4039 - DNA, 1062 bp, Homo sapiens
acattactggcttcccagaagttccatgccacccttttatgcccttccctgatcttttctcatttctttatatttttttctatcttaggactgtaccacaatttgtttacgcatttttttaatggattttggattttctgtaagaataaaaaacagtttagaaacaatgccactacttttgtctatgaattatagtatgtgtgtgaacatgtgtttctagggtttatacctgggaatagaattgctttgttgtgtggtatgcatatcttcaatttgcctagatgttaccaaaacattttccaaagtgattgtactagtttacactctcaccaatagtgtatgaatgtacctattgtcatattctcgccaatacttagtttggtaagactttaaaaatttttgtcaatctgttggctttgtaattttattgtggttttaaatgtgcagttctttaattcctgatgagattgaaccacctttcaaatactttattggccatttggatttcctcttttatgcagtgcctgttcaagtcttttgctcatcttttcattggtcagctttatttttcttactggtttgtgagaattcttggtatttcttggatgctagtgcaagttggttgtatgttataaataccttcttctagtctttgtcttgtcttttcattttatagtgtcttgtggtgaatggatgttcttagttttaatgtagtcaaatttatcatttgtttcctttatagttagtaggtttatatgtttataaagaaatccatctctaccttgaagttaggaagttattcttttatagttattgcctaaaagctttatactgttgtgttttacacttatgtctttaactggaattgatttttggtatcatatacagaggagttcccatttaatttttcatatagataatccacttttcccagcaccatttattggaaagttcatcctttccctattgctctgtaggaccacctttgtcatatatcagcatccctatatgcttgggtcattttgtggccttgtcttttccattctgttggcctactggtat

SEQ ID NO: 4040 - DNA, 1101 bp, Homo sapiens
tttgcaatgacactgggagatttatattaataataccatggtccctagtttatagctttaagaaactaaagcttggaaaggcctaataacatcaggtgtgtcctccattttcatgcaagattggatttaatggttaacacagattagggtgggttttcccacttccagagtgtaagggtttcgcttctctccctctgccggtctcctacactctttacacccagcagggcgtggagggtggcccagggagtggcccaggaggcttctctaagggaagagggtggtggaaaccaggaaggagacgagaaccccagcgggcaagtcacgcagttacgcttgttcgcccagagaatccggcagggcctccgcagagccgtaaagagctctacaagtcgtgaaggggcgaggcgcaaaagcgtagctttacggcgattcgagcagtcgcgtcaagcaggctattccgggtttgtggctgcttggctccacacgtgggccgccgtaggtattccgaccggtaattcctcctattggtgtgcagcagccacattgaaggatagagtggcagcagaggccaaggatcgtgagttgatggagtttgctgctgaaaatgaagggaagtctgggggaggtctccacagcgtagctgagggggtgcggctaagtccagagcctggcagggagggagtaagggacttagcaggggcggaggagttcggcggcggagaggaggggacagggctgacagggataaaggagataggggatggagaggaaggaagtggacaaaggccagaggaaataccgatggacctaacggtagtgaagcaggaaattatagactggccaggtacagaaggcaggttggctggccagtgggtagaacaggaggtggaggataggcctgaggtgaaggatgagaacgcaggcgtattggaggtgaagcaggagacggatagtagtttagtggtaaaagaagcgaaggtgggtgaaccagaggtaaaggaagagaaggtaaaggaagaggtaatggactggtcagaagtgaaggaagagaaggataacttggagataaaacaggaggagaagtttgttggtcaatgc

SEQ ID NO: 4041 - DNA, 1034 bp, Homo sapiens
gttaatattgagatgtgaggtaccattttattcatcgtgttagttgttgcctgaatatcttgtgggttttgtgtgtgtgtgttgttgttttataggcctgtgagatttatgctttaaggaggttctattttggtgtattttaaggcttgtttcaagctttagaactcattttagcagttcttgtagtgctgacttggtagtggtgaatgctcttcacacgtttgtctgaaaacgactttacctctcctttgtttatgaagcttaattttgctggatacagaattcttgattggtaattattttgtttgaggaagctaaaaataggaccccaatcccttctggcttgtagggtttctgctgaggaatctgctgtaaatctgatatgttttcctttataggctacctgatgcttttgcctcacagctcgtatgattctttccttcatcttgactttggagaacctgatgactgtgtgcctaggtggtgatctttttgtgatgaatttcccagctgttctttgatcttcttatatttggatgtctctatctctagcaaggccacggaggttttcttcgattatttcctaaaataagttttccaaagttttagatttctcttctgcctcaggaacaccaattattcttaggtttggccatttaacaccatcctaaaatttgtggaggctttcttctttttttgttgttcttgttcttttttctttgtctttgtctgattgagttaattaggaagctttgtctttgagctctgaagttctttcttctacctgtcctagtctattattgacactttccagtgcattttgtatttctctgagtttgtctttcatatccagaagttgtgattatatttttatgatatctgtttctctggagaatttttcatctatagcctgtattgtttgtttttttaaatttctttaagttggttttcacctttcactggtatctccttgagtagcttaataatcaatattctgaattctttatctggcaattcagagatttcttggtttg

SEQ ID NO: 4042 - DNA, 1027 bp, Homo sapiens
gaatagtggttgaatggatgattaattgaatgaccatttaaaaagtgttttggaaataaaaacaaaacaacttggtaactgattaacagaaggtgatggaagaaagagaagtcaaagataaagcagcctttgacttgggttgctgatgtcattgaacttaaataggcaactcaggaagaggagcagttttggaggatggggatgataagaaatttgattctggttatatttagtttgaggtaccgtttgacatctagaggtagaaataattaatagttcgcggtaaaccaggttgaaaagcagaaatagaagtatgaaggaagttgagagagacaaatagtgtagagaatggagttgcggatttttcctgccaactttagcccttcacctggtgcatacataggaacttgaactttatacattatataaatacatttatttatccattcattcaataacttatttattcaacctttgttgagcttcttctgtgttagaccaagtaataaatgtgggattataaagatttctaaactctcatccctcctccagataaggttacaatttagtgggagagataaaaaataatcataattaagaaatataagaagttctatataaaagagttggtgaagtgctctgagagcctagataattgagcaatagattctctcctgggtaattgagaaatatgtacttcaggtggaagtaataatagaacttaatgtttttaagtgtgcatatcatactaggtgaagaaccagagaactttcaaagttctcttcagtttgggaattttgtttctcttgaagtttaagtgtcagagaactgaagaaagccaactgacctatttaattttcttttatgacagtgatctttagaactttcttctcactaattcttttagtcttgaaattagaatgtcaaaactggggcaaaagacttgaaagctagacattttaatgaacaacaatgttagtacttactacccactggaaattcaaccattatctaagtttatttaata

SEQ ID NO: 4043 - DNA, 1051 bp, Homo sapiens
aagagagaccccccactttgggtaacaagatcttcagccctgtagagttcagggtgtggtgaaggaagcacagaatacagtgtgtcattgggagtgatggtaaataggaccatacctgcttccaccccttggtctttagacccaaatgttcatcctatttgggacaaaactccatatgggtcagtgatttaacaaatccactgtgttctaaagggtagtacaccattttttcacattattttcttttaactggcacatcaattataactttagaaggaaattccaatgttatgtgaggctggatgcttctagattgggcaggattaaaactaatggattacatcatgggcctactccttgcccctccttcaatgtaaagagggtctccatttttggatgctgtgttctgtgaggtttcatgtctgtggatcaggcattctgtaagcctctagatagtagtgctagtagaactttagagacaagaaaggcaaactcttacccaaataaatatctgtctctgtgatgatgaactgctgatacttccaggttggaaggtgcccaatgtaagaaatttgccaccgagtagctggttgccttcttcgtggaatggtgacataatgtggactttgttggtctttttttgctgacaaatggaactttcagaggcagcagaagctggaacatccttggtaagtgatagtacatgctgttgggctcatacataacttctgtctctactaccatgtcttctccattcatttgatactcatgccaatctgggagtgaccaaagatgaaggctggctaatgtcaactggccaagtcattttgtctacttggttttttataacctccttcatggtatatgcttcctggtgggcattaatgtgtgagggcgaactctttatactctttgcctaatcccatgtgtctagtcatgtgactctgtctcagatctctcttcctctatttttttttcctcccaggcccctgaccagatagccatgccattgattactgccgaggaatctatatatcctcacttcaggtca

SEQ ID NO: 4044 - DNA, 1032 bp, Homo sapiens
atattttcatgaatcatgataaattagcttttcattggcagttatttgttggtattttttggtattagcagaaatattttgtcaaatgtaaatgtttaaaacacatcataatttttaaacccttctttggcatttccttatgtaataatgtgctagctgcccccaaaagtaaaagtatatagaacctctcccgaccttctggtggtcctgctggtgacacaaaattgcttctaactggatctacaaccttcaaaccaaaaagcaaaaacatgtgttattatttttaatgttctttgtttcattacacggtaaactctagtttcatggtggtattttgagaatgacctcaactctgtggtttctttggtactgctgacatcttatttctgttagaatcagtgtaatgatgatcaagaaacctctatgaaacacctaagcaattacttataacattattctatttaaaatatctaattgtaaaatgttccctttacactctgtacaggctatgttggagttctgacttcagttcttgagttatcaattgattatttagttcactgataagtatataccagttagagtgtcttttctttttatttataaccaaaactcctgttgtatatattaaaacaaatgttagctgactttacacttgaagtcatcaacagatgattctgaaaatgtacacagcttgtcatcataatcctaaatgctctagtatcagaaatacttttgtatgattcactttaaaagaaacatttcccattctccaactgcttggctttcaagtaagaaaatcatagatgtttcactttattaaagttatgtataaaggaacaaattctctctctccctcttttcttttaatttttgcttgttcatacaatctgtggaacataaggcaatttcaggcacctttgacaaggaaaaacacctaaaaaagttttcaagatggatggtggcaacttttttaatggcaatacttaactaaattctaaggaaataaaaccttccaaaagttttattcca

SEQ ID NO: 4045 - DNA, 1056 bp, Homo sapiens
ttctgcttattttatatgtaatttgttcttcattttccagcttaaggtggaaagctaaactactgattataaacctttcttctcttctaatatttaaagttataaagtttcctttaaaaacagatttaactgcatctcacaaaatttgatatgttacattttcattatcactcggaaatatataatttcttttttgacctgcttatttagaagtatgttgttttctttattatttttctaatttagttccattttgatcagagagcacatactggtggaatttaaccttttaaaatttaccaaggcattttatggcccaatatgtgacctatttttgtcaacattctacatatacttcaaaagattgtgtattttgcagttatttggtgtggtgttatataaatgccaattagattatggtggttaatgatagtgttaacctcaggtcagattttcccctcccccattttttttgtatgtctagaagattttgtatatactggatattgtggatgatacgttgaagagatgttagattctgttacgtcctttgaattgaagactgttcatttttattctgtagatagttaaataactggttcatcaccttaaacttaaaggtttggtaactttttaccaaaagagtcaccttaaacttatgggcttggtaactttttaaaggacagatttgtttcagttttgctcttggtgtgagtctcagtccaaggatgtcatatttacttctaaagcatggcccttcctgaatgtcaatggaaaggtgtttaccaaagtatttaccatgttcttctaaaaggatgtggctaaacccccaaactgtttcccctgtggtgaccagcagctgatatttatgttcaattctttcagccttccacctgcttctgttgagctctttggagtctacctcatataagcacatgttagtgtcagccaaggatgaaaaatctatatccagcatttgggggaagctcctttcttttcttcctctcctttcctttcctctcctctgctcccctcccctttcctttcctttctttc

SEQ ID NO: 4046 - DNA, 1087 bp, Homo sapiens
aaacttcagccaaagagaagtgattggggaagctactacaaaagtctggctctatttgtcaaaagaaaatgtgggaaaaagaaaaatataaatgccatacaaactaacaatgtaggaatggtacaattacagaaaaatggtaggagaagagaggaagaataggaagagtagattaactttgctgattgccttatctgaagaagctgggaattaaatattttacagttggtaaattagatgaaagaaatataaggatatttaagaatgaaaagataaacactatgaaagatactcctatagactaatattagaaggtatgggaaagggttaaagggaggaaaataaaacattgtgtaaaggaaagaattaatagatatgtgtaatgaaaggactgggggcattatatacatttaaaattttaaaggaaacccttagaataaaaatacaaacccttctaaatctcaaaaggcatacacaaagcaaagcaaaggaaacaaactacatagtgaaagacttcaaaaaattaaagtggtaaaacataaaataatacaacagattaaacaaaccataatattagcaaatgtagatagatttagtttatacattcaaagaaaacaattcagactggatcaaaaaacaaatacaatccctttgtctttacctaaaacatagtgtttcacagtagatgaaaacaaaaacaaaggcaaaggtatatcagacaaatgtaaacaaaaagaaagtcagatgagggaagcttagtcttactaccagttaaggtaatgccaaaaatataaaacccaataaactagacatagaaggtctttttgtaattctgaaaggtgcagtactcaataaatatgtgaactgcatgattatctatgcataaaaaccatgacatcaatattcataaagcaaagaccacaagagagaaaaggccaaatagacacactactggtaagatactttatctctcagttgatggcagattaattgtacaaaaataaacaagaatatagaggatataaataacataaacaatgaggtacaactaactggtatgtattaaattttgtaccttcaaacacct

SEQ ID NO: 4047 - DNA, 1024 bp, Homo sapiens
ccaactatgacttattttagaatttgtaactctaatgagaagtaaagacaattttattttcattctcataaaaggctaacattattctgtcattcatttattcatcattcattaacgtatttattcaacacatgtttactgagctccaactatgggcccagtgtggttctaggcagcagagatacaatgattgagtatgacagatccacagttgctgctctccagtctaataaaggaaatagcaaatgaaacaaccaagtataacgaaatgagaggaggatatatacatgaggggcacctagcagtcttgggtgggtgggtaggggaggaaaggataatactggaaggaaaaggtaaccaaaggaaatgaaatctagactgagaccttactgaaaagaacatgaaatttaccagacagaaggaacaataaaaagctcagaagtgagacagcacagtgcatttgagggcctgaaagaaatgaagttggttggagtacacattctagggaagcagtgactggagctggagctggagagataaacagagaccagatttggaaaggcctttaaaccatgtttaacaagcagaggttggggagacttgacttttcttgattttgggatgagtgtataggtagaagatgctagataagttatgtatttgttgaaactcaagaccacctgatactttcattgactgaagattatctgattcattagttcacttgaaaatctttatctaacactagtatgtgccaggaactttactaagctaggcaatagtttaacattctctgtggtattactaggacagactagtttagatgtatttttcttccctcctactgactggactctagacactttgattaaatgaagttcttaagcatttatctcccttgcactgcatgaattgcttgaatgcttagaatttaaccaaaagctctacaggttgagtactgctcatctaaaatgcctgagaccagaagtgtttgggattttgaatttttttggattttggaata

SEQ ID NO: 4048 - DNA, 1027 bp, Homo sapiens
gtatcaggtgtcattgaacacctgatatgaaggatgtaaaagttctctcttttctatctaggtgtctatattttaattggaggctagatgatatttgcaacctgtctttatctaaagcattgtcagtgaactcacctacttaggaattcatatgcaccttagttaaaaaaaatgtattgtggttttaaattttttcctcaaccagtgtaatatgaagaattctttttattttttaagagattctaagaaaatgttcacattatcaaaactagaattctatcaacttttaagacatttaattattttggaataaaatgtgaatttttagacagaaaatggcaaaaactagtatgaaaatatatcatgttacatgtgaaattatgacagttgttaacctattaagttaatcatgttaaatatgtaataatttggggctaaatgaatgtatattataaattatatcagtgaagatcaaccatgtgtgtgctttaattattaattttaaagagtgagctctaagaatgaacacatcagatgtgagtattattttaaaaaatcaaaaagaattatctagttattgtatatatgtttttaatattatgactctggtcctttggaatgaatgctattattgcttatctgtatttttttccttttttctttagaaagcacaacatcaggaagtgtgtttgaaagaagtacaaaatagtcttgagaagtcggaaaatcaaaatgagagtattaagaattatttacagtttcttaaaacttcttatgtaacaatgtttgaataaattgtcaaatttattttctctaagtagtagatttttattatgagtctaaaatgtgattgggtaaaaaaataaatatactaccagttacattttatgatttatgagtggtagtattagaggtttttatgtaaagatttttgaaacataatttatctaactgaaactttaaaataggatagttgttactattcctgtttgctggataattcttatttatctttggtttaatttct

SEQ ID NO: 4049 - DNA, 1024 bp, Homo sapiens
atagaccaatggaacagaacagaggcctcagaaataactccacacatctacaaccatctgctgtttgacatacctgagaaaaacaagaaatggggaaaggattccctatttaataaatggtgttgggaaaactggctagccatatgcagaaaactgaaactggatcccttccttacaccttatacaaaaattaactcaagatggattaaagacttaagtgtaagacctaaaaccataaaaaccctagaggaaaacctaggcaataccattcaggacataggcatggacgaatacttcatgactaaaacaccaaaagtaatggcaataaaagccaagattgacaaatgggatctaattaaactaaagagcttctgcacagcaaaagaaactatcatcagagtgaacaggaaccgacagaatgggagaaaatttttgcaatctatccatctgacaaagggccaatatccagaatctacaaagaacttaaacaaatttacaagaaaaaaaaccccatcaaaaagtgtgcaaagaatatgaacagacacttctcaagagaagacatttagtcagccaaaaaacatatgaaaaaaagctcatcactggtcattcagagaaatgcaaatcaaaactacagtgagataccatgtcacaccaattagaatggtgatcattaaaaagacaggaaacaacagatgctggagaggatgtggagaaataggatgcttttacactgttggtgggagtgtaaattagttcaaccactgcggaagacagtgtggcgattcctcaaggatctagaaccagaaataccatttgacccagcaatcccattactgggtatatacccaaaggactataaatcatgctgctatagagacacatgcacacgtatatttattgtggcactattcacaatagcaaagacttggagccaacccaaatgcccatcaatgatagactgaataaagaaaatgtggcacatacaccatggaatactatgcagccataaaaaaggatgagttca

SEQ ID NO: 4050 - DNA, 1084 bp, Homo sapiens
agcctgggcaacagagcaagactccatctcaaaaaaaaaaaaaaaaaaaaagaatgaactaaggatgaaagcttaagggggccaaagtgtgggcaagtaggaaggggctgcatctcgatggattagatgggaaaattaagttgagacatccagttagaatatttcagtcatccaggtctgaggtaggaatggaggttgtggtggactgtgggacttgttattcatcagggtcttccagctggttatttgggtttaatccctcagcaggaatactgtggttgagtgaccatattctgggtgcagggcctagaatttttttttttttttttagcagattttgatttggtgggaaaaataatttaaatggaagctagtttggaccagagactgattctttgaagtgacattgatctgcaaatgaaaatctttgtagtcttcaaagctcaagtggagagtttagaagtattgatgagagaagacaggtaaatcagacaaagattgtgggttagagtagagcactgagtgattccatatttaaagaagtaataacattagatgaaccagtcaaggatattgataggaaaataatgacttgtttaaaatgaaattttaaattttagatttttatctcatgttatgattctaaaaataatatgtttctctaatactttattttcaggtacaaaagttgcaagaagcagctgaaatagtaaaaagcagatgtgaaaatttgctacataaaaataaccaaataacaaaaaccaaaaataaaaatgtagagaaggtacgtttggaatttcaaataaataatattttatatattttttactttatgaatagtacacaaattcattcattttggtcattttctctagttcatacttaggaaagggctagtcttagcctctgtaagagtttgttttccaaggaaataatgtttcttccaggctggaaatgttgtttgtttatgtgaatgttttttcacttttttgttaatatttggaaaatagcataaatgtttaatttttctgatgcaagagcagactttaaatagctcaaaaaatggttatcaatcataagtata

SEQ ID NO: 4051 - DNA, 2097 bp, Homo sapiens
attacctctcttcttcttccactctcatctccttccactcttccccttttttctctatttctacctcactggctttcttgttgttttcccctaacttgctaggccgcctcccgctgttgtctttttcccttaaacagacacacttcctatcagttttactcaaaagtctctttctcaggaggccttcgcccacatgtcattcctagctgcttttgtgtttgatgtattttactgcttgttcttattttttgtctgtctgcccctccagtatgtaagcttcatggaggaagggaatgtcgtctgttttgttcactaatagaaccttcagtgcctgcagcattttaaaaagtaactagtgaacatattggctcatgtattcatcaatcattcacatttctgcctttttgaattacctactcattattttttatatttgtcttttgtcctaattaatatataataactatattaaggatattaatcttatatttgttttatttttctaatgacaaatgttatttgacaagacatcaaatttgtcatttgctaatactttttcatattttgtttgccatttaaactgtattggaaagctgtgaaattttggagagagatacacgcacacacatttttttaaatggcttctcttgagagtgctctcacagctctgcacatcttgtaatcaaagatattgtccatgtagactgtcttttgaaggatgtttgtatagtagatatccttggaatatggtaaccgtgtctcccttaggagtatgggtaggcatgctcactgcctgctataagaaatttgggttccctaaactcaggtttgttcttctgtaatgcatttgactgcatatacagttgccatctggcctctgggttgctctgtgggaactggggctcagcaaactgatacaaatgctgacagtcttgctactcttattgctgtgagtaataagtcccctgtctctgacctaggaatcttgtaccttctgttagcatccatgaaattgcagtagactaactagtaagcttgcaaggaagataaaatctcagacttttacatttctacatatcttcttttaattttatgctctttaggacttttgctatcctgaaatgaaatacagttttatctgaattgtctgaaaatttttaaagtttttatttaattcatttgatgcttctttagtgttgggctgaggcaggtagttaacctgtttttttcctaatagttaaacagttgtcttattgtcatttatttagttgtccatgtttcctccattgatttaaaaatctaacctttatcatgtattaagtataatttttgtgtatttttcttttccagtaacctctgtattctattgatttttcatatctaggcacatttccaagtttttttgtcagtaaatttagaaagttttaaaaataatatgtcctgtgtaaatcttaataaggatgttcataattattagtcactagctttgtgaaattcctaaattttagatggtattgcatgaaataaaaaataattattttatcaactttgttaatacatgagttatgtttttataataattctgtagcactggagtataaatgtattctaatgacttataaaatctatatcttttttgctagactacacttgctgctttgaaggatgaagttgtatctgttgaaaatgaactctcagaattgcaagaagtagaaaaaaaacagaaaacccttattgaaatgtataaaactcaggtgactactgcatttattttagtgtttactaaaattggtagacaatttaaaacactatttctttgtaatctaaataaatagaactgaagagaggtggggctatcattgtgggttataatatggtgtgtctcaaatatttcttaaggtcccacacatctttataaatagatgattctgctgattcctgattcaaacactgcatatggatatactggatattcctaaaagtagatttaaaatgaattacatcggtataatgtgacccttaatgtattcttgttaatcttggttatatttgtttgtcatcatgtgtatttaatggtattgatttagattaatgact

SEQ ID NO: 4052 - DNA, 1052 bp, Homo sapiens
acctcctctattaaacacaacagaaagtttatttggaaggttaaaaagttgtatttgtttctaatagaaagttagaaaaacagaaaagcacaaaaggaaaaaaatttaaatcacctgtaatctcataactgaaagataactggagttaatattttagcatatatataattttttattttatatgtaatatatacactacttccaatagctacttccagttttttactattgtaaataaaaacataatttctttgagtcttttttgcttatctgttttcttaggatatatttaactgtatggtcaaaagagagactcatttttaatattgttctatatttccaaattaaatgtgtctactataagtaaaatagtccctatacattttccaatactaggtaattaaaagtgctaattttaaaacaaatctctccaaattttataaataatctcatttattcttgtggctttacataccatctatgtgctcgaggctttcaaatttatacctctaatctagacctagtctctgaattccagacatatattctgctgcctgattgacatctccatgtcaatatttaataggtgtctaaaagttgtcatgtccaaaatggagctcttgatgtttcccaaaatagtaaatcctacagttttcctcatcccagttaatggaaaatcatcatttctctcatacgctgcttccagtctgtcatcaaatccacctcaagtatattcaaaatttgaccacttctcaccagcaccactgtcattatcctgattcaagcctccatcatctctcatcgttactgtgacctcctgatcattctccttgcttcagccctggcccctgcaggcagcattcagtattagcagtagagttgtttctataaaaatgtagtcagctgggtgtggtgtctcacgctgtaatcccagcactttgggaggccaaggtgggaggatcacttgagctcagtttgaagaccagcctggtcaacatggtgaaaccctgtctctactaaaaatacaaaaattaactgggcatggtggcggg

SEQ ID NO: 4053 - DNA, 1046 bp, Homo sapiens
agaatccccatctgtctagggagagacctggtgggaggtgattggatcatgggggtggtttcccccatcctgttctcatgatagtgagtgagatctgatggttttataaggggcttccccccttggctcttcactcttttctctcctgctgccatgtgaagaaggtccctgcttccctgtcaccttctgccacgattgaagtttcctgaggcctccctagccatgtggaactgtgagtcaattaaaacttgtccctttgtaaatcacccagtctcaggtatttctttatagcagcgtgagaatggactaatacagttaattggtactgcagagagtggggtattgctataaagatacccaaaaatgtggaaatgactttggaactaagtaatgggcagaggttagaacagtttggacagctcagaagaagacaggaagatgtgggagagcttggaacttcctagaggcttgttgaatggtgttgagcaaaatgctgatagtgatatggacaatgaagtcctggctgaggtggtctcagatagagatgaggaacttcttgggaactggaataaaggtgactcttgctatgctttagcaaagagactgacggtattttgccactgccctagagatctgtgaactttgaacttgagagagatgatttagggtatctggtagaagaaatttctaatcagaaaaacattcaagatatgacctggttgattctgaaagctttcagttttatgcattcacagagagaaggtttgaaattggaacatacatttaaaagggaaacagagcataaaagtttggaaaatttgcagcctgcccatgcaatagaaaagaaacacccattttctggggagaaattcaagtggtctgcataaattggcataaataatgagaagccgaatattaatggggaaaatgtttctggggtatgtcagaggtcttcatggcagtccctcccatcactggcccagaggcctaggaggaaaaagtggttttgtgggctgggcccagagccttgctgctttgtacagtct

SEQ ID NO: 4054 - DNA, 1864 bp, Homo sapiens
aatattttctcatgtattgaatattttttgaatagaaaggaatcttaacttgagctctttgaacacttatggatccaaggatgacctttatgaaatccatgtaccctctgaaattccgtgtacaattttgcattatatgtacatatatatgtggttttgggtgaaaagaattgatagctttttcacattctaaagcagaagtatgactctcaaaaatgagtaaatagtcttctatgatctcatttaaaatggctatatagaattctgttactgatttgctgtaattctttaagagatttcttattgctagaatttagattgttgataatttttgcctatttgtaaacagcactgtgttgcattctatactctatacaaactctatacaaacttcttttgtatagaggatttttgtgagtttagtgtcattggcctatactttctgaagcattcttttgagattaatttagtaaattaactaatttcataaattgcagaccaaaaataatttggaatactagggcaaaaatcttttcagttgttaactcttttaaaaatctgaattaaaagtcatattaatttattgagtagtgcttatttcacttcctacttttttatatagagaaatataatttgcgatcactgatttataacattcttttctcagacaggagacaatttatccagcatgttgctagaaaatctaactgataatgaaagtgaaaatactgtaagtctttccacacttactttgtgtccattcttcctgtcattgttatttgcatgctgcttggttttataaagttagccaatattatccaagttgtgaaattcctaattcttattttatatttgctcaagaatcttaagaagaaggtatttgaaaaggaggcccatatccaagaactttcttgtttgtttcagagtgaaaaggtaagcaaaatttgagcttttgagcttaattcattatattaatattgactcccttttttttcccatcctggccccaactcctcagaaataaacacagaaaagtgttttgaaattctagattatttggatattttacaggttttacctatcaaatataacatcttaattttattaagtttttttagggtttttatggtgtttgtcaggatacttggcataaatcacttcatataggaactgttttaaatttgtattgtgtttcagttggggaacaaattaaggaattttagtgtttgtaggagcattttaggtatacccatacctttatttagaaagatagatgggaattttaaaaaagaaagccattaaataaaaaatgttgggggataaaacttagccctggttgggcatgaaatacatttgtaataggggcggcagtttatgtaaagtagtgctttgctttttatcagctgtttagattgtgcctaaatcagggtaaaattaaagatattgggctggggatacagcaaataatatggatttttttggttttctctttctctttgttacaggcaaatactttgaaagcaaaccgtttttcccaatcagtaaaagtagtacatgaacgactacagatccaaattcataaaagggaagccgagaacgataagttgaaagaatatgtaaaggttatatataaatatatatccatttttatagcttaagtgataaaattaatgaaaggccataaagccttccttagttctagaatttggtggttttaaaatacacagttgttgacatgggaaatacatatttaaggtaaatcttaatatttgtggcctaactaaaggtttgggtacaaatttcaacataaaaatgctgtctctgtttaataccaatctaggaaggatttatggaattgaattac

SEQ ID NO: 4055 - DNA, 1008 bp, Homo sapiens
ccataattctataaatatttattgatgcttactgtatgacaatcactattccagtaatgaagatgttaaatggtaagtattgttattgtatcttatatttgctccttggttaataataagtttcaattatgaaccatcaaacatttatatactcatatattggccatctttaaaaaacattcaagtcaatatgtattataactgcagcctttctcatatgcaatattctgaatattgacctctagccatttttcaaagtaccctaatagggcttctctttctactgttttacctcctgactactaaatcttacttggccctagcctttgaaactgtcttcacttgtgtgacttcattatctcctagctttctgctacttctaacatttctttctcttctgttctggcatctcttctactgcctgcacttcaaacgttgttgttagtcagggtctattatcttgagattttcttctcttctgactctaccgaatggtgtcccactccctcagtttcaattacagtacttatctgatgactaccaatctatatctttacataaagttttgttagaaattgtatttcttatatttttttacttccatgggacatttccatttagatgatttcataggtaccttaaaccaatatacatataagaatcacctggagatcttcttaaaatacagagtacaattctataaatttgggatgggtcctgagagtctatatttcttacagtcctacagactgtggtccacatttttaatacaaaggctttaaacacagcatgtccaaaaactgtattaatcctcttctctgttaaaagtataccatcttccctgtttctataaatggcattatgatcaggcaaaggcataagcatgaaacacaagaatcatgattgatctttcacacgttatatccagttagtcaccatgttgtgtctcttctccctcagtaataaccttcatagtccctttctcttttctgtattttcaatcaggac

SEQ ID NO: 4056 - DNA, 1028 bp, Homo sapiens
attaagttaacctattctttctttctttcttttttttttttttttttttttttgagacagagtcttgctctgctgccaggctggagtgcagtggcgtgatctcggctcactgcaaccttcggctcactgcaacctccgcctcctgggttcaagcaattcttctgcctcagccccacgagtagctgggattacaggcatgcgccaccacgcccagctaatttttgtatttttagtagtgacggggtttcaccatgttggccaggatggtctctatctcttgacctcgtgatccgcccacctcagcctccctaagagcggcaattacaggcatgagccaccatgcctggccaaattaacctattcttaaagttttattgctgcagtgacccttagagatcatcagaattcttaatctgaaatccatcattggtttcagagtccatgaacagcctgcattaaagcgaaattctatcagattctcagaagggtcagtgactccccaaaaacgtaagaattgatccagcccaaagtcatcaaactgttaagaatcattgtctttttaggtcacattaaggtagttttttaatcactactttatgcctttctgtattttccaaactattttaaataaacatgcatagggcatgtgttgttgttgttgttgttgtttttaattaagtaaatgctgttttagaacctgaaaaaataaagtccatctttcttgaacctccataaaaaacaaatctaaaaaccaagaagaaatgaaatggatatgatacgttcttaaaattgccagccttctcttatggtcacagcatttccaagtatattcctgccctataaaaagaatagtcaggctctgcaactacaaaaaaagtggtgtttaccattgaatccatttcagctgaattcattgcaataaaatatttgcatttgagttttttataatgagcttttactataaagagaatgtgcaggttctatagctagaaaagagatacttaccattgaatccatttcagctaaat

SEQ ID NO: 4057 - DNA, 1050 bp, Homo sapiens
ttgctttaatactaacctttcgattttaaataaaatagtttccaaaatgagaatctatagctacaagcagtacctcataaggaaagggaaaaaaaaaaaagtactgtaacatttgtcttgcttcagtcgatgtttatggtttaccttttcagattaatgcagttaatctgttgaacaaagagcctactgttttaccattttgcaatttttgccctattaatataacatagtataaggcagtattcctcatccctgcctgcccattacaatcatttgagtagtaattaaaaatactgatgcatggatctcacccctagatatcctaatttagtttatctggggtaggttttagggatcagtaatgttcaaaatatttccaggtgattctagtgtactgtcagggttgagaactccgctctaaggtagtttgaatttgaaagcttgagaaaatttggagtggccattttcattacagacgaacaatgagtaatatccctgaatagtccctgaactgaaaattctattaagtagacatgataatggcctcacgtacacaacttgaacttaaccaatactgtggaagtattaatcttataataaaagatgttatatattgagcatctaaaaaatccaggcttttcactttttttggtgacttcttatagcaattctggaagtaaataacccttttgttgagacagtaaactgaagctcagtgaatgacttacccaagggggcatactgcttgtaagtggcagagccagaactggaccacatacaactttgatttgacagcttggactcttttcactataccatgccgtatgaaaatttgatatttagtttgactcaacttaaataattagtttatcaaggttttcttaaggtcatgtttctttagagccgtggttattgttaccaacaaaaatactttaagtgcttcgtattggaaagtagagtatttctgacttggacaggtttataaatgtgtaatggtgctggtggtggtggtagtggtatgatgatggcacaagagttaacaaatactgc

SEQ ID NO: 4058 - DNA, 1024 bp, Homo sapiens
atttaaattataaagtagactggaaagatcatttgagttgtccagttaaaactaaattggtaagatacctgtgtttgtagtgagaaaaaaatgttagcatatttctgttgtttccttccagtactgtctttgacttgtacatgctgaattctgtttgaagtattatggtttgtaaagctttcaggcataatgatgtgttattattattggtagtaaaggtttgtttttaacagtaagtgcattttcggagttctaaaagaaaaacaagcaggcaagctttgaaatgttagtattcagccaaaatttaacccttgatttctctgtatctgaacctgaaattccaagtatctcaaaaatggcttgcaaagccttacatgtttttcactttactggttcacatataccagtaaaacattttaatgtttagaagatttctttacatataagttattctttttcttgcatgtaaataaaatctaaacaagtttttaaaacttgattttaaatagatttaagacatacaacttaactagtttagtagaccttttgctgcccctctgttctttttgctgaggtattcacatgggacaaattgctgaataaatctgtatgagccatcctctccttatctttaagctgttctatgggctgtactactactcaaccaacatcctttttcactgaaacaccaaactcagaaggactgaagaacaaggggcattttataataaacagtgtttaccacacacacccccttgtgattagggtaaattgagaggtctgctatttgacaacagatatgccaaaactgtaaaccaaatgcatgtaaaagctatttttacttactgccttttcttagtagttcttcataataccccagttttttggtataattttagtagaaccaaacttgcaccacaaacctctaaaattaattatattcctattcaattttcattattaatggagctatatgttgtatcttgacacatttcagcagttgcagctcagcaataaaagtaga

SEQ ID NO: 4059 - DNA, 1027 bp, Homo sapiens
ccgcccctccccccgttcgggtccgcttattggacggaagagcccctgcgcttcgctcttggttcggtttacggttggtttcctctgccacagagctcaatcaagacgacattcaattgggtaaacttggagaagaaggcggggctaaaactggcgaaggcgtggcttcttggctgcttgacgaagtgtcgtgaataaaagaaaggagaccgcagaagtaaagaagtggggagtttaggcaagtgcctgatttgggtaatcgaaagcacccagtgattgtatttgatgacttttaagctttcatatgccgttatttaatacctgtcacttccaaatgagagatgtaagggcaacggccgttagcgttctgttttggatcaggctctggagtggacgcccctagcttaggggtccttctaggcagccagaaacctgcggaaaatggtagcgatggcggctgggccgagtgggtgtctggtgccggcgtttgggctacggttgttgttggcgactgtgcttcaagcggtgagtgtagatcaccttcgcagctgccacagggagagtaggagtgattgcagctgagaaagacgcaacattcggtcctggttgaaaagggtggggaggactgcgcttccttaatgactgctgcggccagaatgcaacgtggcttaatttctcggttgatccttctccttccccgccttgggtttctagcagcagttttctcttgatttcagattgtcttgggtacgtagcttctcttatacggctcttgctaaaaacaatctgtaaaccacaccaggtgggaggggggaataataaagcttggcaagaagtggaggttgtttttaaatggacagaaatgcaagagactcatgacgagacttccaactcttagaggcaagtcttcaagtcgttggtccaggcgaacagtttgtgtttacctctctcgcgcgcgtgctctctcattttcactacttctgttagtctcttaacttccgttctcctctgctattcatatacggct

SEQ ID NO: 4060 - DNA, 1047 bp, Homo sapiens
ttcaggttaggtagaaatatatgacttttttttctgcttggagattaaatatggtttaggaaaatgtgtataactgtcaagttttcaagggatagacagtacgatttttgttgtattaacttgacacattaaactgtgatgttgctgtgaagatattttgagaagtgattaaagtccataatcagttgcctttaaggaagggagattatttgaggtaatctaggtgggcctgattcaatcattaagaggacttaagagcatagctgtttcctgaagaggaaacttcacctatggacagcttcagtctacctttcctgaggacccacgtgatggatttcagacatacaatcatgtaagccaagtccccacagtcaatatcttaatatgtatctcatactggttattcttcagtggttaaactctgactgacacagaatatgtgtgtatttatttattatttgtaaattgtttttctatattttcctgttgggaggattatattgtcttattgatttgtaaaggctctttgtatattaaagatatacatcaaatatgttaaaaaaaattttctcatcctcctattgttttctctttattatgcttttaaatgtggagaactttttaatttttataaatttatatttattaatgctttcttttatgacatttgtgtttatatttagaaatccttatattttatagaaatgtaatctgcttaacccatttctgtaaatgtgagcaatagatgtcatggataatcctggcaattgctaagcaacattccattactcaatactgagactgagcccttttataaaaccctgtgacatactccctcaattattgaattgttctctccagtgtttaaattccaggcttctctaagatgctttaatttggcctggcttctgcctccaagcatactatgttacttccaatagacatttcctgttctagctgcagcccaatgtgactagactcatggctctcagctattagagtagttcttggaacaataaggagcatgaaaacaatattttttcccct

SEQ ID NO: 4061 - DNA, 1049 bp, Homo sapiens
gtggctcatgcctgtaatctcagcactttgggaggccgaggtaggaggatcacctgaggtcaggagttctagacaggcctggccaacatggtgaaaccccatctctactaaaaatacaaaagttagccaggtgtggtggtgcacgcctgtagtcccagctactcgggaggctgaggcaggagaatcacttgagcctaggaggtggaggttgcagtgagctgagatcatgccactacccttagtctgggcgacagagtgagacttcatctcaaaaaaaaaggtgtgatgaacattaaagttaactgagaaatttgcagttaactctgtgggaagtatcactgagatgattagggtttcatctttaaggtatgattgaatgttttacaattagaatgtatattatgtttataattagaaatggtagattttaagatgaactatatggcttaagtgaattgatttatttaattttttttcttttagaaatatgtgccgtatcacgaatttctaagaaagaaattggtcggtgttttaaacttattttgaaagcgctagaaaccagtgtggatttgattacaactggggacttcatgtccaggttctgttccaacctttgtcttcctaaacaagtacagatggcagctacacatatagcccgtaaagctgtggaactggacttggttcctgggaggagccccatctctgtggcagcggcagctatttacatggcctcacaggcatcagctgaaaagaggacccaaaaaggtagggttcgtcatcaggaagtgtggcagtaaactgaaatttgcagcatgtgattgtttttccattttaagtctgaaccgggtaaatagcaagaaacccacatttgaccaggcgcgggggctcacacctataatctcagcactttggaaggccgaggcgggaggatcacctaaggtcaggagttcgagaccagcctgatcaacatggtgaaaccccatctctactaaaaatacaaaaattagctgggtgtggtggtggggcttgtaatcccagctattcaggag

SEQ ID NO: 4062 - DNA, 1031 bp, Homo sapiens
ttctccagttcctttgcaactagtcaaaagtgctcaaggagggcttccctttatggaaaaaggcaaagtcttcttgagactttttaatcctttttgtccttttcaccctctaccttcttcctgcctagaatgtagaagcgaggcctggaggtgaagcagccatcttccattcatgccacagctagcatgagggtgaatgtctatataataaggatggcagagcagaaagatgaaaagagactggaactctggaagcagtttgaagccactgtacctacccctaccttgtaatggatgagacaaataaacccctatttgtttaagccactgtagtacagttctctgttatttacagatgaatgcattactgatataggttacatggtacaaagatcaaatttctcttctagaagataagttgacctgaggaaaagtcctgcaatgcacagagagaagccagtcagaaggctccaggaccccaggaaaaagacagtgaggccttgaaggatttagtatgagaaaaaggtaaattatcacaaatttttgtcatttgtaaattttttccataattcttatgatgaaaataattatataaccacacacttaccaaatattaaattaaaaattatttccagataaaacaagtctacttggtctcagttggataaactcaagagtaaaacaacaaaacaaaaacctcaaccatgttactgacacatgagaatttcattttattgctgctctgggaatacatctaattactcaataatgccaattaaataggaagttcacctgctgacaaacagctatcttgggatatatcagaataaaccatagaaataattggattttctaatcaatattaacttcatcatattatacacttgctagtttccttcatatttagcaacaacatttgtttcttatgtttagcctttcatttgtgacaacaatctcatggttaaggaaataaaggctgggagcagtggctcatgcctataatcccaacactttgggaggccgaagcagat

SEQ ID NO: 4063 - DNA, 1172 bp, Homo sapiens
ttatgtttaataaagtaactgccaaactgtttgttttccaaaggggctatacccttttatattcccaccagggttgtatagagttccaactgccaacactcagttttcagccattctgatgggaatctagtggtatctcattgtggttttattttcatttccccgggtgactaatgctggtaagcatcttttaaggtactttttggccagttgtatattttctgtgaagtggctgtcaaatcttttgcccacttttaattggattgtttgtcttattgagttgtaaaagttctttatatatactgtattaaagtcctttgtaagacacatgttcgtaaatacttttctttcattatatggctcagaatctggcaactttttaagagatacttgagcccactgaatgatatatagatcttatagtttttttaagtcaagccttaataataattaacattttttgagtgttcatctctcagtccctctatggccatgaaggtgggagatgtgactctgtttagtctcaagtaaagaaatgcaaactgagataatgggtacaaatggagatgaagcaaagccctgtgatgttcaagttcctggtttctgttaccattcagtctggctggacctctgcctttcccatggtaacatgacctttctaatgaattctcccttttcatctaaactgtttcagattgagtttctctcacataactaagagatctgattactatagcttcggagcttctaaggcatcttatgcacttgtctcttccccactgttcaatctgaagcatgtactctgccctttagcaaaaatcacaactccaccaggtgtggtggctcatgcctgcaatcccagcactttgagaggccaaggcaagaggattgtgtgaagccaggagttcgagtccagcatgggcaaagcaagaccctctctacaaatgaatgtttgaaaaaaaaaaaaattaaggccgggcatggaggctcacaccaataatcccagcactttgagaggccaagacaggaggatcacttgaacccaggagtttgagaccagcctgggcaacatagcaatattctatctctaccaaaaaaaaaaaaaattaagaacaaaattagccaggtgtggtgccacatacctgtagtcccagctactcaggaggctgggg

SEQ ID NO: 4064 - DNA, 1044 bp, Homo sapiens
agtggtgatacccccaaattatttcttattgtgttatttgagtcttttctcttttcttatttattagtctggttagtggtctatttcattatttttttcaaaaagccaactcctgcatttgttgattttttgaagagtgtgtgtgtgtctctatgtccttcagttcatttctgattttggttatttcttgtcttctgctagcattggtgtttgtttgctcttagttctctattcttttagttgtgatgttagattgttaacttgagacctttctagctttttgatgtgggcaaagctttttgatgtctctgcatttagtgctataaatttccctcttaacgttgctctatctgtgtcccagggattctggtgtgctgtctctttgttctcattggtttcaaaatcttactgatttctgccttaatttcatcatttaccaaagagtcattccagagtaggttgtttaatatccatgtagttgtgctattttgagggaatttcttaatattagtttctaatttgattgtgctgtgtctgaaggactgtttatgatttcaattcttttgcatttgctcaggagtattttacttctgattatgtgatcaatgttagtgtacgtgccaagtagggatgagaagaatgtgtattctgttgtttttgggtaaagagttctgtaggcatctatcaggtccacttcatccagagctgaattgaggtcttgaaaatctttgttaattttctgtctcaatgatctgtttaatattgtcagtggggtgttaaagtctcctattattattgtgtgggagtgtaagtctctataaaagcctctaagaacttgctttatgaatctgggtgctcctgtgttgggtgcatatatagttaagattgttagattttcttgttgaattgaaccctttaacattatgtagtgtccttctttgtcttctttgatctttgtttgtttaatatctgttcagaaactaggattgcaacccatgcttttttctgtttgccatttgcttggtagattttcctccatccgtt

SEQ ID NO: 4065 - DNA, 1082 bp, Homo sapiens
gaaatcacacgtcttctgcatcgctcatgctgggagctgtagaccggagctgttcctattcggccatcttggctcggccttgcttacttttgattttagaggctcataggcagaagggacttgccttgtctgagatgagactttggactgcagacttttgagttaatactgaaatgagttaagagtttgggggactgttaggaaggcatgattgttttgaaatgtgaggacttgagatttgggagcggccaggagtagaatgatatgatttggttgtgtccccaccaaaatctcatcttgaatcgtaactcgtacaattcccacgtgttgtgggagaaacccagtgggaggtagttgaattatgggggcaggtcttttccacattgttctcttaatagtgaataagtctcacaagatttgatggttttaaaaatgggagtttccctgcacaagctttctcttgcctgccaccatccatgtaagatgtgacttgctcctccttgccttccaccatgattgtgaggcctctgcagcctgtggaactataagttcattaaacctctttttcttctcagtttaggtatgtcttaatcagcagcatgagaatggactgacacaggtaagatcagggagaattccctggattaccaggcagagactcttgttctcttcccttgcttttccccaaacaaatgaagtctctctttctatgtttagctgcctggaactgggagaggattgatgcaagagcccctgtggccaccaccactgggactgcaccaggtcagaccaaaactcagcacagcattgggtcttgatgaaggcccgaggcaaccactgcctggttcctgccaatgttcactcaaggcccaagggctcttcagttagcagttggtgaatccagccaggcttgtgtcctatccttcagtgcagtgatctcccccataacccagggtgggtcccagaatactgtctgggagcgagggcttggagatgggaaccagagcctggaatcaggaatgttatgaatctacttggtgttctattctactgcggctcagctggcaccaatgccacaaaac

SEQ ID NO: 4066 - DNA, 1050 bp, Homo sapiens
agaggccgactccgggcgctgggcccggggcgggcgggcggcctccgggcccgcagaacaaagcccacacggccatcttgagacggtaaacagaccccctgcgtaggccaccccgcctcctgccagctgcgccgaccagccagaggcagcgcttaccgtcctcgaagtccatggcagaggctgagggccgtcggccttggcggcgctaggctgagctatggccggcggcgagcgtccgcgacccgcgattccacacgatcactccgcgcgaccgagagcggcgcgctaccagcccgggagccgcaggccacagcgaggctggggaggcggggccgaccggcgctaccagccccatcggcgcggcctgctattggctgacgcgggctggtgggcgggccctcgcgtggggggcgggaagcaggtccgctgtcacgctcggaggtgctgaccctctggagccgctgacggggaaggaaggtaaaaaaggagcgctaaagattggcgggggttgtgggaaagcaagccgagtgtacgggaagggccggctgcggcccgccatgtttgaacctggcaagagcgaaagaagccggttggaatgccttcttcctgcccaaactaataaaaccgcatgcctaccttttgcttagtattggctagggatgactaatcataacatttgtaagtacttacggggtttcctccatggagacacagaagtctgggacgtttctagaagcctgtggcaaatttgaaaagcaagatacaaaatagcgtatggagtctgattatcgctatgtcaataaattttcttaaaggacaaagcactgaaataaaatggaaataataattcttttaaaaaatttttaaattatttttatagagatgggggttttgccatgttgcccaagcaggtctccaactcctggactcaagcgatccccccacccccagccccgtctccgcctcccaaagtgttaggatcacaggcgtgagccaatgcgacccgcctggaaagaattctaaaacatggcctgcttggccaccgcccag

SEQ ID NO: 4067 - DNA, 1027 bp, Homo sapiens
acagtgacagcaaaggaataatcttcagtttgtgtataatgaggtctgaaatttccgtcgccacatattgatcatgaatcttatttcactagataaactgacagcagagtctcagttacttaaacaaaattttgaagaaaatcaacattatcacccacatctatggcttttttttttcctactgtcactttcatggttcagttattttgtctatatgcagtgatttccagttttttctggattcctcaatagtcaaatctttcctcaatcctacatatatgctcctacatccttaaaaatatgatttaatagaaagacaactggtttggcaggcagaaaaactgagttctaatcttaactctgctgttaactagcaaaattatctaggctaagtctcttaacctcagctttcttatctgaaaaatttattcctccaataggtatttattgagcaggcattatgtgccagacactattcgaagtgttcaggatatatcaatgaaaacaacgaggcctctgccctcagggagcttacattctagaggaatcagaccatgaaaaacatatgcaaaagacaggataattatattatataattgcaggtgcaaagtgttatgaaaaaattaaaaataaactgggagtggggacaggttgcaggtcaggagagacctctgaggaggtgactagaaggaggtgaaagggttaccatgagggtgtctggaggaagaatattccagaaaaaattcctaacagtgtttcctcagtttttttttcccctttagattccatttatgcttgtttacctcagtgaagatttacaatatgtacgaccattaggccagtcttgtatattattccatacatttctttgaatagtcaacaaatgaccaactattccctctagagctagccccatgggtcctaggtacaagagcctgttgccttgtatttactttcagggacttctgtgtggtattttccactggaaaggtcaggtttatattatatcaaacatcacatgaggatt

SEQ ID NO: 4068 - DNA, 1044 bp, Homo sapiens
ttgcccaggttggagtgcaatggcacgatctcagctcactgaaacctctgcctctcgggttcaagcgattctcctgccttagcctcccgagtagctgggattacaggcatgcaccaccacgcttggcttattttgtatttttagcagagacggggtttcaccatgttgaccaggctggtctcgaactcctaacctcaggtgatccacctgcctcggcctcccaaagtgctgggattacaggcgtgagccaccacgcccagcctagaaacagaatcttataggctgggttgcacataggcaggtatggacatataagtctagatttacaagtaggtcacactgacctgaaaccacatttcctgtagtatgcaattagactgaaagaaagtcacatctgtgttttccacattgtgatgtgatgcactgcaggtcttcagtgaattcgcttgccacaaggaaattctggcatgtgttgtatgtgaaatgtgatatgtacttaatttaaaaaattgagtttcgtgatttctgtgtctttaaatttgatacacgttttgtattgaatttctatgttaattgttttcataaagtgaaaagaagtaaaaacctcaccaactggttttatgtagaagaggtaaatctgtgacgtttgctccttctcttgtccaggaggatgaggctgtcactactacagttgggactgtttcatactccgtgctcttgtgctatgccagggggtactgtctaacccacaagtctctgccaggaatgttgctgtccacactggagtgtaagacacctgcggagctcgtctatggggctcatgttggctgaggctctgaactacagaactgcaaacaaccaagggagcgccccaggccccaggtattcctaaaccttagatcagagccatttgcagcacagagttgtgtgctgtttcaaaaccacagaccctgtatatacgcccctccattgcagaggtggatgtcttggcaaatgtaggacgaggattgaaaattaaaaaacaaacacaccgtgttcagggtg

SEQ ID NO: 4069 - DNA, 1023 bp, Homo sapiens
ctgcagtggcatgatctcagctcactgcaacctccgcctcccagactcaagtcatcctcctaccttggctccccaggtagctgggacctcagctgtgtgccaccacgcctggctaattttttgtatttttggtagagacagggttttgccatgttgcccaggctgatcttgaactcctgagctcaagtgatactcccgtctcagcctcccaaagtgctgggatcacaggcatgaaccaccgcacccagccatgactgctcagcttctatagatttaagagttcgtgcaaatattttaaaatttgagtctaaatattaaattttgtgtatagtgtttgtagcttcaggagtggggagagggtagttctcagtatggtccaggtagttgtaatagaagcctggtgagtataatttgaagtccatctcttttaaagagagaggttcctgtctttagattccaaaattcacatgtggatccagagtacagaaaaggtagaggactgccatgagaattgagaagtggtagaaagagtcctggactgggagtgggaactaggtttatcatgtcccaattatgtttcttgaggcaaattttagttttcctcataggcaaaatgtatataattgtaatatctactagtctactttgcagggtagtttgtgccttatctgagatgaagtaaatgaaacacttgctgtgcatgcgcaggattttgtgtgctacaatgcaggttttataggtgaaggtaatgcttatagccctggagttgtccaaatatatgaaccaaaatataaagaaagctagaaacccacctgtgggaacttgggagaatagaatagttttagcgtggataccagagacaaatggatagtatagtcattactcctttttcagattcataggaagtaccctgttgccattgcaagagattttgtttttacacttcctgaagacctgttgtgtataaagtaaccttaagatagccccctttatactatcaagctcaattctgcagcagtggca

SEQ ID NO: 4070 - DNA, 1336 bp, Homo sapiens
actgatcgcccatttttttctattggggtgtctgtctttttccatattgactcttagcaattccattaatccttaggttgtatgtgttgcagatatcctctactttgtgactgtacttttcacttgctttatggtgacttccaataaatccttttaaattttttagtcattttatggcacatgttcttggcttttgtatgtctggtgatgcctttatttggttaattttttttttcactgtttagggtttatttgatgttttagttagtatggatattcacttaattctagaatgatatttttactgggtatggaattctatattgatagttattttttcctcacagattgaggctattccatcattttctgccttgttcttggaagttcagttgttgctcatcttaaaataatctgttctctattttctggctgatttttagacatttatattaatctcgagtttttaaagttttcctctaatatgtctgtgggaatttttttgttgttgtcaagtttgagatctctgctgggattctggaaatttcctggctgttatttatctctcaactgttttttctgccccattttctctctctggttcttttgggactctaaatataagttaaatccttctcactgtgctttctagattttttgtcttctctgttttctttctctttgtctctctgtgctgcattctagtttcttcccctgattttctcagcgactgttacttcagttatactattattcagatctagaatttccattggctctttttcagatatactttttattgtttttagtaccctaggttggcttttatttctttgaatatggtgcaaatagttatttttacattctgtgtttgatagttctgggactccaaaatgtgggtcagattctgttagtagttgattttttctgcttgttcatggcgtcttgttttcttatatgcccatatgtttgactatgtggtggacattgtatttgaaatgtattatagaactattttcaggcctaggacagtatcttctcccataggattttcatttacttctgccaggtgtctaggggtgctactagttcagaacaccctaatccaagttcatgtcttgcatttacctggcctactaagatgacccaaagtcaggctataagagctatctcatgggaaggctggttttacaactggttcaccttttgccctgtgggtatagttttgttcttctagccccatgaggccattgaaagtgcaatttagttttatagctatttattcagatcggacatttccccctgggcaaaactaaaatgtatccctgctggatgg

SEQ ID NO: 4071 - DNA, 1029 bp, Homo sapiens
catctgtgatatttcaaatgacagactagaatcacttttcatccccactgcagaagatagctatcatatttatttcaacaatgggaacttgttttcttattttgagggccagccacattcaattatagatctttcatcagtagccatacctttactacaaccttggtttttcttatcacaaattattgaataatacctgtaatagtttaggcaaacgacaactgtaataataaataaaatttacagaattgattcttcatactgcatggttcttagattagaccagaagtcaaggtgaacaaagagtgcatataatctaataaattattgatttatttcttgttaaaattttagataagaaaaagaaaaaaatacttataattccctacattaaaaattcatcatatgccccctagtcttttttttctgtttgtagaatttttcctttaaaaaaaaaaaaaaaagaatttgctatgtagaaattgaccctttattctattagcagtagatccatgagcattttcatgccactaaatattcatcttaaatatacttaaattttttacaattttccattatcctatacattatttactcctccattattactcatgttatattgtctccaggattgggcatcataaagaatacttttgtcggcccagcacagtggctcatgcctgtaatcccagcactttgggaggctgaggtgggcagatcacctgaggtcaggagttcaagaccagcctgatcaacatggtgaaactccttctctactaaaaatacaaaaattaactgggcatggtggcaggcgcctgtaatcccagctacttgggaggctgaggcaggagaatcacttgaacccagaaggtggagattgcagtgagctgagattgtgccattgcactctagtctgggcaacggagtgagactcagtctcaaaaaaaaatgtttttgatgattattcttgcagtaaattgtacacatccaaaattatttccttagaataaatttctagtagtagagtta

SEQ ID NO: 4072 - DNA, 1047 bp, Homo sapiens
taaagaacttaatttgctcaaacttacacagttaataagtagcaaggttgtaattcaaatcagggctatcttacctaatctttgtttttaatcactattctctaccttacacaggcggtctatttttgaatttcttatttttaaaataagaaattgaaataaaaataagcaatggaaaattctaaaatgaaggtgggtttgttcatttatttatttatttattttgagacggagtctcgctctgtcacccagattggagtgcagtggcgcgatctcggctcactgcaacctccacctccctggttcaagcaattcccctgcctcagcctcccgagtagctgggattacagactcatgccatcatgcctggcaaatttttttgtatttttagtagagatggggttttaccatgttggacaggctggtctcgaactcctgacctcaggcagtctgcccgccttagcctcccaaagtgctgggattacagccgagagccaccgcacccagcctgaaggtgggtttaaaatggggactattctggtgaagactgaataaataagagtctaattaaaaagagcagagatccaagaagtgcttaggcctaaattagactttagaggagttaatgttccattctgattattcaagcagattatgcaaatatccaataaggcaagatatctccagtccagattttattagtccattaaaaaaatgcttttacttcatctgaaaattctgcaaaacacaggattaattacttataaataactggtagtaaatctccatttaccaagaatgcacttatgaagattatctaaaaaatcttcattatcagagagaaaagtaatgtaggatgactgggaatatgtttaggtcctgaagaataaaagagggtgttattttaaaaatatgattaagtactaccaaaatattagaagtactaggaaatagaaagcgtgtgtttggcagtcctaggcaaagaaaaggaaaatgagaaactgaagaaagcctagggtcttattttccacacccagtagccacttt

SEQ ID NO: 4073 - DNA, 1070 bp, Homo sapiens
gagcaaagacttgaaccaagatgaaatagtttgccatgagactatctgggagaaagagcattccatctgaggaatagtcaatgctaaggccttacgctagtagagaacatattcaagaatagtaaaaacaaaacaacaacaaaaaagccaatgtgtctacagcagagtgagtgagttggggagaggagtaggaaacgaagtcaaagggttactaggtagtagtatctctctgtaggtcctttcaggtcattgtaagggcttttccttttttatctgagaaaaacagggagtcattttagagttttgagggacattatctgtatggatcactccgattgctgtgttgagaatagatggtaagtgtgtaaggatctgtccttgtactaataccagattagtcagctgatgaagtcctagtggatctgggtatagcagtgatgagaagtgattggattctggatgtattttgaagataatagcagtaggaattcctgatggtttagatatgaggtgtgagtaaacaagaacagtgaaggttgctccaaggttattggcctgaacaactgatatagatgaggaaggctgctagatatgtgtttgggaacctttcttttgtacagtgagagaagggtgatctttaaaagggagatgggtaagaagaactagagtattgcaaatataacatccagatcaattttagggaaagagtacttacggaagttgaggaactagaaattaatacttgacctgcatactctttgagaagtctgtctgtactttcaggggcatacatagcccagtttgaagaccactgttcagatcaaccttagtaattatgttattaaaatcttctatattcttctttactttttaagtctgcttgatttgttaacctttgggagaatcgtttaaagcctccctctgtggctgttgatttgtcagtttttctttgtacttgtaaaagttttttatttttatattttatagccattttgttgtgtgccaagagattcatgaatatctctatactttattaatgtataagattcatcattaccaggcctagtact

SEQ ID NO: 4074 - DNA, 1045 bp, Homo sapiens
ctctacctgtgctctataaatgaatcagcaaagcctggatgacagttcacctgttacagcatggtttatgaactattttaagcctactgttgagacctgctagaaaagactccttttcgaaatatgctcattgacaatgcacctggtcatccaagatctctgatggagatgtacaagatgaatgttgttttcatacctgccaacacagcatccattgtgtagctcatggaacaaggaataattttgaccttgaagtcactaagtacatttcataaggctacagctgctgtagctagagtgattcctctgatggatctgagcaaagtaaattgaaaactttctggaaaggattagctattctagatgcaacttaaacatttgtgattcatgggaggaggtcaaaatatcaacattaatatgagtttggaagaagtcgatttcaaccctcatgtatgactttgagggatgcaagactacagtggagcaagtaactgtagatgtggtagaaataggaagaaaactagaattagaagtagaacctgaagactgggtgccatggctcacgcctgtaatcctagcactttgggaggccaaggcaggtggatcacttgaggtcaggagttcaagaccaacctggccaacatggtgaaaccctgtctgtactaaaaatacaaaaattagccgggcgtggttgtgcaagcctgtaatcccagatactcaggaggctgagccaggagaattgcttgaacctgggaggtggaggttgcagtgagctgagatggcaatactgcactccatcctgggcaacagagtgagactctgtctcaaaaaaaaaaaaagtggaacctgaagatgtaactgaattgctgcaatctcacgataaaacctgatcagatgagaagttgcttctctagcgaagaaagtggtttcttgagagggagtctactcgtagtgaaaatagtgtgaacattgttgaaatgacaacataggatttagaatattacgtcagtaaagcagtagcagggtttgagaagattgactccaa

SEQ ID NO: 4075 - DNA, 1219 bp, Homo sapiens
cttttattactcatttgctgagtgttttgcttttttcatgaaacagtgttgaattttgtcaaatgctttttctgcatccattgagatgatcatgtagtgttttttctttgttctattaatgtgatatgttacattgattgcatttcttatgttgaactaccctggcattcctggggtaaatcccacttggttatgttatatgatacttttaatatgctgttggtttcagtttgctagtaagttgttgaggattttggtgtctgttttcataatggatatttgtagttttctttgagtatctttggctttggtattagggtaatgctggctgcttagaatgtgttaggaagtgttgtctcatcttccatttctgaaagaatttgagaataattagtgttaattttgtttcatagaatttaccagtgaaaccgcatagtcctggatttttccatttggggaggtttttgattattagttcattctctttacttgtactaggtctgttcagattttctatttcttcttgacttcattttggtaatttctgtgtttctaggaatttttctgtttcatctagattatccaattttttggcatccagttattcatagtattctgttataattcttttaatttttaaggttggtaccagtgttcccccacttctattcctgatttttcacttgtgttcttctctcttttgttgttgttgtcaattcctttgtcaatcttgttgatctttttaaggaaccaacttaatttttttaattagaggacggcttaggtaggggtttcttgtttttgtttttgagacagagtctgttgtccaggctggatttgaactcctgggctcaggtgagcctcctgcctcagcctcctgagtatttgtgactaaaagaaccaatattctcttatctttattctaaagattgattattttcttctttctactggctttgggtttagtttgctcttctttttcctaaggtaataattccctaaggcataaagtgagatggctaatttgacatcttcttttttaatgtaggtatttacagctgtaaattttcctctacatgctgcttttgctgcatcctataagtattagtatgttgtgttttcattttcatttgtgtcaagattggccatcatactaaatctcatctgtggggaatgcagactgaagctgagataaacttacactggcataccctgtttt

SEQ ID NO: 4076 - DNA, 1025 bp, Homo sapiens
cccatgccttctgagagctttacaaatttagcttttatattcagattgttggtccattttgatttagtttctgtacctggtgtgagacaggcttccaacttcattcttttgcacgtggttatccagttgtcccagtaccatttgttgagaagactgttcttttccccattgaatggtcttggcactttgttggaaatgaattggccatagacgattgggcttatttctggactcttaaatctattccattgatctgtatgtctaccctgcttctactgccacattgattactatagttttgtaatcagtgttctgaaatcagggagtgtgagtactccttctttttctttctcggtactgtttttgttgttcagggactcgttcagttccatatgagtttgaggataagcttttacaatcctgcaaaaaggcctttagaattttgatagggatagagttgaatctgggatcactttgggggaattttgccatcttaacaatactaagtcttgaaatccatgaacatagatgtgtttccatttaattaagcctttaagtttttctagcaatgttttgtagtttttagcgcacaagtcttttactttcttggttacatttattctttttttttttttttttttttttttaggagttttgcttttgtcgcccaggttggggtgcagtggtgcgatttcagcttactgcaacctcagcctcctgagtagctgggattacaggtgcccactaccacgcccagctagtttttatttttagtagagacagggtttctcgctgttggccaggctggtcatgaggttacacttattcttctggttattttttaatttttgatgctattgcaaatggatttattttcttaattttctttttggatcattcgttgctggtatatagaagcacaactgatttttgcatgttgctgttgtgcttgcaaatttgctttatttgtttattagctctagtagtttttttgtggatgctaaggaattttctatgaatagaat

SEQ ID NO: 4077 - DNA, 1034 bp, Homo sapiens
agacataatttttgctgcctagcacttgacatctaataccataattgttaaggtatttgtgtaatgtattgttttctagggtcacatatatagctataaaagatggtgctctgtgtctttttaaaaatttaaatacaatacttacaggaaaatgcatgaagtgtagggtacagctcagtgaatcaccacaaagtaaacactccatgaccaccacagatcgagaaatagaatactgccagcaacccagaaaccccctatgtctcttttctcagtcactatccctgttttttctttcccaggttaaccacttgcctgacttaaaagaaaataacttttttttacttgtttctgaaatttttcagaaatatacagaagtattattttgtctagcttattttgttcaacattatgtttgagagttagaaattttgtcagatgtcgctatggttcacttgtataattttatcacaatttgtcatgttactgtaggaggtttgggctgaataatgctgctgtgaacattcttgtacatgtttcttggtgcatatgtgcaacatttatactaggtgtataccaagactagaatctgggtcattggtttgaccagtgtatgtatgttcaaatttagaagatgacacatgaattgttttcaaaatggttgtatcaatcacatcaagtatatgaggattcctgttgctctgtatcctcactaacactcggtattaatatcccctttaattttagtcttctgaaagatgcatttccctgatccaaatggaattgaataccctttcataaatgtactggttgtttgggtatccatttttgcaacgtctcttctcctatcctcaccaccttaacaaaattactattgagctttctaacttactggtttataggaactatatggtttatacatacagccctatttttcctattggagtttctgtacttttccttttgtttttaggagtttttatatgctctaaatacagactctttgttagttacatttaaaaaatatatacattcca

SEQ ID NO: 4078 - DNA, 1047 bp, Homo sapiens
atctcatttgcttacggtgtataatacttttaatgtgctgtttaattttgtttgctagtattttgtttgaggttctcaatctcttttctacctggataaatgaaggcatacagataattttcataataaagccatactacagtgtatatttatagttcagtggaatgtaagtgatagtgttttttttttttttttttttgaaatggagtctcgctccattgctaggctggagtgcagtggtgtgatctcggctcactgtaatctccgcctcccgggttcaagtgattctcctgcctcagccttctgagtagctggaactacaggcatgtgccaccacgcccagctaatttttgtatttttagtagagacagggtttcaccatgttggccaggatggtctctatctcttgaccttgtgatctgccctcctcagccatatatttttttaatagataatcacttatataccctggtatttggttgtatatgcttcacactaattacaacacttgataatcatatgatatctgaactctagaccattgttttcaattatggctgcactttacaatgtcaaaggagatattcgcacacacaccattgccagagtcatttagattggaatttttcagaaggggactgaacattagtagttttaaaaaagtcttcaagtacagcaatatttaaaaattctctagattgttttggctacaaatacaagttgtatggggtgctttaaaaagtctataggccttggtaaagtggaatcaaattccaggggaggagttgcacaatctgtcatttttaaaagtttcccaagtttatctgaagcacagctaggttcttagtactggtctagaattttctcagcgacaagaaaggatagttagcaatttattttgattaagatcatttgcaagggccctgaatacaggttttctattgtatgggctgaaaggagatccatatgttttaaatgtcaattatacaggagctaagttgtttacttaaggaaattgacataggtgcttatccagatattaatcta

SEQ ID NO: 4079 - DNA, 1051 bp, Homo sapiens
cctttaagccatgcctggccgtagtttgtcttctttattagagtatgagtttgaaggtagataccatccatgtctcgtttatcttagcacagtgctgggaatactgtgtgcattcagtaaatgttttgttaaacattgaccaatgaaaagagttctcccaggcaaatagagattcagaatgctagctggaatgggatgggggcattggcacttgagttgctgttgggccataggaaggagccactgaggataatccacagacagcattatagacattttagaaagagaaataaaatatttcccaagtcttcattcaatccagttgaaatacagtggctagtaaaatattcttaattcagacctaaagtaagactgtcattgttgattttgattagtatttccaagtggaggtattaatccatgttgcagaaatttgaagtgtttgctatgaagagtattttctttgtgggtttgtactagttatttctttaaagattttggaatgttagactaatacaagtagaagattgggaacactagtcacacgtgtaagaagtgaagaaaacttttccttatttctctgaaggtaaaaaactgttaggatggaggaagaaattgtagaatcatagcctggaactgtgataacatttttgattcccacagcttaggaagcttgctatttgtttaaaggtacttaaatttttttaaattgtagatatgtaatgtagcatatataaactatatactttttttgttttgtttttgagatggagtttcgctcttgttgcccaggtgggaatgcaatggcacagtctcagctcactgcaacctctgcctcccaggttcaagcaattctcctgcctcagcctcccaagtagctgggattacaggcatgcgacaccacacccagctaaatttgtattttttaagtagagatggggtttcactatgttcgtcaggctagtctcgaactcctgacctcaggtgacccaccctccttagccttccgaagtgctgggattacaggtgtgagccactgcacctggcctaa

SEQ ID NO: 4080 - DNA, 1170 bp, Homo sapiens
tttttttttttttgccatatgaggtaacattgtcagatttcagggatcagggtgtggaagtcttttgtggggcaatagttcagcttatcccactcagtcgtttataatagacttttaatgttcttacttttattttatagtttagtttttaacaggcccccatgtccacttctgggttggtgggagatgatggcattgggtggcagagaaaatatctcatcttttctagatacgatgcagaaaattctaggtctgtggttctaggaaggacaaatcagagatgatagtttggaaataaaacagttaaagtaacctagcttgagaacagaggtaggtgtggtggtgctattttttaaagaatagagaatttagaagagtcacaagctagtttcaggtatggggaggaggagatatgtagagtgtgggacatactgagttttcagaagttctgaaatatggtaaaattagtaatggtggatatatttttggcaaatgcatgttcagtggattgttggtgtagaagtcactttatactagattaaagattaaattgaagatggggagtattgatacattctattctctagaataatgatgcttggcatttagtaagtaatcagtgttggctattatgataattactgtggttgctctaacaaattactttgttatatacttttatgtgtatatacttttatgtgttccaatactataacatttttgtcttcagctgtttggtgtgtgtcttgatatgtacataatattaaataaatactgatctagaaagatgtgtgttttagtaattattttaattattgccattgccatactattaaaattaatgaaaacaatttagaattttttttaaaaaaaagaattagtttcaatttctcatttgaatagattattatttctcaaaaaaagcagtgaggttggggggcacttagcaatagtttcctaaagattaaaatgatggtattctggttgaatggtttttttatgttatatcaagaaatataatttggtttgtgttttttcatttaaaataatagtgtattgtagctatggttattcatgcctgaaacaaaaaattaaaccttggtcattgtgtgtatttctttcaggtttgatttaattttggatgagatcgttcttgcagcaagatgttaa

SEQ ID NO: 4081 - DNA, 1017 bp, Homo sapiens
tgtggcaaagatagccactggctgctctaacctacatcgttctcataactgtttccactgaggattcaagtgacactttcccaatagtttttgcaaatgtactaagaagcattctacatctcccatttagtcccatccatgaacaaattactgtgctaggagaacagggtaatctgatcagcctgagagtcacttgtttatccttccattcaggtgcctaggattggggccactgtaatagttgagtaagaatgtgtccctatctggaaattaaggttactattagtaaaaatagaggcaatattagaaatagaagattgctctataacagtttttatagattttggagtgtcctgaaaaatttccttgtattgctggatccagtaaagttgtctaggaacaatatttcacaaaaaaattataattgaatggtgacattacttacaaaatgattttggtcagtttatgtgtctctgagtttgaaaaattttgtgacagaatgtcttgtagagttactgctaataaaagaatgaaatagatttgttcctttttccccccttgtcttcaaaagttaagagacctaaatcaaatgtcaatataaaataactcctagggctaagaaaaacttattatggtattgttaagatagagttgctctgtcagttagctaattattgtgtaacaaattactttgaaacttggtgatttaaatcaataaacattttgattagaacaagtctgtgagtcagccaggtggcgtttctggtcttgactgggctcatttatgaatctgcatttagcagcaggtcaggaaggtggctctgcttctcttggctgggttctctgatatatttgggcattgactggccataaggttgatctaggatggcctatattgagctggctgtagtttggtctaggatgtgctgtgacgtctgggataccctcccattctgaagcagatgagagttggcttgttatcatggtggtggcaaggttttgaaggaaagagcagaa

SEQ ID NO: 4082 - DNA, 1048 bp, Homo sapiens
caagaggtggagtctacagaggcaggcaggcctccttgagctgtggtgggctccccccagttcgagcttcctggccgctttgtttacctactcaagcctcagcaatggtgggcacccctcccccagcctcgctgctgccttgcagttcgatctcagactgctgtgctagcaatgagcgaggctccatgggcgtgggaccctccaagccacgcgagggatataatctcctggtgtgccgtttgctaagaccattggaaaagcgcagtattatggtgggagtgacccaattttccagatgccgtctgtcacagcttccctttgcttggaaagggaattaattccctgaccccttgcacttcccgggtgaggcgatgcctcgccctgcttcggctcatgcttggtgggctgcacccactgtccaccactccccagtgagatgaacccggtacctcaattggaaacgcagaaatcacctgtgttctgcatcgctcacactgggagctgtagactggagctgttccttttcggccatcttggaaccgcccccctccccttttttttttaatatcttgtaattttttgttgaatactgcacatttaaaataatgtcacaactctgataatcagattctcctctctgccccagcgttgtttgttattttagtgattttttttttgaaactaattctatgaaatctatattctttgtcacatatgggcactgaaatctctgctcagttggcttagtggtcagctaatgattggacagagatttcattaaatgcctgggagcaataaatctttttgttgaagttatgtgtgtgttgggatgctccttcaacacttaaccaggcagtttacaactctgccttactttttacttcctgcttgtgtagagcctcaggtttagccagaggtgagcacttaggtctttcctgggcgtgtatacagccctttctgtacatgtggctctctagagtctcaggaatatgttggagctttacaaagcccccagcttttctttttaaagcttttagtctattgtttg

SEQ ID NO: 4083 - DNA, 1698 bp, Homo sapiens
ttttcttagttgagctaaaggtttgtcaattttgttcttttcaaagaaccaacttttgggttgattgattttttttttctctactgtttttctgttctctatttctgctgtgttctttatttaattttttcttttgtctgctttgagtttagtttgtctttttctaatttcttagaaaattaggttatggatttaagattttttttaatgtagtcatatatagctataaatttccctgtaagcattgcgtttacttcatcccataagttttagtatgttgtgtttttgttttcatttttctcaatatactttctgatttgcaatgcaatttctttggcttactggttacatagatgtttgttgcttaatttccacatattaacttaccaatttccttctggtattgatttctagtttcattccattgtggtcagagaacgtactctctatgatttttattcctttaaaatttattgacacttgtctgatggcctaacacctagtacatactaaagaacattccttactctgctgttgttaggtggagtattctgtagagtttatagtgttcaagtcttctatttccttgatcttctatctatactatccattactgaatgtgaagtattaaggtttctaactattatttttgaattatattctgcctttcaattctgtcagtttctacttcatatattttggggttctcttattaggtgtacacatgtttataagtggcatgtaattttgatggattgacctttttattgttacaaaacattctctgtagtagcaattttttgtcttaatgtctgttgtttctgctgtgagaatagctgcatcaactctcttttggttactttctgcatggtataactttttttatcttttactttcagtttatttgtatctatttaatctcaagtgtgtctcttgtagccagttatagttggattatgttttttaccccttctgcctatgtgctttttgtttggagtgcctgattaatttccatttaatataattaccaataaagtggaatttacatctgctattttgctctttgttttctatgtgtctcattgttttttggggtggttattcctctagtcctgtagtgctgccttttgtgttaaatagatattttcaagtgtatcacttaaatcacttgttttgtactgtatacttttagttcatttttgtagtggttgccctgggaattataattaacaacttaattttagtctagttgaaattaatactgtaaattttaataatatacaaacattttgctcctatatagctctattccctctccttccttcgtgctgttattgccatacatacatccttttataccttttaaatcagacaggagaagaaaaagttacaaagagaaaacagttatactgtcttttatatttacctatgtggttaccttcaccatgctccttatttcttcagatggattcagattgctatctagtgttctttcatttcagcctgagggacactctttagtatttgtttaaatctgtaaatgtcttaatttctccttctgttatgaaaaatagttgtagaattcatggtcgagtctttttctttcagtactttgacaccattgccatccggcctccatggtttctcatgaaaaattagttgttaatgttactaaagttgtttgtctgtgacaagttg

SEQ ID NO: 4084 - DNA, 1035 bp, Homo sapiens
tttttgtctttctactgtgcttttcaaccttggttattcatgtatcaccttcatctgtgcgattattaccatttaactgcagcaagtaaagacgttaatagtgaggtttttgggaatgtggtaaaaccgggaggtatatttgactttgtccaagttatctgatgaggcagatcagctaaagcaaaatacagtgggttgctccctactatcactgggacctagagatttcatctacatctctgaaaaatggggtttctgtatgatagtatgggtgagaaggaatgacagcagaactatcaactgttttctgattatcctgatgaactagtggtataggaagcttttctgaaaacgctgctctgaattgcttgcttaagtagttgcttttttattcctgtgtatggctccagagttcttgggaatagccctacctccatttgtttgtagatgagagaaagctgaaccttctgctgtcagtggagaaggcctagaattagtctagaactggtgctatagggccctggaatgcttcaggaattggtggctgcagggacctctgaaggaattgtctaaaagtctgtataacaagtaagcaacactcatggtttcaggaatggatctcttgcctcatccaagttttcttctttgacattcaacctgaggatctctgtacttgagaacagtaggcatagttcaggttaagggcatcatactggaaaacagggagaattaaataaaaatctgcatgttgatctgagagttattcccagtctctttttccctcccagttctgagaatactggctgacaagttcttgccccatctagctgtgagattaaaagattcatcctgtgacagcaaactgctgagatcaggaaaaatatctaactgataacagatgtggcccagattgataatcctacagtatgtctactcattaagacagaatccctaggcaacttttaagtgcctcaatcttaaatatgagattaaggatcaccaaacatttgaggataaccttaatatgaaagagaa

SEQ ID NO: 4085 - DNA, 1076 bp, Homo sapiens
atatattggagggtgcctaattcgtgtctcatacatgagcacttgataaatactgaattaactgggtgcattggctcatgcctgtagtcccagcactatgggaggctgaggtcggcagatcgcctgaggtcaggagtttgagaccagcttggccaatatgatgaaatatcccgtctctactgaaaatacaaaaattagctgggcatggtggtgtgcacctataatgccacctacttgggaggctgaggcgggagaattgcttaaacatgagaggcggaggttgcagtaagccaagatcatgccactgcatccccacctgggcgacagagtgagactcagtctccaaaaaacaaaagaaaaaagataaatattgaattaatatttagagagaattaatatgacactacagaaaatgctggaaaaaacatcctaacaaagcctagtcgatcttcaaaagggaaagtgtttcatttagggaatattgatgttctgtgattaacaatatgatggagattgataaagaaggatgagaattgagaaaaggtttttagatttagctattaattggttacttgtttttaagtattttttttaggtataacatacagtgaagtgcacaaatcttaagtacaactcagtgaatttatacatataagtatacctaggtaactcccaggtagtgggaggtactgggttacacctggggagaagaggatgtaaaaaaagcacagacatgagaattgtggaatgcaagcattttccgtgattagagcctattttaaatgaaatacccagatagagatgtagaatatttttcttcactgattaaaggtgccttgtgctccctcctattaatttctccctacagaagtaaccactattttaacctctaacctctatcaccataaattagtttttgcttgtttctttttcttttccttcctttttttttcttttgagacagggtctcagtctgtcaccctagctggagtgcattggcgcaatctcagctcactgcagccttcacctcccaggctcaagcgatcctcctccttcagcttcctgagtacctggaa

SEQ ID NO: 4086 - DNA, 2070 bp, Homo sapiens
cagacacacacacacatagaatcacaattgcaattgtaattatgcatatataaagaggcaggatatgataaagtttgaaagtgtaagccttgaagtaaaattgacagggttcagatttagctgtgtgagcactaggcaagtggaattagtaattaccatcttcaaagaggtttagggttgatattacataattcatgtaaagtccttagctttctggcatacaatgctgagtaaagtaagtgttacctgttagagtaataatagttattattaccattgtttaattattctttctacattaacttgagattttcacctgtgagtgatttgcagttgtatacttttgctaatgtcccattttaagccatgccgataaagacaaggttgttatagaggaagtgagaggtaggcatcaaagtgtgccttctctgattctagcagcagaatcttataaccaggttaaatatttcaggaatgcattcccagcactgtcagcagatgagtagatacacttgggaatgagtacattttaatgaagttatttcccagccagtgcattggtttgtctttgttataacatgctgaatttcttcactctcctttcaatttttgactgtgaggccatgtggtgactattagtagagagaagaaggtgagtggctatgcgtatttgtaatgtacgtataaacccaagatgagagtgaggagtggctggtaggtagctagattgaggcgggtggaatataatcttttcattggatagtctgagttgggaatttcccaaacagcatttccttttgctcttttcctctccacactttgttttgtatatgtctgtgctggtatggtgttaaagttatcagttccccctctttaattttctttctaccaccaacctcctcctagcacaaacacggattttaagcttataagcaaatttgtcaaagacagctagtaaaaataattttaggttcatttgaggaggggtactagtatgaaattgtaagtttttcatttatgcttgaaaaatacagcaatttggaaagtgagggaggggaagtcacccataatcttattaccattatataattattagtattaaagacagatgacgttaattaagcatctactatattcttttaataatcctgtgatgtatatattcccactttacatgtgaggaaacacatccacttaataatggagtagccaagtttgaacctaggtatatcttgagaaggtctagagaggagacctttctgttctaccttcctgttcttcttacatatatatccttttacctagttgttacacaatttgtaagtttcatctcctagttttaaaacttagcattataaaaacatttttctccccccccttatttcaagtggtgtcgtattgctctcattgtctattcataccaccatataaaggctctttgtcttggctgctggacattggtacaatgatgttgaccaaaatggatgctgccctttactgagtgactaagatgaaaaaaatcaggcttaatcagaactaatactttatgggatttggattgctacaggtttaatcatgctatctatccttgctggtgggacatttgacttagaattgtatataagtaaaatatagatgaaaaattgtataatttatagctatctgaaaacaacttttttttaatatttgaacactttgaaatgccttacacttccttgttaaaaatcttaaagggatattaaaattaaatggcacttaattactattagtaattcctaatataatatttaattcataaaagaaaaaagcttaatgttgaattctggcactcatcgggaagatgacattatatgttaagagataatttgtggggcatagtaactatagttaatattgcatacttgaaagttgctaggagagtacattttaagtgttcacaccacaaaatataactatgtgaggtaatgcatgtgttaattagctagatttaaccattgcataatttatatgtatttcaaaatgtgttgtacaccataaatatatacaatttgtatttatcagtttaagaag

SEQ ID NO: 4087 - DNA, 1029 bp, Homo sapiens
tattcttctcacttcaaaaacttttcctatacagtatcacccaagcccgtgtctttaatcactgactatgttttgataatttctaaagctgtatctcccatctagacctttctttctaactccaaatccatctgtataatcaccttcctggacatatccacctaacagttaacatatcagacatgtcagcatctgaactctgtcttcttcttacctcactctacaccttttctttttgccttagctcaatgaatgaactctttactttgttaagctgctaaagtgtccttctaaatagctcaccccacatgtaaataatcaccaaatcttaattattttgcctcctgcacatctctcatatttgttatttccactctatcctttctgctgatactctagcttaagcattcattctctcttgtttactgcaataacttacttttctctctgctttcagtctcattatccttcaatccataatattcaaagtgatctgacagacatatctggttgtgtaaaccttctgctgaaacatcttcaatagttatcctttacctataagaaaaacaaaaaacaaaaaaatctccttaatatggcaaataagcttcaacgtgatctagcacttaactacctgtgcagacacaatggaccctgccttctccaactttgtgctccagaaatcctgaaaacttacagttctccccaaattctctgttctctcatattgctgtgtcttttacatggtgttctcccttcatagcataggttccctttgctcttgccctgcttcacaactacagctctatcaagctgaaattccgactactcttccttcatatgttatcacctcaggagtctgtctgtcatgtggtatcaccttagaagagtatgtcttacttccattgcaggtttagatcctccttcctctgcattcccattgcactctgtacaaacttccatttttagtacatatatacattgtgtgtctcagtgtgtgcacatcaacatacaaaagtagagtaatgtgaa

SEQ ID NO: 4088 - DNA, 1130 bp, Homo sapiens
agatagagatagatcttagcctgcaaggagggaggcagggatcttagcttgcaagaagggaaggaggaggggagggtaggagggattttagcctccaaggaggatgggacagagaaagcccttggaggatcttagcttgcaagaagggagggaggaggggagggcaggagggattttagcctccaaggaggatgggagagagaaagcccttggaggatcttagcttacaaggagggaaggagagagggagagagggagggagagaggggtcttagcctgcagtgcaatcctaagaacatttggcaaagttgataggaactcttatagatgtaccttagcatccctgccatgctcagtcattgactggggccatctcatgaaagtatgatctcggtgtaaacatgatgatgattcagagcacagcagctggggccatcagtcactgacacgtcttgcagtaggaggtctgaaaggtacattctcatgtcctccatgctccctaccactgtattttatgaaatatcctgaatttcctgttagaatattaatctttgaaatatcctgaatttcctgttagaatattaatctttgaaatatcctgaatttcctgtaagaatattaatcattcagtagctatattaatagcaagttgtttctttatttccttgctttacttgcaaatctttaaaaattacttttcattccctctgctttgactcattttccttatgctttcctttctaggttatgtttttctgtcttacctaggaaagcttcatctctattaataagccaacaagtattaagtcttttcttaaaacctttcattttctctatcaggaagagaccttatattaacttataaatatttagggtaagaggaccatctttaaatatactgcaatggttaactagttctcgtggtaattataatcttgatatttcacacccttctctcagaagctcctttttataaactaatccattattcacatgttggctgaacatattcaccaggatcctaattgagagcctggctacttctctattcctgattgttagttttatctattgtaccatgtccttggtgcttgtaactctgttggaatgccaaaaatcttttcttcttc

SEQ ID NO: 4089 - DNA, 1212 bp, Homo sapiens
tatttcttttttttgtttgtttgttttaaaaatcttttttttttttttttaattttttttttttaattatactctaagttttagggtacatgtgcacattgtgcaggttagttacatatgtatacatgtgccatgctggtgcactgcacccactaacgtgtcatctagcattaggtatatctcccaatgctatccctcccccctcccccgaccccaccacagtccccagagtgtgatattccccttcctgtgtccatgtgatctcattgttcaattcccacctatgagtgagaatatgcggtgtttggttttttgttcttgcgatagtttactgagaatgatggtttccaatttcatccatgtccctacaaaggacatgaactcatcatttccggggacagtgccaggtggggagtttgactggggctgtacacctgtcaaacggtaacgcaggtgtcctaaggcgagctcagggaggacagaaacctcccgtggagcagaagggcaaaagctcgcttgatcttgattttcagtacgaatacagaccgtgaaagcggggcctcacgatccttctgaccttttgggttttaagcaggaggtgtcagaaaagttaccacagggataactggcttgtggcggccaagcgttcatagcgacgtcgctttttgatccttcgatgtcggctcttcctatcattgtgaagcagaattcaccaagcgttggattgttcacccactaatagggaacgtgagctggaggttctatttcatagacaagactgatgaaatcactggccattgctaattaaacttgatcttcagcccctgaatggataagtcatctccattacttattctataagatgtgaatgttttattaggaaccttaacggttacttcatcccttagggatattgtgaacaagttacttcgatagattgtcttttgatcaaatataatacagtacagtcataaagtgtttccttgtttttagaactttgcagagaagtagttcttacattgaaatggttattggatatagtgtttgggatgatttaatctgctaatatacttagtttatatcttttcctttttggggggatacacaatgctgatttgattggctaggaaaactgtcttatctggtagcttctgtggcgtgaaatgcagttgctgacaacttttaattcataacaagtctgttaacttattc

SEQ ID NO: 4090 - DNA, 1111 bp, Homo sapiens
ttgcacagtgatatatttctatgtgtatgcaagtacaagtatataatatgtcacctggcacattcattttctcagttgaagaagagaaaatttgaaaatgtccttatgcttttagagttgcaacttaagtatatttggtagggtgagtgtttccactcaaaatatgtcaacttaaaaaaaaataggccctttcataaaaaccaaactgtagcaagatgcaaatgcatggcaaatcctgtcggtctccagttggttatctgaatagtgtcaccaattccaccaagacagtgctgagattggaaaagggcactcatttggattgccttacttctcttgccttaaatatatcccatatatttaatatgtcaaaaagggcttgaggtgaatttcattaaatggaataatatgatgccactttgcagctaaaataagctcagtgatacctccttgttaaaaaaaaaaaaaaaaaaaaagaatgccaggggggaattatcatgctaaattattttactgctgaagatagcttcattgcaaattattctttttccagaatttcccccaaacaacttagaattccataagtagaacaagatagattctacccccaaaatattcataagcaaatcccactgcccttaaaataaggaagttatgcctggttgtctgtgaatggaacctcagtaggtaatcctgatgaagcttaaaaccttagggcagtgtctacatgggaaacaagtatgtggaaattgacaatcatttttaccaaatcgttgagtaataatatgacttacctgatagatatacacattcaataaggaacatttttttttttcaataaggaacattttaactaaaacattactttagggctgagatttccaggctatctacattgatctactgaaaaatttctagatttccatatacaaacgaagaagacatgagtttagagaatttttttcctttaatttttttttaacagaagggtatcagagtggaggacctagattacgctacctgtgtttgaaaatattgcgctttgcctaaccttcggtggaatgtattgtttcagcatattctatgtataaaaaagtttaaagatgtcttcaaa

SEQ ID NO: 4091 - DNA, 1061 bp, Homo sapiens
ccctgtaaatattgtaactggctaccgggtgtgtggtccctgaccacaaaatgaatatgcacggacccatactatttgtatataacacaggcctaattcctgatatgaggatctgtttgttgagaaagtgacacagtgagctccaaaatgaagtcatttgtattttattaaaaaaacaagctggaactcagctcttgtcgaaagatccaaatattacctactatttgtaaatcatgtccctttgagtttgccagaacattcaagtgtgctagttgtggagaaatcgatgggttgtttggatggaatttttttggtgtgatatcatgtctgatgatgagcagcactgcaacttggtagttgtaactcacattgtctattacgagagctgcaggctaatgtcctaactgcggtgcctgaggccttaaacctctcttgcccacaagcatccaaaacaagtggagtccccagttaatagttttcctcttgcctcatgaataaactttgcccagttaatgtctctcaatccagatctgtagtttctttcccctgtgtttgaagagtacttctaaaaactcaaaggttcttgttgaataatgtaagaatccatagtcaatacaattattataataagtacataaatgaataaaagggagaaaaggaaaagctcatctttatagtaaaatgccaactagaaaatctagaaggagcaaaggagttagaaaatgatcattttgcaaccatcataataaaagttgaccaggcaagaattatcaacagatgctaaatctagcagagatggagggagttcaggaagtagtatatttagatattcttaaaatatctttcatacaaattacttattaattacacataaaaaatagtgactatataccttggggatatcccatgataccttaaccaggtgattaaaattcatatcagcaatgtggggcagatggacgctgtgtgcctataaatgagagagaacacagcatcacttttgtggtatttttgccagaaatgcatataacctgaatctaatcatgaagaaacgctgacaa

SEQ ID NO: 4092 - DNA, 1052 bp, Homo sapiens
aaaattgtatgtttgttgcattgcacaggtaactgcagaagacctagtatgaatagatgttgtagaacaggttagaccaattaactcttttccatttaggggaagaatcagcaatgtatgagggatggtgttacataagggatgtggcagatcagatttgcttgcattttctcacaccatcaggaataccgaatatccagcactgtttgaaaccagcatggttagaacaggaactcttggattaggcttcatggaccagtttgtggtcaaagtacgggtttcacgagaaactgcatgtgaaagtttttttagttctgagtcttcatctattaagttcttctgctgaaaggatgacatcttaagaccagcggtgtaatttgtagtttaattagatggatccattttgttaccattgttgctcttagaactttcttactcttttacgatggggttcttaatctgggttaatgggtgcctaacggggagttcatgggccctgcaatgaatgtaattccctgacattgtctgcaaaagtttgtgtgatatggatgttttttgtttggtttggtttggtaaggagagggtgcacacatgcattcagttctcaaatgttccatgactcccaaagatttacaaagaagccagtggtttcgagactggtcattgctgctcctttgagctgcatcccctttggttctaccagccttcacagcttgcatggtcccagtgttcaattccttattacttatcagcccatagacaaagctgttaacctgtatttttatgtgtaaatttgacataggattgatggtcaactctttaaactactgtttggatttccaagctggagatttctggatactctttgtatcatttcttcatgggatatttatttgctgtagtctgcctcagctcggcctttagaccatgagcactggagagtgtaaccacaaaaagcttcaggatattcttatatttgtaactgtagtctaccctgagctataattgatcctaaggaggattttctttttcttttcttttgtctttttttt

SEQ ID NO: 4093 - DNA, 1051 bp, Homo sapiens
ggggactgctgccatagaggggcctttgggtggccccgttaggtgttttctttgtgaggtggtgctttccagcctgccctggactctgtggttcatggtagatcattcgtactgacctggaccagggagcactggtaggagtatctgatttctatgaacagtgcttgctggcactgactcaagaaagaagacaggaaggaatggtgaatacaacttccattgagaaactagagtggaaaaaatgtgcaaattatgctaaaattgtaattaatctgggctgtacaggttgaatatctcttcatcctgaaagaaaaggggaggtcaccatgagaaaatgggattgagggaccataagaactttgtcatacctagttatacatttgtttttttctcttagaacttctgaaaagcttgaagccccagaagcaatagaatagagcttttagcatggttttgttgtgaactaaattcccaacagttcacctttagtgcataagcttaactttctttgatggtttgccattcaaattagattactgtggacagtgtccctaatattgtcactaatattatgatacagtatcagttttacagcaggtttgtgcatcatgaaggaagtcagaacgttttagtgagttacaaggaaaatagccatcaaaagtccatataggttactctgtggatgggttggggagccatcttctggtcttcatccagacttgattgacttaaaattgagtatataagagtgtaaaagatggtaagtgataggcttgaggcagagacacaggcctgcagccagaactggaaaaaaacccacaagtatgaaaagtataggcaaaactataaagcagccaggcacggtagctcacacctgtaatcccagaactttgggaagcagagatggacaaatcacctgaggtcaggagtttgagaccagcctggccaacatggtgaaaccccatctctactaaaactacaaaaattagctgggcatggtggtgagtacctgtaatcccagctactcaggaggctgaggtagggagaattg

SEQ ID NO: 4094 - DNA, 1033 bp, Homo sapiens
agctgaagaaggatgtgctggtgcttaggaatggctgtcaggagccatcggtttgctccttcaaacaggaagggcaatgctggcttcagctaagagcgagagaggttctttccccagacacccagtatgtctctctttgcaatcattggctgaattgactcagcttttcctcccatccttgaatcagtccctggtagagtaatggagttacagtgattggcttaggacagtcagctggagaatcagtcacaccactcaccacagcggcctcctactaaatataaatgtgagcgggacttaaaatagaagaaatgcacatctaacaggaccataacttagggataaggtactggacaaggtaatgaagaggcgatcatggcccttgtttgtgtttcctccgttccctcggcagccttctaggggaccctctaatgtgctacctcactgtgtacctgtctctctatcctgactccacctgtcactctctctcgactctgggagtatagctgcttaaggccaaggcactctgtcttactatttgtggccactgtagctggcacatagcagggacttaatatgggtttcagcaaattgaacgaaaaaggatacttcgtattcctttgtgtttaacttttatcaaacattgcttgaatcaagtggatttttttttttttgagatggggtctcactctcacccaggctagagtgcaatggcactatctgggctcactgcaacctctgcctcctgggttcaagggattgttctgcctcagcctcccgaagagctgggactgcaggcacccaccaccacgcctggctaatttttgtatttctagtagagatggggtttcaccatgttggccaggctggtttcaaactcctgacctcaggtgatccacccgccttggcctcccaaagtgctaggattacaggcgtgagccactgaacctaaccacaagtggactattgatagtatattcattgcacattttataacaagtttattgagatataatacacataccatacaatt

SEQ ID NO: 4095 - DNA, 1046 bp, Homo sapiens
ataatcacttttaaatatattttataataaggatattcatagtggttttgccagaggtgagtggttttgccagaggtggaatataccatcttgtttatggaataggaagttttgcttttggagtttgaggttataaacaaatattaggccagtgctttcttatatgcatgagaatcacccagggatcttgttaaaatgcagattctgttttagtaggccttgatgggtcaaagactgtagatttttaacaggctcataagatgctgataccgttagtctgaggaccacatttgacagcataggtcatctgttttctcaatgcacaaattgtaacacagaaactgcaaacacctagacaatttcttagtgccataaaagggagcttgattttagcatgcctttacaacagctaccttgaacacctttggtaaacttgtttgggtcagagggatccatgtgctggagaggaagttggtttgaggcagtgagttccacagatgcctttagctctctgactgtaagtgtggtgcacctgcagaaaccaggtgcatctttattagctggggctacaccttgacataatcctaacagttgttaaagaaggaattcttcccgcccccaccatttcttccttttatgtgcctcttttgccttgtctcatttcttgccttgtgacttagtagaccaaggtaggagattcgtgttgggtcactgagggcggggtcattggtcccggaacctgtggccaagggactcttcggtaatgagaggtgatatgggctgagtggataaaagggggactttaggtgggttagcgagggtggctctggagttagggactaaaagttaaaagttgggtatacctcatttctgctagcagggctctaattttctagctcaggtttccccattgacttcctactttattctttttttttttttttttttgagatggagttttgctcttgttgcccaggctggagtgcaatggcgtgatctcggctcactgcaacctccgcctactgggttcaagcgattctcctgcc

SEQ ID NO: 4096 - DNA, 1027 bp, Homo sapiens
attttggctagaaatatttcttcagttgacagaagacattccttagtatccattaataaaaatgcaactcctaggaaaggtgaattgaatataaaatgtcactttgttatagagatgaaattttgttataaactcaaaatcaaccaaaataactaagtataccacatgtgtccaagccctaaactcataaggaatagaaagtactataatggaattcctacacaacaaaataatttaggtagttctttgaagtgctctgtataaaagaatgacttgtgctaaataagagaaaaacttttttggatcagtaactactgtttttttttttttcctagatgaagacattgtccacatgaagatactgggtagtttttcattaaaaagatgaattacatttaaaaagttaatttttcatgttatacttttaaaatatgtactagtttattataaaggacactacaaaggatacagatgaagatatgtgtagggctaggtatgtgggaagggacatggagcttcaacgccttctctgggcctgccaccctccagacacctccatgtgttcagcaaccaagaggctcttattaattatttttaaaagctggaaatcagctaaagaaagagagtcttaagcaagcctttggctgggtgcagtggctcacacctgtaatcccagcactttgggaggccgaggtgggcggatcacaaagtcaggagttcgagaccagcctgaccaacatggtgaaaccctgtctctactaaaaatacaaaaattagctgggtgtggtggtatgtgcctgtaatcacagctactgaggaggctgaggcaggagaatggtgtgaacccaggaggcggagcttgcagtgagctgagatcacaccactgcactccagcctgggcaacaaagcaagactccatctcaaaaaataaaaaaaagaattatataaattaatacactcagtgagcagatatctgcaatctctgaaacagtgtcaggccattaagaatggtcctaaagggaaactt

SEQ ID NO: 4097 - DNA, 1026 bp, Homo sapiens
aaaaagagttagataaaagacaagctgtattgcttgatagcacattacagtgactataattagcaacaatatattgtatatttcaatgtagctaggagagaggacaggaaatgttaccaacccatagaaatgatgaatactcaagaggatggataccccaaatactctgacattattatacattttatacgtgtaacaaatacatgtacccataaatatgtaaaatatcatgtatcagtaaaagaaaaaggctggatagagagaggtaaaaataggagaaatgagagcagtcagtgcacataagagtaatatgcttgttatactgtgtggctacactggttaaggaaattcctgctgcatataacccaaatttgccattagaggttaagaaaactttccacttaacaatttaaaaattatacaactaaaacatccattatttaaaaatcaacataaagaagcaaaaaaaaaaaaaaaagaatagtaatcaaaattacaccgttgttgatatactgtattcccttctaggttttgggttaatacgtctgtacattttttcttttttaaaaagaaaatgagatcatactaaaagaatcacactgttttataaccttttttcccattcaccaatatgtactgaaaaacagtattttaatggctgtatagtttttccattatgttaatatgtcataatttactatgaatctcctgttgagttattttaattctaatgtttcactaaacatttttaaaaaacatctgcagtagaatcataacatacatctttatttccccaagataagttgatagatgctaagtgaaaaggtatgcatatttttgagggttttagatcctctctagtattctacttttcctattagtataggataaataagacaagatgactgaaatgaaaaggataggtgtgagacattaatattatcaattattcagcatagacatgtgtagattttatttggaatgctgcaagtaacatgtactacttgggtcaaaataagctcatta

SEQ ID NO: 4098 - DNA, 1506 bp, Homo sapiens
atgtatagttttaagccttagaactggaaatcagtaagcctccttgggtatgaaattaaaagcaggtatttgtgaacatttcaaatttttaattataactattttaaaactcttaatttactttttctagacactgaaagattttaagaaatcttaaaatgtgattttctttgtagtatttattatttctttaaaaacgatctggtaaccttgagagaaaaaatattcttattctcacagcttcttcactcctacatgcttctaaaaatattacagtttatcatctgaaaaatttgtggaattatgctgaacagaatatgtaaaaaatttctttaggctacttttggcatgtgtttttattacctgaagttttatgattatgggctattgccattgaaaacagctaaggttttaacattcaaagatctagatttgcactgtccaatacagtagacagtagacacatgtgactatttaaatttatattaatttttttttccttttgagttggggtctcactctatagcccaggctggagtgcagtggcgcaatcacggcacattgcaataacaacctcctgtactcaggtgatcctcccatctgggattacaggcatgagctactgcgctgggccagtactctttattaatatgtgattatttccatttgagaaatttgaaacattaaaagaaaacgtttggttagagatacatttgctttttaaagtcctgatttagtaatttggttaaaatttttggctgaagagaattagtgaagcttaattgtatatttgtaccaatgaatgattataaaactttatcactgtaatcccagcactttgggaggctgaggcgggcagatcacctgaggttaggagttagagaccagccagtccaacatggcgaaaccccatctctactaaaactacaaaaaaattagctgggcatggtggcagacgcttataatcccagctactctggaggctgaggcaggagaattgcttgaacccagtaggtggaggctgcagtgagctcagatcatgcctctgcactccagcctgggcaacagagcaagaagacaccatcttaaaaaaaaaaaaaaaagttttgggaatcagatttaaaagaatttccattacaaagtaaaactgaaaggatgaaagaaaaaaattttcaacttagaacttctacaagaggaaagtttttcatggatacaaattctttggttatatttttgcaaatattccagtctgtggcttgtgttttaatagtatttttcaaagaacagaaattttaatatttatggagtccaacttatcaattttattcttttatgattcattatttatgggttctaagaagtctttgttaacccagatcacaaaggtaatttcttgtagaaattgtatagttttaggttttacacttaggtcaatgaccccatttcaagtaaactttttatgatatgagatatgggttgagagatttttttttcttttattttgac

SEQ ID NO: 4099 - DNA, 1055 bp, Homo sapiens
ttgtttcttgtcttctgctagcttttgaatttgtttgcttttgcctctctatttcttttaattgtgatgttaggtcgtcgattttagatctttcccactttctcctttgggcatttagtgctaaaaatttccctctaaacactgctttagctgtgtccaagagattctggtatgttgtgtctttgttcccattggttgcaaagaacttatttatttctgccttaatttcgttatttacccagtagtcattcaggagcaggttgttcagtttccatgtagttctgtggttttgagtgagtttcttaatcctgagttctactttgattgcactgtggtctaagagacagtttgttacaatttctgttcttttgcatttgctgaggagggagtgttttacttccaattatgtggtcaattttagaataagtgctgtgtggtgctgagaagaatgtatcttctgttgatttggggtggagagttctgtagatgtctgttaggtctgcttggtccagagctgagttgaaatcctgaatatcgttgttaattttctgtcttgttgatctgtctgatattgacagtggagtcttaaagtctcccactattattgtgtgggagtctaagtctctgtaggtctctaagagcttgctttatgaatctgggtgtttctgtattggctttatatatatttaagatagttagctcttcttgttgcattgatccctttaccattatgtaatgcccttctttgtcttttttgatctttgatggtttaaagtctgttttatcagacactaggactgcaacctctgctttttttttttctttccgtttgcttggtaaataatccttcatccctttattttgagcctatgtgtgtcttttcacatgagatgggtctcctgaatacagcacactgatgggtcttgactctttattcaatttgccagtctgtgctttttaattggggcatttagcccatttacatttaaagttaatatcgttatctgtgaatttgatcctgtcattatgctagctggttattttgccaattagtt

SEQ ID NO: 4100 - DNA, 1034 bp, Homo sapiens
taaaggccgggaagagtgccaacaattattctgaaacctgaagttaattcccaggagcatttaccaccccacatccagctttcctttccctttccatttcctattgtacgtctgctttcttgctgaaagcacttagtcctgttgggtggataagttgcaggtcctaagtcaactaaccttgtggagctcaacgtacatatggtgtcttgttcagtttcctccacctatagctcatgagctgtataaaatcatctgatattttaatattgcctcatcagacatgacaaattgaagcattttcagcactaaaacagaatttgttaacagcaccttttagatatgtttaggaagttggattttttaaaaatagcacatcattagaagtattcaataaatagagaagtattcaataaatagaaaactatttgagggagatttgtcatacagtaaaattatatttgctttttatcttctctttctaccctgttctgatcattgctttccctatatgtgtcacctctattagctagaactacctgaatcatgtgttgttaattggtttttttttagtaattcatttttatataaagatgccaaagaaaattttttttaaattaggtaaatcgtgatttgggatgaaggtttatgagaaaagtagcagtctctttccttcctgacagatctatagtagattcagtgatttgaacccccgttcatccctcttcagctgaaaatagctatttgccatcattgactagtgcttactctgtatcaggtgctatttttttttaacattttgttgtgaaacttttcaaatgtacagcaaagttgaaagaattttatagtgatcattggtttacccaccacctagagtctatgattctactgtactaacttcatcatgtatctatcactccaccctctgtctatcactccgtcagtctattttttgatgtatttcaaagtaaactgcagacgtcagcatactttctccgaaatatttcagcatgtatttcattacattgattaaatat

SEQ ID NO: 4101 - DNA, 1029 bp, Homo sapiens
ctctgggcctctttgagctgatattgtggcttatttttgctttgttatatgcttctcaaaaatgaatggaaacttaagtctcttctgtttctgagtgctcagtaattctaaatggaaaacagagtgaccagtgttctcaaactggcagggttcgttcctggtgtctggaaagtgaatgaaagtacggaaattaaagttaaaaactgtattttaaatgtgcaattcttcatttttgtagtgtcaaggtattagaaaaacacatgaattacatgaattataaagctttctcaatttttcgtttgcttttcagagaacacgtaacaacaaatggtttacaggaccacagttgatttcccttcttgatttggtactttttctcccagagggtgcagaaacagatttactgcaaaactcagataggtgaggtgaccattaccaaagttcacatagtaaattcagaataaaatgtgaaacatctgcttagggaacctaaagtaataaaatgtcttttcctgtgattttatgatctatggctaattcattaagttacataaagatttttcatatttaagtgatttgataatgtgtagaaacaaaattaaaacctcctctttctagatgaatgaccagcactatgatttgatagcttttatgtacccagcattccatagaaatttgcaatgacagcacttgtgacttaaaactaaaaatctgtgtatgtaatttatgtgtttaggttttgttgttttattgttttccaggtcattttttttttcatatagaacatataatttcagtttcagtatactggaatggatattgagaaatggtttaaagcatttaaaaagtaatcttaaaattcagaaagcaagagatgatgctctcaaatattaaagataacaaggctttctttaaacaaggatgataattttcacaattgtatgatttaaacaaatggaaaacagtgataagttattactactcaaaaagatattaatggaaatagtttctattggcaaacctaattat

SEQ ID NO: 4102 - DNA, 1051 bp, Homo sapiens
agacagatcaaagatggattaaaacttttgatcaagttcttcaacagaatttctccttaatgatatgcattttaaaagtgttaaaatttcagtttttgctgtatttttcataagatgaagtatcattctaaaatagtttacaaattcatgataaattttaatattatttttcagaacagaagagtctgttatctccaaaggattggtaagatgtttgttcccattataacttaaatacatagttatgtcaacaaataacagctgttgacttcactatatatgtatctgcatatattttaatctgtaggagctgctggagaatagtttattgagaatagaagacaatagtctactttaccagtacttagaaatcaagagttttcttactgtacctcaggtaaataaaatatgtattctaatattgaaaatagccctttgcctgttctgaacttaaagtaaggtcttttctgattcctttcccactcttttctctgcaacctttgaaaactctggtgtaatgctgtccagtagaactttgacaatatgaaagccactagccaaactgaacacttgaaatgtgactaaggaactattttttttttttttgaggtgtagtcttgctgtgtcgcccaggttggagtgcagtggtgctatctcagctcactgcaagctccacctcctgggttcattccattctcctgcctcagcctcccgagtagctgggactacaggcgcccgccaccacacccagctaatatttttgtatttatagtagagacggagtttcactgtgttagccaggatggtctcgatctcctgacttcgtgatcagcctgcctcagccccccaaagtgctgggattacaggtgtgagccaccacacccagccggaactaagtttcaaatttaaattttaatttatttaaacacgaatagctattagaggccaccattattgatagcacagcatccagtagaaaagcataactttcttcttttaacactttatttctgtagggatcttggaaaatgaagcttctttatgtttctca

SEQ ID NO: 4103 - DNA, 1046 bp, Homo sapiens
ttgacttcctcttttcctaatcaaataccctttatttctttctcttgcctgattgccctagccagaacttccaacactgtgttgaataggagtggtgagagagggcttccttgtcttgtgccatttttcaaagggaatgcttccaattttttgcctattcagtatgatattggctgtgggtttgtcataaaagctcttattattttgagatacgttccatcaatacctagtttattgagagtttttagcatgaagggctgttgagttttatccaaggccttttctgcatctattaagataatcatgtggtttttgtcattggttctgtttatgtgatagattacgtttattgatttgcatatgttgaaccggccttgcatcccagggaagaagccgacttgattgtggcgcataagatttttgatgtgctgctggattcggtattttattgaggattttctcatcgatgttcatcaaggatattgccctaaaattctctttttttgttgtgtctctgccaggctttggtatcaggatgatgccggcctcctaaaatgagttagggaggattccctctttttctattgattggaatagtttcagaaggaatggtaccatctcctctttgtacctctggtagaattcggctgtgaatctgtctggtcctcgactttttttggttggtaggctattaattattgcctcaatttcagaacctgttattggtctattcagagattcaacttcttttaggtttagtcttgggagggtgtatgtgtctgggaatttacccatttcttctagattttctagtttatttgcatagaggtgtttatactattctctgatggtagtttgtatttctgtgggatcagtggtgatatcccctttatcattttttattgcatctatttgattcttctctcttttcttctttattaatcttgctagaggtctatgtattttgttgatcttttcaaaaaagcagctcctggattcattgattttttttgaagggttttttgtgtctctatctccttcagttc

SEQ ID NO: 4104 - DNA, 1651 bp, Homo sapiens
gaacttgcccttttataacagcattaatctcatccgtgagagtggagcccccttggcctaattcccacctccttatggcagttaaatttcaacatgagttttggagagcagagtcattcaaaccatagcagtgcttatgttatttttcaagtaaaattaacttagatttgaagacctagggattttatacttggaagtgttgatttcatagttacctatttcttatgccttagttgtttcaaaagcttgaaatgccctttgctgacagcacaattctttgaacagtctgaagaaggtggaaatgatcctttcaggtattttgcatcagaaataatagtaagtacagctaatttaatctgctataatcttaaatgttatcccactatattctcagtactgcacatgtaaattgatacattcattaataaagaaatgtgtattttttgtagaacacacataaacaaaagatggaaaataaaacagcaataattttattatccaaagataaatattaacatcctccaggcttttttcttatatacttatttataataatacatatatataaatttttcaaagattttatatatatatataatcttgtaatctacctttttcctcttcaacagtatattatgaatatttttccattggcttaatagtgttccatggtatggacttagtataatgtatttcacctgtgccatatagttcaacatttggattgtttctaattttccattattgtaggacaactccaagttttctttttttaactgttaagtctatgataagtaacctagtaattaaatttttgcatacttttcaaattatttccttaaaactcctagagtggaaattccatgccctgtgataaatattttcaaaatagctccatatttaagtaaattttattttaaaagcaatttggctttatgcatcaatagtattttaaaatgtgctcagattctgtattagagaaataatctgaaatattaaaaaatttattttaagttgatgtttctgaatttcaaaagagaaagtccatgtggctgtgtagttttcttcagccatgttcagctacatgagtgcaggtgcagcataggagtaacatttggttgaattagggtggggttttaagaacagggtaagttgtagagagcaagaggggggcaagggattgagcatgtatgtaaggtgatttctttttcaattatactttaagttctagggtacatgtgcacaacgtgcaggtttgttacataggtatacatgtgccatgttggtttgctgcacccatcaactcatcatttacattaggtatttgtcctaatgctatccctcccccagccccccacgccccaaccagccatggtgtgtgatgttccccaccctgtgtccatgtgttctcattgttcaactcctaccaatgagtaagaacctgcggtgtttggttttctgttcttgtgatagtttgcttagaatggtggtttccagcttcatccatgtccctgcaaaggacatgaactcatcctttttaatggctgcatagtattccatggtatatatgtgccacattttcttaatctagtctatcattgatggacatttgggttggttccaagtctttgctattgtgagtagtgctgca

SEQ ID NO: 4105 - DNA, 1028 bp, Homo sapiens
tcctaaccactctgctctacctctggttagtgctgtatggcgtatggttttagggtagaatacaggggattgcttgattgagagggagaggcatcaaaaatgactgggtttctagcctctaaaaggataacatatgatatcaaacagaaaaaggcaacctaagtagagggaaaagttttctgaaggaacaagtgagttgacttttagaaattttgagtttaagtacagcagtcaattggaaaataaggttttgagctcagtagagatagaggaattaagatgtagatctctgagacacatatctgtgagactttaattacctaaagattgggtaattgaagcattgaggagtgaaaaaaaaaaacaagaatttacctgagttcacataaaaggggcagaagagaagaggcccaagatcccatcttgaagaatttaagaaacaggtagagagaagaggcctgccaaggagatgaggatcagcaccacatcagtgaggcagaaggaaaagggaagtataaacaaagtatttttcaggcattgcatgccttagcgttttatttttagcatgcttctgaatagctaatgggatagatttaaacatgtgaggcttagtcttaatagtttgagaatcacctttgcaatatgtggtcagctaaatgcaaaggtttagatattgataagacaatgttcaaaactgactacaggctgggcacagtggttcatgcctataatcccagcactttgggaggccgaggcgggtggatcacctaaggtcaggagttcgagaccagcctggccaacatggtgaaaccctgtctccactaaaaatgcaaaaattagctgggcgtgatggtgcgcccctgtaatcccagctactcgggagactgagatggggggattgcttgaacccaggaggtggaggctgcagtgagccaagatcgtaccactgcactccagcctgggaaacagtgagaccccatctcaacaacaacaacaacaaaaaactgactacaatttaattttcttgc

SEQ ID NO: 4106 - DNA, 1054 bp, Homo sapiens
atgaaactgacttgatcgtggtggataagctttttgatgtgctgctggattcggtttgccagtattttattgaggattttcacaccaatgttcatcagggatattggcctgaaattttgtttttttgttgtgtctctgccaagttttgttatcaggatgatgctggcctcatgagttaaggaggattccctctttttctatcgtttggaatagtttcagaaggaatggtacaatctcctctttgtacctctggtggaattcagctgtgaatctgtctggtcctggactttttttggttggtaagctattaattgctgcctcaatttcagaacttgttactggtctattcagggattcaacttcttcctgctttagtcttgggtgtatgtgtccaggaacttatccatttattctggattttctagtttatttgcatagaggtgtttatggcattctctgatgatagtttgtatttctgtgggatcagtggtggtatcccctttatcattttttttattgcacctatttgattcttctttcttttcttctgtattagtctggctagtggtctattttgttgatcttttccaaaaaaaaaaaaaagttcctagattcattgatttttttgaagggttttttgtgtctctatctccttcagttctgctctgatcttagttatttcttgccttctgctagcttttgaatttgtttgctcctgcttctctagttcttttcaatgtgattttagggtgtcaattttagatctttcctgcttcctcttgtaggcatttaggtgctataaatttccctctacacactgctttaaatgtgtcccagagattctggtacgtgtgtctttgttctcattggattcaaagaacatctttatttctgccttcattttgttatttacccagtagtcattcaggagcaggttgttcagtttccatgtagttgtgcagttttgagtaagtttctgaatcctgagttctaatttgattgcactgtggtctgagagactgtttgttatgatttccgttcttttgcatttgct

SEQ ID NO: 4107 - DNA, 1076 bp, Homo sapiens
gcagttgtaagtttcttctattccaaactttcctttcctttctaccttttttacttattaatgtgggtgcatgttttttccttctaaaaacgtcagctttaactattgcattatatacagttttacatgaaatctacaattttttcattctaaattttatattttttatgatttacttagcttaaaaccaaaaacattttcagcattatgtacctagtattatttcaataaaattcttgaattttttttagttttttttttttaagtactgtagattagaattttggctcttgtctgtgtaataaagtaatgaagaaatcatgacctccagtcgatcacttttactgatttcctgttctgattctctggaaatcattttgtttgtgtggttattactagtctaacctttgtcatgtttacaattcagtgtttaaagaagctgataattgagaataaattttgcatatcatctcccattacatttattttagattttgaaaacagaaaactattaaaggtattctataaggaatccaacaaaattactgaccaaactctgaggatggaaaaaaaagtaaagcctctagaacttagaaatacaaactatgtgattattagatctttccatgaaaagtaaaatacattgttatttaaaattgtatatattacatatcacttacagaaatgctacatttagctcaaaaagctatagctctttgttttataaagattaattatacaaactcaaatgtacgaataggagcttttataatctgatatgactcagtcttggaaacttactgcaactgttttgcagttcacttggtgtcacatgattcacttcaatggtttaaaccctgtctagtagtgatcaaagttcatttggttaggggttttttttggtgtgtggatgacttttttccactttgttgtggattgattgtctttcaaaatacccaatgcagcccttcctcttattcttttgaatctcagaaagtggtagttgtctgcacagtgcaacctccagtcacacacaggggaaattttttttaagttgaaataatatgcatgaaagc

SEQ ID NO: 4108 - DNA, 1058 bp, Homo sapiens
agtggtttcttgagctagaatcttctcctggtaaagatactgtgaacattgttgagatggcaacaaaggatttagaatattccgtaaacttagttgataaagcagtggcagggtttgagagcatttactccaattttgaaagaagttctactgtgagtaaaatgctatcaaacagcatctaatgctacagagaaatacttcatgcaaggccgagtgaggaagtgcagcaaactttattgttgtcttactttaagaaattgccacaaccaccccaaccttcagtaactggccagcctgctgccaccagcatcaaggcaagaccctccaccagcaaaaagatccattacttgctgaccactcaggtgatcattagcattttttaggagtaaaccatttttaattaaggtatatacattgtttttaaacatatactgttgcacacttaacagactacagtataatgtaaagataacttttatatgcactgggaaacaaaattcatgtgactcgctttattctgatatttgtatttatccattcatcagttgatagatatttgctttattcccactttttggctatcataaataatattattttgagcattcatttacaagtttccatataaacgtatgttttcattggtctgagtatatgcgtagtaatggaattactgggtcatatggtaactgtatgtttaactatttgaggaactgccctactgttttccaaagtagcagtaccagtttacattcccaccagctgtgtatgagtgttttgatttatccacattcttactaacatttattatttattttttcgattaagtagtatctcattatggttttgatgtacattcctggtggctaatgatattgagcatgttttcatatgcttattggccatttatagcttcttcagagaaatgtcttatttagatccttcgcctatttttaaattggattgtctttttataattgagttgcaagagttctttacatattctaaatatgtgttccttatcagatacattatttctgatttttaaatatttttct

SEQ ID NO: 4109 - DNA, 1114 bp, Homo sapiens
tctgtttcaaaaaaaaggtctcactttgttgctcagaccagagtgcagtggtgtgatcatagctcactgcagccttgacctactgggctcaagcaatccccccacctcagcctcccaagtacctgagactacaggagcacaccaccacacctggctaatttttatattttgtgtagagatggaatttggctatgttgcccaggctgatctagaactcctgagctcaagcgatctgcccacctgggcctcccaaagtgctgggactacaggtgtgagccactgcacacagcctcgttgctatattgggtgcttactgtataatgtctggtacataaccgtcattcagtagatatttgtatttgaccaaatttgaccagtagatatttgaattttgacaataattcattcatcttctgatgttgtttctacaataaatgatttttaatgtatgcagttgtcactatattcacacatttatcaacttgtatatgttcttttattattaggtcactaccagttaggaaggagaaaatgaattcagcctctgtccaaatgaatttaccattacagagtaggagtgactgagcttaggtcccttctctgaaatgttttttaatggaatttaaacctctgaaaattaatgtatatttattgttggtattaatgactgtaataacatgcaagaagatgccaactattatcagaatttttttgctatcctcacatatgctttagaacccagttttctgtttgaatgtctcagtctaaaggaacttcttttagtagcctgcaaaaataaatatgacatatcttaatcagaataaagagcttcaagaaatttagttatgaagaacaagaggattttaaaatcctgaatgtctctgtggtcccaactttttgtctttttgttttcttctaattgctagagattctgtattggttaaaagaatggatttttgagtccaacctcttattagcctcttatctttgacaagttttttaatgtatttgttggttcactcattcaaaactgaggattctaaagctatctgccttatagttgttgggatcaaatgagaaaactcatgtaaagtgttctttcttgcctacataa

SEQ ID NO: 4110 - DNA, 1051 bp, Homo sapiens
cgggcagccagcagcatactgtctgagctccacctcctgtcagatcagtggcatcattagattgtcacaggagcacgaatcctattgtgaactgcacatgtcaggggtgttggttgcactctccttatgagagaatctaatgcctgatgatctgaggtggaacagttcatcctgaaaccattctcccaccctctctatggactacgaaatctgtcactagtaccaaaaaggttggggaccactaattgttgcaacagtgaatcataatttatctccagccccagcctgtttccccttaccaataattttctaaatggtttaataatttaaaaattatgaaacatgatgtacagagaagttaataaaacaaagttacattgtatgtgtacaaatattatacataaaacttctaaccaaggttaagacagacaaaattgcctgtactcaagaagtctattcagtcacaccctgttccctatcctgacttttatgacaatcactcttttgcctttccttatgattgtgtcatcttcctatacatttctgatctatacagtttagttttcccagcttctcagttttgcatatcgccaactcttcaatctttcaaaatagaaaagtctaagtaagtataaaactaaataaaaggtaatttgagtcatttttcaaacttttttgagtctataataacatttctcttctccctaccactccgttagttcatctgcttaccccttacctgaactgttgttgtaacctcccatccagtttccttttctccagcttcagctcttctacagattaaaaaagctgtctctctaaaacatagaaatttcattgactaccttttaaataccaatcatatcgaaactccttagcataaaatcctttttattattgcccaaactgaatttgtagcttcatctctcaccattatctccccatcctcatcacctacacatacatgctgtattctgcccactgtgaattatcctattcctgcacctatcacattctttcagaattctgtgccattctgcatgttgctgca

SEQ ID NO: 4111 - DNA, 1033 bp, Homo sapiens
tttatcatatttctatattatcaaaactatcttcaaaagaaaattcaaagctttaaaaataaatatgtttttacagggcacagtaactcatgcctgtaatcccagtgctttgagaggccaaggtcaggggattgctggaggccaggagttcaagaccggcctgggcaatagaataagaccctgtctctacaaaacaatttttaaaaattagctgagggcatgatagtacactcctgtagctctggctacttggaaggctaaggtggaatgatcccttgaggccagaagtaggagttccatattacaaggagctatgatcaagccactgcactccaatctgagtgacagaatgagaccttgtctcaaaaaaaaatttttttaataaaaataaatgtgttttgtcacttcttatgccttacttcttgtataatatgataaaagtagtaagttttccctatggacaaaatactatgtttaaaatcttatgtctttcaaagtctttaattatattgtactccaagtcacaatagtctttgctgtaacatctagaattttcttcccacctgaaatttccttttgtctttaaatttcaatttcaaatgtaattaatttccaaacttacatattatattataacttcattttttgatctggatcaaaagtaaccacaacacattatgatttgtatgtttataaaaaggtatcctttatgttctgctggtagtagtccccataaagtgcacatattcagaaaaacctcagacatgagccaactgcataatatatttgtaatcagttgtttaaatcatgctatcgtatgtgattttagcattagtctgtacttttctaaacatcaagaaaatcctaagaatttgccatatttctatacatcttaatcacaaaatagtaaaatttaaatcactctttttgttgattctgaaatatttattaaaacgaagaacctggtatgcaggatttttgtttaaaatgaaatgtaatgtgttacattatttttgaaaaatagaaaattcat

SEQ ID NO: 4112 - DNA, 1313 bp, Homo sapiens
tatcctctttgtctgaacagtaacttactctttatcctcgtgactgtgattcttttttcagtaatcattcatttccaatttttttttattgtggtaaaatagacataaaacttaccattttaaagtatacagttctgcagcattaagtatatttgacactgttgtgcagccatcaccaccatccatatccagaactttttcatcctccctaactgaacctctttgcccattaaacactaacttcccattccccagcaactggcaaccaccagcaactggaaaccaccattctactttgtctctatgagtttgaccactctggttacctcatataagtgggatcatacaatacagtcatatgctgcataaggacatttcagtgacggacagcatatatggtaatggtcccataggatgataatgaagctgaaaaattccttttgcctagtgactatagccatcattatgttatagtgcaacacattactcatgtgtttgtgatgaggctggtataaacaaacccactgcactgccactcttataaaagtgtagcacgtacagttgtgtatagcacataatacttgataataaatgactatgttactggttcatatgtttgctatactatttgttgttttgctatactaatattgctattttagagtctaattctacttatacaaaacaagagttaactctaagacagtctcagatccttcaggaggttttccagaaggcattgttttcataggagatgacagcttcatgtgtgttattgtccctgaagaccttccagtgggacaagatgtggaggttgaagatagtgatattggtggtgctgaccctgtgtaggcctaagctaatatcttagtttttaacacaaatgttttaattttttttttttttgaggcaggatctcactctgttgcccagaccggagtttagtggcacagtcatagctcactgcagactccaactcctggctcaagcagtcctcatcagcttcccgagtacctgggactacaggcacacatgaccacacccagcttatttatttatttatttatttatttagtagcaatgaggtctccctttgctggccaggctggtttcgaactcctgggcttaagtgatccgcccacctctgccttccacagtgctgggattacaagcatgagccactgcgcccagccttaatttttttttaacttaaaaaattttttgttcatcaggtgtaatgactcatgcctgtaatctcagcactttgggaggctgaggcaggcagatcttgagcccaagagtttgaaaccaac

SEQ ID NO: 4113 - DNA, 1475 bp, Homo sapiens
tcacatttgacttatttatttatacatctttcaagagtttttttagtggttgttccaggttttacaataaatagagtttaccttcaaataataaattataaataataataaatgaataaataactatacacttcatgtgtaatctaaggctcttacaacagtgtgttttcaaatctttctacctcttttgtgaaattgtcatacattttacatattgtccaaatatatatgctactaattttgcattaaagttttctttcatagaaattgaaaaacttttaatgaaatgtgtttttccttcaagatattctgtttcagcactctttctttgtgcagatccatgtttctgtctggtatcttatcttttctgctttaagaagttcttttatcatttcctttagtgctggtttttgtttgataaaatgtttatttcttcaattttaaaagatatatttgcaggatattgaattctgccttgacagtttttttcttttaacactttaaatcactctgctatcttcttgtcagaaaccatgccagccaggattctgttgtaattcttatttttgttcctcaacatgtaatgtattttttcctctggttgccttcaagcttttctctttgtttgtagcaggtcgaatatgatatacccagatctgggtttttttttctctcttttttttttttctctgagtttctttgatttatagatttgtgtatgccacaaattttggaaacttcttggttgttatttctttcttttttttttttttttgagatggagtttcactcttgttgcccaggctggagtgcaatggtgtgatctcagctcaccacaacctcagccacctgggttcaagccatgatcccctgcctcagcctcctaagtaactgggattacaggcatgtgccaccacacctggctaattttgtattcttagtagagacggggtttctccatgttggtcaggctgttctcaaacttccgacttcaggtgatccgcccgtctcggcctcccaaagttctaggattataggcgtgagccagcacgcccggcccttggttgttatttcttcaagtatttcttctcatgctcccttcttgaggggtttcaattatacatgtgttagattgttcaaggttgtctaacaactcttggttgctctgttcgttttgcccctatcatttttctctgtgttttcagtttccattgactaaaacatttttaccgacaaattattaagttcactcattctttccattgctttgtcaagttgtttgatgagccaactgaaggtattctttacgtctgttactgtttttcatttctagcttttctttaacaaaaaaaaaattttttttttttcaaagagaaaaggtctcactgtgttgcccaggtctcgaactcctgagcccaagtgatcctcccatctcagcctccccaaagtgctaggattacagtcacgagccactg

SEQ ID NO: 4114 - DNA, 1049 bp, Homo sapiens
gatcttgaactcctggcctcaagtgatccacccgcctcggcctcccaaagtgctgggaaaccatgcatatcttttgaagaagatttctacatttctaaggacaaatacaattttgttattttggaatttagatggttcacattattgtaggtaccctgttttttttctattagattaaaatatatttttcagtaatctttacatgtcttctgtagtatataacagtactatcaaatagcaatataatgtgtcacatatgcaatttaagattttctaatacccacattaaaaggagcaaaaaaaggtaaaattaatatttttatttacctcagtatattcaaaatattattttaatgtaatcaatataaaaatcattgagatttttttatttcatattaattcttcaaaatccagtttgtattttatacttataacttgttttaatctgtattagccacatttcaagtgttcagtagccacatgtggctaattgctatcctatttattgtgcagtgtaggtctgtaaagtcagaaaaaattctttgtatctggatggatggacagataaaaggagatgtttatcttatatgaatcagatttgatcagcgtaataactagttaccaaaacccaataatgtggtcatctttatagatatcaaaggtgggcttttttactcattggagaagttaattggaggagatacattggaaatattgggtagatggaacttctcctatttagttgcccttaatgtaatataactgtattatgtggttgcattgtttttattgtatatacatgtttatactttcatgaaatttcagtgtatgtctgtaacctttagcataaatgcagttccaactacaacgaagattttgtgctacagctagagaaggaattggtccaagcccgactgagtgaagctgagtctcagtgtgcattaaaagagatgcaggataaagtcttggatatagagaaggtaagaaacctacacaaatgcagtcattcccaaattagaggggatatgtgatatttattaagtacttac

SEQ ID NO: 4115 - DNA, 1082 bp, Homo sapiens
catgtgaggaagggatccggtttcagtttgctgcatatggctagccagttttccaagcaccatttattgaataggagatcctttccccattgcttttgtcgggtttgttgaagatcagatggttgtagaagtacggtgttatttctcaggtctctgttttgttccattggtttatatgtctttttggtaccagtaccatgctgttgggttactgtagccttgtagtatagtttgaagtcaggtagcgtgatgcctccagctttgttctttttgcttaggattgtcttggctatacaggctcttctttggttccatatgaaatttaaagtagtttttttctaattctgtgaagaatgtcaatggtagtttgatgggaatagcattgaatctataattactttgggcagcatgcacaattttttatttagagttgtgataagtgttacaaaagagatgagaacagggttccatgaaatgtttgggttcctgaaaagagcatataaatgtcatatcttgaacttagttaaaagcttaatgtatacttaaattcaagcaatattggatacatttgcatggacaaccctttttctaatttcaattttttttcacttaataatatgagaaacttcccccaatacaaatatttactttttactgtattactcctatttccttcaaatattgaaattttttttaataatatgagaaacttcccccaatacaaatatttactttttactgtattactcctatttccttcaaatattgaagatttttttttaagctcaagacacaagcaaaaaggattactgaggactttctaacttacctttacctttgtaatttttgcaacaccagaaaagcacataggattgaaaagcagactctgcttactaaaaagaatttctgtcagtttcattggaatgggattgctggtatcacagaaacattatgagattcatttacataaattaacttgatgtaagtatagagaagtcatctgtcatttctatgcttttaaataaacggctccccttgctgagactgccagccatcataattgtggcagttgtcatttggta

SEQ ID NO: 4116 - DNA, 1061 bp, Homo sapiens
tgcttcaataaattgtttttaaaaagactaaataaatgataatataaagctcaaagaaactcgacacatttaagtgattgcagtagaagacgagtttatgggagaacgtgtaaagtccctgtgctagaacccattggtgagggtcaggttagaaccaacaacaagtgatctggtttgcagggggagcctgggaggattaggagattcactcagggctggggttgggcatgtcttgatcagagttgtggttgccttgagacttataaaggagaatgcaacgtgaagtgaagcagagcaggttggtggcagcaagagaagtgagttgcaacagattatcagaccaatgacctgtagcccaaaggcaaggggatttagatataagagacattaatttggagtatcagcatttactagattaatgggagagcagcttggacaaggatgaatatgggggctattacccacagctaagatttgatatgatttggggatgtgatatttggataggatagctcaatttaatgtgccagagtagagcagacataaggttctttatgttcctctagttagaaataaggttggtcccaaaatatcagtgaatctgagcctgtaggtaggggtgaaatagtctcagttgcaaagattagaaattacagaggccaaagtaggttgctgtgtagctatggaaatgtgtagagcttgatagctaatgacagtgactttcccccacagtggacttctaggagtgaaggatcaagatggtctgcctataattattggacataatattttaattacaactggaaaaaaattaaaaggatgaaaaagatataatatggaaatctaatcaaaacaaagcctggagtgtctgcattagtatcatagacaaggtggactttagaacaaggaatagcaccaagagtaaagagaactatctataatgatagttcaccaagaagacataacaatcttatttaagattgtatgtgtttaggaatgtatgtcacctaatatatgtatgctaacaggaacagtaacttgaactgatagaactgaaaggt

SEQ ID NO: 4117 - DNA, 1047 bp, Homo sapiens
ctcattgtggttcaaatctttttttaactttaaaattctttcaatgcaaagactatatcaaatagacatttaaataattttttgaccgagattttgtttatggttcctctctttctccttttctccaaatataagtagcggccaatttagtcatgggaaagataacaactaatttctttattctgtaatttattgtaaatatatcaggttcaatttgtgtaaatactttgtattttccttagtcctatatgtgttaatcttataatggaatgaacttattcatatatttatttgaaaactaatgtgcaaagtattgtcttaagtgcagagggtacgataatagtaaacaagaaaaacgaagactgctgttacgtgaagtgttctagttggggagacacattaaacagatacaatttcaggtggtaataaggtgatgaagaaaaataaaaataaagcagaggagaggtggtttgtgcaggtgctactgtaggtaagctagttttggagagcttccctgaggagctaagatttgaccagagactcaatgatatgaagatggaaactatttgaagatctgggaagaaacattccagatagagcatacacttagtagaaaggcctttatcaaggaataaatttgtggttttcaaggaacagtaaaatgtatatttataaaccatagggaaaccacctaaaatttttttagagaaaaatatataattaggtagcaaataacagagataaaattgagtaatttaagaaattatttaatcaggaaaaagaaaaaaggaacagcaagtaagtggatcagatagaaaatttggaagattatagattttattccaaccatatcaataattatattaaatgtattttaaatataccaattataagattggataaaaagttaaaacatatctgtaagaaatttgctttaaatacaaagatcttgttaggttaaaagtaaaagaatgcgccagcaatgaataactagagaaggaaattaagaaaaaaagtccattcacagtagcttccaaaagaataaaa

SEQ ID NO: 4118 - DNA, 1073 bp, Homo sapiens
tggtccaagaagagacttgatatgattttgatttttgaaaatttattgagacttgtttcatgggctaaaatatggtctgccttagagaacatttcatgtgctgatgagaagaatgtatattctgtggttgttgaatagaatgtcctataaatgtctattagagtccaatttatgtccagtatttctttgttgatttcctgtctcagtgatctttaatgctgtcattggggtgttgaagtccttctctattattgttttgctgtctcttttcttagatagagtagtttttctttggttttcttttctttttctttttatttatttttgtttccaaggcactgtctcaggatgtcctgagaacatgtgccccagtagtagttgtcttatgaatctgggtacctcctatatcgggtacatatatatttaggattgttacatcttcccgttgactttatcccgttatcattttaaaatgaccttccttgtcttttttcactgttgttgatttaaagtctgttttatctgatacaaagatagctactcctgcctgcttttggtttctgttggtgtgggatatcattttctaccctttttccttcagtctgtattaggtgggtttcttgtaagcagcatattactggatcatcctttttgtaagacctgtaagttttatacttttgtctgtttttatgatgttgagtattgaccttttgtttacatgtttagaactcacttgaacatttcttgtaaggctggtctaatggtgatgaattctgttagcatttgcttgtctgggaaagactttttctccatttatgaagcttgttctagcaggataaaaaattcatggttgacaggtttttttttttctttaataagtcttaaaatgggattgtgattttttttctggcttgtaaagtttctgccagtatgtccactgttagtctgaggggatttcctttactgatgattagacacctttctcttgctgattttaggatttttttttttccttcatgttgtcattagtctgatgagtatatgtgttggtgaagtccttcttgcactgtatt

SEQ ID NO: 4119 - DNA, 1015 bp, Homo sapiens
gcatctgttgagatgatcatacagtttttgtttttagttctgtttatgtggtgaatcacagttattgatttatttatgttgaaccatccttgcatccctgcagtatgacccacttgattgtgatatattatctttatgatgtgctgctggatttggtttgctaggatcttgttgaggatttttgcatctgtgttcatcagagatattggtctgtagttttgttatttttgtgggtccttccctggtatcacggtgatgccggcttcatagaatgagttaaggaggagtccctccttgatgttttttggaagagtttcaggagaattggtactagttcttcattgtatgtatggtagaatttggctgtgaattcatctgatcctgggcttcttgttcttgttgggagatttgttattactgatttaattgcactactcattattagtctttttaggatttctgtctcttcctagttcagccttagaaagctttattcttccagggatttatccctttcttctaggttttctagtgtgagtgtagagatgttcatagtagtctctgttcatttgtatttctgtggtatcagttgtaatgtctcctttttcatttctgatcacttgttaatttgggtcttctctcttttcttggttaattgagcagtatattggttttgtttatttttttcaaagaacccacttttcatttctttgatccttagtatattttgttgttgttgttctcagtttcatttagttctgctatggtctttgttatttctgttcttctgcttgctttaggttcttgtttttctagttcttgaggtacgatgccaggttgttaatttgtgatccttctggtttttttatttaggcatataatgctgcagacttcccacttggtgctgcttttgctatatcccagaggtttttgtatgttgtgtctccatgttcatttgtttcaaaaaagttttagatttctattttaattttgttgctgacccaaagatgatttg

SEQ ID NO: 4120 - DNA, 1049 bp, Homo sapiens
tcatgaattaaattttttacattgtttttcaaatattgagacttattgatagatgtatatcaaagggatagaatgctggtttatagtgaaaaatttaacttggtgagcaaaaatggccataataaagtgaatgagcatattacggctagaaagtgaacatctgttgctcattgttttaattatagccttccaatataactttatgaattcttcaaagtttcagaataagggttttaaatttgtattccagcaggaggtattgaattaccaatataagcatccaccgccaccactccctactgccaaatagtggcaatttatatgatataaagagctttggattttatttatggaactagattctagtcctgttttgccaactatgtgatcttgtatactcaaagacagttttgtgtgtgtgtgtgtgttttttcccaaatgattaaatagggctagaccttctcaggtctctctctttcacttttaaaattaactttattaaagtataatttatatgtaataaaattcatcaaatgtaggtatgtagcttgatgtgttggaaatgtatgtagttatgaaacactaccacaatcaaaacaaataatatttctatcattccctttatggttcaccaccccccaaccccagcaacctgtgtgctttctttcactatagttttacctcttctagaatttcaaataaatagaattgtaaggtatgtgacttttatgtctggcttctttcacttagcatatctattcacttttttgatgatttttgaaagttttatttttaattgacacatcaaatcagagtaattagctaacacattgattgcctcgaacattcctttgtggtgagaacattcaaaatcccctcttctagctattttcaaatatacaatacgttattgttaactatagtcactctactgtgcaatgtaacaccagaatttattcttcctatctaactgtaactcatacctgttgaccattctcttcccatcaccatgttcccaattccctccctagtctctagtaaccactatt

SEQ ID NO: 4121 - DNA, 1077 bp, Homo sapiens
tcattttattgattcagaaatgaagttgtgatatcctgcattcttgaataacagtattttcctttttttttttttttttgccttcaacagccctttgaatgttgggtactgtaccatcattcacagctctgcaggtttcaagtccattaccttaagaggtcacacactgaggtgaaatgatcattattaatcccctgaccagaagaggatacacccagggcccaatcttacccttgacttacagggttccctagtcttattataaagctagctttgtgagttacaaatttaatgatgtcttctacttcattccaaccccctaataagtcttccttggcttgcaagataggacacttaaataattcatttttgtaattttattttatttttaggaacttgttcataaagggataccccatcactttagagcaatagtttggcaacttttatgcagtgcacaaagtatgccaattaaggatcagtattcagaactcctgaaaatgacctcgccttgtgaaaaattgatccgaagggacattgctagaacttaccctgaacacaacttttttaaggaaaaagatagccttggacaggaggttttatttaatgtaatgaaggtaagttttatttattcattttttgaaatgaaatgaattcctggaaggttgaaattatacatttttcatgatgaagcatgacctcccaccacaataatcagttgctttggcagtgaaattggttttagcatcatttttgccttaattcttatgctacattactatctagtatagagaacttgttagaacatttactacgttatttagcattagttgatggaaatggaatagcttaaaagtcacatatcatagagggatcctcatgaaaaggaataattcaccatctgtgaagttcaaaacctgggatgtgggtttctcctatcatatctgtgttcctacagtgagcaaatttttctgctttctatggccagcactgttaagagcacttagcccttgaaaggtgtaccattgtcattttttcttcaatattgccatttcccttcccacagttactttttct

SEQ ID NO: 4122 - DNA, 1057 bp, Homo sapiens
cagtaaaatttgtttctttattgcatttacaattcttagggtttagaatcatgtggaaaattacctatgtaaactaatttttccataagatatattacggacttactgaaataatatgtattttaaaacagtatttaaagtaaaacatcatcattaattctttttttatctttttattttcctcagagaccttgttctgaaataatttttttcaagtaaaattatttataataattagttgatgctcactttggctgtttggtatgtttttatgtttttagcaatatttgggaaattttattttaattattgttgccatgaaaatatattaaattttccttcagtaaggatagaatttgtttgttcagtttatactgttgtattattgaaaatgacatacctggaatttggaattttaaaatttggacttatgattttatttcattttgataatatactttgcattgagctaaatgttctaagggatataaagatgagtagcatataaatctggctctcaaagggtggttgtataatctgttaaataggatttgacctctatatgtttattttctttctcagcttttgtattttatgaattagtattgtgagcttttgttgtagcctaagcagatgacttttcctgaagaattactggaagtgagtagtagctatataaaatagtgatagagctacgttttccaccttccttttataaataaaagacttaatgtagtgattagtcatggattggatcttggaaattatcttaacccttctttcaacagataaggaggaggcctaacacagggttgcaagctcaaaattcaacagggaccttatgagtgaggaggtcccagtttaacagtgtaaacctagtaataaatagcagctgttagctggcctgagttttaggggagactgtagggattatggaaagtgagcagattaaagtccttctgcatttgaaggaagaagctcccacgcagctatatcctgttcttactgtgcaggaatatggaccggttttgccttatctttttatttttcaagagaa

SEQ ID NO: 4123 - DNA, 1411 bp, Homo sapiens
aagattttgagcaaatcctctggtcagaagttttgggaagagatagtcttttaaaataatatgtagattctgaaagtttcttggataagatgaaattagaagaggatcttgaaagatcaaagtggagtgttaggttgtgtgagggctgttatgagcaaataggttctcagaaaaggaaatgaaagggactattaaatagagcaaaaggagatatgtgatagaaaaatagtgggaaaaccaaacactgcatgttctcactcataggtgagaattgaacagtgagaacacatggacacaggaaggggaacatcacacactggggacggttgtggggtggggggaggggggaaggatagcattaggagatatacctaatgctaaatgacgaggtaatgggtgcagcacaccaacatggctcatgtatacatatataacaaacctgcacgttgtgcacatgtaccctaaaacttaaaagtctaataataataaaatttaaaaaaaagatattgatcaaaggatatgaaatatcagttagataagaggaataagttcaagagatctatagtataatacagttactattgttaataacagtatattatattcctgaaaattgctaagagagtagcttttgtgttcttaccacaaaaaaaagtatgagaggtaatgagtatgtgaattagcttgatttagccatgtggtacatgataaatatatacaatttgtatttgtcagcataaaatataattttaagtaattaaaatagtgggacatgaagttggggcaggactgacaaagtaaagcacttacagacagtgctaaagggtataaaggatttttaagtgttcagttggttattatatacaaggatgaagtagtttccagtaaagataacttctggtatagattttgtaagtgaccaaagttgaatttatttttacggttgtgatcagtaattactgtgcaactaaaatacacaaagcgttatattaaaattgttgtaggtaaggtgtggttgtagatgaattgcttattcccatacaattcacaatttaccccagaataccagatgtgtttaatatatatgttgacaactaaggaataattactggagttttaaaaaaaattattgttatactttaagttctagggtacatgtgcacaacgtacaggtttgttatataggtatacatgtgccatgttggtttgctgcacccattaactcatcgtttacattaggtatttctcctaatgctatccctcccccagccctccaccccttgacaggcaccagggtgtgatgtttccctccctgtgtccaagtgttttcattgttcaattcccacctatgagtgagaacatacagtgtttggttttcagtccttatgatagtttgctcagaatgatggtt

SEQ ID NO: 4124 - DNA, 1055 bp, Homo sapiens
gctgagtgttttttaatatgtctctattaaacttttgaatatataggatacagttataataacttttaatgggctctctggtcattctaacatttgagttaatgctggtttgcttttgatggattgatttcccccccacctcattattggttatgcttttcttctgctttgcatgcccgatttttttttttttttaaacaaaatctcactctgtcacccaggcttgagtacagtggcgtgaccacggctcactgcagctttgacctccttggctcaggtgatccttcgacctctgcctcccaagtggctgggactacaggtgtgtgccatcatgccctgctaatttttgtattttttgtagagatggggtttcaccgtgttattcaggctggtctcaaagcctgataattttttattgaatacctgagattgtgaattttatcttgtcgtgtttgactattttctattttcctataaatattcttgaattttgttctggcatgcagttaaattacttcaaaagaatttgttctggagtaatacagaacctaggactattattcccccctactgaggcgagacccttttgtgtactcttcccaatgtgtcttgaaacagtaacttttccagtctggctggtgaggataggtataattttctaccatgtgtgaatgttagccatggttacatctaatcttttctggtggttgattctctggccatggatagtttccttacatgaatgcattgatcagttcccagctgaatatttgatggagatctacctatctctgaagatctctgtatagttctttcatctctggtcatgacctgtgaactctagacaccttggtctcactgccattgagtacctgaaatatggtttatctgacttgcaatgactcttctcatcatctcctcagttcagggagcacacaagactgtatctcaattttccccacctgttatagggccctgaaactgaatttcaaggtggttaaaatggcagtcacagagtttactttacttatgtcccgagtctcaggaattcttct

SEQ ID NO: 4125 - DNA, 1072 bp, Homo sapiens
tcaagaccaacctggccaacatggcgaaaccctgtctctactaaaaatacaacaattagctgggcatggtggcgggtgcctgtaatcccagctactccagagggtgaggcaggagaactgtttgaacccaggagacagagattgcagtgagcagagatcgcgcctctgtactctgcactctagcctgggcgacagagcgagactttgtctccaaaaaaaaaagaaaaaaaagaaaccatggcaagtgaaactgtggataaggggtgactattattggtacatctttgttggctttctgtttacatgttatatcagatattgagagaagagcagtaacttcaaattataattgtggatttatctatttctttttaaattctgtctttcatgtaatttggagttctattttaggtatataaacatttaggattgttatatcctcttgtaaaatgaccttctttatctttggtaatgttgtttccttggaaatctactttatcttatattaatatagtcactctagcttccttttgaatagtgttaacatcttatatattttcccagccttttgcttgtattctatttttttttgtttatctttaacttttttttttttgagacagggtcgcactctgtcacccaggctggagtgcaatggtatgatcatggctcactgcagccttcatctcccagactcaagcagttcttccatctcagcctcccaagtagctgggactacaaaattttattatttttttaagagatggggtcccactatgttgcccaggctgttcttgaactcccggattcaagcaatcctctcacctcagcctcctaaaatgtttggattacatgtgtgagccatcatacctagaaaaaatctttggagtttgtctgttagtagcatttagttgggttttgcttttaaaaatacaatctgacaatctttgtcttttaattgggttatttaagccattttatttttttaaaaaattaaagttttattttttgctcacatttacattcatctcaattagtaggttggatacatctttgctttactgtgctttgt

SEQ ID NO: 4126 - DNA, 1066 bp, Homo sapiens
ttatagttggatgcctcaacacctctcagtaatttatagtgtagcagacagaaaatcagttaggctatagctgaatagcaccatttatcaactggatttaattgatatatatagactgcttcatccaacaacagcaaaaaacacatttttctcaaactcatatggaacattcgccaagattaaccacattctgggacataaaacacatcttaacttgtattctcagaccacggtggaattaagttagagatcactaacaattatctatacaacttgtgttgtatagttagaaagatatttggaaaatctgaaaatacttgggaattaaaaaacacacttctaagtaacacatgagttgaagtctcaaactaaaaatattttgaactgaaggaaaatgaaaagcagcaaaagcagtgcttagagtttgatttatattgaatcatatagtagaaaaaaagattcaaaaatcagtgattaagcttctactttagggaactagatagaagagcaatataaacctaaagcaagcagaataaaataaataataaaaattagtagaaatcagtgaaatagaaaacaggaaaacaattacaaaattaatgaaagaaaaactgtttcttttaaaaggcattgaaagtgacggacctctagccagggtaacaagaacaaaagagagaagacacaaattactaatgtcaagaatgaaaggggtaattttttcccccagatttcattgtgataaagtattcataacaaaatttacagttttaaccattttaagtctataattaagtatattcatattgttgtacaaccaccatcaccatcatctctataattttttcatctttccaaagaaactctgtggccactaatcaataactccctatttcctcttcccatggcaaccaccattttactttctgtctctgtggatttgactatctcataaaagtggaatcacacaatatttgtcattttatggctggcttttttcacttcgtataatgtcctcagggtgtgttcatgttgtggtatgtcagaatttccttcccttttttttttg

SEQ ID NO: 4127 - DNA, 1026 bp, Homo sapiens
tttatttcaagcactgttaaatattttaattttgttttgtgggataatgtgatattgttccagttactgtagcggtgtaacaaaccaccatgaaacttaatggcttcaaataatcattttagtatgtgcttagattctgtgggtcaggaatttagacagaggattatgaagaggacttgtctctgcttcacgtctttggtctcagctgggaagacttagagtctggggctgactcttcacttagggcctagaatcagttgggggtatgttcacatttgtgcctggtggttgaggctggaacctcagctggactgttagtgagaatgcctgtactctccatgtggtctctgcgtgggctagtttgggcttcttgaaagcatggtagccagattccaagagttaagctcagtaataacttttggtacccacttttggttgaagcagtcagcgagctttgcttgggctcaaggggaggggatgtggacttcaccactctatgggaagatgtgagataggaaatgtggccgtgttacagattggattgtgtccttcaaaaagatatgttgaagtccagctatcacagtacccttgtacctcagaatgtgactttatttggaaacagggttgttgtaaatgtaattagggaagatacagtcactggaggggagaatgtcatgtgatcatggaggctgagatccaagtgcttgaagtgctgcaactgcaaaccaagaaatgctggtcattactggcaaaccacccaaagctaggaagaggcaagggaagattctccctacaagttttagagggagaatgaccctgctgacaacttggttttggacttctagcctccagaactgtgagacaatacatttctgggtggtttttttttttgtttttttttttggtgagatggagtctggctctgtcacccaggctggagtgcagtggcgtgatctcagctcactgcaacctccgccttccgggttcaaacaattctcctgtctcagcctctcaagtagctgggac

SEQ ID NO: 4128 - DNA, 1702 bp, Homo sapiens
cagacgggagccactgtgcccggttgggaaaattatttgtaatctaagagtttatagtgcagtcattttcaagtgtaacagtagaaaaagcattttcacatatgcagtgtctcaaactcacctctcatgcaacccctttcaggaaggtagtagaggaggtactccaccaaaataagagtgttttgagcaaagggaagacatagtgtttaggaaacaaatgatccaacccaagtgaggtgaaaggaatacctgggatcacagttgtgtaccaggtgtagagcaactagtccagaatggagcaagtcagaaggttgcagaaaggacttgtacaaaaatataagattgatagcacatgtgatatgctcgaatatgttgaggagatttatataattggatgaattgggggtgaatttataagtacaaataaagctaaacaattagacatttattaactccagggaaagtaaaaaattggtccaagaaagtaaaagtaatcacagtatacctcatagaacaactgtgactaaagttacatagtcatgttaatgcatacactgaatattggtgtaaccaaaaatatgttttttatttatttttattttttttgagagggagtcttgttctgtcgctcaggctacagtgcagtggtgcgatcttggctcattgccagctctgcctcccgggttcatgccattctcctgcctcagcctcctgagtagctgggactacaggtgcccgccaccatgcctggctaattttttgtatttttagtagaaacggggttttaccgtgttagccaggatggtctcgatctcctgacctcatgatccgcccgcctcggcctcccaaagtgctgggattacaggcgtgagccaccgcacccggcccaaaaatatgttttaattacatagggataatggaatgtatgaagtgtttgtatgttatggtgggcaaggttgatgatatggatgatggggaaagaactaattgacctttttcacaggaagaagtcaacagataaaatattacttttttttttctggtcataacctcatgtaagtggtaaaaattaaaagtaaggggaaaaaggcaacggggtagacatttattatagccaaaggagggtcaggaattctacttctggatctggggatgataggaaagttcaaaaattatttgcaaaattttgttcatatgtgcatgaatttctcaaaggagtttgtgacccctaaaatgtctaaagagtatagtgtagtgtgatgattgtggtgtttttcagcgtgttcgtgaaagtgttagttttagttttgattcttgatttatttttatgttttcatgtattcattatcttgttatatgaaagatgacttagtttggtaaagcaaataccattttttatttggttttgtattaaaataaacctcttaagtattgatttgtatctgtgctgccttctgagttaatgtcttcggctcttctagttcattgattttctgtttatgtctgtttaattctctatccctctgtcttccccacatctcacctccctttttttcctatttcatttattaaattttttatttctataagttccacttggatacttcaaaaatttgcatgatctttgtttgtatcctattccttgctcatttaaaaaattcttttattgctttaagcattttaaaagtagttatatattctg

SEQ ID NO: 4129 - DNA, 1035 bp, Homo sapiens
attacaggcgtgagccacctcgcctggccagtttctttttatatctgttaaaacttgtagtattatgttacttgtcccagtagttatactttatggaataaatcctagagaaacgtacacatgtggagaaatgtctttaacatatattaataatagtaaaaaatcggaagcactccaagtatccatcaatagaggattggttaaatcaagtatagtacatttatatttatatgatggaatgctatacagctgatggagtatggtgtctatactgtgttactttcctgtgcggctgtaacaaattagtacaaacttagtgacttaaaacaaatttaatctctcacagttctgaaggtcagagttcaaaatgtttcactgggttaaagtcaagattgtagcagggctggtttcttctggaggctctgggggagaatcttctctagcttctcgagctgcgttccttgtattccttactttgcattccttgtctccatcctccatcttcaaacccagcagcatagcatcttcaaatttttttctgtttgtgccttcacattgttttctctctcataaagacttatgtgattatatcagtcacaacccagataattcaagataacctcccttctcatgatcttttttttgttgttgagatgggagtctcactctgtcacccaggctggagtgcagtggtgccatctcggctcactgcaggctctgcctctcgggttcatgccattctcctgcctcagcctcctgagtagctgggagtacagatgcccaccaccacacccggctaattttttatatattttttttagtagagacgaggtttcaccatgttacccaggatggtcttgatctgaccttgtgatctgcctgcctcggcctcccaaagtgctgggattacaggcgtgagccaccgtgcccagcctacctcaagatctttaacttaatcatagctgcaaagcaccctctgccgtataagataacatagtcacaggttccaggtattgggatgtggagctctttgcc

SEQ ID NO: 4130 - DNA, 1030 bp, Homo sapiens
gcgtgcgcctgtagtcccagctactcaggaggctgaggcaggaggattgcttgaacccaggaggtggaggtagcagtgagctgagattgcgccactgcacctccagcctggcgacagagtgacactccgtcacaaaaaaaaaaaaaaaaagattttggcatctttgactaggtcagttatccagctgctttccagcttccaaaattttgttgctattgtctcattctccctgtcataatggcttgtgtcctaaaaacagaacaaacaacaataacacaactttctttatccttgttttagtaacgttttgggaggaagcaaaattagatgtgtgtgtgttcaatctgccatctcaccttggaagtccactgtctgctttccattatacagaaacttgttgccacctgtcctccattgttgtctcctccttatggggttataccttttaaatttcttcatagttgtctgaaaagagtgtcaggaggtagaggacctaaatattggtcaagatatcatttctttaggagtctcaaaattctttttagaagtactcgttgtcccaggatcttataatctcaagattggaagtgattttgaagataatccggtttaacgagctatttgataccttctctaaaggaattgtccagcctaaaatgtgagaaacttgtggtaggaggagatgagtgcctggagaaatggattgggctgtagatctctgcaaggggtctggaaatccatgtgtacattaaatgttgcatgaataatagttcttgcatatttgtaatatataataaaatttattaaaaagtcataatgggccgggcgtggtggtggctcacgcctgtaatcccagcactttgggagtctgaggcagctggatcacctgaggtcaggagtttaagaccagcctggccaacatagtgaaaccccatctctactaaaaatacaaaaaattggctgggtgcagtggttcacacctgtaatcccagcactttgggaggccaaggcgggtggatcacgaggtcag

SEQ ID NO: 4131 - DNA, 1053 bp, Homo sapiens
tatatatatatatatatgccaggagtggtggcatgtgcctgtagtcctaactacttgagatgctgaggtgcgaggattgcttgagcctgggaggtcgaggttgcagtgagccaagatctcaccactgcactccagcctggacgacaaagtgagaccctgtttcaaaaaaaaaaagaaaaagaaaagaaatctgtgttggagaatgtttactttaacattatttatgatagctaaaaatgtccagatatgaggagggagttcattaattaattggagtgctgtacagtttgacatgaaaattaattcaaaaaaggtgaaataaaatgagtatactcttagaattgtggctattagaggctgggaagggtacagaggagaggagaataaggagaggttggttaacagatacaaaattaccgctagataggcagaataagttctagtgttctatagcactatagggtaaagggattaataatttttggttattttcaaaaaactaaaaggattgtgaatgttcacaacacaatgataactgagacataaatatgctaattaccttgatttgatcattacaaattgtatgtgtgtattgaaatatcactatgtatcccatgaattttttttctgtgtgctcccgttcacaatacagacaaggcgcagggcctgggctgaggtgtacatgggagttcacctcctcattctatacagtcagtataagaacacagcctggggtaagcaccaggaggcctggggattttttttctttctttctttttttaaaagatggttggttatttgttttgttttgttttggcagggtcttgccctggtgcccaagctggagtgtgcagtggcatgatctcggctcattgcagcctcagcctcctgggtttaagccatcctcctgcctcagccccccaagtagctgggatcacaggcgcaccaccgcacctggctaattttttttttttttagacggagtctcgctctgttgcccaggctggagtgcagtggcatggtctcagctcactgcaaccttgcctcccagat

SEQ ID NO: 4132 - DNA, 1030 bp, Homo sapiens
ttagggttgctagatgtagcaaataaaaataaggatgctcagttacatttgaatttaaaataaactaggactaccttgagtataagtatatcccaaatattgccaataaacaacaataatttttcagcataagtgtatcctaagcagtattttgctcggcaaccctaatgaagaaggtcccagaaggctttctggaaaaggttacatctgagctgaattttgatgaatgagcattgcagacagaaggaggcatgtgcaaagctacaaacatgagaaataatgctacattccaggcatagcatagctagagcagagaagatgaacggcagtttgcagaggtgaaggaagcagggtcaaactcataacagaccttgtatctcatggtaaggagttcgccttttaccttcagagcagtagagagtcagtagaagtttttaagcagggaagtgactgatccgatttatgttttagaaaaattttgctacttgtagtggagagggtggattagacaggagacagcacaagcagggggatctgttttatggcagttgtaataatccaggcacaagtgacgagggtttaaactatggcattgacaatgggaatggaagggatgaaacagcctcaaaggatatgaaggaaataatttgattgccagcaattggtgaccagttgagtttggggaaattgggaagaacaagaaatttaggacaactcactgcttcctccctcggtgcctaggtggttgatggcaccttccactgaggcaggccatgaaggaggacaaccttgggacagaggagggaagggtgtgatgggttcagtctttgatagattgagtgtgaattgcttttaggttatccaaatcgaggcaagagatgttcagggagcacttggatatttaattcacgaaaaaggcctaggctgggatagagccaggattcctcagagctgtgggaatgtcactgatgatggtatacagagaacacaaggaaaatggaacaaaaccctggaaaacactaatacttaa

SEQ ID NO: 4133 - DNA, 1103 bp, Homo sapiens
cactgtcctgcacccactgtctgacaatccccagtgcgatgaacccagtacctcagttggaaatgcagaaatcacctgtgttctgcatcgctcatgctgggagctgtagactggagctgttcctattcggccatcttggctccaccccgaaattttttattttattgaaagaaatgaaaatagaaacacaatataacaaaacctgtgggatacagcagattaagagggaaatttatagcaataaacacctacatccaaaaagtagaaagattttaaataaatgaattaacaatgtatctcaaggagctagaaaagcaagaataaaccaaacccaaaattagaaataaataaataataaagatcaactaaaaaaaaaccacaaaagatcaatgaaatgaaaaattggtttttcaaaaagacaaacaaaattggtaaaccattagctggactaaccaagaaaaaagagaaaatacctaaataaataaaatcagaaatgaaaaaggagatatgacagctgataacacagaaatacagagtatcattagagactttgtatcatgaagaactgcacaccaacaaattagaaaactagaggaaatggataaatttttggacataaacattctaccaagattgaaccaagaagaaatagaaaacctgaacagaccaattacaagtaatgagattgaatctatgaatttgtaataaaatgtttcctatcataaaaaggcccaggacccaatggctccactgcagaattctaccagatatttaaagaactaataccaattctcaaactctcccagaaaactgaaaagaagggcattcttccaacttattctataatgccagtgttacttcaataccaaaaccagacaaggacaccagaaaaaaagaaaactataggctaatatacctgatgaacatagatgtaaaaatcctcagtaaaatagtaacagactgaatccagccgcacactggaaaaataatttaccatgatcaaatgggatttattcaagagatgcaaagataggtcaacgtacacaaatcagtaaatatgatacatcacattaacagaaccaaagacaaaaaccttatggtca

SEQ ID NO: 4134 - DNA, 1048 bp, Homo sapiens
aattcagccagaggatataacaattataaatatatatgaacccaacactgtagtactcagatatatataaagcatatcttatttgatctaaatggagagatagagtctgatacaataaaagttgggggtttcagcactccacactcagcatttggatagatcatctagacagaaaatcaacaacagaaatgaatataaagtacattttaggccaagtgcaattgctcatgcctgtaatcccaacactttgagaggctgacatgggaggatatttgaatccaggagtttgaggttagcctgggcaacatagggtgacccccgtctatacaaaaacattaaaaagcaaaatagccaggcatggtggcacatgtctgtggtcgcagctactcgggaaggtgaagtgggagggttgcttgagcccaggaggtcaaggctgcagtgagccatgattgtgccagtgcactccagcctgggtgacagagtgagaccctatctctaaataagacagactcatacctgtaatcccagcactttgggaagtcaaggcagaaggatcacttgaagccaagagtttgaaaccagcctgggcaacaaaacaagacctcatctctacaaaaaccgtaaacaaataaaaattagcaaggtatggtggttcacacctatagtcccagctactcaggaggctgagatcagagaatcccttgagcccagtagttcaaggctgcagtgactatgttcataccaccgcactctatcctggatgacaaggtgatatgttttgtgatatggtttgaatgtttgtcccctccaaatctcatgttgaaatgtaatccccattattggagatggggtctggtgggaggtgtttggatcatgggggtggatctctcatgaatggcttagcaccatccccttggtgatgagtgggttattgctctgagttcatgtgagatctggttgtttaaaagtgtgtagcacttcccccttcccccgttgctctcttcaccatgtgacaggctggctccctgtcactttcaccatgactgta

SEQ ID NO: 4135 - DNA, 1081 bp, Homo sapiens
ggtgtgcaccaccatgcctggctaattcttctggctcagcctcctgagtagctgggactacaggtgtgcaccaccatgcctggctaattcttctggctcagcctcctgagtagctgggactacaggtgtgcaccaccatgcctggctaatttttgtatgtattgtagagacaaggtttcaccacgttgcccaggctgcagttacatttttacttgaaaatcgttcatttctaatgcctttttaattttttaaatcagaaaagaacaaatttgttctgccagactattattaggttcctaattctgtgaagctgtgacctggggtaaaggttaatctgtagttagcttaaaaccagtttcattactagcctttacagtatactttggtatttatccaagatcggggtgctggctttttatgtgaaaggccagaaccttaagtagcaagaaaaagtagtccttaacttttcattaaagtataacatgaatattgaaatgtacatttatgctcaaggaacaccattttaccagcatgctagatctgcagtcagttaggaattgatttttgtatatggtataattacagttaaagatacatgtattttttccaattagatattcaaatgacctggtactgagattttttaaaaagcagcattgtccaaaaaagcaactttggcaatagttggttcattcaccactagaatgaattccaatcctagcccaaaaggaggctgaaagatgtgtcagagcctctttttctttccggatcaccatttagtctgtaaaaaataaagcatgtggggatttctgttgtgatccccacaaattgaaagtcacatctgcaaaagttagatagaagtatatcatgcagtatctgtgaagtaatacttgcaaggtatttatgataggttagtcaccagttaatgtgctaggaagaagtcaccatgcccggctatttttttttaatattttttagtagagacagggcttcatgttggccaggctggtctcaaactcctgacctcaggtaatctgcccgcttcagcctcccaaagtgctgggattacagatatgagcca

SEQ ID NO: 4136 - DNA, 1042 bp, Homo sapiens
gcggagctcgacgggccgccttctccctggtgttttcggggctttcccccctcccccgtgggcccccgcaggtcggttgcccttgactcagtgtcttgggtcttaagtcggtggtaggaaaggtggtgtagcattcctccgtgtcttagaaaattatgacaatttgtcacaccagtgtttccccaggctccaaaaagcagcgtgtgcctcgtgccgagccccttggttgggtcgttccatcacacccaagatttaaatgggaggtggagaccgataagcctgaaccaggcggatgggtgtttgctttttaaaggaaaggggctagtggctggtctgtggatcccaaataccctagtaatgcaaacgtaattctcagtcatgtcgtgtgtacggttcgcgtgttaatttttcatgatttcccgttccaccctctgttccgctgccagtctgtgccttggaaccctactactgcctaagtgtactgtttggtcaccagggggacctagtagacaccgcgagtagctgagcgcaaatccatcactccgatggaaaaacaactacaaatcaatgccttgcgtgggtcagcagtgttagccaacgctgcattcagaggacagtattcctttaccgcttacattaaaaggccaagaggtagatgatttggggtcagctggtgcttttataaattatgaaaaaagttgagaaggtaaccatcatgaggcaagtaaatcttacatttttgtttgaaaattgtatgtgtaagtcattaccctgaaatgagtgacgtattgcaaattggaagcatgatttgacaacccatgatattaagcgtgtacgaataaaactgagtctttgtagcaagcaccaccaatagtaattgtgcacttgagtaacactgtcacaaccccttctagaattcaacccaggccaggtacctctgtgtaatcttttatgtgagtttaaaaaaaagcttaccggccaggcgcgatggctcacacgtgtaatcccggcacttgggaggccgaggcgggctgattccttg

SEQ ID NO: 4137 - DNA, 1031 bp, Homo sapiens
aattctaaaaggacacgtaataccattgcagaaagaaaagacagttccaaatgataaattttagagttgttttgctaggatgcaagagaaattggataagtggaccactcatacgttgctggtgagatatgaaatagtagagccactgtggaaaatattcttggcagtttcttataaaactaaacatacatttaacatataactggcatttgtactacttgacagttatccctgagaagttaaaacttaacattcacaaatgttacatagcaccttcatttataatagccaaaacccggaaacaacctggatgtccttcaaaaagagtgaatggtttagtatgtccacaccatggaatactaaatagtaatatgaaggaacaaactactgatacatgtaacaaattgcatggacctcaagggaattatgcttgggtggtttggggggacaatcctaaagttttacacactgtatgattctgtttttgtaacattcttaaataataaagctatagagatgggaaacaagattcgtggttgccaggtcttgggactgaagggaaggagaatgtggctataaagggagccttgtggtggaaaagttctgtagtttgattgtggtgattacataaatatacatgtgaaatgttagaagtatttatagctgaaacatattagtatgttggtatatacatatttctgactaattaatttcgccatgttgcccaggctggtctcgaactcctaagctcaagtgatgtgcccgcctcaacttcccaagtgctgagattacaggcgtgagccaccatgtccggcctgttttttcctatgcatgcataattacgatcaagtttaatttgtaattaggcacattaagagattaacaatagctaacaaaatggaacaattacaacaatatattgtaataaaagttatgcaaatgtggtttctctctctcaaaatatcttgtactcacccttgtgaggctgtgagatgtcatacaatgcctacatgaagagatgaaatgaggtg

SEQ ID NO: 4138 - DNA, 1052 bp, Homo sapiens
ttttataaccaaatacatttcagtgtaacatattagcagaaagcattagtctttgtactttgcttacattcccaaaagctgacattttcacgattcttaaaaacacaaagttacacttactaaaattaggacatgttttctctttgaaatgaagaatatagtttaaaagcttcctcctccatagggacacattttctctaacccttaactaaagtgtaggattttaaaattaaatgtgaggtaaaataagtttatttttaatagtatctgtcaagttaatatctgtcaacagttaataatcatgttatgttaattttaacatgattgctgacttggataattcattattaccagcagttatgaaggaaatattgctaaaatgatctgggcctaccataaataaatatctccttttctgagctctaagaattatcagaaacaggaaagaatttagaaaaacttgagaaaacctaatccaaaataaaattcacttaagtagaactataaataaatatctagaatctgactggctcatcatgacatcctactcataacataaatcaaaggagatgattaatttccagttagctggaagaaactttggctgtaggtttttattttctacaagaattctggtttgaattatttttgtaagcaggtacattttataaaatgtaagccctactgtaaggtttagcactgggtgtacatatttattaaaaatttttattataacaacttttattaaaatggcctttctgaacactttatttattgatgttgaagtaaggattagaaacatagactcccaagttttaaacacctaaatgtgaataacccatatatacaacaaagtttctgccatctagctttttgaagtctatgggggtcttactcaagtactagtaatttaacttcatcatgaatgaactataatttttaagttatgcccatttataacgttgtttatgactacattgtgagttagaaacaaacttaaaatttggggtatagaacccctcaacaggttagtaatgctggaattcttgatg

SEQ ID NO: 4139 - DNA, 1023 bp, Homo sapiens
tggtttctttttttttttttttttttttgagacaggatcttgctctgttgcccaggctggagtgcagtggcatgatcatgcctcactgcatcttcaaccttccgggctcaagcaatcctcacactctgctaatttttgttatttttttgtagagacaggattttgccatgttacccaggctggtctcaaactcctgagctaaagtgatctaccagccttgccctctcaaaatgctgggattacaggtgtgaggcaacacactcagcctgttacttcttatttttacctttagttgcttttcatcacaaatagaaatacaggtaacttaaaacatgtacttttttttatacagtgtagagactgaagttggtgattacatgttctgctttgacaatacattcagcaccatttctgagaaggtgattttctttgaattaatcctggataatatgggagaacaggcacaagaacaagaagattggaagaaatatattactggcacagatatattggatatgaaactggaagacatcctggtcagtatggtcttctaataaaataaaaattattaacagccagaggccttactatggtaataagttactgaactaagcattttatctgcattatccaggaaaatctgtttctaatattttatttttgccataaatactttgacctcaagtatcagcttaattttattttatattaatatagcccttttatagttttcaaataacttatcttccaggaccctattataaaaatagcttcagatgtgcaaataagactgcatcttggtaagtttgttttataaatgtgcagttagaatttttaaattataaatagattatgcttctgattatacagcaggcatatgaaaagtaaaatgttttctaatttcacaactattttgtggtattaaaacattgggtgttttactgaatactaaattgttcagataaacatacaaagaaggaaatattataaacacatgcattatgtaataggtaaatacctaaa

SEQ ID NO: 4140 - DNA, 1035 bp, Homo sapiens
aactccgctggtctcaaactcctgggctcaggatcctcccatctcagcctcctgagtagctgggattactgggattatagatcttgtacatattttggtagatttgtacctaattctttttttctttttttttcttttagtgctaacgtaaatggtattgtattttttattcccaactccagttgcttgttgctggtgtataggaaagcagttgactattgtatgttaatattgtatactgagacttggctatcatcacttattagttccgggacgggtttttttttggcagttctttaggatttctacatggactatcacaaggacagttttatttcttcttttccaataggtatgtcttttctttccctttcttgttgtattacattagctcgagcttccagtatagtgctgagtaggagtaatgagggagtagcatctttgtcttgtttctgattttagtgagaaagcttctagtttctcgccattaagtgtgatcttagctgtaggatttttgtaaatgttcttaagttgaggaagttcccctctattcctagtttgctaagatttttttaatattaaatatcatggattgatattggattttatcaaatatgttttccatacccattgctgtgatcatctgagttttcttccttagcctgttgatgtgatgaattacacaaaataattcatgaatgttgagccaggcttatatacttggaacaaatccatctggtcatggttgtaattctttgtttacattgtcgaatcagctttgctaatattttgttgaagatttttgcatctgtgttcctaagagatactggtatgtagtttccatttcttgtaatgtcttttctggttttagaattagggtaatgttggcctcacagaatgagtaaagaattgttccctcagcctttattgtctgtaagagattttagagaattggtttcattttgtccataaatgtttggtaggattcaccattgaaactgtctggtcctggtcctttcttttgggggaggttat

SEQ ID NO: 4141 - DNA, 1048 bp, Homo sapiens
atgacccaagaattctactcctaggtatctacccaagagaaatgaaaacatgtccaaagacttgtatgcaaacgttcatagcagcattattcataatatcccaaagtggaaacaatccaaatgtccatcagccagtgaatggataaacaaaatataacatatctatataatgaaatactatttagcaataaaaagaaatgaaatactgatatcacaacatgaacgactctaagaatgcaaaagaccaggtgcaaaagagcacatattatacgagttcatttatgtgaaatgtccagaaaagacaaatctacagatgcaaaaactattagtgtcttcctaggggtagaagtgagtacagggactaattataaatgggtccaaaataccttttggggatgacagacatgtttcaaagctggatcatggtgattgttacaaaacttataaatttactaaaaatcatagattagtacacttaaaacaggcaaattttatggtatataaatgatacttcaacaaagctgtttaaaaaaaattctgtgccattcttatatatggcatctgagaaactggggaaaagtgtagaatggtaagtgcaggaaaaaaaatagagatttagacagaagagaaattcatgactaaaagtatagagaaaaagaaattagaagctaataaagcaaccacaaaatgatagtcttttctaaaacactttagtaaaattcttcttttccattacgtaatcacacatacttactggcaactgggatataatcttttccaaacttcttagttctacccttgaactttcaatttcttgttgacataaatctagtcgctcattctgtgctgcaacacggacctttaattctcggttttcattcattaaagaaaatttgtctctaagtatttcgtctttgttctctaactcactctctagcttcaaaatactttgtctagattcagttagttgtgccatgacttctgaatttttcactgccatgatccttaatttttcttttccgttgttattttcttcttttaactgcct

SEQ ID NO: 4142 - DNA, 1711 bp, Homo sapiens
gatcctcccgcctcagcctcccaagtagctgggagtacaagtgctcatcatcacacctggctaattttttttcactttttgtagagacagggtcccactatgttgcccaggctcacattcttatctgcacatggaatattatccagaatacataaatatgttaggccacaaaataagtctcatcaaattttaaaggtagaaatcctatcaaatatattatctaaccactatggaataaaaatagaaatcaataataagaggaactttagaaattatataaatacataaaatgtaaacaaatgcacctgaatgaacaaagggtgagtgaagaaattttaaaaaaaattttaatgtcttgaaacaaataaaaatggatatacaacataacaaaacctacgggctactgtgaatgcagtaccaagaggaaagtttatagcaataattgcttacatcaaaaaaatacaaaaatttcaaacaaacaatgcacctaaaggtgcatgttaaaagcattattgaaaatattattggacatattactgaaaatgatgcttttagaattgcattgagaatatatttgataggatttctacctttaaaaatttgatgagacttattttgtggcctaacatattacatattctggataatacataatacatttatgtattctggataattccatgtgctgataagaatgtgagcctgagcaacatagtgggaccctgtctctacaaaaggtaagttcaagttggtcttgaactgcctttcccacactggaatagcaacagccaaacccaatattattagaaggaaagcagtaataaagatcagagcaaaaataaatgaaattgagactataaaacaatacagaggataaatgaaacaaagagttaatttcttgaaaagatgaacaaaattaacaaatacctttagatgactaagaagagagagaatccaaataaataaaatgagatgaaaaaggaaacattacaactcataccacagaaatacaaaggatcactacagactgttatgaacaactacataccaacaaattggaaaaactagaagaaatggataaattcctggacccacacaacctactgagattgaaccatgaagaaacagaaaacttgaatagaacaataacaagtaatgagataaaagcagtaataaaaagtcgcccatcaaagaaaagcccaggacctgatacattcactgctgaattctaccaaacatttaaagaaaaactaataccaattctactcaaactatttcaaaaaattgaagaggagggaacattttttttttttttttttttttgagacagggtttcactctgtcgcccaggctggggtgcagttgtgcactcatggctcaatgcagcctctacttcccaggctcaagcaatccttccacctcagcctccttaatagctgggactacaggcacatgccactacacctggctaatttttctactttctatagagatggggtttctccaggttgtctaggctggtcttgaactgagctcaggcaatctgcccacctcgacctcccaaagtgctgggattacaggcacgcaccaccgtgcctggcccacttctaaactcattctacaaggccagcattaccctgataccaaaaccggacaaggacataacagaaacagaaaacaacaggccaatatccctgatgaacacagaggc

SEQ ID NO: 4143 - DNA, 1026 bp, Homo sapiens
gaatggacagttaaatctacaaaagctgaagaaaaagaggatactaaatttgtttattatacaaagagttttttgtgactttcaagaaaacagtaaatttaatattcaagagacaaatacagtaagttacaaagtgggaagggtagtaaggaggtagcaacaatggagaaatagaatgaataaaaattttttttgagatggggtctccatgttgcccatacttgtctcaaactcctgggctcaaataatcctcctgcctcagcctcctggatagctgggattgcaggcatgtgccactgcacccagcttagagtgggtatgaatttaagatgtctggaaatgaaaggaagagggaaataaagaagcctgaagatacagattaaatcaggaagcagagaagcaaaacaggcaagcatattaaaggcttgaaagtacatgttcaagaatttctctctaaaaaagaagagggatatatctttcttttaaagagaaaagggacaaaagaaggaaagatgaatataaatattttagggtgaaaaattataaggatgaggacagttggccttattcatgcttttaaataatggctaattcagtaaatcaactttccaaggatcagtgatagccagcaataacttattttgacatacagagcccaaatgaacagtaaattatgacgaagttatgagaacattcacctcagaacctactttctctggattcctctcactgcatatttcttaccatttttctttttttcagttttttaatttttttatttttaagcactttcatgtctatcttcctatttttcgttctacttcctgttctgtctccctctgcctctctctttccccgtattgtctcacaccatgcaatagagaaaatgtcttttggtattgattttacttaatgtataaaatgtaaaatcttccttcttcaaatattagtagtttttcatttaaatatatgaattttcttccaagtaataaaatgatattctttggaaacaaattattacagttt

SEQ ID NO: 4144 - DNA, 1050 bp, Homo sapiens
gaattgacccctttatcataagacctgatttgtctctcttcttatagtttttgtcttgaaattatattttattttctttctttttttttttttcaggagaagttttgctctgttgcccaggctggagtgcagtggtgcaatctcagcctactgcagcctctgcctcccaggttcaagcaattctcctgcctcagccacctgagcagctgggattacaggcatgtgccaccaggccctgataattgttgtatttttagtagagatggggtttcaccatgttggcctggctggttgcaaactctgatcttaagtgatctgcccacctcggcctcccaaagtgctgggattacaggtgtgagccactgcacctggccttgaaattattttttctgatagaagtatagccactcctactcttttttggctttaatttgcgtggaatatctttttccaaccctttatttcagtctatgtgtgtctttataggtgaagtgtgtttcttgtaggcaacagaacgttgggtcttttttgattggagagtttggtccatttacatgcagttattgataagtagggaattgttcctgccattttgttatttgttttcttattgttttgtggtcttctctccttctcttccttcttgtctcccttttagtgaaggtgattttctctactgttgatacgggagctagaaagaaattatctaggcagatagtgtgcataaaaggagtcttcgacaaggcttctcttttaacaaaaagcagctcccaaatcatttcttttctaacaaagagcagcctgaaaaatcaagctgcagacatagataagcaagctgaaagctttgcatgggtgagtgccaacagctgtgccaatagaaaagggctacctggaagccaggtatgttcaacatgggggctccatcttcccttttcattgtcaccacatgtacagtaaggagcaggcaacatggcaccggccaggtagagaacccttctgcataataaaagattaggatgggacagccagcttcttcacatgctatgcaaa

SEQ ID NO: 4145 - DNA, 1030 bp, Homo sapiens
atggattgagttttctttcccacatggatattgaattgtaccagcacagtttattaaaagatgtctttttttctactgaatcacctttagaactttcttgaaaatcaattgaccacatatgtgtgggtctatttctggatactcatcttgaattcagatattgagtcttccaattctgtttttgttttcaaagctgttttggctttctaggtcttttaagtgtcagcatgaatctaaaattcattcgcttatgaatttctacaaaaaatcctgctgtgattttgattgggattttcatctgcaaataacaagtattattacttcttttcaaatctggaggccttttatcctttttgttttttttaccttattgcactggctaacatctccattaaatgttgaaaagaaatggtgagagtggacatccttaccttgtttctaatctttgcatgaaaccattcagtttttcaccattaagtatggtgtcaactgtaggttcttcatagatgccttttatcatattaagggaattagtcttctatttctagattgttggggtgtgtgtgtgtgtgtgtgtgtgtgtgtgtgtgtgtgtgtctgttgaagatatatacaacataatgggaggaagtggagcaagatggttgaatagaagcctctaccaatcagcccctctgcacactaaatttaacaattatccacataaaaagcaccataaaaaccaaaaatcaggtcagcagtcacagtacctggttttaacttcatatcactgaaagaggcactgaagagggtaagaaaaacagtcttgaattgcagatgccactgcttccatatcccccagcagtaggttatatagcgcagagagagaatctgtgcattttggggagtaagagcgcagtgattttgggactttgcattggtactcagtacagccctatcacagtggaaaacaacactgggcagaactcagctggcacccaacaagggagcatctagaccagccttagccagaggggaatcacccattcca

SEQ ID NO: 4146 - DNA, 1076 bp, Homo sapiens
taaaagaaaaaaaaagacaattatttagcccaaggggaagtgaagtgaagtaactgctgtttcattctaatgcctgtttgggcctgataatttaaaagggcttacattcctaagataaagtctcttttcttctttttttacattgtttttagtgatcaggaaagagtagtatgtttgatatagcgacaataatccaaactgatcatgagataactaaccatgttgtgagttgtttgctagcctaaggcattattcaatagccaaaagcaagctgtggtattgacaagatcctttcactgttgcacttctggtactgtaaagaatggactagatccgggcaagtaaaaagttagctggctgttttgttagtccaagggagagaggatgcaaacctaacctagagcattggcacataggatggaaaagatgggttagaccaaagatatttctgaaagagaatttcaagattagtaactgaatatgaaaggagtgagagggggaggaattaagaataactctgagatctccggcttgggaaaatgggtggatgatgacaccattaactaagaacaggaatataagatcatttgtatttgtacaaatacaaatttggaattcaaggttaagattggcatttgagaaacagatttgggaattaataaatgaagctatgagaatagataaggccatcaaggaagcacactggagaaaaaggaagaggtccaaggaaagcagtgcaacatctaaaggcagcgagaaagcccaaaataagaattatcggagtgacgggaaaatggcatttgagaagatcacagaagagagagcatcaaggcatggtagtctacagtgttaaatggggcagaaaagtcaagtagactgcagaaaaaaaagccagccgttttgcaatgaattcaacaggttaaaataactaccacttgtagaggaggaaaaaaacttttccctatcctcttaggttcagtacctggggccgtacaaattaaactagcaaaagacagattaacaaaagtgaaaagtttattacatgagcctattggagcttcatagaaaagttgtga

SEQ ID NO: 4147 - DNA, 1058 bp, Homo sapiens
atagccattccccaccactcgcattactcgcattactgcctgagctctgcatcctatcagatcagcagaggcgttagattctcataggagggcaaaccctgttgtgaaatgtgcatttaagggatctaggttgcatgatccttacgagaatctaatgcctgatgatctgtcactgtctaccatcactcccagatgggactttctagttgcaacaggttcagggtttccactgattctacattatggtgggttgtataattatttcattatatattacaatgcaataataatatacataaagtgcacaataaatgtaatgtgtttgaatcatcccaaaaccatcccccataaccctagtccatggaaaaaattgtcttccatgaagctgttccctcatgccaaaaaggttggggaccactgacccaagtgataaaaacaaggaatctttttattacccaagtgataaaaagagatccggggggctctccaagcagaatgagcaagaggtgggatggcctgaagcatgaacaaacttggtgtgttcatgggacagagtatcagagtggttagagctcaatgaacaaggagaagagtggagagagatgaggtcagagacacagatggggcaagatttggagagcctcatagactctgatgagaagtttgttgattattctgatgcaatgggaagtctttagataattttaagcaaggaaattatattctctggtttacgctttagaaatatgactctggctgctatgtggatagaggaaggacaatgaggaatcaagagtgcagccacagagaccagtgagaagtgatgatggcattgacctagattggaagagtagagatggaaagaagtggttaggttcagaatatattttggaagttggagctaatggaacctattgatgaattggaagtagatactgatggattgaatgtgctgtgtgaggaaaagagaagagacaaatagggctcctaggtatttgtcctgagcaactgagtgtataattgtgtaatttactaggaccggaaaggctcaggggaag

SEQ ID NO: 4148 - DNA, 1026 bp, Homo sapiens
tcttagcttaattgctattttcatcaccttcataaattcacatctagttcacagcaacattctagaggaatggtatatgtcagccaataaaaaccacctcattagaaagtgttaaaaaagtcattttaagaaacaccattcaaaatttgagtacgaaaattaattttgcagcacagatatacgttgagtagaacttactgttcaaatatagaaaatgaccaatacatataagaaaaatatacttatttaattcctaaaaaacacatagattttgctgataggaaaaagagaagcagggatataaaggcataaattgcatgctttcaaaacacacaggctgtattgatgagaaacagagatgtgtggacatggatgcgtgaaaggactcactaaggctataatgaagggccatgaggaaagaaagcattgacatttgttctttcctggaccttgaccttgtgttatcaggaccagatatagcagatcttataaagagggtggaaaacaaaaccagtagattcacataattcaattccaggccaagaatgtaaaagacatgagattggtgtttttgaaagccaatgctacctaaaggggtaaaaattcaaattgtttcttccataaaattactttttaagaaatgataattagaattgaaacaacaaaactctcaactactggttttttacaaatacaacttttgaaggaagagtcaagaataattcattacccttcttaaaaccctgtcccactgtttctcattatcagccactttatgtcccaaatcacagagaaaagggggtcttccttctttttcccaccctttttttttttttagacgatgtctcgctctaacgcccaggttggagtgcagtggtgcgatctcagctcactgcaacctccgcctcccgggttcaagcaattctcctgcctcagcctcctgagtagctgggattacaggtgtatgccaccacgcctggctaatttttgtatttttagtagagatggagtttgaccatgttggcc

SEQ ID NO: 4149 - DNA, 1034 bp, Homo sapiens
gagacccccacacactctgaccctatgtctgaaactctgttcaaaagtccaaatctcaaatatctatggaatgcctagcaagtgccaggcactgggctaagtttacctaacccagcttgcttgcttctcttaagattcactgtgccattccacaccacgctcaagcaatcaaccccaaactctcccactcactctgaggaacaagggttcacactgggagatgaagtgggcagtggagtcagggaggccagtttagggagctccacatcccagctctgtgaacttggctggttactctgcctttttgtgctttcattttctcgtctataaaaagggcttaataacccccacctctctaggttgctgaaaggattaactcagatgatgcacacaaagttcttagccctgggctggtaagcatagcttttatgattcatatttagtttgtgtttcccccatcagaacctttggtgctctctccctctttgcagacacctaggccaattcttgtgtgtctccttatgcttgactgtgttactatctggaaattattcttaccatttggaaacctcagtactgtcgacagcaccattaaaagcagttccaaatggttaccacacaagaggaggcaaaagcagtgccccacagcagctgtgtgtgcactggggaggggggttcctgtgaggaaggaaccagagaggaaagggccaaactgacagcctcttgcagccctccagcttgctgtgccagctgctcttgcactggatgccgagctgtgcggcgagcacttcattcctaatgatgcagtgtcagttataaatcacttatttaaaaatcaaactggccaaccctagattgtctttatcatagcaccactttcactcacttgcattccaaaggaattttagaaacattatttaacttttcatcatggcatttttcaaccatatgcaaaagtagagagaatagtgtaaccaagtccagctttaagagttgtccacattttagcagcaaaaggtctcttgagtgaaaga

SEQ ID NO: 4150 - DNA, 1022 bp, Homo sapiens
cgacagtacagtgggaaagacaaacgtttcatgggatgtgcctgagagagcccagagggaagctcaggatgcttctagctttcaaacccagcttacctctgccttgagcagggctctagctcctgtgtatgcagaagggccagcctcttcatcatacaatacagattggtggactgagagagatccaaggaaggtcccagattctctcttgtactcatttgttgctaatgtaaagtgctactatcggagaagcactttacattagcaacatggtcttctcaatatgactacctctaaagtaggctcattttatgggtatttacccctgttgaaacgtatcctcaggaggaagaaagggactgatcaggacagcttgccaacttcatactttacctgggcctaaccctgcaatcaagcaccattgggaataaatgattttgccattaaattctaatgtgactaagactctcatcatgctctgagctttggctttccaatctgtaaagtgaggataataatgcttacctaacagggccattgctagggtgaggggagattgcagatatgaatgccctgggtaactgtaatgtacagtgtgggtggtgggggctattcttgcatacagcctgctgcctcccaggcctcaggctaatcaggcctggctaggttagatccatgggtcttccctgcactttctgtcccctcccactacacatccccatgcccttccctagcatccttttatgtgacatcgtgatatcatactgttggcaccatttagccttaacctttctttttaagaaacagacaacagtaatgtggactgagaaatgacaggcacacagaccaatctatgatctttatacaaagagacacattaaataaatacctatttacattatagacaaataatgtagtcagtgtacttagttgtagctgggtaagaatgagcttgtctgtacttcctggctgattgagtgctcttagcaaagtccctacaacatttttcaaacagagttaac

SEQ ID NO: 4151 - DNA, 1090 bp, Homo sapiens
atggggagccttgcttgacagttttgtctttctgtatgtggatggtgcacagagcagagctggggacagtgacccttcaggggtctgttagcatgagttgatgtgcatggaggctttcatttcttagcaaaggaggtggaaagatctcttgcttgttaactgtgcatcatgaaagtgagagaaggacaatggaggagtgagatgtgtctgtcttcagcctggtccctggtgctgctgtcttcagcccctatggagagagagcttgaaggaaaaagtttaaagagctattttcatgaggtactttgtgatacttagagcacatattctgcttctgtgggaccctggtgacaaggtgtggcacagagtcagggagaaaaccatgatcccaactcttgcaggaagtcagcactgtgggcctgcatgctggtgctcttatcataaaccctgagagcccagacagcagtatggtaccctcaagtggcttcttgggtgaggatatcaatgagagaaaaccggaaggggacaggaatagcagggaggatgctattgatgtaatcaatggactggctcatgggcatgtaggcaagtggggtaagaacacgatctttgtgttattgaatttctttggaattaaacaggatccacaggaaggtggcctggggatgttcagattacccatgaaagtgaaacattagaagaccacattcatgctggcttggctggcttgagctcgggggtttgccgtggctgccccagctgggatggctgagggcacacagtaactgcagggctaggtgctctcaaggtaattcatctgtctccaagcctttctgggtcaccacttacgcctgctctcatggtgaaaacaaagaaaagacttcaaccaaagaccagcctgtggtttcagcaggtccagggtggtccttgcctgagctggagtgtcctttggtgataggatggcacctactaaggtgttaggtattaatctcagtggggaaggggtgggtgaatttcagaagcagggttggagcttcagcctcaggaggccagacctcctctctgagcagttctacactggttgtgttcactg

SEQ ID NO: 4152 - DNA, 1062 bp, Homo sapiens
cccctataacgattagctggtccaacatgtcaatagtgctgagattgaaaaatcctagcttagggtatatatggaggagtagaattctcactcaatgataggatattcacagtttcaactttattatataatactaaattgtttacccaagtggttgagcaagtctatactcctaccaaagggaggctccacatcctctgatattgtcaatcttcttagattttgccagttcatgtttttttccttctgaaatgcacatttgtgtgctttgtccatttttatagagtaaatgtttataggattgatttgtaggcattatttatatattctggatactaattctttgttggttgtatgtgttgaaaatatctcctcccagtctgtggcttatcctctcacttcttcctggttcttttgatgaacagatgttcttaagcttcatgtagttaaatccatcaatcgtatactatccatcaggcttgtgatttagggtcattatttaagaaagaatgtcctgccctgaggttatcattgcttcccaagcctggcagcattttggggttttatcttttccagctggcaagacctggagttcctcttgctgaccccagaggtgcctggccttccttatcctccactgtttgctcagtccttatgaacactcagattgtatttcctaatgtactccattttctctgttgggctctttctacaacctctgtagccctctctacccaggactggactctactgtctcgggactggcctcaaaatgaactgacttctctggaaccacagtgccccacttagtatcagcactgctgaagatgtcccttagagattagccatggcaggattgagccccagttttctaaagtacttggatggtttcatttgcactcatgtggggtattctcctctagggctaaaatcaaaaatggggcaaagctgaagatgccaagtggtccccaggaacattactgctcacaggagggacaccccaagatgagcatatctgctctgaccacataccttctagccaggcctatctacccagggccc

SEQ ID NO: 4153 - DNA, 1029 bp, Homo sapiens
agagcgtcaacaaaggaacaatggatttaaactacaccctagaacaaatggacttaacagatatttacagaacattctacccaacaactgaagaatatatattcttctcatcagcacgtggaacattctccaagatagaccatatgataggccacaaaacaattctcaataaatttaagaaaattgaaatcatatcaagtatcttctcagaccacagtggaataaaactggaaataaactccaaaaggaactctcaaaacaatgcagatacatgaaaattaaataatctgcgcttgaatgatctttgagttaacaatgaaatcaagacggaaattaaaaaattttttgagctgaatgatgttagtgacacaacttatcaaaacctttgggaaacagcaaaagtggtgctaagaggaaagttcgtagcattaaatccctacatcaaaaagtttgaaagggcacaaatagacaatctaatgtcacaccttaaggaactagagaaacaagaacaaaccaaacccaaacccagcagaataaaagaaattaacaaagatcagagcagaactaaatgattattcctcttaagttttcacccaccatctgtctcagatgccccttttcctccattccttcaagcttaatgccaagcccactatatccagtcattggggacacagggcctctgtcagctgagaattgaaaccctgctccctcccctgacaagacacggactgcttaaatgttaaactatgagcatttctttaagaaataaactgcaggagaaatgtcttaaaggattacatggaagatgtgtgaagtatagatctctaaacttagaaacaatcagtgattcttaggtgcaaaagaatcatctggaaagtgactgaaaaatgcagcttcccaggccccattctaaggcagttagctgcaggggacagtgtgaaaaatcacagttggaggaacattggcccagatgatccactaaaatgcttagtcttcacacttaaaaagagtttggagcaatgctac

SEQ ID NO: 4154 - DNA, 1043 bp, Homo sapiens
ttctgtaacttttaaattatatccatattaaaagtgaatgagagagagagagaaactgtcctagtttttcagagctttggacttgtggtagccacacccgatttgagtcagtgaaagctttctcattgagggggtgggggcagtgaggtgaggcctctttttagtaaagtgtggcttcagcccactgtggagccctgacctttgccctggactgaccagagtgactgcacacaaagcttacctgataatagatttacctgacctatgagacggcctttgcttaaacattttgagggagtgaatataattcacacctataggtggaggaagaacagtggaccaagctgaaggcagaatggagctctgggggctggggacacagggagcattccagggcctgtgaaatacagagaaggagaaaggagggtcatctgggggagggatgcagggtggaaccaccacctacagctttgctggggcaatccttccaaaaggtaagactgctggaatctgaatgagcaggggaaatgttaacagtaaaaagactgctatgaggggtagccatgaaaaaggacatagagtagaaaaagccgatggagatgatatagacaatgatgtgtgttagaaccacttggaggactattggaattctgattcttttaggcctgggataggggggtagagaatttacatttctaacaaactacctggtgctgctggtctggaccacactgtgagttgcagtggtgttgcagatgattgtgtccagcccaccctggaggggtaatgcctgtgaggaacatgtgagagtcacaatcaaagaggtccagggttgaccctgtggtgcctctagctgggcagtagggattagggacagacagcctcatggatgaaatgccacttaaactgggtttcagaggagctggggtagaggagggccttctaaggaagcaaagacctagaaaacagtccagtccagttcatcatttgggtttcccagggaaatggtgggcagaaaggcagttgaagggcctgagtgccag

SEQ ID NO: 4155 - DNA, 1030 bp, Homo sapiens
cactttccttctacacgatttgtctcctcctcaaatctaacctttctcttctgttcatcttcttacatagtctcactgctacttggccctactaaaatttatttttgcttcttaccacatttgccacaaatgttgatataaaccatttccattcttctgagatgtatcacctacttacagaggttattatctacccaaaatcttctcttcttcactccacttgaacatacttgcattcacattctcctctctgtttcagatatcaactctttcctcctggctcaaaggaaggtgcattcttttctgactacacccacatctctgtttattatccagttcagttagcattaggctcggctgcaaatagaaaaatccttaattaacagtggcttttaacaaggtgtttccatcaggtgaaaaatctagaaggcggctcttgagggctcatagggcagctccacaagttgatttttccatctcactgctatgccatctctaaagcatgccttcatccttatggcacaaacttgccgcctgaaaaccagcgaacccaactttccaggaagtaaaatgcactttaaaagatcaggagggctgggcgaggtcgtttaggcctataatcccagcactgtaatcccagcactttgagaggccgaggcgggtgaatcacctgaaggcaggagttcaagaccagcctgcccaacatggtgaaaccccgtctctactaaaaatacaaaaaaaaaattagccaggaatggtggcgggcgcctgtaatctcagctactcaggaggctgaagcaggagaatcgcttgaacccgggaggcggaggttgcagtgacccaagattgcgccattgcactccaccctgggcgacagagcaagactccgtctccaaaaaaaaaagtcagggacggcctcctctcttttagatgccgtccctaaagacatgcacacaatttatacctaattggctaaaacgtagtcacatagccacatttggctgcaagagagactataaaataagctatt

SEQ ID NO: 4156 - DNA, 1030 bp, Homo sapiens
acaaagaagcaagactatagattcattttctgaaggggatcatgtatggaattttttgatgagtttttacttttacctctctactcttgattttctattattgaatactcttttaaaacactgatttttaaggctttatatatgttttccaggctgatgttcacatctttttttcatgaactatcagaatatagtgaacacttttcaaatatttaaggacttaatgtttaaaaagccataaaatagagagtggtaatactaccaaataattacttaaaactgaaagctaagttatcaatagtttatataagagatgttttctgaggagatgtgcatccagtgagaccaaggtagaaagtttatataattgttttttttccagtaaatatgaaaaaaaaagctgtagcttgtttattacatgtccaaaatacagtggagccttactttaacacaatgtactgtaacttggaatttgttctgttatgagtctatcttgaattcccatccatgaaactgtagtcaccaaaagcaacaagtattttcacatgatgtaaaagaccatactatgatggccattgctagaaattgaatcacaaataatagctaataatttttcatttttcaaaaaagatcatttggatagcagctatgtataaaatggaaaataaaaaattattctattttgcatgaatagttcagactttcccataccacagccaagcagtaactaaaattaggatcttaattttcaatgataaaaggtctaaggttcatttaattatgctcctttaacactgtctttctagatttttcacccagtattttcaaaatttgggaatgtaaacaattgatatatttattgtatgttggctagcagttcatccttctgcaaaatatgcattcagagaaatgtgaagcttgttttaatgaagacttaaaccatttgtgtcatttgtgttttcatattcaaatacaccaaattaaaattctgaacctatatttttcatcattaacttcctaatataccaga

SEQ ID NO: 4157 - DNA, 1021 bp, Homo sapiens
catatgatggccatacatgttttgaaggtcgacaaaaatttaacctatgtttttcacagaggtcatgctagaaaagtttaaccatgacatgaattaactatacttttgctattcacttcccatgttttcactgtaataaggacaaataattaaaaagtatttacatctcctataagaagctgaaccatgagtgtggtttgtttttaatatttagtttaattcttctatgattgttaaattaatagatttttctaaacatagaatgaaatcaactgattattattctttggagtgttgagttttgttttttgtcattgttgttgtttcagaaatgtaaataaacatttaaatagttcccaaccttcaggatttggacctgccaactctttagaggatgttgtacgccttcctgacagttctaataaaattgaagaggacagatgctctaacagtgcagatataacaggtagttttccaccctaaagagagtgctaatttataaaaggtcaggttgttcgaatgtgattgttaaattaattggtgctctggaatttaaaaatcaggccttagtttgtaagtttatgagatcttattcacagttgttaccatggtgcctgtcttaacgttgataactggttattgttaaagaaatttgaattgtctcacttgatagaatgtcagtattttaccttatgaaatctacctgtagccaagttttgactttattctttttattaaaggtccttcctttataagatcatggacatttgggatgtttagtgattctgagagcactggagggagcagcgaatctagatctctggattcagaatctataagtccaggtacatctatatttaagtctggcaatgaaaactcattgaaagatcagtccttttttaggtattttttaactaccttgtttttatagtgaactttcacacataatagagaggaaagtgtacaatttaaaaaatagtttttaaaaacccctcatatattcgccacccaggctaagaat

SEQ ID NO: 4158 - DNA, 1042 bp, Homo sapiens
ggaattggggcccacaccagaccctgaatctgatagtgccttggtcttgatctctcaatctctacaactgtgagaaataaatctttgttaagtcactctgtggtatttttgttgtagcagcctgatgtgactaagaacatacagatgtagtagtacatatatggattctgtcatatatgaaaatggatattgtgtcattaagatacaaaataagcattctggtaaaaaaaaaattatctctttcatggaacagaaatagaagttctgagattactagttacctgaaagtgtagtaatgaactgtgaaaaactgttgaagaagccgagcatttaatgtggcttccagagttttatgaaaatgctagatgcattaaaacatgtactaggacaattcagcctaaaatagattattctataaatagccaagtttaaaaaaaatggttgcacacttatctatatttatacatacacttaatttttttacagtctacttagaactagttttttaccacttcaagtggaacacagaagcatcaccaccgtagaagttcctttacctaatctgggttgtatttgatatatgtaaattacatccatatacgttgaaaacctcaccagactctcataatttttgcttttaaaagtcatacatattataaagaggttaagaggaaaaaagtagtctattatttactatttctattcattcttcttgcattctagtggttccatctttcctctggtaacactttgtctacagaacttcctttaccactattttatagcaggtctgctggtaatggattcacttggttgtgtttcatatgagaatgtctttatttcgtctttatttctgaaggacaccttcactggatatagaattctaaatacagaaatcagttctttcactgctttaaaaatattgttccactgccttatggcatccgtagtttctcatgagataccagtaatcatatgaattatcattccccaattgtggcatgtgtttttctttggctgtttttgtgggattttttttgtc

SEQ ID NO: 4159 - DNA, 1047 bp, Homo sapiens
caagttcaggaaaggtgagcattttttaatttgtttttatgacctgttttaaattgtgaatacttgggttttacaacccatttcttccccaattcaaaaatagcagaacagagttgttgagaaggtgatggagtagaagggggagcgcgcactgtggggaggggtggacaacaggcctggtcctacctgtgactctgcactaccctgtgactctgggcagggccccctcggagacccaggttcctcagccaaccggctggatcaggtcatctctaaaggtcccgccatgctcacatttctccctctattgaggatcccaggcacaaaatttgtttttggttcaatgcataatactcccttcctttttcttttactgcagatatcttctaaaggggctcaatagggttcaatatgcctaaattggatcttctcagtcttggaaaaggcatttttagcagtgatcaagggaaactgattagcgaagtcacttctaatccttcacgtgtcagctgtgttcttgtaggctttgcttagaacctaggtttttacttccacagtgacttaataaaggggaaagaattgactcagagcccagatgaattaagaactctatctttttacagaaaacagccaaaacaaacactaatgagtttttgattgatgtggataaaggagaaaactactgtttcagtgttcaagcagtgattccctcccgaacagttaaccggaagagtacagacagcccggtagagtgtatgggccaggagaaaggggaattcagaggtgagtggctctgccagccatttgcctgggggtatgggtgctgtgggtgacttctggaggagtagctccaccctcagggctgggatatacttccttggttaaatattcaggaaaacaaactgcctggaggttttttgttgttatttgtttgttttggttttgattttgctttggtacaaaaaagattttggacatttagaaatgtttctgtgttgattgtgcccttgtattagcaggtgttttcttgagcacctgtcatgtgct

SEQ ID NO: 4160 - DNA, 1030 bp, Homo sapiens
tgtctcttaatgtcaagtctgcagaggtgaaatagactccagtctcccatagcgctcccaggcttattaggaagaggaaattcccgcctaataaattttggtcagaacagttgatctcaaaaccctgtctcctgataagatgttatcaatgacaatggtgcccgaaacttcattagcaattttaatttcacctcagtcttatggtcctgtgatctccccctgcctccacttgccttgtgatattctattaccctgttaagtacttgatgtctgtcacccacacctatttgcacactccctccccttttgaaaatccctaataaaaacttccctaataaaaactggctggttttgtggcatcacggatcctaccaacgtgtgatgtcccccgtggatgcccagctttaaaatttctctcttttgtactttgtccctttatttctcaagccagcagatgcttaggaaaacagaaaagaacctatgtgattttcggggcgggttccctgaaagaccgccaccatggacagctcagccagggccatcttctgctctgacattccctcatgccctgccttgctgttgtatcatggaaaagggtgggatgaaggtttaggaggtgacctgcattcatgtcccaaccctgccacttttagctatatgaacttggttgactcacgctctctgagtctcactcaaaaaagaccctatatgtgtagatttatagatggggatggtccagatggtgtgagtggtcagctccggctctaaatcctggcattttctgggatgtggatgagtatggcgagaggcaggcagcccagctgctggcagcacgtggctagtggatgccggtgcctcgagctctctcagagaccacatccaggttccctgtataccagccccaggatgtacacacaccatagtaccacccctaaatgtagatggcaaatatttatttgaagtgttaccagaaagggatcctaatttagaccccaagagaggactcttggaccttgggcaagaaagaatt

SEQ ID NO: 4161 - DNA, 1027 bp, Homo sapiens
aggggttttcagtgggtgagtgtgggccattgctgattcttttgcctctgagctgagaaatcagctcctaggggtcttgcaggatgtggatttagttgtggtttacctgccttgcttgccagcagtaacaacactgggaagtgaaatgagaactgtgtccttgacaccaccagggacacagcagggagtgagaatcggagggaggataatgccttcagtttcgtttagttgtctttcagctagcaagatacatgaaactgaagaaacagtaatataccatatatttcaaaaagaaaaaccaaaccaaggctagatgtgtggacccaagttatgcatggagatgtataagcaatgctgtgtgagtgaagggatccagtataattaaatctctatgtacccaaactactgggagttttaaaaatcacagtactatttacttttatgataaagtgataaaagtgctgggcattttttatgataaggtgctgggcaattcatcactggaatatactgaaacattatactgtatgcaacacatgttcagcacatttgttaaaggcagatatgtttaaagaagttgaaacaaggggaatgcaattctccctgatacatccttggctgtggagacacttatttcatctagaataatattttcgtctactttctgtaaagcaagaggtgaaaatactttctttttgtttttaaagttaagactatcttgaaaatggcaacttggaagaaaccttaaaggtaaaatttagttaatcggtgtaataagttcctatggtttctctggtctattccatgccatacacaacttaatagccattctagcagtgttataacaacactgttttaacaacttcagaagtaactccactgatgggtgtagccaagagagttttatctgaactccagatcctggcagtataagacttttcaagcaaaatgcagtcggtgccttagcttcatggagtgcaagcctcatctcctacactgcatgtggatttccatccctctaggtctc

SEQ ID NO: 4162 - DNA, 1076 bp, Homo sapiens
gacagggtctcattctgccgctagggtgcagtggtgtgatcacggccctctacagccttgacctccctgggctccaatagtcctcctgcctcagcctcctgagtagctgggactacaggtgcatgccaccacgcccagctaatttttgtatttttttggagagatggggttttgctgtgttgcccacgctggtcttgaactcctgggctcaagcgatctgcctgccttggcttcccaaggtgctgggattacaggcatgggccacccactgcacccagcctgaagttcacgtatgatttctgctttataacaggggaagtggaggaggtgtggtaaggagcccacgctcacatggccagtaagtgaaggaggcctggcaaaggccacactcttggtctgtcaccctgctgcttctcctcacttccttgtgtaacagctctgtcatcaatgggctgtgtgactgcacacgctgctgcacccctgtggctttcagtttccctatctgtaaggggttgcactagatgctccccaaggccgaggtatgtgggcctgagtgctctgcattccctgatcaacttcacttcatcaagggtctcccatggatgtagcccagttgtgggcacttgggagatccaggagaagtaacatcatggcctctggctcctcaaggaatttagaatccacttgaggacatgactggtggcacaagatagtgaattattaatttcccaatgtgtgattcagactagagtgtaagggttctggaaaggcaattgaatgagtcttgcctagtggaaaaattgatcatcctaaagggagagcaaatcctccttaacatttgctaaaaattgctcctctgttaggcaagagtcagatgcacttgggcacatcatcaccatctgactcccagtccaccccaacacccagcccgggagccctgggaagctggcggatgtgccacatttcaatgagaccatgaacccttagagggcatgatggttttttcctccacattatacacttccttatgttgaaacgttttttccacagggctgcagggaaagaagaagatgtat

SEQ ID NO: 4163 - DNA, 1031 bp, Homo sapiens
gtagagacgagatttcaccatattggccaggctggtcttgaactcctgaactcaagtgatcagcccgccttggcctcccaaagtcctgggattacaggtgtgagccactgcacctacccattctgattactctttctaaactgcacagctcattcatgtacctgccttacttaaaacccttagcaattacctatttatttccctagggtaaaaatccaaatttccttaccatgtcctgaaatatactcacctgtgatctggccccgagttcctctctggatttatctcctgtccacctcccctcccacacttcacactctacttcaagccatactcagctgctcaaagcaccacacttgggccacgctttctcttttataacttgaatgccctcctgcttgcctggcattcctttggtccccttctttgcctgctcagctctgactcccatcaggaatgagaccatattcctcaggaaacctccctggttctcctgagccagaatggactccctctgtgctctcttaagttgtggtgccctcctgccatggcagctaggccggggcattgcctgtttcccttggtgttctgtgagctcctcaagtgtgggcagcacatcttagcttgttctgtctccccagggtctggcatggtacctagcccttgattagtgcttgctgaataaatgaatgattgagtctctgtcatctcacagagtacttgcaagaattaaatgacatgtgaaaatactttgtaaactgtaaatgtgttagggacatttctgagagtcaaggggtttagagaggaaatgagcatgctaggcctctggacagtgaaccgaaaggatgttgagctgtggtgttctaggagagtaccaggactgctctggacatgacatactacctgggactacttgtgaaaggaaatgagcatcctgagaaatcactttgggtcctgtgtactcagggaggattgtttttatatggttctggtttgttcaggaagcacagtctgtcctccagtcaggcact

SEQ ID NO: 4164 - DNA, 1038 bp, Homo sapiens
ttgcgtatgttgaaccagccttgcaacccagggatgaagccgacttgatcgtggtggataagatttttgatgtgctgctggatttggtttgccagtattttattgaggattttcacattgatgttcatcaggggtattggtctaaaattctctttttttgttgtgtctctgccaggctttggtgtcaggatggtactggcctcaagaaatgagttagggaggattccctctttttctgttgattggaatagtttcaaaaggaatggtaccatctcctctttgtacctctggtagaatttggctatgaatccatctgttcctggactttttttgattcgtacgctattaattattgcctcaatttcagagcctgtttttggtttattcaaggattcaacttcctcctgatttaatcttgggagggtgtatgtgtccaggaatttatccatttctttagattttttagtttatttgcatagaggtgtttatagtattctctgatggcagtttgtatttctgtgggatcgttggtgatatcacctttatcattttttattgtgtctatttgattcttctctcttttcttattagtcttgctagcagtctatcaattttgttgatcttttcaaaaaatcagctcctggattcattgattttttgaagcttttttttgtgtctctatctccttcaattctgctctgatcttagttatttcttgccttctgctagcttttgaatgtgtttgctcttgcttctctagttcttttaattgtgatgttagggtgtcaattttatatctttcctgctttctcttgtgggcattcagtgctataaatttccctctacaccctgctttaaatgtgtcccagagattctggtatattgtgtctttgttctcattggtttcacagaacatctttatttctgccttcattttgttatttacccaatagtcattcaggaacaggttgttcagtttccatgtagttgtgcggttttgagtgagtttcttaattcttagttctaatttgattgcat

SEQ ID NO: 4165 - DNA, 1035 bp, Homo sapiens
gcggattattgatcccagtaacctgtctttaaggtttaaaaaccatgtattttgcaatttgttctcaatggcttgctggctttcttcttgggtttcttttcattcctggtaagtaattgtgctagaaatgggccacagtcactaggaaattgtctcttagggtcatccatgcatcataggactggatgggagggaacctggtaggtaggtaggtctgctaaagtgtttgcctgtcgttcagtaattttagatgttactgcttagaaaaagagatagaaaagaataatattgactgctaagatctacacatggggagtagggcttttattctaaaaattttgaattattgaaatccagcacaaatgtgatgcataatttttatcccaaaataaaattgtgttttcatttgtgcatgtcacctgctagttcttgtgatgtggacatttttttaacctatttagagtattatcatgaatattttaaattttcacctaaatttacgtattagagattaaaaaaaaaaaagaaaatgggctgggtgtggtggctcacgcctgtaatcccaacactttgggaggccaaggcaggcagattacctgaggtcaggagttcgagaccagcctggccaaaatggtgaaaccccttctctactaaaaatacaaaaaaattagccgggtgtagtggtgcgtacctgtaatcccagctactcgagaggctgagacaggagaatctcttgaacccaggaggcagaggttgcagtgagctgagatcacgccactgcactctagcctaggaggcagagtgaggctccgtctcaaaaaaaaaaaaaaatagaaaataacaattagacctactgttggtgctgatggatgaagcagcagaatgatgacagtaagcagtggctttcctgcctggctttgcctttggggccttcaacatttagtatttcagcttggcctctaaaaaaatgggagcttacgaatagctaccttacaaatatattaggtggaaaaatcactggtgtgtgattttggg

SEQ ID NO: 4166 - DNA, 1146 bp, Homo sapiens
aaatgggcttctaattcaagcattcagtttccagagcccttgctcctaaccattttaatctgaggccagagctcagggagaattgacatctttcaagacgagagggtactgagtccagagagggcagaccagagcaagaaatcccaggataaagtcctttaacaagaagctggaggaggagagattagagggccctcctggaaaatactaggtgctacagagaggcccagaggatgactggagacaggccactggatttggctactgagaagtcactgatgacctgttttgtttgagacaggatcgtcctctgttccccactccctgcaatccccctcccctgtttccccccaggctggagtgcagtggcatgatcttggctcactgcagccttgacctcctgggctcaagcaatcctcctgcctcagcctcccgagtagctgggactacaggtgtgcaccaccatgcctggctaattttttgtatttttcgtagagacagggttttaccgtgttgcccaggctgcactggtgaccttttgagagatcgtcggtagagcaaatttccaggggttaggagagagtactaagggaggaaatgggcaggcttggcatgaaataaatgacaaacaggacagtgtatgaggctggcagcaggttcaattaaaaatttgccatttcagggaagacagggtagcctgtgcccattgatggaccaagtaaaggcaacagcccaaaacagatggtgtgtgggggcaaagcagaagggcaggagggtcagtgggaagagaaggggcccagctcagaaggggaagggaagaggaccatgaaaacgcagcactgatgtggagaagtcctcttttcatctgaaataggggtgtcactttgctcctgaccttattatgctagagccactgatgtccgatggggaagagagcaggaataggaagagatggcccaggctaagccctccctgtgagcgcactgctgattgggctgcccctttggagcttgggcactggttcactctcctctttccattggcccttgatctggaagggatgggaagttgggtttattttgttagagcctggttgtctgtagcaagcctttactgtattatctccaagagacctttgtgttgggg

SEQ ID NO: 4167 - DNA, 1049 bp, Homo sapiens
ttccctctttaacagtgtatccttaaagtcataatgaatctgatctgcggcataaaaaaagtaagcacaattggatcgttttggtttttcacccatcattagcattgtattcaggagagtgaggaaatgcattttcttctctctcttttttatttttttgagatggagtctccctctgttgcccaggctggagtgaggtcgtacgatctcggctcactgcaacctccacctcccaggttcaagcaattctcctggcttagcctcccgagtagctggaattacaggcacctgccaccacatctgactaatttttgtattcttagtagagttggagtttcaccatgttggccaggctggtctcaaacgcctgacctcaagtgataacacctgccttggcctcccaaagagctgggattacaggtgtgagcaactgtgcccagccctgcattttctttctcagtgaaactaggtggtggttggagaaagcttgtccttagaatttgttggcaagttccatttaaatctaggcattaccctcctgtagcatataccatgtgcattggctctccttaactctgaacttattttatagcccaaatgggctcttaacttatttatgtgtacttgtaccctcagatttttgttaaggattcttggaactcataggtagatccaggttgtttgtggggacgaagtttatacaatttgggggtcctcattatgaaaaatatataaatatcttttaagttttacaaaaacctatggccatgtgaacccttttgaacttgaagacttctccatacctgtcatacaaggttcttgtcagggaaagtagagcttagtggttaagaacatggactgtgggaactgggttggattcctggttctgcatcttactgtgaactttggcaagtgacttaacctgcctgtcttgtatgtaaaatgaggatatcataacactcatctttatagggttgttgggagaaatcagatagataatccatgtaaagtgtttagaataatgcctggaatcaaaagcccacattata

SEQ ID NO: 4168 - DNA, 1033 bp, Homo sapiens
ggcagtggtagctcatacctgtaatctcaacactttgggaggccaaggctggaggatcacttgaatccagaagtttgagaccagcctgggcaacacagcaagaccctatctctaaaaaaaaaaattttttaatctaaaaagataaaaaattaattttaaaaaaccaaatatttttaatgtatctaccatttcccaggaatattcttggtgctggcagatacaacaatcaatggactttacaatccatccctttcttatatagaggaatcgaactttgtctcatgtcttaaatttgcatgcagccaaaggcaggctgtgggggaaatgcaggggatttaaattactaataaattttttttagtgttatatagagagagatgagtacttttttgctctcaaagggcctctcagctctatttttaaaaataattgtatgattttataaagtttaattcatagcaatgtctccttccaagacactgataatcattataataagcatttattggatactcacagtgcctcttagcattgtattaattgccttacatttaatcctcacaatccagtaaactataggtactatttcccttttctctataaaactgacatttagagatgctctgtgacttgcctcaagtcaaacagctgccaggtggcagatccaacattgagacctagtcctgcctgactttggatgctgtgctttttagcccctgtgctcactgcaccgccccgtccctcctgtcggcccttacccaaaagtgtcgtatctctgggctgggaatattaacaaagcattagaatagattttcctgtaccatttttgccatatcttctgaagatttttgccctctgctgaagtacaattggaatcagtttttgaacaaatcatgtttccaccaaccaacatctatggtgcacttggcactataacaatgctgttgattcattatgaaccttaagaaattatctgtggccggggaccgtggctcacgcctgtaatctcagcactttgggagtcggaggcaga

SEQ ID NO: 4169 - DNA, 1052 bp, Homo sapiens
actgagaaagcttgagtatctgcttagggttgcacagctggctagtggcagagccagggcttagcctgtcattcttgtgattccatgactcttccctttcatgctccacacaacaaaatccacagaatctgcaggtacccgtgtctctcatgagacacagagacagtcctgaaaagctcttccatcagataagttgcttttctactccgtactacattatcggtgccaactcagaaggtggcagacacaagtggtggcaaagcctcatccagaaaaaattaccatgggaagttgaatcaacagaaaaatatttgatacaagagtatgacagttaatcctaggatttcactttttgttctgaacttctgacctacagctgctagtccaaccacggaacatctaaaagatactttaattagattttaaccctgtcgagcgagcatttggccaatcaaataagtaggtctttgtttatttcctttaaactctaaagccaggaaattacttttgatatgttaagacccctgccttccctccaaggacatcctgagacatagaaataaaatctagccaaacatattttcaattactattcataaggaaacacccatcacattataggtaatttgaaaaagcaaatttatggaaaaaactgttaaaatattacaatattttttagaaggcataatttgatgtacttaaaaccaagtagtcactttttgatatgttttggatactaaccgcaagtatctaaagttaacagtaataatagtagtgagtgcacaatgctgagtcttttacatgtattaattcactaaatcctcacagcagccctagagagtagttagtattaggttggtgcaaaagtaattgtggtttttgccatacttttagtggcaacctttctgggccctgtttgttcctctggatacaatacagatgtaatcaggcttcctgggccccatgtctgccctggaggtcagttgcctgcattgtcacatgctaaaatcccctaagtatgattccaaaggctttgaataacagtgttggtt

SEQ ID NO: 4170 - DNA, 1031 bp, Homo sapiens
ctctgattggtcagactggagtcatacatcctctccttacagctgggtgtggagtcaggtctacacaagcacttaaattgagagcgaaggatacagtggttcgttcccgaggaaaaggtgatggatgtgggatggttaaaaaaaaaaaaaaaaagggccaggcgcagtgactgatgcctgcaatcccagcactttgggaggccaagacaggaggatcatgaggtcaagagatcgagaccatcctggccaacatggtgaaaccccgtctctactaaaaatacaaaaattagctgggtgtggtgatgcatacctgtaatcccagctactcgggaggctgaggcaggagaatcacgtgaaccagggagtcagaggttgcagtgagccgagattgtgctactgcactatagcctggtgacagagcaagactgtgtctcaaaaaaagaaaaaaagaaaaaaaaagctgtcagtcaaccacataagtgtatggttagaattacagatggtcaagtttggcaaaggaaacatttgagtcaatatagggtaagcaaagacccactccttctatactcccttgcttcttcctttctttcttcctttcagcaaaatttagtgaatggctgctttgttctaggtgcagagtatacactgttctagaagcggactctgcccataaggagcttacagagtagtgaggaagagagatggcccgggtggtggtgtgagacacattcactgataatttatattttgagaaatggaagtatgaagagtatttctgtgttttttaaaattaaaaagacagttccaatcattatatcatttaacatctttacttagactgtctcagtgagttctgctttgttcaatgcttggaataagtctctctggtatgcttctttgaataatgaagactccataatccacttttatttttttgcctaggctgctgcaaaaagaggtaaaacctttgtgtaattaaaagtagctttccttagattaggtttcctttgagattagtttgcttttttttt

SEQ ID NO: 4171 - DNA, 1044 bp, Homo sapiens
atcactaaggagagagaaagtaactccctgtagatctttcgttagtaacaggacatactgttttcttaaacagctaccatttattagtgtgccaggtagtatgcaagaccctgaactggctggtgccttgatcttggacttcccaggctccagaactgtaagaaataaatatcagttctttataagccacccagtttatcgtatctcattatagcacctgaaatagactaagatatcatccttggatttttgtgacttttatcacaaagcactctttctcctgcctcagcctcctgagtagctgggactacaagtgcatgccaccaagccttgctaatatttgtatttttaagagagatggggtttcaccatgttttccaggctggtcttgaactcctgacctcaagtaatctgcccgcctcggcctcccaaagtgctgggattacaggcatgagccactgcgcctggcctgtgaccagtaatctttgatgttattgttgtaattgtttggggacagtgtgaatcgtgcttacataagacagtgaacttaataaatgtatgtgttctgactgctccaacagcctgctgtcctctctctgtctcacacacacatacacacacacacacacacacacacacacacacacacacacattccttgggcttccctgtctatgagacacaacaatattgaaattaggccaattaataaccctgcagtggcctctcagtgttcaagtgaaaggtagtatttcttatgtttcacattttaaatcacaagctagaaatgattaagcttagtgaggaaggcatttgcaataggcagttagtcaagttgtgaatgcaaaggaaaagttcttgaaggaaattaaaagtgctactccaggctgggtgcggtggctcacacctgtaatcccagccctttgggaggccgaggcaggcggatcacaaggttaggagatcaaggccatcctggctaacacaatgaaaccctgtctctactaaaaatacaaaagatttgccggccgtggtggtgggcgcctg

SEQ ID NO: 4172 - DNA, 1028 bp, Homo sapiens
taagaatcagtggcagtttggtggttgcaggatttatcaaccagctcttctaaaattaacatgacattcttccactgaacaccacctactgttttccacaaggtggggtgctaacttcgcacagtggactgagactgtgtacagcttgctgagatgtctacattgagtgtatttgttgttactttccacagttcctaagcagttcttttttccctttctttttttttctttctttctttttttttttttttaaagagacggggtctcactgtctgcccaggctggggtgcagtggtgcaatcatagctcactgcatctttgaattcctgggctcaagcagtcctgcctcagcctcccaagtaactggaactacaggtaaggcccatcacacccagctaattttttaatttttgtttttgtaaagatggggtcttgctgtgttgcctacgctagtctccttctgccttggcctcccaatcagttctgaaagaaatgtttgtaactgtatagtttaaactgtggggttttatttaagtttgtcaactgtaatgtatattacaactggtggcttaacatagttatggttttgagtgtgtataatgtatatgtgcacttttcctcattcatatggaccttaacttactgaattataggtaaaggtaaaaaaaaatctctaatttgaaaggaggccggtctaaatgagcaaaatatttgaataagaaaatatttgtaatttactgcaaatagagattctgatgtggccatttcagtgaatagattcttatttttgaaatagtatatcaggtagatatatacatgcttttaaagtattttaaacagcttaatctcttaaattcctccccaaatctcaattattccttcctctatctctagacctaaagccagtcaggttaaactttctttaaatcatgttctgaacagatgaaattaaaatagctgtgaataacatagtgccgttatttcaaccttgtggtaatttaaccaatttcccagtgccagttaaattt

SEQ ID NO: 4173 - DNA, 1057 bp, Homo sapiens
gctagctttaactgttagaaaaataatgaagaaagagacctaaaatattaaacactgggaaaggagcttgaataaaaggaaatgatcaatatgggcccaatagtgaaatcttattgagacattaaatatggtaaaaataaatacagaagcatgttcctgatgtttaaaaacttaacaaagattttcagttttcccaaatttataatgcagtaggtgtcagaatcctaatgctttttttaaaaaaaaaatactttgtttattcagcaataaatatttgctttccatttgccaggcaatattatagatagttgggatacacaagtgaacaaaaaacacaaaaaaatgtctgccatcatggagctcactccacttgacctggatgagaagacagtaataccagacatagtgaagaagaaaatagtaaagtctgttagaaggtgatcagtgctgtgggggcagattgcacagggatggggaactgggaattttgatggggtggaaaagttgtgattgctcttaggaccttgaaggcgatggggactcctgagagaagagtgtttcaagcagagggaaaagtctctggaaaagccatagagaggaatattcctggatgttggtgcaatagcaggtaatcctggtccctggaggagagtgagtggaaggagagacactgaagaggagatgggaggagtgggcaaagaccagataatttaggaccttgtaagcccttttaaaaacttcctctcttaatctgaggaaaatagagacctgttggaaagttttgcttggaggagtgacacaatcatactgttttacacaggtcactcgtgtggctgtgttacaaatacaccaaaagcaaaaccaaggaaatcagttaggaggttgttgcagaaatcccagcaagagataatgtggcttgcatcaggagggccaggagtaagggaaaatagttggattctggatgtttttgaaagtggagttaacagaatttcatggcagaaaacagaggaatcaaacatgactacaaagctgttctgagcaattgtaagaatgggat

SEQ ID NO: 4174 - DNA, 1055 bp, Homo sapiens
gcaagctctgtaaatgataaagcttgaaagctgctgacagtcatgttttcacttagaagataaaggtagtctatagatagaagaatgaagataatgtacaggaagagaggagaagccagtgtctggtgctgccttcagtggctcaagaggccctgctatagctgtgttggtcctggattggtggttcttttcttgggaaatcaggacccactcctagaaccctaccccactccctttgttcccacctttgtgacatacgcacactctctctctctctctctctcaaggctgtttgtgttaacttttggtcatttgtaaaccttatccccaactaacatactactaaaatgtattctcaaaaaatccacgtcaaacaagattggtatataaatctgcttgctatcattcagctatagcaaaatgtgtggtactttttttcctctgtggaaaataagccaaagtgatttcgtttttgttttaggaatcaatactgtattagtttcttagggttgctgtaacaaaactgggtttttgccacccataaactgggtggcttaaaataacagaaatgtattttctcatagctctgaagggtagaagtctgaaatcaaggtgtcatggggccatactccctccggaggttctgaagaagaatccctccttgcttcctcctggcttctagtggtggccagcaatgcttggccttccttagcttgcagctacgtcactctaatctcggcttccaccatcatatgaccttttctgtatctctgtcttcacatgccttttttatgaggataccggttggatttagggcccactctaattcagaaggacctcatcttaacttgatcatatctgcagtgctcttatttctaaataaggtcacattcatagattccaggtggacatgaattttagggggacagtagttatatactgtgcatcacaacacttagaaccaagtaagttgggtttgcttcacattaatagtcttaactataaaaatattttggatttttatttttatttatttgttgttttttttttaaaca

SEQ ID NO: 4175 - DNA, 1213 bp, Homo sapiens
tatttaaaatatataaggagctctcacaattcaaaagcaaaaaaaaaaaaaaaacaacctgatttcaaaattttttactcaggatctttgaagaaaaaaaatgtgaaatcatagaaaaatgaatgagagttatgtgtcttgagtgtagacgttaatattctttgaataaagaacccgagtaaatatctttgagtaaagaacctgagtaaataatggaccaaaggagacataaatggcacagatatttgaatagatgcttaacatcactgatcttcaggaaaatgcaaatcaaaactacaatgagatattatcttacacctgttagaataactattatcaaacaagataaaaatagcaaatgttgatgagggtgtaaagaaagggcaacttttgttcattgttggggaaaatgtaaattggtgcagccattatggaaaacaatatggaggttcctcaaaaaattaaaaacagaactacgatgtgacctagcgatccttcttctgggtaaatccccaaaggaaatgaaatcagcactacatatagatagatgatagacagatagatagatagatagatagatagatagatagatagatagatagatagatagacagacagacagatagttagatagatctgtactcccatattctgtgcagtattattcacaatagccaagatatggaagcaaccttaagtgtctatcaatagatgaatgatgaagaaattgcagcatatatacgcaatggagttttgttcagctgtaaaaaagatcctgccatttgtgtcaaaataaatgaacctagagaatactatgccaaatgaaataagccaaacacagaaaggaaaatgttgtatgatctctcttatatgtggaatctaaaaaaaaaaaaagttgactacttagagagtagaactgtagttatcatatgtgggtgcatgaagtaggaaggttacaaagagatgcagttcaaggatacaaaattgcagtcatgtcagatgagtaagtctggagatctaaagcacagcacaagtaatctagttaataatattgtattttatactagatatttgctaagagagtagattttagacactcttaccaccagaaaaaaaatgttgctgtgtaaaatgagagatgtgttaattggcttgactgtagtgatcatttgagtgtgtatatgtataacaaaacatcatgcagtacacttaa

SEQ ID NO: 4176 - DNA, 1039 bp, Homo sapiens
aattattttttcataattccaaaagtcaatgataggagtttatgtctgaattgcattttattaattatagaattctatataaaagttagatcaaacatttgctataattataacatatatctcattcagattaaataaaattgggaagaatattcaaaatgccaaaattaaatatctacatgcattttctacattatatgccaccacaagtttgttcttaaatagaaataacacatagcttctgtgtttatcatttattttttgtttctttattaatcttaaactgtgacagaaaaactgaaccttaagttgttattaaatgaattattaataagtatattcagaacatctaatatataattactaggagtaatattaatctgtaagtctgtattaagttgatttaatacctaaactctcttttcaaaggattttaaatatttaaacattattaaagacattccccagaaattttaaatgtgaaatatgtctgacagaacacctgatctgtatctaattgtaaatatatctttggtatgttttcatatgtttagttagacactcagagtatgtataatgggctatattggcatttacatttcattgtgttaatatttatatttacatttagaatacaaattaattgcatttctggtaaacaacattgttcatcgttagaatattttattgtagactttgtgtcattttgattaccttgcataagtatttaacttcttttttaaattcagtaaatgatttcattctcttttgatatacacccagaaataaaattgctggatcatacggtaacctatttttaattttttgagaaacttttatactgtgttttctttttcattttctttccttttttttttttttttaaagacagtttctcactctgttgcccaggcaggagtgcagtgagtggcatgatcatggctcgctgaagcctcaacttcctgggctcaagtgatcctcccacctcagcctcccaagtagctgggactacaggcatattccaccatgcccagctaag

SEQ ID NO: 4177 - DNA, 1007 bp, Homo sapiens
ttatttctgttttgtatatagagacaccaagattatttaaaactgtgtgccttacagttagcaaatgggtagtgctggttgaatgcaacccagtgtctgtatatcttctgcctcatcaactgcctacaaagaagatttgccttactacactgctgatgggtaacaatgcaggactgttctgtggctaaaaatatgtttttaaagcttcaaaaatatatattgaaaccgttatgataccatctccaaatgatatggtttggatgtttatcccatccaaatcttatgttgaaatgtggtcctcattgttagagttggggcttagtgggaggtgtttgaatcatgggactagatccctcatgaatagcttggcattgtccttgcattgagtgagttctcaccctgtaagttcacatgagacctggtttttaagaagagcccgacacttcctcctttctctcttgctctctctctcaccgtgtgacataccagctccccctcccttctgccacgattgtaagtctactgaggcctcactagaagccaaacagatatgagtgccatgttagtacagcctgcattggcaaataaacttcttttctttataaattacacagtctcaggtactcctttatagcaatgcaaaatggactaagtcatccaatatgaagattttctctcactcaataccaggagctttcaacttaattcttgaattttcataatggcttagtctatatgatcaataataaagagttggtaagcttgttgatggccattaatttagaaagtagcttctcctaggtgacataatgatttgccacaagtacccacatgtgcaaaaacatctgtgtcttattctgtcaggcatggcttcccagggcatagttctctgtggaaataaatgagagcataacttcaggggatgtgccaatgtacatatgtctgtgtgcctctcttgaccaaatcctggtatgctgagctgacagtgagggtttttaccctcactg

SEQ ID NO: 4178 - DNA, 1056 bp, Homo sapiens
atttattttctcacaattctggaggctagaagtctgagatcagaatgccagcatggctgggttctggtgaaggccctcttcctggcttgaagatgtctgccttctccctgtgtgttcctatggcctttccttggtttatccgcatggaaagagaaagacctctgacgtttcttctttctataagggcactaatcccatgatgggggccccaccttcatgagtttaactaaaactaattacatcccaaaggccccatctccaagtaccatcatgtttgagattagggcttcagcatatgacatttgtccttaggatcatcatgatgttttgttttgttttacgtttggtaatcatactataggtctgcattgtcctctaaaggtagaatattgatgttgaaggataaattttaggatacttaacaaaattagaagttactgagatagtggatattgtcaagaagacttttggaacatcacagtacacaacccttcccctccgcccactgtaattcaatgaagctaaatgtggagaattcaagactacattgtattcatgtgcacagtacacagtggttttcaaatagagctaggagatgtactgttggatagctattttcacactacaaaccacacagctcttatcttacgaatcgctgctatgtaaagtttggtgaactgaagaagacatacacagaagaaaagaggggttagtaagagaaaaggaaaatggcatggaaatggcagggattgatgcaagttggaggaaactaggcatatttccatatatgatatatatttctttctagaacaatcttaccaaagtacagaaatgtgaaattttgggggataatttatgttttatccgttccttatttcctgtttattccagttaagctatgccatctttcgttagcaggattaaagtgatctaataatctctttctctgtcatttaaacagcttttttgactttaagtgcttaacacctgtatactctaaagcaagaccaaagcttttaagggactgcattaaatattttaagtaaatctatttta

SEQ ID NO: 4179 - DNA, 1037 bp, Homo sapiens
ctgcaatactaataatgttatcaaataactatttgaaattcaccaatgtactaaaagatatgttttccattatttgagtatatactaatacaattattaatacatgtatctgtaagaacttcatctacaaagaatctttgtactgaaggaatatggaccaataaaataaccaatacattgaaatatccaaattaattacataagcaaattattccaaaaatgtggaataattaaattgtttatcactctgagtagttataaccacgaaacaccttctaactgaaataatcaatagtgtttcagctttttaatttaattttatactattaagtccccttaagtatattatttgataatgctatactggttcacaatacagttgtctccatttgactctgcactgaggtgtgaatacagcatttagaatgtagagtcctttcatatttatgtgctgtgcattttcatgctgagaagtgaatctttgacattttggtgtagtgatgtgaggaatgcagttatgctctatttcagtattttgtatgaaacatatacgagaaaaatttcatcatgtcaaaaagaaaagcttcagtctgtggaagacaagtagccgtattctctaggaaatgtttatttgacactcatgagtgtcgatttgggaatttatgacctttgtattaccatataactggcggttacttggacagccacacaaccttacatgtttttgttcattaaccttgcttccatattgtaattaaacattactcacttattttatctaccctttctcactgattttgtaggaggaaatgtagaataggaattccatattatttaggatatacatttgggcagtttcagaaaacaatagagggtaaaacaatataaacgtttagttctttctcatgtaacaatgtaagccattttcaaacctgaattccgtctttggtctgtgggtagttaccatgttcacattcatgctaatagaagtgggaaagagggaagcagctccttcagtcttatatttatgagccgga

SEQ ID NO: 4180 - DNA, 1016 bp, Homo sapiens
atacaatagactttgtggacttagggggaagagaaatggtgggtgggaggatgagggatgagacaacccattgggtacagtgtacactacttgggtgatgggtgcaccaaagtctcagaaatcactactaaagaacttaccagtgtaacaaaaagtcacctgttccccaaaaactattgaaatatttaaaaatgtaagaaatttctgtggttttaagccaaaaaagagaatggaactgacaagcaattgtagatgaaatcaggtgactcattcagaaaagaggtatctgtagattttccttttttatgtttttaaacattttttttattttactttttgtctctcagcaggtttctaaactatcacctctcatttgactttactcaatccttgtcgtatcagcatatactatttgcagtaatgcaataaatactttgaaatatacaataaataattaactacagttacactattgtgctactgaacagtagatcttattccatgtaagtgtattttcatacccattaactatctggaattgaattggatttttcattaacacaaataaatgacaaatgcttgaagtgttggatatctcaagttaccctgacttgatcattacacattgtatgcatctatcaaaacatcacatgtacaccatacacatttgacactaatatgtattaataataattaaaaataaaaaataaaaaattgaattttttcatgtaattgataaaatgtattttgttttatttgctttagattgaacatatattatagataaaatgctaaaggccatgatattcccttcccaagtcaagcactctgattcattgatgaatatggtctatgttttatgtttcctaagaaataattgtacaaagaatgtggaattctcaaatgaatgttgaagtttagaaactttctcatctgtttattgaccattcatcttcctcatctttttttaaaaagtttattctttgtacattgtgtcatatgtgtggtgatggagg

SEQ ID NO: 4181 - DNA, 1050 bp, Homo sapiens
tattttggtgtcatatctaaaaaaatctttgtctaccctagggttgcaaatattttctgccatgttttcctctagaagttgtgtagttttgtgttttacatttggctctaggttacatttcacgttaaattttatatatggtatgagttatggtcaaagttttttttcgttttgttttgtttttgtttttttcatatgggcatccaattgttttaacaccattgtggaaaagactcatttctccacggaattgactttgcacttttatgaaaaccagttgtcagtatatttgtgggtctctttctggactttgtattctgtggcattgatctttttttctatattaacactggtatcatattgtcttcacagttagtcttgaaatcagttagttatagttctcaaagttagttttcctttttataagttgtttggctattctaggtcacctgaaattccatatgaattttagaataagtttgtctatttttactaaaagcatctgctaggattttgattggggctgtgttgacttgatatatcaatttgaggtgaatcaccatcttaacaaaattgagtcttctgacccatgaacatagtataactttccattttgtaaggactttaaatttttttctcagcatggtagttttttaaaacatattttaaaacttaggaatagttttagggttacagaaaaatagcagagacagtacactatatagagatttcccacctacaccaagtcagtttcctttatctttaacatcttatataaatgtgctttgtcaaattaatgaaccagtattgatacattattattaactgaagtgcatactttattcgtatttcctcagtttttacataatgttctttttctgatttagaattccatccaggataccaaattatatttacgtgttatgtcttctgaggcttctcttggctgtggcagtttgtccaacttaccctgtttttgatgaccttgacagttttgaggagtattggtcaagtattttgtagaatgtgccttacttagaattcgtctga

SEQ ID NO: 4182 - DNA, 1043 bp, Homo sapiens
tatacagtctgcaaatgtggagactgtaaaatgagttcagacaggaacttttagtcttgccctctgacattttggcagttcttattcaggcagaagaaagatttgtcttaattaaggcttatgttcatatgttcataattaaatagttttaaaaacctgaaagaatttgctagagccaactgtcagaattgtgctgtatccaactacaaatttatctggaaggcatttcactgccaagctttttgaatatgtagtctgaacagcgtgactctacgtctttacctcccagtcatacctcaacccactacaatctggcttctttgcatcattttttctgttagacatagtgccctttacaaagtaaaagctcaattgatatactgatgaattttaattttaatttcttatttatattttatatcctacttctaaaatattaaaaggagatatgttaagtttgtatgaaaattagacactactagtcaaataataaaataaataatctttatcacattttaaattaaacaattgagacaagaactacagaaattggaaaaaaacatgctaagcagtgaatagttactgcacatggttgaaatttcaataagggagaggaggcaaaccataaaacagtttcacagaatacaggaaaaaagaaacacgagagagaaaaataatgggcctttccatttgctgatccctctgccctcagatatttgcatgcccccagatacttcctctcatccttcagttctttcctcaaatgttaccttctcaggttcgccttttttggctaccatataaaattggaattcaacttatagcattaacacttcttatccatttttctaatttatttttcttctgagaacttacaactatctaatatactatatatcttacattttaaaaatctttaatgcatctctctcagtaaaatataagctcgtggcagggccataattagtgacataagctgtatccatttgaggagtaggaacagaagctaaattggtgttttggtcagttttggctgctatagc

SEQ ID NO: 4183 - DNA, 1050 bp, Homo sapiens
attaatttgagtttttgagttacattgtttaaacaatactgtcaggtctctgtttgaacaagtcatatcacacagtgtgcacagtgtagataaggaagatgaacaataaagaaataaacaaatagacaaaattttagatactggtgaatataaaatagggagaagtaagagttgttgactggtcagggaatttaggttggatagtctccaaagaggtatcttttgtcatacttgggtagtatattattgtggcttttctttttgcttatttaatatattttttctctatgcttttctctttaattggatttctcagcttgtgtctggcttgtttctccttagtgtatgtttgaatttaaatataattccaggtgaaaaatgtagtctattattgatgactggaaaccatttaaactcatagtaataaatgataaatttgtttctatcaagtgttaaatgcttttatgagtttgtttttaaatctttttactgttttctgttttatcgtacatatactctggtatattttattgtcttctgtagtgatttaggaggaaaattcccctttaaaaaataatagtggttatctttaagaccttattaactatgtttaaactgagattgttctaattttctaagtcagtgattaaataatagtaaggattttaggatctacacttctattcatgaatattttcattgttttgcatttcttactttatgacatctttgttttatttacatttatacatttctcctggtacatatgtggaaaagagtctttagagtgtagggggtcatagaggctgcaaatgtagaacattgtagcagaatgtcaaattgtttatgctatttatacttccacagcaacattttagaaataatcttaatccctttccgcattgtctccaacaattagtattgtcatcctctaaattttggttcacgttggggtgtaaaattatatctcaatacattcataatttgacttttcccaaattactagtaagggatgaatctaatgagtttgaacatcgttttatgcttagg

SEQ ID NO: 4184 - DNA, 1033 bp, Homo sapiens
atgggcatacaatggcagctgtctttctaatcgttcccctattcaaacactaatcggtggaacccacgtaaaatgctagaggcctgaataggtagacaatggcagcagcgtttttaatcacagtcctattcatgcactaatcggagtgatgattaaaggacattagagggagcactttgacatctgatcctttgaactgacgtctgtgcaggctgcactccatagagctcacttggccaaactgatttccttaaataaagtgctgtgatttccaatgtaggaaatattacattagagcctattgaaatgattaggaattgaggagcttttctttaggtgggaatgtggtgtatgctgtatactcacaaaagtgagatcattaatattgcatgtactactttgaatatcagggaccacagagaaatagcatgagaaacgccttcctgcagtcatgcacttaaaatgaatatgaacaaaaatgtggaactctgctgtcatagctctccgttattgaagtttatgaattttgaaatatttgtatttttatataacacgataaagatccacacatcctaactgcatttcatatttttgttttcattaagccaggatatttttaatgttacctatcttgaagttgctttaattacaaaaaaaatgtgttataccctatttgcatggtcatgctttgattcagtagtcattagtgagacagaatggaatattttattttctcttttctttcaaatttctaatatctatttagattttactaacctattccccagaatatttcatgtgatttatcctaaaaatgttaatatctattcagcatttgcaaattgaatcagtagttaaaattccaacatcaatatttgaatatggagctccaaatatcaataactgtatatactacatttatgtgtaatgtatgtaggggaagaaaaaccttttcctttaacctcttatgttcagtggctggggcatgtgaattaatctgacagaagacagattgacaggaaaacatgcatac

SEQ ID NO: 4185 - DNA, 1031 bp, Homo sapiens
tgaagaattgatacaatgatggtttccctgtaggataattgttggaattaacacatcacagataaacttctcggcacatagtaggtgcttcacacaagttagttccctcccgcaacaatcatttctttaatgggatttttttttttaatttcacactaggatactcccatacaaagacttcatggatttaaaagtttatacagatattgtctatttcatacatcgcacaaatgcaggaaatactgtagtataaaatgttgcatatattagtgtcatagcaatagcaaaacaatcctgtggtttcttgccaagacaaatatgattatacattactgtgttccctgtgataaattcctttgaggtttcagaatgctgtgcgtgagtaactctggcaatctatttaagattcagttgattttctataatgcaaatctttgttttacagagctgctgaactgtaatataaatgttatataggaccttgtcaaaacaatcttattagtgattagatattggaatagttagtggaactaaatatgttcatatttaggcatttttcttaatctaggctttgagcatttattaaaaatatttgaagtaagtcaatatttacatgctatactgtgttctcatttgtaaaatttaattttgtttaaaaaaaggaaattgaaagtggaagcttaaaaatttccaacaggcatcaacattttaggttgaaaatactggcacattctgttattattttgccatatgtcattttcctatttgtactccagtatactcagaatcaatttttccacactatttatgaattattacatactacatgaaaaataaaagacagcttttcccttcagttatctaacaggccttttataaaagcatctttcattaaattactttggaatatagactagaagctttctcatctgatttatgtgaataaatatagaattgatgactgtatctttaaattatatgattcattcagtcattagttaaggagagaataatcaatgatagatttaaaa

SEQ ID NO: 4186 - DNA, 1005 bp, Homo sapiens
ctaatttgtaagcaggaatggaaaggaataaagacaacatagaaattcaggaactggcacagttgacaatggcaaatacttttctaatggaagcctttaataataattttaaaaaatcaaaccaagcctatccctgtcatacctatctttaaaatctctaaatggattgagatatcacctagtaagtcctttcaattggatgaaatggctaaatgaacagggaataaaggtgttggtctcccaccaagcttgataggctcaaggtacctagaattaagtagacagataaatggagatatgtcaaggaaagaactgtgttatggccattggcaaatgaagctgattggaatctaagagataagaaaccagtaatgtttataagataattgtattgccaaaggagccaagagcctagacaaaacttaacatgtctctttggcctacagccctctatacacaggaaatgagctcaggatactggttagcctccaaagagtgcatattctccaataccctcttcacatataactaaaaaatataataaaggaagaactgtctcccagaaggtcaaatcaaggaacataaagaacaatgaattgggaacccccttctagagggcagaattagcatctaattcaagaactatttaatatcacctacacccaggatagcaggacttcacaatgtgttgccactgagcagtgtcagctctgttcattgactttactctcattttttcccaatgactcaccacatctcttccctctaatatactttctgtgatctaagaatttgcctgttctagatattttatatgtgttatcatacaatatttgtccttttttatttaacttctttcatttagcaccatgttttcaaggttcatccatattgtaatctgtatcagaacttattccttcttctggctgaacaataacccattttatggatataccacattttatttatcccttcatccatcagtagacatttgagttgtttcta

SEQ ID NO: 4187 - DNA, 1044 bp, Homo sapiens
tcatttaattttaaggattgatttattctcattgttttgcaagagcctttaacttcttattacaagtaatactagggaaaccgttaacactggatgtatttagaaaggatggcagtggtagaaaggggaaacacagaaatgcccttctttctcccccagattttctcatttgtattaatttgatcagaatttattgtgtaatgtgtgttaatacttgatcatgactactttgaagcactagaaaatttcgaagagcttttggtcaaaggaaaaagaaatcttattttaaatatgagttagaaattaatagtgttactctcaaggcacgtatttttctgtcatgtatcacttatgtgctagtatttaaatttttatagcacttgtagaattttcatttttcccaccatccttatcccagctcttaaaattttattataatctactctttactgaggatactttggtttatgtataaaattaccatttgcttaagaaaccagtgaagaatgtgttctgaacaaagctaagctataaatagaacttagttacattatcttatatatatgtatacatatgagataaaccttcaaagttaataaagactttgttaaataagttattaccattttctttttaagtggtgaaaatgtagggttggaatccaaatacctgaagaaaagggaagatagcattcctttacgcggactcagccagaacctatttagtaattcaggtaagcagggatttctggatttttgtactttatagttgaattaaatttaatgtatgaagacttaatgaataccagtaacctttttttgtcctcatttgcagaccatcagagagatggcactttaggagcattacatacatcttccaaacccacagcgctcccctctgcgtcttcagcctatttccctgggcagttaccaaacagttaattctagtgtcatgttttactttttattggtattttagaaactcaggtgcttaaaaaatatgtcaacacaaaccagatcctcaaatagcaagtttcaaatttta

SEQ ID NO: 4188 - DNA, 1022 bp, Homo sapiens
cttacaatgcaggtctgtgaggaattaattcttcttttgtcttataatgttgttattttgacttcattttctctgaatatagaactttaggttggcaagtttttttcctatctgtattttgaagatgttattccgttgttgcctggattgaatactttctggcaagatgtcagtagtcatgtttatatataatgtttcctttatataaagtgacctttttctctgggtgcttttaaattttctctttatcattcattttcaacaagttaattatgccttggtgtggagtttgtgtattattgtttaattggggttttcatgaagtttttaaataggtgggtttgtagtttttatcagtttaggaaattctagtcattattcacatttctttttctgttttgttctcttttttggtgttcctccttggtactccaattatacgtggttgattacatgatactttcccagggagacttagtttatttcattattatttatttcattttatgtagattctgatgctgtgtcttaaagtttattagtcttttcttactgcagtgtataatttgctgttaatttattcagtgagaaattttcattttatatattgactattttatgtctggaattttcttttcactcttttttatatcttcaattttctcatactttttatttccattaagttcttacacaattacatttgtgtccctggtctataatttctaccatttctgaatctgtttctgttggctaatttttcttctgagtatgacatcttattgttgtctttgtaatttttgataagtggagcattgtgagtgttacattgttgattgtctggattttatatttctttaaagcatggcaggctttttttttttttttatagacagggtcttgctctgttgcccagtctagagtgcagtgatgtgatcataactcactgtaaccccaaactccagggcttaagtgatcctcctacctctcatatatctgggactacaggtgtgcactaccac

SEQ ID NO: 4189 - DNA, 1026 bp, Homo sapiens
cacattcttggctcactgcaacttctgtctcccaggctcaggtgatcatcctacctcagcctccctagtaactgggaccacaagtgcatgccaccatacccccagctaattttttgtaattttggtagagacagggttttgccatgttgcccaggctggtcttgagctcctgagctcaagtgatccacctgccacagcctccaaaaaagtgctgggattacaggtgtaggccactgcacccagcctatagtgcagtttaaataaatgtgagagcagacattctggccttgttcctgagcttcagggcagagcattcagtctttcatcataagcatattagctgtaggtttttgctaggtggccatttttcagaataagggagttttattctattcctagtttgctaagagcttttatcatgaatggttgttaaattttgtcaaatgctttttcaattgatatggtcatgtggcttatcttttatcagttaacagattgtattgattgtttaagattatattagcctttcattcttgggataaacttcacttggtcatggtgtattctttttatatatcgctggagttaatttactttttgtttctttttcttttttttttttttggagacagagtctctctctgttgccctggctggagtgcagtagtgtgatctcggctccctgcaacctctgcctcctgggttccagcgattcttctgccgcagcctcccgagtagctgggactacaggtgcctgtcactgcaccagctaatttttgtatttttaatagagacacggtttcgccctgttggctaggctagtcttgaacttctgagctcaaggtcagaggtgggtgatccgcccacctcggcctcccaaagtgctgggattacaggcgtgtgagccccaacacccagcttggagttaattttctgatagtttgattttgtgtccatgttcataaagcatattggcctgtagtttacttttcatgtactgtctttaacaaatttaaatcaggacaa

SEQ ID NO: 4190 - DNA, 1244 bp, Homo sapiens
aggagacacagtaatacacagcattattttgagtgagctccagcttttcattctaacccttgaaccgaggagaaacagctgtcctttttcattgagtctgcaacagaatggaaatgtgactcagtttatcagctcccacagagcaggcagagtaagagactattttaagctggtttggggagcccctatcccaagcatagagtggatgttgaaggttgttcccggcatccactggtggtggcttgtggctagtcctgggctccctgggtcctaggcatctcttgattctcagtaatgaacttgtcagttggccaatgtggacctgttgacaaattactctgaattactgtaaggtctcttttggctttattctctagggtttgagtttctacaggaacgtttacatttttattttctcggaaggaatctcttatcctcctgacactgtaattgtaggtgctgaaatgcttgttttctgtcagtgtcatccagtacagatctctaacatttgtgtgtgactggaggtgccccaaggccctgttgcctcaatttctttatcttggtagtgtttggcccacagtgtgtattcagagacagattttgtgtacagatagcattattcagttgggttaaccatctgattcacctagatggtttaaattaatttttcatttatttggtattaactttttaaaaataatgtgtaagtatgggaagctttgaaaggtacaagaggatgtactatctaaaagtccctactgtggtccccagtcctcttagagaaaaatactgttaggaatttcttatgatatattccagaaatattcagagcatgtattagaccatatgtatgtgcatgtatatgtatatgtgttcaaatatatgagtgtttttatatataaacataaatagtacttgccaattgttctgcgccttgcttttttcatttaatggtattatggaataggtaactgcagtgtatcagaatataagtttttgtttctttttaatgacttcatagtattccagtatacggatgtactataattaactaatactctatttatggatgagtaggtttttttcaatccagatgctcatacagtgctccagcaaatatttttgtgcatacatctcggtggcctggtactaatagatttataggttacattgttagaagtaactgtgtcaaaggcatttttgcataactggtgactaaaatagtatcttattgtaatgttaat

SEQ ID NO: 4191 - DNA, 1063 bp, Homo sapiens
taattatgttcttaaatacaggagcaagactttcagtgtttcctgtatcggtgatctccatattcttttaattatgtatccctaacagggaaaaaaaaaaaccctaaaacagaacaatttgcgctctcatctcaaatacattaatgtgtatttatttgtgaatttatgcatatactactgaaatactatatgccgtataattattggttaagaaggcggaatctgatgttaggatttaaaacctgcctctatcaacctgaagttgatcaagccactgaaaaacaaacaacattcaactcttacacttcagttttcccacttataaaatggagtgataattttctctaccttactggattattgagttaagtgaattaatgcatttgcttagaatagtacctggttcatgataagtgctctgtaaatgttatattattaataataaaatatattcaaaaatagaaattaaagaatcagactaaaaatggatgtaaatgaaagttgtaagattttcttctcagacctcagtgaatggtcctaattactgcctactttgtcctccccgactcaaagacccactttaaagcaccaaataccacctactttggtgatcattgatctaggtagttttgtgctagcagctatgttgattaaaacatgtacttttgaattacagtttttaaaaatgacgcttttatttttgacgttgaacctgtgatcttcctgatgtcttaaaatgttactgtcaagattgaatacattcaaggatgtttaactgtgggaatgtaaaataacatgagaaatttggcaagaaacaaaataatgctgaaagaatatgtgagaatatttaacaagattgtgctgttctgacaaatagaacaaatacttgataattttaaagcaagatacacaaaactacgtgttttttctcttttatttttggatacaatgatagccaaagattcattcattgaacaagtatttaatgaatgtctgttatctgctgtggccaggcatagttttagttgcaggagatgacagcagtgaacaagacaaatgccct

SEQ ID NO: 4192 - DNA, 1056 bp, Homo sapiens
ttagcatttcctcagtagacatgagtagagattttatttcaaatgaattcttaaccttaatgcccagttctttattagttttacatcatcttgtaactaatgctgtttttctttcaccagtgttctctggtacataattttggtgtactttttgtgagctctagctgttatgatggtctcccacactatgtacacgtagctacctggaaagtgatctttatgaaaggtacttacttcatttgagactgaaaacagttgggcttccatatcagtggccacctggcctaggagagaataggctctttggaagaagcctggcaacgtgttacctgataccctggtcttctgagagacagaagctcttttttctagtgtggattattgtcagttctgctgatatatttgccacttttgaaatgccataccagttaactttaaggaaactaaaaataaaattgaatgtggtatgttcagtggtaaagaaaattttcatcatgttatggtgtagcaaggactgggtctaaatttccccaagcctctgataggaggatattcctaaactttcaactcctagcacttgcttaacttttacagacctccatgtggcttttaaagagcggaatgtctacccctatttaagattctaactctctaaagactaataaaaaaccagcagcactagaaaacaaagctgtctgcaatataactatgatacactgatgttgttggatttctttacttctgagaagaaattactcaaaaggccagatctagtaaaaacatttaaaaacaacaaactttcttttaggacttagttattcgtctgactgatgacacggatccattttttttatataaccttgttatatctgaggaagattttcaaaggtaactaaatttttttctgatcttatatttagtgaaaaaataagtttctaagttttattggtactgttctctttcaaacacatacctacatattagatttagttactttgggaatattgggctatttgtactatctttacttagggtgttttggaaaataaatatttt

SEQ ID NO: 4193 - DNA, 1053 bp, Homo sapiens
ccgggttcaaacaattctcctgcctcagcctcccaagtagctgggactacaggcatgcaccaccacgcccagctaatttttgtatttttagtagagacggggtttcaccatgttggccaggatggtctcgatctcttgaccttgtgatctgcccacctcggcctcccaaagtgctgagattacaggcttgaaccactgtgcccggcctataccatatatttctaaaacatacgtgaaaaattgtggggtggggtgacattctccttagatttgcccagtgcacttagaagttgcatattatatatatataataacatatatataaaaatatattttattgctgttggtcatacacacacacacacacacacacacacacacactgctgccttgtagaattggcatttcatggtataaatgtaaaaacaataaaccgaagtactgcagggagatatttgtgaatcttttactttacgttttgaagagaggcatttagagtatcagtctcatataaccttcaaaagtgtgagtcattaacagaactaaggatatagaatagaggaggggtccccaaccccctggccacttactggtacggtctgtggcctgttaggagccaggctgcacagcaggaggtgagtggcaggcagggaagcgagtgtaacctcctacgatccacctcctgtcagatcagtggtggcattagagtctcataggagtgcaaaccctattgtgaactgtacatgcaagggatctcagctgtatgctccttatgagaatctaatggctgatctgaggtggaagtttcatcctgaaaccatccttcactccctaattcttggaaaaatgtcttctacaaaactggtttctagtgccaaaaaggttgggggccactggaacagagaactaagaaatacggcatctgtgccaagggcagtgcctcacacctgtaatcccagcactttgggaggctgaagtaggcagattgcttgagccaggagtttgaaaccagtgtaggcaacatggtgaaatcccatctctacaaaaaaatac

SEQ ID NO: 4194 - DNA, 2093 bp, Homo sapiens
ggcagggtcaggactagaactcaggccttggctccgagcctttccccctcgttctcttttgaagtatgttggcagtaaagttcaacttttaaaaacctaccaatttggtggcgtactttggctcttcacatcagttgctttaaaaaagtaaattacatttaaccgactaaaaatgagaaaagcagaaacgtcattaattcattcaataaatattgcctccttgtaaaacaccttactgggcactgggaatacagtggtcaggaaaaacagtccttttcttcatggagtttacaatcactggaggaaataaagaccagtcgcacagagaagtgcaactttgattaaggaggtggtattattggggcgtaaatagatttgaccagaggtcaggagacttactttttttttctcagttctaacactcaatggttgtctctttttttctctgaacgttctttcctcatttgtaaaactgatataacatgcgtattcacgtgtttgtaatgaggatcaggtgtgaaatcttttgcgtattcacgtgtttgtaatgaggatcaggtgtgaaatcgtatgtgaaaactaagtggtgtacaaatgtaacataaaaaatgaagacattgccttattgagttgccagtaatgtcaaactgtagtatatatagttcagaattcggtcaaaaatcaatggcaagccggtcaaggagatggtcccaaaaccagcagctgcatatggagatctgtaggtttagttgatcattcttttaatgctgtccagtatggtagccactagccacatgtggttattagacatttgaaatggggcttatctgaattgttgtgctttacatatgaaaatgcacgttggatttttaagacttactatgaaaaaagaatgtaaaatatgtcaatttttatattatgtgttaaatggcaatatttttgggtatattgggttaaatacaatgtattattaaaattaatttcacctgcttttaaaagtctttttaaaatgtgacttctagaaaatttaaaagtaggctaggtatggtggctcacacccgtagtcccagcactttaggaggccaagacaggaggattgcttgagcctaagcttgaggttacagtgagctactatttgtgccactgtactccagcctgggtgatagagcgagatcctgtctctgaaaaaaaaaaaagaaaaagaaaaaaattaaaattacatacctggctcacatttgtggcttacattgtatctccattggacaacactgttttagaatgattatagaaagataaaggaggccatgactttggtttcaatatggaaactcctagatggtctctttctggttacattgccatcacagttaatctaaaaactcaatttctctgcttagaaacctttaatatattcctattatctgtataataggggtcagcaaactggagcacatgggccagttggctcactgttttcgtaaataaacttttcttggaatacagccatgctcatttgtttacatattgtagctgcttttgcacaggaagggcagagatgagtaattgtgacagagaccttatggcccgcaaagcctaaaatatttgctatctggccctttacagaataatttggtgatccttgacctataggaagaacaacccagactctctctctttctctctctctttttttttttttttctagacagagtctcgctctgttgcccagactggagtattgtagcacgattacagctcactgcagccttgacctcctgggcccaagggttcccctcaccttagcctcctgagtagctgcaattacaggcgcataccaccacgcctggcttttttttgttgttaatttaatttaaaagagacggggtctccctgtattgcccaggctggtcttgaacacctgggctcaagtgatcctctcaccccagcctcccaaaattcggggattataggcgtgagccaccacgcccagcccagacgccttggttgagtatttgaggccagttcagctcaacaaatactggcaaatgtctgctgtgtctcaggaactgtcctaagtgtggaggatgtaaata

SEQ ID NO: 4195 - DNA, 1030 bp, Homo sapiens
agcagctcatgtttgtgatcctagcacttctggaggccaatgcaggaggatcacttgagcccaggagttcaagaccagcctggagaatgtggagacatcctgtcactaccaaaaaaaaaaaaaaaaaactggcacactggttcttgctgtagtcccagctattctgaaggctgaggcagagggggcccaggagatcaaggctactataagccatgattgtgccactacactccagccttggtggcagagtaagcctgtctcaaaaaaacaaaaaacaaacaaacaaaaaaccacaaaacaaagaaatacctgaaactgggtaaattacaaagaaaagaggtttaactggctcacggttctgcaggctttacaggaagcatggtgctggcatctgcttctcagggagctttcaatcatggtggaaggcaaagggggaagcctgcgtcccgcaaggccagaacaggagcaaaagagggagcagggggaggtgccacaaacttaaagaaccagatctcccaagaactcactgtttcaaggacagcaccacgccatgagggatcctcctccatgatccaatcacctcctacctagccaacacctccaacgttggggattacagttcaacatgagatttggtgggaacatatattcaaactatattgtgatatagtatatcttttcctttatggatatgctttgtattctgttttaaaaagtgttctctactttaaggacatcaagataagtcctatattgtcacctaaatgctttattttttctactttcacttttagatctacaattcacatggaattaattttggtaatacatagatattcaactgtcccaatataatttctcttaaaaaattattcccatggccaggtgtggtggctcacacctgtagtcccagcactttgggaggccaaggcaggcagatcacttgagcccaggagttcaagatcagcctgggcaacatggtaaaaccccatctctacagaaaaatacataaattagccaggtgtggtgg

SEQ ID NO: 4196 - DNA, 1040 bp, Homo sapiens
cataatttaaccaattatctattgataggcatttattgagttttaaatgaataatgacatgatcaataaaaatgtcctcctcacttaaagaatagaaaaaccaggagaagggagttctgaaataagtaagtatgtaggtccagcatcaatggctcaagatactctattcccaaataacccttaagttatctggttctattccaacccttgggtattactatcttctctttggtctcatgcattgagaattcagcaaaggatttgttccctacagtgtgcacggcccttaggatagcaggattccctgaagagggccaaaggggcaggagcgcagccttagtggcagtgctggtccatgaggctctacaaagcaagggatgggtgtttgggaggaggaaaaggctcttgctgtactcctagaggttggaattaaagtggaaaagccagaaaattcaagtcctttactaacatgtctggagattagaaggtatatgtacatgggggagaagccaaaattattgctgcgagtggtcagcaagaaaatcaaggctcttttcattattttgagcattcctctgatatttgaaaaggaagtacaacaggaaaggaagtctgaggatggaagctaaaattggtatgaatttatattttagagatcaaaatgtaccttatgttgaaacctatgtaagaagtgattatgtagaaagagtgaaagtgatagctcttagtctggaaagcccactggcttgtttgggcatttctcatggcttcccactcaaagtggatccccaaaatcacttgatggatttccttgctgatttctaagtaaactatggtttaagaaagaaatgacagggctcagcactgccctacagtaccaagaatacaaatgtttccatgaagtcttcaaaggcatttgtaaaattcaggctgtaagtgattagttagttcattctgcacttatttattaactgtatattcagttccaggctctagggtagagattatggataaaggtgaattagatagatgaagttttt

SEQ ID NO: 4197 - DNA, 1032 bp, Homo sapiens
acattgcttagtacaccatctgaaagtaaatgctgggctagatgaatactgatctaactcagcatggcatttacatccttaatatgatctgtacttatgactgtttccataaaagtgtctcatttctttttcttttaggtatgtaaaagaaggagatacagtgtctcagtttgatagcatctgtgaagttcaaagtgataaagcttctgttaccatcactagtcgttatgatggagtcattaaaaaactctattataatctagacgatattgcctatgtggggaagccattagtagacatagaaacggaagctttaaaaggtattgtaagtctgttaatctattttaccaaattgattattggtctctttttgtcattgggtcccaattaaaagtgatctttgtttttttgttttttttttttctattcctatttatttttagctcttgaggaaatgtaatcttttcaacgtgaaaaaaggtagcaagttcaacacaaaatagaaatctgaattgtaggataagacaaaaccaaaggtgggggggaaaaggcaatagcaaaaggaagagatgaaatgttgcaaaaaagatggaggatgtcccatcctttctcctctgggtaatgactcaaacattcaggtggcattatacattgttccacataagtcagtgacgttattccttttggaggggtaagaacgggtggggatgggcttttaataacttacaggatttgagttggagttttagaagccgaaatcaggaaaattgaaaaggttctctgtgagtcatgattatcttttggccagttgccatgttaaaaatgtgtacagtaacacttcatttacctgaagtcctgccttctcgagatgttagtgttcaaagaggcaacaagctctctcagtaattaaagattcagactataaatactggccacaaagaacaaaaattggagtatctaaagatgaaatctaatataatggattgctctgtttgccactgatacaaaaaaaaaagcactcttgttggagat

SEQ ID NO: 4198 - DNA, 1078 bp, Homo sapiens
tttctaggatcagaaactcaagagaggcatttctctgctttttcactaaaggtcagttgttttaatttgaaacctgaaatgcctctttagcaaaagcctgtggtatggggtaaagccatgtaagaagagaatagtctcagtcacatatgaagaggaaaatttgcagctgccagtgctttccttgtggccctgccaaccagctcttccaggacgaactcagtccagcatggttttgatgtaaccatccatgcttttatttttgttaagtcttttgtgactgggacagttaattttagtagctgaagaacgtctagttgtttgcttgatatttgtgaacatttactgcatggatcacaaaacaatataccctgtatttcttacacgccacttatatgcagcaaggagtaaatgtgttactagattcgggtagtgcattttgtcactgaatctgaccttgagaatgtacattaattcttatattttacataatgtatgtgttgtttaagaaatgtataaaaaacctgaaaaaaatgagtaagaactggcagaagttaaaaccctttgtatcaaaagatctttattggtagagcactggttatcttctggatactaaaaagttgtattacaaagccaaacacttgcattcacaactttaaaaaaagatccaaggaactattcataatgatgaaatttcaactacatacaaggaggagaaaataagaacccagtcataacagaggaattctataggagtctgcatcaattcattcttaaggttgcctactctctgttatgtgaattagcgtctgtgtttcacccattgtctgtgtttagtccttgttcaccactaaggcaaggaattcttaactaggcctctgtttaccaacttctctttctcctcctttccctcttattcctccttctcctcttccttcttatataatgctagtatattctcaaaattgcaaagctgtgagaatattaaaataatcatggctaatgttccaataatgaggtctttgtgcatttagttccgcatatgatggttttttttttacattaaagagtatatgtgtct

SEQ ID NO: 4199 - DNA, 1027 bp, Homo sapiens
ttttttcctaaatcatagcttgaataagcaggcataaattggtcagtatcctataaaagccgctctctcctattgaatatgtgttagtaatagctaacttttacaagttgcactgccattacctgaaaccggaactgcatggaagtacttcgaagccgtgtcaaataattaaacactgtgctacccagtaaatgatcgaatttatgccatggtaacttttaaaattagcttcttgggatataacagcattcgatattaatggtaagtgatcacaatactcagcagatatcagcatttttaaaacttcagtttttaatttcatgcctagtgtgctgaccaacgaaatttttccatatcaacaatttttttttccagtccttggaatgaaatgaaatacatgaaagcttcttggacaaaaagttctaatgtgataattcaactgtgagatttctattgatgcttaaaaatccatttgcccaaaatgtaaaaatggaggcagaatatggggactgtggttaattggaaccatctgagtaaactataaattaaagatatataaatatgatttcaggttttatttttaaaaatatcaaaaacaatttcagtccattgaccaacttaaattcagtccaacccaaaccctgcatagcataatgatctgaggtttgtgtataagcaagcaagattcgagtagacattcatctgtgtctttgtatttgcccattacctccacttttagtgttttcccttttccctctctagccaattgtgaaatttctttcattctcctagattgtataaatagcgcatcttctctgaaacctcccagcctttatcccccatcccctgaccttcccctttgcctcccagcaacacagttgtcattctaccctcaatgtgcccattgaatttacccagctgcacttaaaacaactttctcacagtattgtatttccttgtttgcatatccatattatacccctctaccctctctagactataagtgctttgaaatagcatttaactc

SEQ ID NO: 4200 - DNA, 1238 bp, Homo sapiens
attttcctgttggaaatcctagcactattactgaaattacttggtaatcttgggaagggcatgtaatctctgtaagcatctaaactattaaatgggaataataataataaataataaattagatccaagaactctccaatggcttctcatctggcgtatagtaaaatccagactctaatgagggtcagaggtcccacataatctggcccttgcttattctgatttattctttttataaacagattctcttcatacccgctaccccagattatcttttgaatttgtttattgtgttatctgtttctccctatcatctcctctgctactaacagcagacaccttttgtatctcattaattgctgtatccacagaacctggaacagtggtggcacaaagtaagtgctcaggaactatctgttgaatgagtaagtacatactgtggtatatgaagcacatagtacagggctggtaagtaatacacctaccataattgtttgctgcctcatgtattatggctctgtatgattttgtttgggaaaaagtctgctactacagaagtgtagattcgaaattaatatattactaagggaaataaaatcccagttgaaaaataatctcagttctggagatatagtgataaaatgatggcaaatttttaaatgcttaatttttccaattttgtgtgtataacatcttttgtctgcaactgcgtaacaagcagggcaagaaggaagggaatattaaactggttttttaaaatctcttaggccaaattaccttattgaggaggaagggagaactgaatttgaatcaactaaaataagattgatatctttcctcattggaaaaaaacatgaaaacacagggactcgtaagaatgctaacatttgtatgttgtttccatttctactccaggtgttgccacatctgcaaacttcctgggagagtaatggggattcgagtgcttcgattatctttggtggtcatcctcgtattattactggtagctggtgctttgactgccttacttcccagtgttaaagaagacaagatgctcatgttgcgtagggaaataaaatcccagggcaagtccaccatggactcctttactctcataatgcagacgtacaacagaacagatctcttattgaaacttttaaatcattatcaggctgtaccaaatctgcacaaagtgattgtggtatggaacaatattggagagaaggcaccagatgaat

SEQ ID NO: 4201 - DNA, 1032 bp, Homo sapiens
tctcctgcccccttgtaaagaaggtgcctgcttcatcttccgtgatggtcataagaggcctccctagccatgtggaactatgagtcaattaaacctctttcctttataaattacccagtctggggtatttctttatagcagtgtgaaaacagactaatacaaccctcaatagaaagatgaaaaccaaaatatagcaccaacctcactggaagtcattaatcatctacctcattgcctaaatataatttttagaagacagaataacaaattttaatttctaaagtaactcaaggcttatggacaatggcattgaaagcaccattttttgttttgtttttaaatttcctgctgactgacagaaacatcacagaaaattctttgatttatcttaatagtgacaagtgagcctgcttctgtcaattactgaagctataaggagattttttaaaaattaaacttcaacacaatgaggtaagtaccaatattttttggcttttgtttaactgttgtaaaatacgtataacacaaaatttatcaccttaacgggttttaagtatatagttcagtagtgttaactgttttcacattgttgtgcggccgatctctggaactttttcatcttgcaaaactgaaactttatacccactgaacaacaactgtccatttcttcctactcccagcccctggcaactgccattctttctgtttctataaatttgactttcctaggtacctcataataaatggaatcatacagtatttgtctttttgtgactgcttatttcaattaacataatgtcttcaagattcatctatgttgtggcatgtatcagaattccctaatttgtaaaaacagaataataatactcttttgtacctgtgtatcatattttctaaatgtattatccattcatctgtcaattgacctttaggttgcttctgccttttgactcttgtaaataaggccacaatgaacatgggtgaagtaccagtacttttgtctgggaaaaattatctcctatagagttggtt

SEQ ID NO: 4202 - DNA, 1026 bp, Homo sapiens
tgatttaacttgggagaaggcgggagaagtaatagaaataattaaatttcagcaactgatttccagcataatcctaactcatcaaggtcagctgcattttgaacttttttgtattctgcctttgaaaataagtcctatattttatactgtattgctacaaatcagaaatcgcttaagtggtttatggagaaacctacattacctcttttcaaatagttttgaaatgggtacgagaaattgaagtttaatttcagttacatcagtttccagagactcccaaattcccccactccccatcccccaagatatatgataggtattcccatgaggaccttctcctttcaaaaagtgatggtgatgtcttcacatctttcagtcttaaagagcataatgaccaaatttaaaactaaaggcattttatttgcaatataaaagtgtaggtggacactatttaaatcaggaaaagttctatgagtgaaaaacgtcaggctgtgcctcacttcttttgtcattgtcaaataatgtttgtcccatatatgttaacctatctttgttgtcatatcaaatttgtttctttcattcattcaacagtcatttaatgaatgtcttctatgtgccaggctctgtgctgggtgctggggatacaaagccagataaataaaaagttccttccctggaggaattttatggaaaagagtagttatgaagaaaggggggggttgtgacaggcaaatcagtctcgtcttttagaactctgtgatgtttaaaatttacacaagggatgcccttggagcagtgtgaagggacagctgtcactcagtaagtctttccataaatactaagccattccttttgccctttcaatatgtcgtattggaaaatcaaaaatgattcttcaactctgttcaaatggtatcttgcaagtcaccaatcagaattcttaattcctttgtatgttacaagattaaatcggtttataagatcataaaatacatatactattgaacatttttaaactaaaaaatg

SEQ ID NO: 4203 - DNA, 1038 bp, Homo sapiens
tgtagtggtgtctttttttttttttttagacaagagttttgcttttgttgcccaagcaggagtgcaatggcacaatctcggctcaccacaacctctgcctcctgggttcaagctattctcatgtctcagcctcccgagtagctgggattacaggcatgcaccaccacgcccagccaattttgtatttttagaagaggcggggtttctccgtgttggtcaggctggtcccgaactcccaacctcaggtgatctgcctgccttggcctcccaaagtgctgggattacaggcatgagccactgtgcctggccgcagtggtgtctttgttgtggttttaatttgtatttcccaatacctaatgatgtggatcatcttttcatgtgcttattcaccattcttatatcctatttgatgaagcatcagttcatgtcttttgcctacttttaaattggattgtttccatatggtgaaattttgagtgtttattacatattctggataaaaccttttgtaagatatatgacctgcaaatattttcttcccatttgtagcttgtcctttcattcccttaaccatttttgataaagcaaacgttttaaattttgattaaatccagtttatgttttcttacatagattatgcttctgttgccatgtctaagatcccatcacaaattcaacagactcaatatttgtatgaagtgagttttagatccacactcatttttttttttcatgtaaatgtttagttacaacatcttgataagaagactgttcttccattgaattgtttctgcaccattgtaaaaatcattaagccctatttatgtaggtttctttctgaactcttgctgttctattgatctgtgcatctctcccttctatgatactatgctgtcttaattactttagctttatggtaagtcttaaaaacaggtggtgtggttcctttaacattcttttttcaaagttgttttagctattctagttcctttgcctttccatataaacgttagaatgagcttgttgacatatacaaaa

SEQ ID NO: 4204 - DNA, 1020 bp, Homo sapiens
catttcccctactggctctcattctcactcttgccgccctgtgaagaggtgccttccaccgtgattgttaagtttcctgaggccttcccagccatgtggaactgtgagtcgaaaattaaacctcttttataattacccagtctcgggtatttcttcatagcagtgtgagaatggattaatacctggatgcatgcatgtttgtgtaacaaacaggtcttttggcttatctagtaagtataaaacaagtgaccaaaaagaagttgactcaacaatgcttggtttcttgtggcagtgagttttttccctatgatatcatcagttgttgctgctattttggcaaattttcaggatgtacacataaagcagaccaggctggaaagcttgtggatagacatccactgacagaatcatttaagagcagtttttatttatgaaaccaatttatacaaggtggttgttaacagaatataacttagaggtaactggaatttgaatcacttgaatctgttttaaagggtaaaaaatgttatgagtgccaagaaaagcaaataaaagattagtaaatgttcacaaaatatgtttataattttcttctttttaaaaaagttagctgtccctactgcatgaggagttgtcctgacagcagctggtattagtgtatataaacaaaggtagaaagattacatttccatccagcagtctgacttaaagctcagctgagcacatgccacaaaatgacattcttctgaattcactgtcttggttagctgacatcctaattacgtggctcatactctgctgtattttggaggttataagattgtttaattataaatgttcagccagccttgtacagttgctgtttggttttaaatagcatctttcacatccaagcagacaaatggaaaacttgctgactacaaaataaaatttttaaaaatgtaagttttaaggcaacaatggattagtcaagatatgccatataacttaattcagttaatatgccattgtatatgtgcg

SEQ ID NO: 4205 - DNA, 1064 bp, Homo sapiens
taatagctggcctttttctctttactttttggactagcgcttatggaagaaaaaataacctaaatctgtggttctcagacttagtatttattagaatcacctagagggcttgtaagacaggttgctgggcttcatattcagactttctgatatagtagatctgggatggggtctgagaatttgtatttgtaacaaagtctcaggtgatactgaagctattgctacaggtaccatactttgagaattaccaacctagacaaattaaaaacttagaaagtgaaagaactgtgttgtcttttttttggcatggcaggattggaagagtaggtttttaattcccagtatacacttgttaaatgtaggatgttgagaggttatcttgccatgctctcttgctcaattttttaaaagggagataagaaccactgtgaaaaggcattctgtcatctccatgaaagagctttccatgagttcaaaaacagccatcaagttattgaacagagtagattaaagagtagcagtatgaaatttctaacctagaaatagacagacttttcagctatcaatttatcaaccccctttgaactattctgttgtttttgttattttctaaagaaacaacatgcagagttcagaatcaaccactgagtattgttcattacctttgtagtttattagccaacagaaaatttttgtttatcactatgatggtaaaaattgttgtataactatctaacactccttcatacacacagacattcacacacacagccagttgatacacactatcttacagacttgccataaaataaaattctctaccacaaactccatattcctgatgaaaattttccttgtaaaataaaaagtgtattagaggcttccaagttagacatctttaaagagaatagtgatccattcattcaacaaatactgttaacctacttatttttctaagtgcctttggatacagtgataaacttgaccaatagggtccttgctctcaaagagattctattttagtgggcagaagagacaacatcaataaaatgataaatattaga

SEQ ID NO: 4206 - DNA, 1539 bp, Homo sapiens
aggcctcagattactttaaaatcttatagaaggaattaagaactgctacttgaattggccatgcatttaaataaaagttgtgtgtaaagaccaactttgatatatacatatatgtggagagagagagaaaataagtcttgctctgttgcccaggctggggtgcaatggtatgatcatggctcactgcagcctcagcctcctgggctcaagtatcctcccacctcaacctctcgagtagctgagactacaggtgggtgccatcatgcccagctaattttttgtattttttgtagagacagggttttgccacattgcccaggctggtcacaagttcctggactctagtgatctgcccacctcggcctcctaaagtgctgggattgtataggcacaagcaaccacacccagcctaaggccagctttgatttaaaaaacatttttttttctcattttttcactcttaggatagaaccaaaatatctaagctcgaaatgatggaaatgtgcgtctctaatcagtgattaaggaaaagtaaaaggaacttaacaccttcaagaaaagacagacaaataacaaaacagcagtttgatagaatgagatatcaggggatggcatagaggaaagtttggttatagttttatctttgttacatgttaatgtgaccttggacaagtcctttaactttagtgtcttttttaaatggggtaaaaaacatctactttaggtgttcagcataattcttagcataggttcttaactatggtatatggcacaaaactgttcagaaatagaaattgtcaatgttcacatttccaaacttctctgaacctcagtttcttcatttgtcaagtggcaattaccagttggagggttatgtagtgttttattgagatgatgtatatgaaagtgctttgtaaattttcagtgctagctaaatgttaattttggctgctgttattttgtaaagtatttttttccaaagacaaaacttctggagttactacttacagagtcaagacctgaagctggacccagccttacctacagtaaattatgtgtactttgttaaggtgctggaatatctgtttcttcacagtaataagtactgacatttatagaacagttacagaacagttactgtgcactgttttaaatgctttacatgtagattaggattattattctaattactgttcattttgcagggatagagaagttaacaaacttgcctaagttcatgcagatagtgaatgatagagccaggagatgaaccaaagcagtcctgagttgaagtctgccactctttttattattattattatttattatgtttttttattttgagacggagtcttgctatgttgcctaggctggaatgcagtggtgcgatctcggccccctgcaacctctgcctctcgggttcaagcaattcttctgtcacagccttctgagtagctgggattacaggcgtgtgccattgcgcccggctaatttttgtatttttagtaggatgagatttcaccatgttggccaggctgg

SEQ ID NO: 4207 - DNA, 1007 bp, Homo sapiens
atactttgttttggaaaatttaaatgctgcagatttgtgtagagttctaataccaaagacagaagtaaatgttttccatatactttgtcttgcctgtatgcagccctcgtgtaatacggtgaattagagtggtatttcactttgtattattttgtaaatatgtcaatataataaatagtgactaaattgatttctaagagttggagtctttttattgaatgatccctgtattagtcagggttcccctgaaaatggatggcactggattgttgggcctgtaccaggccatcgccagcagtccagagtgaacagaagcagtgtatgtgtggaggtcaccacccccccgcccgccagccccgtggacgctatgcgtctagtaggagggccgctgcggtgagtcttgaagcccagggctgggcccgggcagagccgccgcaggtgcagatgttggtggtagtagcacatattctaaagagaacttcaaaggccgaagtggagaagggttccatgtgaacagcagttggacatgggtcattcggtcctgagaaataggtgagcgccattctgaatggacaggcgatggcctctgttgccctcagccaatcgaaagggagtccggttcagatcccgaatccggagtggcggagatggacactgccaagcgtccagcacagtaatgcgaaggatcccagagaagccaatggaagccccggggagagttcttttctccttgtgaagggcagggcgccctggaattgggttcgcctggagagaggggtccgcgccttggaaagcgtcgcgcttccagcggcatctggtgagctctggagggcccttgaaagtgcgggggagagggtgtaaatctcgcgcccggctgtacccatatccacagcattcctccctctggaactaagacctctaggccagcacaacagaatgtcgcgggaacaggaagcaaaaattttgctagtggatcacttagggtgatggtgagtggtgccacttcc

SEQ ID NO: 4208 - DNA, 1094 bp, Homo sapiens
tctgtttgggtggtgtctgggaatctccttaataagtcactgctatccacaaatatcactaggaccctttcatgacaagagtattaactttggaagaattctgtggctgtcaagtcaagcagttacctgaacagaggcagaatatattggaagatgatgtgaactcattcccagttgtcttagctcacttttacctcatgcttggctgtagaaaactttttgtcacagttcagattaggccatggtacaagtaacagcaacccaaaaaccttaaataggcttcaagaagataattatttctctttcccaaaaaatcctagaaatactccagggctggagggcagggctggtcatctctgttccaggaaatctttagcgatccagtttctttcaggctcatgctccaccatcctgaaggggaggctttcctcctcatgaaccaagatagtagctttcatattccagacagcaggatagaatgaagagccaaaaagaaaggcaaaggcgtgtgtccactgtattgttaggaaaggtcccagaagctgtctcatgacacttttgtttatattccattggccagaacttggttgtatggctataccgaactgcaagggaggctgagaaatgtagccttctctctaggcaaacatagcccaatgcataatctaagacatgaaagaaggggagaataaatactgggagaaagtatacaaccacaccttccttttccattgcagtggcaccatagtatcagcaggtcaatttatatagctgcctgcggaggtgcctgaagcagagtggcagttgcacagtagtgcagcagtcgctaagagcaggtaccctggagtcacatcacttaggtttgagtccagatttttctcatatgtaaaggggaaataatattagtaccttcctcttagagctgtgacaattaagtgaaatactgagtatggcactttcagcatggtacctaagacttcaaaaccatttgataaatgtgattagctcttatattaaaagtaaaatgaaagttttagagcatccatagacatgtaacttttctgtacatctctacaatgtggaggatgtattta

SEQ ID NO: 4209 - DNA, 1053 bp, Homo sapiens
aatagtttttgttactgtggacaataatagaagtaattgatgattgtcacttgcatggcttgaaggccttctctgaacttctacgctgagttaaatgctcccctcattgctctcaacatgcacatcccctgtgcttccttttttttttgtgatgctttccagtgttgttattatttgtatagtgtctaattttcctactagaccacatgcttcatgagggcaggagctctttctgttttcttcacaactcaattgcccggacctagtaagtccacagcacatataatgagtgctcactaaagatgcattgcagtaaatttgacattcattcactaatcaaagacttactggattcctgtagatgtcagggactgagctaggctctgggtttgcactggagaataaaacacagcccctgtccacagggtgctcatcaactagcaaaatgtgctaaatttgccttatttaactgacatttatatatggcttaaagtttctagattttttttaagcctcaaaataactctgtgaagaggtattgtttccctctatagatgaggacatcgaggaacagatcaagtaacttactcagtttcacataggattgggacctgcctctgtctggtctccaaatccttcacctgagacctgtgctacttccagccagtaaatcacatgggggtgatagtcataacttgcacctggtttatcagaaattaaatttgtttctcttggctcatgtgtttttgggtttgcattaaaagctggggcaaggaattatgatgtggaaatgagcccactactgattgaggcttttgcatctcattaaacctttaatagtcttattttctttgagactcttttcccattaccacaatttttcatggtgataattttgtttgactttggaaactgactagtctacattttgggcctattggattaagtttaaaaatcttttcttggtatttgggttctccatagtctgaaaaacttctgctccttttaacccctcactattcaagtgagtccctagttgggcctacagataca

SEQ ID NO: 4210 - DNA, 1097 bp, Homo sapiens
atgggcataaatttttctccttcagcactttaaatatgtcatgtcactccctcatggcctgtaaaatttccactgaaaagtctactgccggttgtactggaattccattatgtgttatttgtttcttttttctttctactttttggatcctttctttatctttgatttttgggagtttgattttcaaataccttgaggtagtcttctttgggttaaatctgcttagtgttttagaaccttattatacttggatatcgatatctttctctacattgggaagttctgttttattatccctttgaataaactttcttccttatctctttctctacctactctttaaggccaataactcttaggtttccctttcgagctgttttctacatcctctaggcatgcttcattgttgtttattcttttttttcttttgcctcctctgactgtgtattttcagctagcctgctgtcaagctcactaattctgcttaaacaattctgataaagactgttgcattcttcagtgtgtcattgcatttttaaacttcataatttcgacttaacctttgaaaattatttcaatccctttgttaaatttatctgatagaattctgaattccttctttgtgttatcttgaatttctttgaatttcctcaaaacagctattttaaattctctgtctgaaaggtcacatatctctgtttctccaggattggtccttggtgcctaatttagttcattaggtgaggtcatgttttcctggatggtcttggtgcttgtggatgtttgtctgtggctgggtattgaagagttaggtattgtagccttcacagtatgggcttgtttgtacctatctttcttccaaaggctttccagttccaaaaggacttgggtgttgtgatctaggctgtatctgcattaggaggcaccccaaacccagtaatgctgtggttcttgtagagttgtagaggcaccgccttgatggtctttgataagatctggaagcattctctggaccaccaggctgaggcttttgttctcttcccttactttatcccaaatagagtttctctttctgttctgagccacctggagctggg

SEQ ID NO: 4211 - DNA, 1035 bp, Homo sapiens
atcctctgatcttctcatggtatagggctttcctcacagttcttttggaactcttagaactctataacttcgcttgtctatggcaaacttttcttctctgttgtagtcatctttgtgcagatgttttatttagattcattgaatataagacttggaatattgtggctttcaaaaatgatataattggcacatttgaatctgtcgatttgtctgttggcaatttcatatgtgtaacactctacccagaattgggagacctgcattccacatgactccattgctgataaactcagtgatctctaagtctccattttctctgtgatcaccagtgggtggcattttatagcaaaaaggttataggctctagagttcaaattttggatctgctgctaattagctggatgatctagggcaggctcttttccctctgggttcccttggcttcctctggaggacaccactgtctgtgctgtaggctgctgtcatgatttgataagataaagtatgacaaattcctgcctcagagctttgaatgttgtaaactcttaataaaagagtggcaaaacaccttccactaaatactattatggttggtgttattaatgtctatttcccttgggtagttgagggatccagtaatagaacataactattatagctgaagaattttagaagacactgagcaatttcttcaaggtcacataggaagtgataatggaatagcatgtagttgtgaaaatgaggaatagtccatcttattaatatgctccttatttgtggaatcagttatttggattattttcagtccttctcttttatggatagcatgactgtccatgtccttgtgcagattattttccccctttggattttttccttcagctttgttttccaatgcgaaatttctaggtcaatggtcataaacatttttgtagctcctgttaacatattgccagatagtgtgcagagaaacagttctagtggacaaaaagcacagatttccaaagtcttggttaaaaacaaagacttgagtgg

SEQ ID NO: 4212 - DNA, 1030 bp, Homo sapiens
ggttagagtgaatgggcatggctaaagtttggtaggtgggtaatgcttttctggatacatagttaattttgctcatgtgtacattataccactaatgtcacaaaatggatttatttatgtgtgtgcatggctcaaggtatttctctcctgtctttctttttttaggttgaatttatgtgtgtatatatatatatatataaagttttgttataagttcggggcacatgtgcaggtttgttacataggtaaacgtgtgtcatgggggtttattgtgcagattatttcatcacccaggtattaagcctagtacccattagtgatttttcttgatcctttccctcttctcatcctgcactgtctgataggccccagtgtgtgtggttcccctccgtgtgcccatgtgatctcatcatttagccctcacttataagtgagaacatgtggcatttggttttctgttcctgcgttagtttgctaaggataatggcctccagcgctatccatgtctctgcaaaagacatgatctcattctgcatagtattccacagtgtatatgtaccacattttctgtatccagtctatcactgatggacatttaggttgattccatgcctttgctattgtgaatagtgctgtagtgaacatatgtgtacgtgtgtctttatactagaacagtttatattcctttgggtgtatatcctgcaatgggattgctgggtcaaatggtatttctgtctttaggtctttgaggcatcaccacactgtcttccacaaatgttgaactaatttacactcccaccaacagtgtataagtgtttctttttctccataatcttgtcagcatgtttttttttttgactttttgataatagccattctgactgatatgagatagtatctcattatggttttgatttgcatttctctgaagatcagtaatgttgagctttttttcatatgcttgttgactgcatgtatgtcttcttttgagaattgtctactcatgttttttgcccactttttaatggtg

SEQ ID NO: 4213 - DNA, 1036 bp, Homo sapiens
gtatcccttaaattattgtagctattattacttttaatagttttctctttcctactacagatgtaagtgatttgcataccatcattacagtattattttgaatttacctgtgtactttcttttatcagccagttttatactttcagatgtttttgtgttactcattagcatctttttctttcagcttgaggagctccttttacgtttcttataaaataggtgcggtcatgattatctccctcagctattgtttgtctgggaaagtatctctccttcatttctgaaggacactttgctgggtacattacccttggttggtatttttctccttgaacgctttaaatatatcatccctttctctcctgacctgttaggtctctgctgaccagtctgtttccaaccatattgggactgtcttatatgttatttgcttcttatcttttgctgttttcaggatcctctcattgtctttgatttttgatagtttgattgtaatatgtcttggggtagtcttgtttggattgaatctgattagagaccttggacttttcctgcatgtagatatttacctctttctccaggtttggaaaattttctgttactgtttctttaattaagctttttaccccttttatcttccttttctccttcttcaactcctgtgactcaaaactttgctcttttgatgctgttccataaatcttgtaagctttcttcattcattttcattcttttttctcctctgtgtattttcaaataacctgtctttgagttcatagtttctttcttcttcttgatcacttctgcagttgatgctcccatattgcattttaattttgttcattgtatttttcagccccatgatttctgtttgattttttcttttattatttcatctctttattacctttctctttgtggtcactcgttattttcctaatttcattgaattgtttctttgtattttcttgaagtttgctgagctttctttgaattctatgtcagttcatacatctctgtttctttagggatggtc

SEQ ID NO: 4214 - DNA, 1026 bp, Homo sapiens
tttaagtccctgcttttaattctttgggtatacatccagaagaattgctggtttaaagttttttgagggaccaccatactgttttccataggggctgccccattttacattcccaacaatgcaaaagggttctaatttctccacatcattgccaacacttgttatttttttgtttttgttttttgtttttgatagttgccatcctaatgagtaagaggtgatacctcactgtggttttgatttgcatttccctaatgataagtgatgctgtataccttttcttgtgcttctggccatttgtataacttctttggagaaatgtctattcaagtcctttgtccagtttttactgggttgtttggtgtttttgttgttgagttgtaggagttctttacttattcttgatatcaatctcttatgaaatatatgacttgcaaatattttctcccattctatgagttgcctttccactcttggcctaatacattgtaaatacaaacaaattcttggatttattggagactctaatatcctcatcactaaaggccctaacaaagactgtagttacctttccagcctattccctttcccagccaaggctatatgaggtactgtagtttttcaagggttgtgtagcagttcttggcttggacctccaggtgagaaatctaaactctatttctctgttacgtaataaagaggtcacataagataatgaaaaagtcttggatgaatcggcaggaatcttgaattttagacttgctctatcacttactactagtataatgttgggtaaatcatttgccttttctgatctttatttatttgcaaagtagaatcctaataattgccctcattgcctcacaaatcctgtggaagcctttaaagatgggtgggcaatactcttctgatatgatccagcagtcatgctcctcagtgtttaaccaaatgaggtgaaagcttatgtctacacagaaacatgcacacacaaatgtatggcaactttattcataattgccaaaactt

SEQ ID NO: 4215 - DNA, 1028 bp, Homo sapiens
ccagagtacttcagatgacccacttggacgttattcagatttgactatatttctctatttaatgctcactcaaaatgtaactataagatatgtgactagatttcagaaattgaacaaactgtttttcttacataatttctcagaccaggttgtgtaggacagtgttttttattccaagccctggatacaaatcatttagtaaactaacagttaagtgctgctggcaagtcttggtctatggtacaagaagtcttttggtagctgaaatagaaaaatataagtaacctattttagtcctttctaactcagccaggccttagcctcagccttagccatatgtttctcttcagtctgtcttcgtttttcttttttaatccagatatgaagcattgacgttttatatataatcataaggtatgtataacgacctttcttcctcatttttatttttaaaagttatatttaggctgggcacagtagctcatgcctggaataccagcactttgggaggctaaggcaggaggatcacttgaggccaggagctcaagaccagcctggacaacacagcaagacctcatctccacaaaaaataaaaataattagccaggcatggtggtgtgtgcctgtagtcccagttacttgggaggctgaggtaggaggatcacttgagcccaagagtagaggacaaggctgcactgactacgatcatggcctggcactccagcttggctaacagcaagatctcgtctcaaataaattaataaaatcagattttatttttatatattttttagacatagggtctaactatgttgcccatgctggagtgcagtggctattcacaaacgcgatcattgcacactatagtctcaaactcctgacctcaagcgatcctcccacttcagcctcccaagtagctgagattacaggcatgcaccaccacacctggctcacagtcacattttccacaacagatttttcaaagaaaactagggaggtagtataatatagttagtagaaagcacatt

SEQ ID NO: 4216 - DNA, 1044 bp, Homo sapiens
ctcccaaagtgctgggattacaggtgtgagccactgcgcctggctgctgatttatttttcatagacacgggggtctatgttgcccaggttggtcttgaactcctagcctcaagcgatcctcctgcctcagcctcccaatgtgctgggattacaggaatgagccaccatgcccagcccaagaagtagagtttcttttatactgactttggcctaaaaaaacagattttcatggaggaaaaaaaaacctagatttttagtaagactattttatatacttttttacattgatcaagtacattatttttaccaaacaacattgtttcccactacatccatggttatgtataaaaaaacgccattgtcaattaagatgttaaaaaattatttccataagagtattaaattctaatctatgattcacttaacttcctactttataaacactaggtaaagtaatctcacaagctgccaaagaacacatcccaagcagtaatcacagacgatgaagcaccttacaggacccctccaccctcaaacgcgcatgtccagagaagtattaatgccttaatagactactgaaggttaactatttacatcattctaaaaatattttaagctgtattacagtgctataaattctccttttaaggaaaaaagtaatagattgtttccttaccgtgtttgaaaggaaaaaaaataaatccatagtaactaatggtctgccgattttttccctgaatttttaaactccaacaaagcattattttgcaaaaagtcctttagcccaaagtcagtgtctctgttttgatctctttgtaaaagaactctctgttcatccattctctttccctgggaccgtaaaataaggctgaaaaagtcttcatctggtactgtcggaccctttgtggtagcaggtggtggagcacatctttgatcatctaatctggatccctagaagtttatgagagagattaaaagacatactgtgggaaagaaagcaccaagctatgttaaatctctcagtcacaacaagaaaacgcagtt

SEQ ID NO: 4217 - DNA, 1042 bp, Homo sapiens
caactgttgttgaatgatgacagcaattcaggaaagacttaaatatgaaagcaaattgaacacatcgggtgtttgttatcagaaaagagatgagatgagataagacttgtttattgactagccaatatgtcattaaaattaaggtttatattgtgaagcttttttgaaattttacttttttttgagagttttgctctgtcacccaggctggagtgaggtggtacaatctcggctcactgcaacctccacctcccaggttcaagagattctcctgcctcagtctcccgagtagctaggattacagatgtgcatcaccatgcctggctaatttttgtattttttagtagagatggggtttcaccatgttggtcaggctggtctcgaactcctgacctcaagtgacccgcccttgtcggcctcccaaagtgctgggattacaggcatgagccattgtgcccagcctatatagtgtgaagcttttaggaaaatcagaacagggtagacagctgttaaaaacaatgtttaaatggaataatgttgaatgtttacaggctgtaagaactattgtatacacaaaataatacacaaagtttgtactttgtgtacaaatacaaatttgtactttgtgtacaaataatacaaaaagtttgtatacacaaactttttacgttgtggtttggtatattgtcttaactgaattttcttataagaaccccatgaaacttacctgagtttttaaaatgctatccaggacatcataccttatagtatacatgaaacataatgtaatccaggttgtaatttagaactttttttttttttttagctgagcacttaatgtaattaattccaggttatgactcttaaaaaacattggccattagagaaatagttctatttgcccatccaaatcacctgaatgactttttgaaagaataggggtccacatccccagatcccatcccagctgtgcacagtctgaagcaagcagagtgaaacaagttggcaacttgttccaagcgtgggcctttgcagtctgtga

SEQ ID NO: 4218 - DNA, 1041 bp, Homo sapiens
atgaactggaaatagctactctttacaaataatatgttttcctataatcctagcactttgggaggctgaggcgggcggatcacttgaggtcaggagttcaagaccagcctggccaacatgatgaaaccccgtctctactaaaaatacaaaaattagctgggcgtggtagcgggcacctttaatcccagctactcgggaagctgaggcaggagaatcgcttgaacccgggaggtggtggttgcagtgagccgagattgtgccaccgcacaccagcgtgggtgacagggcgagactccgtctcaggaaaaaaagagaaaaaatagtaataataatatgtttttttttaattaaaaatttataacagtctggtttggatgaatggtaaagacactctttgaatgaaggtcttttggatgtgtaggcctaaccttcataggtaacggcctctcctggttcccttttggtgttgggcagctagcttttgcacagcatcaggctgaagtcgccaagatggagccattaaacaatgtgtgtgccaaaaagatggactggactggaagtatctggggtaaggtgtttgtgcacttgtccttattttgaatagaaattctgagaatgaaagaacatagaacaaagagaatgataaaataacaggaggctttccatgactgaatctttaatatcagaagaacatgcaagaagcattttaggtttaaaaccagtgactttttatgctcatctaaagtcacagggaaggaatagaagttgtatatatgttggctctgatattatctgtcttccttcataagactgtgtgaaggatcctatgctcgcttttgttcatctcgttctttgcacagggtctggcatattctcaatagaagtttattaaacaagtgaatgaatgtatatatgaattaatatccatcttaaatttaatggccttatattgacttgtgaaattttatgttgtagctttacttttttttaactacgggaaaaattagtttttttattctttcacattttataaacattctc

SEQ ID NO: 4219 - DNA, 1034 bp, Homo sapiens
cagcagtcgtaacccagatggatactaagtgactggagtgtgacacctacagtgtggacatcgtcccatgtgggatggaacaggacaggaagagagttcctcacactatccagagctgtgcataattgaaaacttaggaactgtttacttctggaattttccatttaatattttcagactgcagttgactgtgggtaactgaaacctcagaaagcaaaaccgtagatggggttaccactgtagagttactgtgttaccttgatccaaaacctttacctgaatgattcctttaaccattcccggtaggctttctctgttaaagctgctgtaccaaatccaggggtcagtttgctgccctctgatcgcctgacctcttagcggcattcaacatatttgtctgctctctcctttcttcacttggcttctgaaattccaacctctcttggttttcttcctgcctcatagcactcactagaattatctcttgctggttcctcctcttctttctgatccccgaatgttggcttgcccaggactcagtcttttgtcctcataataaatcttctggtgatcttacccagatcatctcttttaaaccccgtctacattctgatcgttctcaaatgtagtcccactgctctccttagcttcatcctgcatatttataatctctacttggacatcagtggacacttcagatttactatatccaaacaaaactcttgatctttcagaacttgcagtcttcttcagtcttttcccttctcccagttgccctggccacaaacatagaaatcgtcccaaatcttcacttgtccttaccgacatccaaattttcagcaatttctatagtgtatttctgtattagagtagcaagagatgttataagaaataaacccctatatctcagtatatgccataaatgaaattaatttttgctcacatgaaagtgaaaagctatattcccacttagtgggtggccttccaggtggtcatttaggggcccaggtgcctgcatagtttggctgccctcc

SEQ ID NO: 4220 - DNA, 2086 bp, Homo sapiens
caatcaacgaggccaatcagcggcccgcaacgggggagggacacgcagccgtcagccgaacaattcgatgacgaggcccaggaagcacgctgaaaccctgggcggcggcaagctgtgcgacctcttctgcggccggcctgggcaggtgtcttcctcgagaggcaggcaggggatcccggacgtgagtccgtgcagttgggtgtgttgtgcggcgggtggggcgggttacccgccgttacgccctggcgggtccagcggactcgcggcgcagacgctggggaggccgcaggcgcgacccggggcggggaccgtgctagctgcgtgcgtccgctgcggcctgtgggtgccccgggctcctacctcagctcccgcgccggcggctgcctgtccgccgcggttgcgcgcgttccggggaggtgcttggcccagagagcggcctacggagaaggcacagcgagggcaaagcgagacctgagcgcacgttgaattctgttggctttggttatctctgaaaactttaagcataatttgaataaatgctgtcagcagaatagctcggatttagttgtagttaattttctaaaacttcaaatctgtgaattaacacagttaacaacaacaacaaaaacggacacaaaacaacctccaaaatggattttttttttttttttgagacggagtcttgctgtgtcacccaggctggagtgcggtggtgctatctccgctcacggcaacctccgccttccgggttccagcgattctcctgcctcagccacctgagtagatgggaccacaggtgcgcgccaccaggcccggctaatttgtaaattttatttgtagagaaggggtctccctgtgttgtccaggcttgtctctgactcctgggctcaaaggatcttcccatcttggcctcccaaagtgctgggattacaagcgtgagccattgcgcctggctccaaatctgatttgagtgtaaaaagttagacacaccataagctgtaggtttattactgggtggtgaaaaacaattcaggttttctttataatagtgattatgaagtgttcttcccagactagctttatcgtcatctgggaaattgttaaaaatgcaaattcgcaagtttgagagccatggttccaagaaactgcataagcatacgaaataagttgcagcctcccgacttataccctggtacttctagtctaaaacaggatttgactctactaatccaggttagtcttgcctttcccattactcatgtgctttcgttgaaaccaaagactttttcttttgtgcccatttctactcactgcctggccgtctgcacgacgatctgtgtttcctggtagttctccagtctagtagctactataaactactctccctatttcccgctctgtggagatgtcgttccaacaggtcctctccactctaagaccctatcctctcagagaagcccctgagagccattagtacttttgccctggagaggcagtttaggtagagccagtctgggttctaccacttactagcttggtggtcttaggcaagttactttgtgtgatctgtaaaatgaagatgagtgaagataagagtactacttccagtagttttgtgaggattaaattaatgtaacagtgcttagcacatagtaacaaaatattagctacttttttttttttagacggagttttgctcttgttgcccaggctggagtgcaatggcgcgatctcggctcaccgcaacctgcactctctgggttcaagcaattctcctgccccagcctcccgagtagctgggattacaggcatgcgccaccacgccctgctacttttgtatttttagtagagacagggtttctccatggtggtcaggctgggctggagctcccaacctcaggtgatgcgcccgccttggcctcccaaggtgctgggattacaagcgtgagccaccgtgcccggcctttagctactattatacatattataatttaaaaattattagtaccgaagcctgagacaggagagaaatggtaaaaatagtagggactgcgggagagagaaagagtagtgtcccctgacaagt

SEQ ID NO: 4221 - DNA, 1054 bp, Homo sapiens
aggactatcctggacatcatgttgaaaacttgtctctacagaaaaatacaaaaatattagccaagcatggtggcgtgtgcctgtagtcacagctacttgggaggctgaggtgggaggatcaattgagcccaggaggttgaggctgcagtgagccttgattgcaccactgtactccagcctgggtgacagcaagatatcctatctcaaaaaaaaaattttttttttcagtgattactatgtgctaacaccatgctacaatatgattgaactgctatggtgaacaagaagataaaacatgaaagaaagggagtgtgtaatattttaaaaggatatctttccacttgaacagagacacttaaaatggagaaaaatcatttgaaatatgtaagcttgaaatgcatgtatttcaggcatggactggcactggaattggagtctgatgacctgagttcaagttcaagctctattttctagctatgcaatcttaggaaaatgacttgttttttgagtctgttacctctttgtgaaatgggtcttataaactgtttcacaggttattgtgcaagttaaatgagataatgcatatggaagttctgtatacgttgcaaaattaaatgaaatgttactttttgaaggttattttattctttatacagttaatagctcttacaaattcttctttgtggacataaaaggggacttcctgtggccattagtaattcatagcacagtctggtagccaaaaaactcctcagtcttttgtttttgaaacggagtctagctcttattgcccaggctggactgcaatggcgcgatctcggctcaccacaacctccgcctcccgggttcaagtgattctcctgcctcagcctctcgagtagctgggattacaggcatgctccaccatgccggctaattttgtatttttagtagagacggggtttttccatgttggtcaggttcgtctcatactcccgacctcaggtgatctgccaccctcggcctcccaaagtgctgggattacagatgtgagccactgtgcccagcccaaaga

SEQ ID NO: 4222 - DNA, 1085 bp, Homo sapiens
aaaggacattggtggaaaaacttgtaaaatctgaatgaagtctgtacctgtaccgatgttaatttcttagctttgatgactccctatggttgtataacatgttaacataaggggaagctggatatagggcatatgggaaccctgtactatttttgcaactcagctgtaaatctaaaattatcttttttttaaaaaggcaaaaaaaagtacagaatccaaaacagaacgataggaactattggctcctgtgtttgtttttttactcctgtttctggacctaaagactcttgccagtgtaaaaccctagggatatgtctatctcaggctggtttccaagtcacccttttcttctgtaggcctggtctactttcttctctttgtacttctactagtttttacttcttctaaatagaggaattattcttaatttactcatttcttcctttagaagtattctatgagtatcttttttaaaaaaaaaaacttaggtacaataaattgtgcaagtcttaagtgaacagcttgctgaattttatgtatgctatacagtcggctctctatgtcatgggttctgcatccatggattcaaccaacctcagatggaaaatattcagaaaaaaaaactgtgcctctattgaatatgtatagacttttttccttgtcactattccctaaacagtatagtataacaactatttacatagcatttacattgtattaggtattgtaagtaacctagagatgatttaaaatatacataggatgtatttagcttatatgcaaatactatgccattttatatctgggatttgagcatctgcagattttggtatccacgggaggtcctggaaccaagctcccaaggatactaagggacaactgtatacatgtgcgcacacacacacacacacactcacacacttgtaatcactactaagatcaagatacagaacacttccagcatttgacagcatttcttaccatttacatatacccctttgataatctgataaaagttataattattcccagaaaaatgcccatgtacagataatgtataaaatttttccgtatgatttcagggt

SEQ ID NO: 4223 - DNA, 1025 bp, Homo sapiens
caagacttcagtagcaaaccactacagtcagtacctggactcgcctctacccagcagaccctgactccagcagattctggcccagggacaggaggaagagatgccaccagggctggtctcccaggagtagagaccatgggaaatggggtggattaggattgagctggagaagacttaaactctctgggttgaaagaagattaggggaaaagaggtcaccttccagcagtgaaatgaacaaatagaagatgagaagtacaggcaagtggtttgtctttatccacccccactgttgtggtcagccccagagaattttatcttcttccttggcattggttcactggacatttccacgtgagcggcctccgtagctaacctccctgccctctgaggagccatcttcctgaatcgcattctctactggactctggcctgcttggagaggtggcagcaggcacctggtcttcagaaattgtttcctgtgaattctgtgactcctaataggccagtttgtgataagcttactctatgagtcttcatttttctaaaataaagtgaatgtatttttatattctctgtatatctggaagtcgatcctgctcctatttctttctctttttttagacagaatcttgctctgtcacccaggctggagtttaatggcgcgatctgggctcactgcaacttccaccttctgggttcaagcaattctcctttctcagcctcccgagtagctgagattacaggcgcctgccacccacgtccggctaattttttgtatttctagtagagacggggtttcaccatgttggccaggctggtctcaaactcctaacctcaggtgatccacccgcctcagcctcccaaagtgctgggattacaggtgtgagccaccgcacccagcccctgctccaatttctctttttttttttttttttttttttgagacggagttttgttcttggtgcccaggctggagcacaatggtgcgatctcagctcactgcaatctctgtctcccgggttc

SEQ ID NO: 4224 - DNA, 1631 bp, Homo sapiens
gcagaaactgcccctcccctcattgagggtcactgctcaagagtgcaggagtggactctccactgatgggtctccctccccatcctggtttccaccccgggctggctagctctgttggtttgaagactgacagccagcctggctcattctcattattggctagttagctttctttatcaacctgctcactcacaaatgtgtgccctcagccagagagtaagaaagcccaaatctgttacagcttctaaaaaaatagatttctaatttgtcctactcatgttaggagcattatctttgaaggtaaaacatagtgtatcattgtgtaaactcccaggcttgatgtagcagaagagatcatttctggaggcttcagcaatggaatttagcattataagagagattggacaaaccagtccaaagtggtccgagttcttaaatccaggtagggaactcactcttctttcttctctggacctaattgggcattgggctttagtgagaccacagaccaggcccgtctctcctgtaggcttttaattcaatggcaactctatttcaaagaataaaagcctttggagagttgcggcagttctgggggcgggctcaggagagtccatagatcagccgtaactggaacgtagaatctacgtctgcctctgaatggacttcccacctcctctctcttgctctgatgcttgcctctgggcctctccatgcccaaggtggtctttcatccttgacaggctggtaatgtgctggccacctccagctcctgcatcgagtctgtaaaccagagctggttctcatggccttcgtcacgataccaggatacggaggggagcccagggccatccatacccaccccagggtaacggggctggcctggcattagtcattatttagtttccaggccaaccatccagatagagattccctctttcctttgagcagtgctctcaagagctccgtgcctgtccacaatgacctagagtgcatcctgctcattgtcagtgtagcccctcgcccctatattcatccaggatacttggaagtgctaaaataggaagggattcggctttcaactttgctaccatcttccctgaagcaggaaaatgaacatggacttaaatgttctttgaaaaaaccaaagttttaagatttgctgtgtgatgaagtgacagggagggccggagtcagcaggtgccagactttctgttctgtctgccatgggtttgtccagctcaggtagctctaggagcaccatcctgccctagcagagcccaggccttgccctcatgaagcatcattgaaatagcaggagcatgttgatttcttggttaggttgcattataataacaagagtcagaacattaattcgaaacaacttgcagtatgcatttcttcacaccagtacattcttaagtgtacttgtttataaggaataacataaactaatctgtacctttatatatatgtgtgtgtacatatatacatatataaactgtatagtgtacatggtaatgatttattgctatgccccagatccttaatgtagttctcatcctccgcatgccctcagccacaagcgggtgactgactgttccctgatgatttggcccacctcctgtgtt

SEQ ID NO: 4225 - DNA, 1055 bp, Homo sapiens
tttccttctcaccccttttttctgactttgccaagtaatttgttgacacgaaaattttggaggaaccaattgaaaacacacttccagtctagatgatgctttgtgtgatacattaagttcttattttggattaaaagaagttttccatttgatacctctctaaattaaataaattatagaatgtagttgggtggattttggggtggccatatagtaatggaaagctgcaataattagttttaatacagcttgaatatttgctatatagaaatatagtatggaaagtttttggtcttaatgtagctactgtgcgggtcacagtttctcccaatgattatgactgggacattctttggtagataccatttgctactagtttattttgtggctagaaagtcagttttgtgtgtttttttttttttttatttgaagtgccaaattaactttagtcagaatgtgagcagatggctaagttctctcctccccagaatggattaacagctgcgtggaaagtgggggagagagtggatggagacttttagagatgttaaaactgcagtagaatgaaatgagtcagggagcttcagttagaaaataaagttgaggcagtttttgtgaagataatatggttagggctggagtgcactagtctttttgcttattcattttgcatggttttaaaattaaaaataattccgaagatacaccagctcacaaatgaaaacgtcagcctctgccccaccctccctcctgcccaaagtgaatttggtactcagaaaagaactgtttataccactcacctttctcccagcatgtactcactgtgggcagatgcaccaatacatggtaatcctcttactcattttaagacgtaggaaactcaatattcttctctaaccatatacgatagggctcttcgcttttaatgatatctgggatttctgtggaacttggcaaattttcagagcaccttcactcacataatgtcatttgaacctcacaatgttcttgggatggagtcagttgttcagggtccccgtgtgtgtgataagcag

SEQ ID NO: 4226 - DNA, 1050 bp, Homo sapiens
aaatcttctttgcctggtaggtaccggaaaattccaggggacaaatgccagggtggggtaaatccagttcgagaagtaaaagacttgaaaaagaaatgcacaagcaactttttgagtccggaaaaacaggtatgttaaaataggtctagttttcaggtacaaatgggattttgtgttctgctaagaaaaatcaaagttaaagcatcaagagttttgttactgataaaaagtggtcaaactacttctctcaggcttcccttatacaggaagctgttagcatgaaggatgggtcatgtaacccagtgataagctcaccctactgaaagctcttttcttattgagggttgggggatgatattctgtaaagttgtaaaattcttaaaatcatacagttgtggaaatttctgaggctgagagtcatttaggaaaacaaaaaggttgtctgtgggctgggtacagtggctcacacctgtaatcccagcactttggaagtccaaggcaggcagatcactgaggtcaggagttcaagaccaggctgtccaacatggtgaaaccctgtctctgctaaaaatacaaaaattaaaattacaaaaattagctgggtgtggtggtttacgcctgtagtcccagttactcgggaggctgaggtaggagaatcatgtgaacctgggaggtggaggttgcagtgagccgagatcgtgctgctacactccaacctgggcaacagagcaagactccgtaccaaaaaaaaaaggttgtctgtgaagggccatgacctggaattgtgcatgtgtggaagagaagagcactgggcaataggtagggtggatctctgaccaagtcatgttaagtatgttcaaagtgaaaaattgagctatggtaatgggctggttttgatttaaatgaagcaagttacctgtcgggcatggtggcttactcctgtatagtcccagcactttgggaggctgaggtggggagatcagttgaggctatgaattggagagcagcctgggcaacatggagaaactccatctttacaaaaaaaataca

SEQ ID NO: 4227 - DNA, 1056 bp, Homo sapiens
gatttcattattgtgcaaacatcacagagtgtacttactcacacctggacagtatagcctgctacacaccacagctatatggtataacttcttgttcctaggcaacaaacctgtagagcatgttactgtactgaatactgtaggcagctgtaacacagtactaagtatctgtatatttaaacatagaaaaggcatggtaacaatatggtttcataatctggactcaccatcatataaacagtccattggtaaccaaaacatcttcatgcaacacataactatattctatcattgaagaccactgcagattacatttatctgtgtgcagaaatttgcagtgcacagcagtcttcattgatggatacttaaatttaatgaacattaagatttagcattttgtattgtgtaagagagctatacatagtattaaacctgtcagggttagacagctatggaatttttgcttttattttccagaatctaaacatggattcgaatacttctcaaagatattgttggaatgaacttttggaaaaagcttggaaactctgagagttgagattaagtttgtttgtttttcctagctgtatttcatgtactgagtgccttacagacttctgcctagggatggtaacttctatggggaaaaacttcaagaacttgctacagcttcatttacagctttttcataactactgtggattaatagattagttagaagcctttgggagcactttgcatagatctcaccttaaactaacctgaataataagggaatagttgattctgtaactaagtacagaggaatgacaggcttcagggtcgattcaattcagtgtcataggctctgcttctcggtattctgaaattaccttctctgtgctcccattgtgacagaatgacgatagcagtctttactgtgtgttcacatactgcatcattggggtttctcaaccttagtactcttgacattggggccaggtaattctttattattgtgggactgtcctgtgccttgtaggatgtttggcaacatcgctggccactacccactta

SEQ ID NO: 4228 - DNA, 1047 bp, Homo sapiens
aagagtttttgaggtgcatgcttgaaaaagcctacatagctgttaatgaaacttaaagatgattctggtgaaggctcagaaagaaaagaggagggctgtagagaaaaattccatcttagagaatacctaagtaatccatggtagaatattcgtaaaaatgtggaccacaaaggccattatgatgggtttctggcagaaatgaggaacttgttgttggacagtagagaaaaagcaatccttgttataaagtggcagacaactaggctgaattgtgttcatgttctagtgttttgtggaaagtagaacttgcaagcaatgaaattgcatatttagctaaaacaatatctaagtaaaatgttgaagttgcagcttggttcctcctgactgctcgtagtaaaatgtgggaaaagagaaatgacttaaagacagaattattaagcaagaagaaagcagtactaaaagatttggaaaattctcagtctatctaaattgcacagactgcaataataggatgtgaataattaggatgtggccaagtgaccatttgataaagagattagcataggtgtaaactaagaactcaatcagtcaccccaacaggaaaactgccagtttgaacccaatgagggaaggctttcagatttcaaggaccacagagctattcagttgcgtatgtgtaatcttctttaagacaaggccattcagggatcaccaaggctgcctcctcaatttcaaaagaagggaccatcacccaaagccatgggagaagggccacccagatccttgtgggcctaccccctttctggcaaggctgcagagcaagaacacaatcccagcgtgtctgggaagaggagggaccccctccccaatattggacctgtaggacagagcatagagccaaagagaattgttttcaagctttaatatctaggccaggcgcagtggctcatacttgtaatcccagcactttgggaggctgaggtggaaggattgcttggggccaggagttttgagaccagcctgggcaacatagtgagacccatctct

SEQ ID NO: 4229 - DNA, 1084 bp, Homo sapiens
acagtagttgaaccattttagatgaaaaacatcctatttggggagagaaaaatgcattttaaaatgtgtaactttgcttcagtaactctttcctgtggttaagaatgtttgctattataaattccctcctcacaaaattagctgggcatggtgtcacacacctgtggtcccagctacttgggagactgaggtaggagcatctcttgggtccgggaggttgaggctgcagtagctatgatcacatcactgcactccaggctgggtgacagagcaataccctttctcaaaaacataaaatatctcctcatgatagtttttcttaccaacctgtgtttcattataaaagcagtataatcatattataggacatttgaaaattttaaaggaaagaaaaaagttcaccatacagccacgtgtaatcttaatttgtttgcagtttattatcttgaccttcccctttgatgttgtatcatataattgtagagtattgggaggcaatgtggaatagcaaaatgttgccaagctttgttggcaagtaggctcaggattgaatcacagcactgtcattgcaaacagaatgaacttgggaaagtcatttaacctcctaagtcttttttgtcatctgtaaaaggacaataataatgcccacctcagagccgttgtgaggtatgctctgcagtgcctggcatggagtaatagcttggtgctgttagttgctgccatgccaatgatcagggatggcatgtagccagcaggtactggcattgctgtaccagttgttaaaatgaatttgaagccttcaggcagattgcctgcccccagatgcctccacgtcttctacaaatgcacactgcaccccctagcccctgccaacatgcaaatgttactaacacctggcattatgacctacatccatgctgatgggtcggtactcataccttcactctgctggtaacccctcatttttttagattgacataatttacttaatcattgttccattggatagttaggttgtagctgtttttttcgctgtaactaatactactgtgatcagtatcatacatatttgtgtcatagggga

SEQ ID NO: 4230 - DNA, 1031 bp, Homo sapiens
aagcatttttaggcgggaccggcacagcgttaagtctggggttatttttctttaccacagaggtaaatgtttctgagtactctacccaatttccttgaaataacgaggtttcctattatggttgctggtaacaggaattattcctgttcctgtgtgaggtctgaatattgttctctgccgtcctttcaggtaattatttccctggcctcaggtagtttcctcacatgcgtgtgctgatgggtgttcagctgaagacttggtggggtggctggggaggccccctgctcagatctccagaattttttttctgtgtaagtctttcttctctaatcttctgccctgtgaacctctttggcctccccagacgatatatcagcttcctctcttcagtttaggaagaactctggactctgcctgggtgcccctcccctgcactgtgcctgaaattctctccaggcagtaagccagttagctgtagggtcctccttgttcagttccttgtctttcaggaatcgtcgtcctttgtgcctggtgtccaatatcttggaaacagtcatttcatatattctgtcgttttgggtttttttttcttttcttttcttttttgagatggagtcttgccctgtcgcacaggctagagtgcagtggcgcaatcttgcctcactgcagcctccgcctctcgggttcaagcaattctctgcctcagcctcccgagtagctaccgcgcctggctaattttttgtatcttttttttttttttttgagacggagcctcgctctgtcgcccaggctggagtgcagtggcgcgctctcggctcactgcaagctccgcctcccaggttcacgccattctcctgcctcagcctccggagtagctgggactacaggtgcccgccaccacgcccggctaattttttgtatctttagtagagacggggtttcagtcgaactcctgacctcgtgatccgcctgtctcggcctcccaaagtactggggttacaggtgtgagccaccgcgcccggcccattctg

SEQ ID NO: 4231 - DNA, 1080 bp, Homo sapiens
ggacggtaagggatgagactggagaggtatggaccagcttgggaatgtccttttttagtatgctaagagtagacaggagcaaaggaagtaatgacgagtaaagataggtgggtttggcggtaaacctggagagatgtcccacatttccccagatttttcctagtgattgtaaagtcatctgccgagggtaggtgaatgcaacagtaaaattgagaatgggaaatatttggaaaagttgttatgagaagacagggaagagtaaaaggattgctgggccatattaaaatcgtagttgaggccagtaatcccagcactttgggaggccaaggcaggaagatcacgtgaggccagaagttcgagactagcctggccaacatagtgaaaccccgtctctactaaaaaaatacaaaaaattagctgggtgtggtggtgcgtgcctgtaatctcagctattcgggaggctgaggcatgagaattgcttgaacctgggcagtagaggttgcagtgagctgagattgcactccagctgcactccatcctgggcaacagcacgaaactctgtctcaaaaaataaataaataaaatttaaaggccaaccaaggctgtaattatatatcagtaattaaaccaatcagtacttaccaggatatttgttgaccacactcatgagaaaatggatggttggattaatccatggtaggggattgactagttaagaacagaagattagagaggactggagagtattgttggtgaatgtctcacccatagaaccagctttcataggctgctgtgaaaggtcagtctaagaaggactgacatttgggagccactgcgctagagcccatctgctttaagttcttagtccattagttgttccttggagctccagcctccctacatgaactgcttcccctaagaaaaggaaaatatccggccaggcgtggtggctcatgcctgtaatctcagcactttgggaggccgaggctggcggatcacgaggtcaggagattgagaccatcctggctaacagggtgaaaccccttctctactaaaaatacaaaaaaaattagccgggta

SEQ ID NO: 4232 - DNA, 1029 bp, Homo sapiens
tcagtaaagtggtgctggcagaagccagaattcagtgagttaaagaatgaggcctggcgaggtggctcacgcctgtaatcccagcactttgggaggccaaggcaggcagatcacttgaagccaggagttcgagaccagtctggccagcatggcaaaaccccgactctaccaaaaatacaaatactagccaggtgtggcggcacgcacctgtagttccagctactcgggaggctgaggcatcagaattgattgaacccaggatttggaagttgcagtgagctgagattgtgatactgcgctccaacctgggcgatagagcgagactctgtctcaaaaataaaataaaaagaatgaaagggagatgatgagtggagaaaacaatagtatgctgctttctcaagaagtttgattagtgtcagcagaagatagcattaaagaaaaggattgtgtcttttttaggatgtggaaaagtcttgaaaatataaacggagatgaaactagtgtatagaaaaatgttgaaagagttgggcgcagtggcctgtaatcccagcactttgggaggctgagacaggtggatcgcttgagggcaggagttcaagaccagcctgcccaacatggtgaaaccccatctctactaaaaatacaaaaattagccaggcgtggtggtggacgcctgtaatcccagctacttgggaagctgaggcatgagaatcacttgaacccgggaggtggaggttacagtgagccgagattgcaccactgcactccagcctgggcgacagaacgagactccgtcccgaaaaaaaaaaaagctgaaagaaataaaaggagaggttaggatagtgatggaaaagttatagaagaggtaaggcatggtacacatgaaggagttggttttgaaaagtaaaattcattcagcatcatattgagtacccattatatagcaggtattatgctagatgcccagggttacagacacagaaaatccaattcctattcaagtagtatactgtgtagtgcagggaacat

SEQ ID NO: 4233 - DNA, 1035 bp, Homo sapiens
tacaataaatgagtaaaggaaccagttgaggaaacacacagcactttctctctagggaccacaccaggtcaatgaaaggcactctgtagctctaactagatgccctctttcagctcctgggtccatttttctccaggaaacattatatgcagttacagaggtgaagctttcctccttcctctccttgctcagcttcttaatggtctttcattctgccaaggccaattgtcaggggaactgcggagatttacatagacaccacaaccaactccaggactatcccttggagacttgggagtgagcatttttataatacaaggaaatcagattacatttagataaatgaattttaggatgaatttactgcatgcaaaggacagaaaagcaaaccaaaatgaacaaggtagtcattgtaaggttctaagacagctcatggaaataaagtgcagccagtatcattttgaaaattgcatctgggaaatctgaactgttagggctcaaggtatcctctctctgtctctctctccccaacccctctttttctcttttcctctctcaccctaactgtaagatacctattcactttcccacacctccaatcatggattattatgaatgagatgtcatgattatgagtggctaagtcttctgtctcctcaagaaaacagcactattgtgtgactacagcatcctatggaaaatttcaatcttattataaccttaagagctctggtttcatagccatccaagccctctttgaaatgacttatagtccctctctttgattctctttctctggggcctctatggtgtctctatggtctcatctgttcatacatttgggccatttttctctctgcagcttgttcaagaagcatctctgcctcttaatgacttcagcctgtttacagcattgattgtaggtaaagttcccaaccctcagtaacctttgagctctgattgcattctggctgtgcaacacatacttgaaattctcaagagggtgaatctgattggctgctgaccagccaatag

SEQ ID NO: 4234 - DNA, 1034 bp, Homo sapiens
tcggcctcccaaagtgctgggattacaggtgtgagccaccatgcctggccagaaaataaaatgttttaaatgaacagagcatcatgagttgagaaataatttcaggtggcttaatatacatgtcactggagtctctaaaattgaggagagaagagagatagaaaaataatttgaagaaataatgactaaataaaatcctaaatttgatgaaaataatatccctatggaaccaagaagctcaatagctcaatgaactccaagcacaagaaacatgaagaaagctacactaaggtctttataatcaaagtactcaaggaacagtgataaaaagaaaatcttaaaacaaccaggggaaaaaaagacatgttatggactaaggaacaattgtaaggataagagcagacttcttattggaaaacaggcaagctggaagaaagtggagcaacacatttaaaatactaaagaaaaaaaattgtcatactaaaaatctatacccaataaaaatacattttaataacttaaaaaaaggactttaagatatacaaaaggtgaaagaattcctcatcagtagatccatactacaagaaatgttaaaagcaatcctctaagtagaagaaaaatgagaccagatggaactacagatttacacaaaggaacaaagagcaccagaaatggtgactacaggaataaatgcgcaatactttttttcttgttatttaaatctctttaattcatttttatttttatttttttgagacaaagtcttgctctgtgacccaggctggagtgcagtggtgtgatctcggctcactgcaacctccgcctctcaggttcaagaaattctcatgcctcagcctcctgagtagctgggattacaggcatgcaccaccacgcccagctaattttttgtgtttttagtagagagggggtttcgccatgttggccaggctggtctcgaactcctgacctcaggtgatctgcctgtctcagcctcctaaagtgttgggattacaggcttgagccaccgcacctcg

SEQ ID NO: 4235 - DNA, 1035 bp, Homo sapiens
acaactttaattctgtacagattttagcccagcaggtagttttctttaattgcaagtagaaaactccattgcaataaagaccgtaagtaatggtgagtccttaaaagcaatattataaaaggaaatggtcactaatagtaatgagccaaaattctgttgaactgtcaagatagaaccattgtatttcaaatcataaaaagagccattttttggtgtacttgtgtgtttttttcttttttcttttttttaattttgtggtggaagtttgggggaaggggcagagagtgccctgtgtacatatgagaaagtagaattactttttaaatgattaatttctgcagccttattttagtacctgaatacttactgacttctgacttagcttaatttatagaaaatttgttttaggattgcatttttaaatacaaaaagtaagataaacaactttactttgtgtgtgtgtgtgtgtgtgtgtgtgtgtgtgtgtacccttaactctgttatccagtttctaatccttttggggatttggagatttttaaattacaaattacattcataagtcattttgagttcattaactcattgatttatgcattgtttttattatttttgaatgtatttatttaaatcattgaggttttacatcatatatttgggacatttaccagatgactttctgaagcttcgacatttactttggttaatggttgcgtatttgattccattctgttctgtaagtaataaaacatccaaatataattttgtaaataatattaacggcccttgtagtttattggaaacttagttttcttatttttctggtaacatgtttgatggtactaaatcatttatttttataacttaaatgactatgattttcttattgtttgtagcttaaatatttcctgttactgcttatttaaaatttttcagtagcataatacagaattgtatattgttgtatattgtttgaagtatctcttaattcatcagaacatcacatgtaaaacccaaatttaatcttagagtaca

SEQ ID NO: 4236 - DNA, 1031 bp, Homo sapiens
ggttttttgcctacgcccattttatctatattctataactagtgctgattctgatgctaatcataaaaacattttgtgttttatataactgtttgtaaatatgagacccatggaaggcaaatgatttgcttagtcactggagggatcagtagttccataatacaaccttaaggttctccaacatccacagcatgagccaggcacacaggtatgtgcctacagtcccagctatctgggaggctgaggctaatggatcacttgaggtcaggagttggagtccagcctgtgcaacatagagagaccccattttttaaaagcaaaaacaaaactacagctattttgtttttttttttctttttattctctctgattaattttaaaaggaaaatctgtgattctggatagcagtgacctttgtgaactcttcattggcaactttatttcttgattatttattactttgttgttttttggattatcttttcccaggcattgctaccatttatgttcgttataagcaagttcatgctctgagtcctgaagagaacgttatcatcaaattaaacaaggctggccttgtacttggaatactgagttgtttaggactttctattgtggcaaacttccaggtttgtgttttagcccagcataggtattttccttaagtacataaatatatatattaaaagggaaacctgaagcattcagttacatgctgttgttatttctttaccttagcaaaatagaaatcacttcctttaaattatttgaccctattagaaatagctacttgcacaactagaaaaattcatatttaaaagtctgaacaaatacaaattattttaacttttttaggatccacaggacaattattagagtcttcattactacttagttggagattacttcaactcactactgaaacaaaattgatataaattagaagtgacacaattacagattttaaaagttttgtttttaatatgcctaacaatttataatcatttacctattttatctacttgtttgga

SEQ ID NO: 4237 - DNA, 1051 bp, Homo sapiens
tgggaagatgggacaagaaagcaagtttctagctctgtcacgtgggtgaatcttggttgcgctcactaagaaagggaaggagagcgagtattggggtatggcatgagggatgatttcagaggtgaaacagcttggggtggtaagtacaaggctgtgggcatggatggctaaagtaggatgaggaaactcttgtgaattatcttttctaatatgttttctctatttcagaaaacctgttagaaatgtggtggtttcagcaaggcctcagtttccttccttcagcccttgtaatttggacatctgctgctttcatattttcatacattactgcagtaacactccaccatatagacccggctttaccttatatcaggtaagtgaaatgtattctttgtataggagactctttatgtctcattcttattttaacattgaagtcaacatttaatgtcaaccttttaaaaatcagattttacattggcattacaacaataaagggaatataaaaaggaacttgaatttggctttttctttgtgatagagaaatgtagagacagcccaataagattcagtttgtgaactggttcttgaactgtgactctttagtgccttgttttctaagtaagtatttgaagttgtttcagaatatagaattggaattattcgccgcttaaaattaaaaaataaatgctacaaacaataataatgatatgaaaagataatggaaatgacaaacatgtcttaatatgcttactgcgtacgaagtaattttctttttttttttggagatggagtctagctctgtcacccaggctggagtgcagtggcatgatctcagctcacctcactgcaacctccgcctcccgagttcaagcgattcttctgcctcagcctgccgagtagctgggattacaggcgtgcatcactacgcccagctgatttctttttttttttttgcatttttagtagagatggggtttcaccatgttggtcaggctgctcttgaactcctgactttgtgatctgcccacctcagcctcccaaagtgctg

SEQ ID NO: 4238 - DNA, 1050 bp, Homo sapiens
ggtcactacatggagaacacactactactccacctagaacaaggccaatgcaccctccctgaactgacatcccaagacccattcatataaataagtctttatttatgaaacctactgcataacatttgaagagatgactttcctatcagatgtgtagaaatcaatgtagggacacattaacacgacaaagcaagaaaacatgtcaccaccccacaccaaaaaaaaaattctccagtaaaagaccccaatcacaaggaaatatatggaatgccccccccaaaaaagaatttaaaataataatattaaggaatcctagtgagatacaaagaatgcagatagaaaattcaatgaaataaggaaaacagttcatgatttgaataagaaatttaacaaagagatatcataaaaaagaaccaaacaaatcctagagctgaataattcaatgaatgaagtaaatatacaattaagagattcaacaacagactggactaagtagaagaaacaatttctgaacttaaaagacatgtcctttgaaataacacaggcagattaaaaataaaagaagaaagaattagaaagaatgaagaaagattacaggatttatggacatcattaagtccatactatgggcattgcagaagtgaagagaaaatgtgagggaaacatatttaaatgaaataatatcaaaaaacttcccaagtctagggaaagagacagacatccaggttcaggaagctcaaagaatgctaaattgattccacccaaacaggtcctgaggcacattatattcaaattgtcaaaagtaaaagacaaagaaagaattttgaaagcagcaagagaaaagtatcaagtcacacacaaaggaatgtctattcaactattagattagtagcagatttctcagcagaaaccttatagggcaggagagaatgggttgatattttcaaagtgctttgagttttcaaagtgaatagaaaaaattgccagtcaagaatattattcccagtaaagatatttttcagaaatggaggagaggagaagaggccagct

SEQ ID NO: 4239 - DNA, 1029 bp, Homo sapiens
taataaccattagcagcaataacaacagtcactgctatgagtgcctaccatgaatcagacagtttacatttataatctctatttttttaaacctttcaagaaaagtgtcattattgctacttttcaaatatgttgtccaaagtttctcaattagtaacccaaatctgcctgtttctaagccggggtgtgcccacctttttggctatgctttttctcaggtcattccaaagacagaccatttaaccactggatctggggcaacaaaggtggatcaatcgtgaatccttcactaaaaagcttgctttgtaatagatgaaacagtttaatttttaaatctagtgttataagggtttaagtagtagcacactgtcaaacttctgttggaatgaaaagaataagaactgacgaccacaaaaaagcaattctgcttaaaccagtgtctctcacccttggcactattaaattatcagtacaggcggtccgtgacttctgatggttcaacctacgatttttcaactctacaacagtgcaaaaacaaaaacaaaaaacaaaacaacaacaacaaaaaaagtgttgtcagtttgttcatcgacttatgatggagttacatcctgataaaatagtggttagttgaaaacattaatattttttattttactttaagttctgggatatatgtacagaacatgcaggtatgatgcatagatatacatgtgccatggtggtttgctgcacctgtcaacctgtcatctaggttttaagccccacatgcattaggtatttgtcctaatgctctccctccccttgcccccaacccgccgacaggccccagtttgtgatgttcccctccctgtgtccatgggttctcataaacattaatattttcaacttacaatgggtttatcgagatgtaatcccatcataagtcaaggaccctctgcactgaatatacttcattgtggagggctgtcttgtgcatcaaaggagggttagcagcatccctggcttctacccattaggtgctgtggc

SEQ ID NO: 4240 - DNA, 1041 bp, Homo sapiens
attttccctgcttaacatttagattaaaaagtaataattaggccaggtgtggtggctcacacctgtaatcccagcacttttggaggctgaggtggacagatcacttgagctcaggaattcgagaccagcctgggcaacatggtgaaaccccatctctacaaaaaataccaaagtcgggcacggttggttgtgtgtgcctgtagttccagctacacgggaggcagaggcaggagaatcacttgagcctgggaggcagaggttgcagtgagccaagattgggtctttgtactctagcctgggcgacaggagtgaaacagtctcaaaagaaaaaattaattgacaaacattgtgtatattcaaggtatacaacgtgattatttgatagacgtgtaatgagttatcacaacaagcaaatggtacacaatatagtttcggagggtttatgtataaggggactaattagaaaggtttggaaatggtgtaggagaaccaaagggctagtgcccaagggcaagggaagggagtggttacctgaaactggaagaaaagatagttttgtagagcatctgctttgagagcagcagtgacttttatcaagagatagagttaccttgatgccacatcacggggtgatccaggagaatgaatacgccgatttctgtcctcccttcctctactcttccatcaggctgtacccaacagagcccatttgatgtagtccaaacagacagactttcaggggcagcaagtgaggtggagaaagatgggaaatactaatagaagggcagttggaaaatatgtttagtctgcctttttgccccttatcatcctctcttgtccttaatataggtgaaatttcatgtccttaacacaagagatgcctagagtcccatcaactattttatcattatggggtgataaccatttgttcgtgcttccatcttaaacctaaaggattaggtatcattagtgtcctcatataaagcagcagtagaaaagtgagaagagaaaaacaaggaatgaaatatagctgttagagtt

SEQ ID NO: 4241 - DNA, 1030 bp, Homo sapiens
tataataaggaatttaattcccaaacaacatcctttaacattctggtgaaagcccagccagtgtcactggttgaaagtgccttcagtggatatagctatatttcacctgtccctgtgatcatgaggtaccagattccggtcaagcatttcactttgggaggcaccatgttgtaaacattaggaatttcaggtgcaaactaattttccattctggtagtaactcttacctggagtgtcagctaagtcatgaaaattgtttagattagaaaatgcactttttatatatagcctaaattagcttcatgttctgtagtttctgcagcttgtctcagaaatcctctgagtagaactgatgtatgagaccctttaagaccattatccaactgcagtttgcttggcagagttagcattaatgcaccctttgatctaggcacctggaggcaggtaagacaggctctgcgtgcaccaccgtccctggacctgttgtggcggactccttgaagcaagatcaacttgggctttgtttgagtttttaaagtcttttttttttaatgtaaaatttgtcattttaactttttaagtatacagttcagtggcattaagtttatttgcatttttgtgcagctttcaccacttccatctccaaaactttttcatcatcccaaactgaaactgtacttattaaacagtaactccccttcctcaagaccctggcaatcaccattcatcttcatttctataaatttgactattctagacatacgtgtaagtgggagcatacaatatttggtttttttagaggggggttctggcttaattttataaggtgttaacttgttcctcaaaatgtgttctataaactggcagcatttgcatatcttggaacttgcttgaaatacagaatgtccagatctactgagtcagaatttacattttcaaaagcttcctacgtgactcatgcatattaaagtttgggaagcactgacttagattaccttttgagaattccagatgggtcagaaaccagaca

SEQ ID NO: 4242 - DNA, 1499 bp, Homo sapiens
tttctggctgaataaaaagtttggcttgcctgtgtaatgcccactcccttccccctggctccctagtgatgggacatatatgagagagaagtgtttttctatcatagacaccataggggaaagtttggggatgaaggagagcttaaaggtgtttcaattaagttagaaaactgacacaggctgttgagaattctttgccacttttcccaccccaaaacagcatggggcctgacatcttctgccctggtcccctttctcttgatgtggaaagtctgaatgcagtatttatagacttctaaggttttaaaatccagtatcaagaagaaaatcagaaatactggttggtgaaataaagagtttaggcattgttggcctgtcttttttgaagcatgtgtgttatgtgtagttagatatatttcacttatgtgagtcatcatggtgttggtcttgtagcccattatttttcctgtgcttccccagcttcccaaagtagctagttagaacttaaggtaaatatttattcttgggttggtggagtggatattgccagttaggagtcatggatcaattactgattatattgaaagtaaatataatcaattatgtacttttgagctttgcaggttcaatttaggtaaaaatcacattatgaaactgggaaagtctgaaggaatatgggcaaaatatttctcagtaaagcttccatgcttcacccttgacatgattacccttgagtaaaacatgggaatttgtagttgtgtgatcctctggcgttgatgtggagtaggaataaagtcttgcatcatttttataatgtgggaggaaatagaatgggtaggtacaatcacttaagttctgcctctcgaagataaaactttaattttgtggacacttagagaaagtaaggggtgggggagcttgaggtgagtaggaatttgcatagcccttttcttcctggacttaagaatgatggagaaaaaactcagtgaaagagataaggaagcaaatgtgtggaaatgtgtgataaggaaggaaatgtgtcaaggtggttacaatatggaagggaagcataggttttttttttcttttgttgagatggagtttcactcttgctgcccaggctagtgtgcagtggcatgatcttggctcactgcaaccttcgcctcctgggttcaagcaattctcctgtctcagcctcttgagtagctgggattacaggctaatttttgtgtgtttagtagagacagggtttcaccctgttagccaggctggtctcgaactcctgacctcaggtgatctgcccgccttggcctcccagagtgctgagattacaggcatgagccaccgtgcccgaccagaaagcatggtttttgaaggaccatattttattgtaaaaaaatgttttggttcagatagatgtgtgctgatgggagtaattcacatctatcagtgaccaccaccaagatatttataaaccttatcaaatacagtaggaagag

SEQ ID NO: 4243 - DNA, 1032 bp, Homo sapiens
gctttaagatcaagagggtccatttctatgtttatccaaaaaacagtaaacatcagtttgatggaacagttgggccggtttcaacacctctttaacccttgctcatctccctttctaaccaagtaggagcaggcttcaggctcagttccttaagcagacaacagcatctggctagaattcagtaatgcaagtggtgtgtgggtatggcagaatcaccagggcagaagaagaattaaagtagtttggtaaacactgaactagtccagaactttgggcatctgggacataaagggtcagggagggagggtgatttgctgcaagtcaaccaactggtcaacaccagaccaagcctggtctccctgcttcaactaccggccctttccccaagctcttctgctctccacgtggagctgtcagtatttctccactttccttcaaaaagcagacctagtactatcttgttctttgctgtctttgttatttcttgtttgagctttttttttttttttttggagttggagaaggcatgggatcatgctattagcataactaaaaatgtttttagtttgcctctgcattttccccaagcctcagcttttcctaaaaatccagcatcttctgcatccttccctggggaccacactactcctcagtgctgggcattgtctgtttacaactaaagcagattttttcttttgcttttgtcttcaaatgtgagcttttcagagtctctagtgcaaccatattagtgttttagatgcttcctgattatagttatttgtgcttatgtagtcagaatttcccccaaagtgtttctggatatggatttacacctcagttctgcctgggctgctaactagctgagggaccttgtgcaagtcattcaccctcactgaacaggtaatagcactgccctacttagctctgagggttgccatgaggaccaaatgagtggtagtcacaaagatgctttgcagggcataatggaccccacataatgcaccccacaatgaaatgtgttattcagctcct

SEQ ID NO: 4244 - DNA, 1044 bp, Homo sapiens
cataaaatgagacaattattttgagatggccacaggtagacggaagtaaaggttagatcctatccttgttcacaaagacacgggtaaattgtgtgaataccaagctctgtgaggaaaggcaaaagctttgtaagacttgctgcccacaccaaacacagccctgagcccagcgaacatagatggagctgtcatcacagggagttgcttcccactccagatatgccccgtcagtgctgctgcttggggcagagcggcaagccttgggctcagaaatgctgcttccagaagcccataaacaaaaggcagctgtctgctctccctcttccaagaattcttagcaagtaccagttttcattaatgggaagcaaatccactaatggcattcaggaacagcgctcagagtgagaccaggggcctcactcttttctcttattctctatcccagggctctagaaaaaagatagcagggccccctgctgcatcccttggagccccatttcttcttcctctgctcagccctggctggtcatcagggtatcctggagcaggagggagagaagagctccatcatatcaacattcctcacccaggagggcagagagcaaagtgaagataatatacagactttggaattgcacaggcttgccagttggagatgtgtaacctctctaagactcagtttcctcatatataacatggttgtaataacagtaccagcctcataggattgttacaagatctttacatgtaaagttcttagtccagcgcttggcatgtacttactgctcaatataagttagctgctgccactgtgattattatctgctcctggccctcattggaattccagtgcttaacttgcgatggaggcaggtaacaaaattctgtctgcttagtgtcctgggacccctggcaatatctcggattcctgtgcaagatgtgttcctgcatcgtgaacccactgaaagtcaagggaccaagtgctgggggtcacaggacatgggtgtgcttacttgggctccacccctaggctgcaccagctgc

SEQ ID NO: 4245 - DNA, 1026 bp, Homo sapiens
tacaggcgcacgccaccaagcatggctaatttttgtatttttagtagagatggggtttcaccatattggtcaggctggtcttgaactcctgatctcaggcaatccacccgcctcagcctcccaaagtgctgggattacaggcatgagccaccgcgcctggccggtagatgtactttttatctttgcttctctataagtaagggtttttttctcatcgctggcttctttcaatatcgtttttttttttttgtcttagattttttgcagttttaaatatgatatgcctaggtgtagtgtttttgtcgttgttggtttcgtttttgtcatttaatctgcttggtgttcactgaacttcttggacctgtggtttggtggccaacattaatttgggggaaattcacagtcattgcttcaaatatttctgttcctttctctattttttctctttatggtattctcattatacatgttataccttttatagttgtcccgccgttcttggttattctttttcttctttctagtcttttttctctttgcttttcagttttggtttcgttttatttttgagatagggtcttgctccgttgcccagactggagtgtaagggtgtgatcacagctcattgcagcctcagtctcccaggctcaagtgatcctctcatctcagcctcttgagtagctgggaccacaagcgtgcaccaccatgcctggctgattcaaaatacatttttttgtaaaggcagggtctcactatgttgcccaggctggtctcgaactcctgggctcaagcaatcctcccagcctcctgaagtgctgggattacaggtgtgagccatcatgtctagctgcttttcagttttgaaagtttcttttgaggtagccttatgtgcagagcctctttcctcagctggacccagtccactaacaaactcatcaaaggcattctttcgtcgtagtgctattgatggagcaggatctctagcatttcttgcttctcctttctctttgttaacattgcctgttt

SEQ ID NO: 4246 - DNA, 1025 bp, Homo sapiens
agtagcatgagatgccagaagaggcccatttccttccacagggatgagaaccaaaaaccaaagaatagagagtagggtataggtagatttaagtcaggttgacgtcctatggaaggcatatgccattatttatgtggtaacctgcatgttcttgtgagaacaggggctggccaggacctgaggctttccccagcagcctggcatataatataaggcagcttcctttggtaaattcattcagccctattgttgagttcagactgaccatgacccccttacctctccactaccccaaagctttcctcaagatgtcagctgttctcttcccctcccatttccccctccttaatcccaccattggctcatcagttatccagttgactccattctgaaggaagacattctcttggcctgactcactcaggcccatttctccacaggcatccccttaccgcagaccacaagggccctgactagctcatgttttgtgttaatggatgtgaaaccagagcaaatcccctcaccaaaagaaaaaccaccctaaactctcccacacaggtctcagcaggttacacaaatattagtcctatcatccaaataaatctgcccccgtggcccagagctatggctcccccaacctcctgctgcctgtgcagagtgaagctgcttcaaaaacatgaggaccccaagggatattggagaggaactttggaaagacaggggcctgtatccagaattctttatgcaggctccttaatctacagacttttgttaatactttatagtcctaaagaaggactgttcctagagaagtcatgatgggctagaccagccaggggctttggtgaagaggatctgcgggctggagtttggtgcataattaaaactcagcgtctgacagctgggcacagtggcttgcgcttgtacgcccagcactttggaaggctgcagtgggaggattgcttgagaccaagaattcaagaccagcctgggcaacatagtgagctccatctctgaaaactatg

SEQ ID NO: 4247 - DNA, 1101 bp, Homo sapiens
caacgccctctcttttctatccctttacctttgaggtcagggacagggcatattactgacaccccactggctattgccctatacctgccaatcacccaaagaaaataatagcttctgagaaagctcaattcactgtagcaactgtgatatatttaccctaataaagccaccacttggtcttttccagtgcttctctcttatggagatcatccctggaatccaaagctctccagttttctaacccagttaagagttaaaaacaaccacaggtcatgagcagtaggcttggcagttataccccatgcagtcataggagactgctccatcattctcagcacatagggtgcacatctcactatctctggcatgaaccagccttgcgaacttatacagtctcagccactctgctttgatggtaattcttcaccactgatctctcctcaccatgcccttcctgcatccttcccccaaccacccaccagaggagttctggtccccaaaccaaagagttgcctgcaggttggtaatgtgactttgtagatattccttgattaaagccagaccctattggtatcctttttgaagtactggatcgaaatctaattgcttttttttttaattgttggggagaggaggatgagcagaactcctatgcagcctgagagaagttctctatgtgtctgtatatgtacacctctgtgtgtgtgtgtgtaacctcatggttgtgctcaggctgacagggagggcaaagagtgaaaaggaagcatctctttcttgttatccaacattgcttcaaagatgcccaacccccgtagtagcaggcagttcccaagtggagggtcggggcagaggcctccaccaaggccatcaataaccaggtgtgagctacaggtctctgtgtaatgtgaagctctcccgtatttcatttctgcacccagggggcggctctgcaggattgcttacggagaactctgtgtctggcacctctctccacaaggcccaggcgcccagggtcccaccgacctgcccaggaatgcatcacattgttctctggtgctgtaatttggctgcaggagctaggctgaatgcctcccagggatg

SEQ ID NO: 4248 - DNA, 1049 bp, Homo sapiens
cagccagactagaccattcactattatctaaataaatcttatccttccccttatttattattttgcttactttgtttctcgtatctaaatgtctcactaaaaaaagaaaatagtatgtgaaatttctatataaatttgtctccaaatataggatggtaaatgagacagaattgagtatcaacacatgcttttttttcctcagcttttagaatgattccatacccgttagagaaaggacatctattttacccttatcccagctgcacagagacggctgatagagagctattacctagtaagtaaatattttagttttcttaaacttaaaagtagtaagtttagattgtttgtcatagtattctccattttaaaaatgcctttggtttaaattcaggacactgtttaaatactattttagccacttctgggatgtagttgtataattcaatttatttcctaataattattgagcaaaactctgtgctagatgcaacaaaggacaccaagattaaagatattaacaagaactgtcatcttataaacttttagaaaagaaatagtgccaatccttcacaaactcagaaaataaatgaggaaggaatactccccaaatcatttgatgagagcagtattttcctgataccaaaccaaagatatgatataaaaatactataaaacaacagcccttatgaatatagacacaaacatcttcaacaaaatattaggaaactgaatccagcaacatatagaaaggcttatataccatgaccaagtgggatttacctcacaaatgcaagtttggtttaacatctgaaaatgtaatgtaccatagttaatagaataaagcacagtagatgcagaaaaagcatttgacaaaatctggctctcattcaagataaaaagaaaaaatctcagtaaactacaaattgaagggtacttcctcaacctgatttaaaaaaaatccctgaaaaacccacaattaacattatatttaatggagaaagactgaatgctttccccctaagatcgggaataagacaaggatatct

SEQ ID NO: 4249 - DNA, 1027 bp, Homo sapiens
atagaagacagcctatcatcaaaaattacaagtctagtattatgcattattttaatgtaatatttagtgttgcagcagaatgatgttctttacctggccagtatcagatgggtgctgactttcatcagtttgtcaagttcaggaagcgttaggtggcagctagctggtgacatgtttgatatgagaaatgtatttttgttacacaagtggaatatattgactccttttctaagctgagactaatattttgtttccaaaggaaaattcaaacatttttcacattattcttcctggacagttgcaggttttgttccaaaagcaacactcataggttctctatttttcttatcaaacttgaaatgggccagtttgtcttctgagtctactttatttgtttatttaattaaagaaaactttacttactgtgaagtcttcattttggtacagtaaattggtagcaaaattaatattccaaagaaatcctaactcaggcctttgttgaatcctgatagaggctgacattttctagaggtactatattctaaattaattccttttttttttttgcccttttacacaaaacgcaagcccgtacattcttcgtagagtgaatcattcattagacaaagactttgtttttaagtttttgtatatttttatttttagcagttccataaaaccttttcagaatgataaaagtagaactgtaatatttcatattgattataatgtgatgtcacttaaactcaatgttaacaagcatttagatatataaatgttcatacataataatgatataattaacttgtttaggtaccctgtatattgttaaaataaatcagagaaagaatatatttttattttatgtgaagcttacaaatttaatgtaaatttctcataatagataatgtgaactaataacctagtttcttgttttgtatgtttaagaatatattatttaaagctttgcttactccactaccttattcttcataattttgcagattatttttttaccatctcatct

SEQ ID NO: 4250 - DNA, 1050 bp, Homo sapiens
atggtttaattgcaataaaggagtaaaaaaaatagatttatgtttatatgcttaatgtttatattaatggcaaaaggataggtgttggggaaataacagcagcacagtatcagtactgtatgttaactttaagggttgagtgactctggaagttaggtctcaccaccctttctctcacagcccctctcacagagtgacactgaattgcaaacgtcagcaggcttttaaaatagcaatcatggctatctactgaagttgtggtattaaaacatttttatttgaatatctcccaaaagaattttgaaaaagaatatgtcccttcacacatttttaagttgacatcataaggttaaataatcatagagaatgtaatttttgacatattgcaaaatacagacatttaaaaataatagtataccctatatttcaatctatgttatgaaatcaaatgatttaatacccactacaatccattgaaaaatacataaataggccaaggacagtggcttatgcctgtaatcccagcactttgagaggccaaggtaggagcatcccatgagtctaggagtttgtcagcctgggcaacacagtaagaccccatccctacaaaaaaagtttaaaattcatcagatgtggtggtacatgcctgtagtcccagctacttgagaggctgaggtgggtggatctcttgagcctagaaggttggggctgcagtgagctatgatggcactgctgcactgcagcctgagggacaaagaccctatatctaaaaaaacaaccaagcaagcaaaacaatacgtaaacaaatgctctttttttttttttttttttttttttttcttttgagaccaagttttgcttttgttgcccaggctggagtgcaatggtgcaatctcggctcaccacaacctccacctcctgggttcaagcaattctcctgcctcagcctcctgagtagctgggattacaggcatgcaccactatgcccggctaattttgtatttttagtagagacagggtttctccatgttggtcaggatggtctcgaac

SEQ ID NO: 4251 - DNA, 1029 bp, Homo sapiens
ctcggcctcccaaagtgctgggattacaggcatgagccaccaggcctggcccattctgtcttcttttctttcaacattcatagccccatatctaggcccttaaacatctcttcccttggctattgctatagtatcctaagtggtttcccttcctcttacacttccccttctagtacatactctctccttactaggtaaaaaaaaaagtggttctcaaactttttagactaagaaatcctttacattcttaaaaaattatccaggacctcaaagagcctttgtttaaatgtggactatatccatcaatatttatcatattagaaattaaagcaggaaatttaaaaatattttaatagtagtaaatccattacgtgttaacatgttgtagactgaaatgtgtcccccaaaattcacatgttgaaactctaacctctaatgtaactgtattaggagctagggtttttaggagataatcaaggttaaatgaggggatcctaatctgatagtattgatggctttgtaagaagaagagagggattgctgtctctctgccatgcaaagacacagtgagaagactgctctctgaaggccaggaggagagccctcaccagagcccaaccattctagtaccttgatcttggacttccaaccttcagattgtgagaaaataaatttctgttgttaagccactcagcatatgatactttgttatggcaacctgagctgactaactcagattttgttacgaagaagtggggtgccactgtaacaaacacctaaatatgtggaaacagctttggagctgggtaatgagttgaggctggaagagttttgaggtacacacttgaaatatggataaggacagtttggtgaggtctcaagtggaaatgaggaatatgtggttggtaactggaggaaaggtggtccttgtataaagtggaaaagaactggctgaactgtattctagcattttggggagagtagaacttgagagcaatgacattggatatttagctgaggagatttcta

SEQ ID NO: 4252 - DNA, 1055 bp, Homo sapiens
ccaggttccagcaattcttctgtctcagcctcccgagtagctgggattacaggtgccggccaccatgcccggataatttttgtatttttagtagagatggcatttcaccatattggtcaggctggtctccaactcctgacctcaggtgatccgcctgccttgtcctcccaaagtgctgggattacaggcgtgaggcaccgccctggcctaaagatcctttatatggttataataattataaattattattacctatggattagcatttccaaaatgtattcagcatttgaaaagagttacctattcaaacaagtttggggaacactgcatctcccaatctacttttaagagattgacagtatttatttacatattaaaggcttattgtaaactgtagtcagggagggcttggggtgtgttggaaattaaatgcctgcagagcccaagttggtaacaaaaatgagtgaaatggatagagtttaataattaaattcttatttctttgaggactgggtagcctggacagtgcatgccccttctaaaagaggctaaagctaattgttgccatatagacttggaactagtattaccaggtttttcaatttttcaaatgatttaaagagaacccagacaggccggacgtggtggctaacacctataatcccagcactttgggagcctgaagcaggcagatcacttgaggccaggagttcaagaacagcctggccaacatgatgaaactccgtctactaaaatacaaaaaataactgggtatggtggtatgtgcctgtagtcccagctactcggaaggctgaggcataagaatctcttgaacttgggaggtggaggttacagtgaaccaagatcttgccactgcactccagcctgggcgacagagagaaaccctttctcaaaaatgaatgaataaataagtagaacctggacatacagtttttatataaaatttgcccattaaaaaaaaattgagatggagtctcactacgttgcccaggccagagtacagtcgatattcacaggcaccattatagcacact

SEQ ID NO: 4253 - DNA, 1045 bp, Homo sapiens
ctccttggtaaatacaacacatctaattaaatgtagacagatatttcaaacatcagctgaattcacttaagtttttccaaaacctcagttaaactgtgaagctattggaatttttttttcctggaatttttcccctttgattcacagtggtcccatttatatctgcttctagcttagtgctatgtgtgagatatgtgtgtgtttggtgtttttgtttttttgtttttttttttttaaggtttgcaaattaaaaagggccagaaaaatttggcaccaggcaaacgaataaagataggattgggaaagaagttgctaagtgtgcttagttttaataagtaattccttctcttttttcagagaaggccttacagaaaattgttgtgcttagaattgctggatgcatttttaccctccacacaaacctaaaaattttgtgacccctttcacttacctgaaaagtagagaaatggattcagtataaggataaggagggaaggtggaccagaatgaaaactgtaaatatttttttaacctaatatcacttaaatcgaggcagaaagatacagacattcaatgaattatattcaatgcatttaaaataccactgtaattgacagagtaaaagtatagatacaaaaccttgtgtaagaggctgacttttccaaataaacattttttaagaaaacatttcttctcccaaatgtctattttcttgaggaaaatattgctgtgtcttcattttcattaccaggtttcattttgggccttgctaaattgattgaattaaatcctccagcttttgaaccttgatatttgtgtatatgatttattttcatttgaatttctcctttcctcttctttgctgtaaggcaaggaggaggggaattttaaaaccatcttatttgaactgagagcatccagagcagttaaccttaaggaaacaatgaaaaactccctttgtatgcctgggcatcatggcagatagaggaagagtgttagaggagaaaactgctgctgagagtattggcaggcttggcctcagttt

SEQ ID NO: 4254 - DNA, 1051 bp, Homo sapiens
tgtttgtgttgttttacatatttaggtcggctcaatgacatgtatggagactacaaatacacatactgggcatgtggcgtcgtcctaattatttcaggtatctatctcttcattggcatgggcatcaattatcgacttttggcaaaagaacagaaagcaaacgagcagaaaaaggaaagtaaagaggaagagaccagtatagatgttgctgggaagccaaatgaagttaccaaagcagcagaatctccggaccagaaagacacagatggagggcccaaggaggaggaaagtccagtctgaatccatggggctgaagggtaaattgagcagttcatgacccaggatatctgaaaatattctactggcctgtaatctaccagtggtgctcaatgcaaatagtagacatttgtgtggaaatcataccagttgttcattgatgggatttttgtttgactccttaccaatagcctgaatttgaggagggaatgattggtagcaaaggatgggggaaagaagtaggttctgttttgttttgttttaatcttagcttttaatagtgtcataaagattataatatgtgccttaagttttagtctttagaactctagagagccttaacttcttaaaccatttttgctgaattcatctatttcgagtgttgtgttaaaaggaaaaataacaactaacttgtttgaggcaaatctaaaatttaaaattaatcttgcttcattgttacatgtaatatatttcagacattttcactggaagatttatgaacagaaatattggttgaaagttagagattttacaaaatgctgacaaaaatattttcctagcatcagtagatttctggcatatgtttctgctagctatatatttaggaaattcaaagcataaaactttggcaacatcttggctgttctagacacagtgtacttgtcaacccctctcaggtaccttttcttgggatgcttattagaagccaagtaaagtgcttaaggtttgttttcattaaattagctatttctgctcccctgttcaaagatgcatt

SEQ ID NO: 4255 - DNA, 1051 bp, Homo sapiens
gcccaccaccatgcccagctaatttttgtatttttagtagagacggtttcaccatgttggccaggctcgtcttgaactcctaacctcaggtggtccacccgccttggcctcccaaagtgctgggattacaggcatgagccaccatgcctgatccataaattttttaaaaacacacaaaaagcaaaaaaaaaaaaaaaaagtttatttcagtagcagtagtataataatagctaccatgtaagctcacagtgtaccagagactgtccttatcattttgtatctcctgttgtatctcacaagtccatatgaggtaggaccgttttaagtccccattttgtaagtgaacagaggcttcaaaaggtgaaataacttggctaaaatcatacagctagaaaattaattacaacttgggaactattcctgaaggttattgaatactttatctttcaaattaatagctcaatacataacacatagtgaaaaaataatttgacccttcttctggatgtgactcatactttaggaactttgatttggggagtgagtgagtatataacagaagatccatagctgccttttgagatcactgtcttcttccatctcatacccagtgagttactaagttctatgagtttttatgctctaaatcttgttctcatctgcccatttttctccatcacaactactacccttatccaaagctcctgtctcctgtttgggctgctcctaactgtaacctcctaactggtctacctgtatcagttctagctgttcttcagtctccttgaagtctccagttcagaactcttcaagatttcttaaaactctccagttgcttcccattactttcagggtgaaaagcaaattccctaatgtggcttgcaaggcactgcatgggctggccccagctgtccttccagcctcatttctaccactggcctcctgctctctgtgccccagcaacctggcccttctttcccctcacacaccatgctctctcctaccattgcgcctttgcactacagttctctgcctggatctaattcccatc

SEQ ID NO: 4256 - DNA, 1037 bp, Homo sapiens
atggttaatcagttggttcatttgctcttttattaatttatttatgaaatatttattgagcaacaactgtatgtgtgttaggaaccattttaggtgctgtagagatagagcaacaagtcaggcagttacactctttaataggaggagacaaacagtacaactcataaataaattaataaataagaaaaatatcaggtagtgataaatgctatataaagcctttaactgagtgttgtgacagggaagaactgggcaagcaatgaaggtcagggctcactgaagaatcaactttaagtagagacctgcataacaacagggaaccagatttgtgaaaatgtaagggatcatagaccgtagagcttattaacaaatgtaagaatggtttgctatgaggtcagggaggaagttctttgaatattacttttgctagcactatttattgaataatttctctctattaatttaaaatgctactttatcttacattaaatgtttccatgtatttcaactctgttcctggactttctatagtgtttctgcactttcactgacgaatttttactggttcctgaaacagggccacactgctctaatgactgtagcttttgtaaagccatttaaataatttgttctggttggtcccactttttcctctgcaccatcaaaaatttcctagtagctctgtatttgttctgtaagtatcctttagaatcatttaccttaatccgaaagtaaaattcactgacattttcattggattgcattaaattagtacattcaggctgggtgcggtggcttacgcctgtaatcccagcactttgggaggccgagccaggtggatcacgaggtcaggagatcgagaccatcctggctaatacggtgaaaccccgtctctactaaaaatacaaaaaaaaaatgagccgggcatggtggcgggcgcctgtagtcccagctactcgggaggctgagccaggagaatggtgtgaacccgggaggtggaggttgcagtgagccgagatcgcgccactgcactccag

SEQ ID NO: 4257 - DNA, 1032 bp, Homo sapiens
actcctgatttttctttagattgtaaatttggatacaaattatctcagcctgaaaatagatttctcagctccttatgttctgcattcccatcgtgttttcaattcactttataatgctcactcctatgcaagattaagatctctgcgtaaatgcctacatagctgtcttgtttttgttgcagttgaggactaggaagatggaacttgggtatgaggaaaacagtccagattgttgtgaattttatatgttcggcaatttgttattggctaccaggcaccatgagagacttaggattcagcagtgaacaaattttaccacttgccctcctagagttatagtctagctggaaaacagataaatatataattgccacagcaaatactctttacaaacaagtaggtactgttataatagggtgggtacaggttcctgtaggaacaaatactgtattgtgtaggtgtgagaagacacccaacttagtatagaagcaatttggctagacctctctgaggaaatactgtttaacctgagacttgaaggatgaaagagctagccaggcaagacagtgatgatgggtggaaagaacattccagacatgaacactgaagctacactcaagagtacagggtgtaatgcaagagctgaattttaccaaagctaaagcataaaaaagtcaaagagaatgggaagagatagaagttgaagagatagacagtatgagaaaatggagggccttgtaagccattttaaggaatcaaggagggtaaaaaaattaaagggatttttaagggataaaggagggtaaaaaaattttaaaggagcgctcttgtcttgaagctgattgaaagcagttgaaggattttcaagctggtggctcacgcctgtaatcccaacactttgggaggccaaggcgggtggatcacttgaggtcaggagttcaagaccagcctggccaacatggtgaaaccctgtctctattaaaaatacaaaaaattagccaggcatggtggcatgcttctgtaatcccagct

SEQ ID NO: 4258 - DNA, 1929 bp, Homo sapiens
taataaaatggatgtaatatctcctcctgctctgtgagaattaagatctaatggattgaaaagactttgtatactatggagagatttttattggtggtaatggagcatgcttttaatctcatattctatgtcaagtattagatctttagagtacttgtcatttagcatgtataataagcttcttgaattcttctgtattagacatagaatacattattcagtgtttggaagatacttggttttcagtatgtgaatagacactaagattgagaaatatctcttgtaaatacagagtagtataaagtttttttaattttgtttttaatttcaagtttttccataaactttgaataaaaacatttatcattcgtttctgttttttttttgtcttagaatcgtaatggagaattcttcctacaaggcaaaatataaggaattagtaaagtaaaaggagctatcttcttctgttccataaatgtttaatgaggatgttagattatctagggggatagtgagatgaataagatagaggttttgaactcaaggtgcttacgtgctaattatgttatgttgcaagtaatattaaaatttttcattgttttgatatttaaattgcttcatcattaatttttcatcactaaatagtttttctttgccagagggagactgatcaggaatgggggctagagcacatgacatatgttctctgtagcgatagctattggaatttcaaaatttattttacttgaaaacatgacctttgaaatatgccagattttatgcagtatatatatttttttccaagaaatttaccttaatttctattccttcccttagattaatttatatcttaagatggaaaaaaagccaaataagaaagaacagcttactctagtaaacaatgtattaaagctgtccaccaagttgttgaaagtaagtcataggctatgatacacttttactatcatttgagttaaatcagtcttttctctaagaaaacattaaatggcagatgataccttgggttgggaggggtcctggaagtggactcttccacagtggcatcaggggtaggggtcacagtggtggttaggaccagagctgaggtcacagagctcctggaggcaagattaaggacaaagagtggctccccatcaccaagttgggccatctggtcaaggacatgaagatcaagtccctggaggagatctgcctcttctctgtgcatcaaggaccaggttcaaggcatttgtcaccattgaggactacaacggctatgttggtctgggtgttagtgctccaaggaggtagccagcaccatccatggggctataatcatggtcaagctctttatcctccctgtgtgaggagactactgggggaacaagattagcaagcctcacactcacactacctacccttgcaaggtgactggcagcctgcatctctgtgctggtggcctcatccctgcctccaggggcgttggtactgtcttggcccctgtgcccaggaacctgctgctgatggtggttacccaccactgctgcactttgactggggactgcgctgctaccctggccaattttgccaagggcacctttgatgccatctccaagacctacagctatttcacccccaacctctggtaagagacatgttcaccaagtctccctatcaggaatttagtgaccatggcctaaagacccataccagactctccatgtagaggacccaagctctagctatggccaccatgtggtggttttataccagaaaaataaagtgagttaacctgttttaaatacattaattaatgttttacttctcagaacccagtaagagatagatgctaggctgtgtagattcaaaatgctgacctgatggttttgggttaataactactgtgaaaaaatttccaattttgttacc

SEQ ID NO: 4259 - DNA, 1278 bp, Homo sapiens
taacaatagagtatgtgcaagaatatgctcactgaagctcctggcagcagttactcagtagacagtgtagttctgggtgtcaggcagattatagcagcagctgacagacttgctggacagcaagttggatgtcatctctctgcaaagctggtaggggtaggtaaagaagagcttagaaagggaaaagaaaatctaaatttcctaggggcaaagtgacaattaaatagtttatatttttctggcttttttgggaaatactccagccgaaagtatgtcaatgaatcagtcacccttaatttggaaatgcatggatttcagtacttaaagttgatgacgtccaaaatatgttaaaatcctatctcagaaacttcttataaacattattttcacacgaatgtagtacaattcagagtgttaataatgtgagggcggttgctgtctgccagtaactaaaacattaacacatgtgtctcactccacagagacgggggccacagcgttcagttgatgtggttgtatcctcggttttcctactgacactttcgattgctttcatttgttgtgctcaggtaaaagtttcacatctgctttaaggaaaaatgaaaattctattatagagttcactttctgttttagacttaggtcactgtccttaagtatgtatttttaatgcatctacattttttactattttggatgtttggtaatttttctaacttttcaaaatgggaatacaagtaattctgaagtcctttcaaactgtaagatcgctctaattttagttggtaattattaattgataataaaactatcatatggttgcaaaataactgattttctgactacattattccttctgtatttattagttatcactccaaggtagatctttcatttctttccctcttatttattcattcatttatttattatactgtggaatcatgtattctcatttttatacagtgggttaaaatctgttactataggctgggcatagcagcttaacacctgtaatcccagcactttgggaggctaatgtgggaggattgtgtgaggccaggagttgaagaccaacctgggcaacataatgaggacccatctccatgaaaaaaaaagaaaaaaacaacaaaaaaaacctgttactatatttgctttgctgcctacattgtcctaaatttggccagtgggagcccctagaaaccccctcctgtacccttttgacagggtctgctttttgtaaagcacttccgtgctttctgcattaaaagaagttac

SEQ ID NO: 4260 - DNA, 1306 bp, Homo sapiens
ctcagcactttgagaggttgaggttgttggatagcttgagaccaggagtcggagaccagcctgggcaacaaaatgagaccacatctttacaaaaaaaaaaaaaaaatatatatatatatatatatccgggtgtgatggtatgcacctgtagtgccagctactcaggaggctgaggcaggaggatcatttgagcccgagtttgaggttgcagtgggctatgatcatgccactgcactccagcctgggtgacagagcgcgaccctgtatcaaaaaataaaaaagcattattgttacgtgaagccctgtgaaaaaatgaattcatggtgattgacttctgaaggctttcaagccattgctgtagataagttgttttaattttatttcacatgtaattatttttaaagatgaataacattttttgctttttgttttcctttaaagggctctagatcgggtgtgagtggtggctctcgaagcctcaacatgtcaagaagagactcagaaagcacccgccatgactcggagactgaggacatgttatgggacgacctgctacatggcccagagtgccggtcatctgtcaccagtgacagtgagggggcccatgtgaatacccttcactcagggaccaaacgtgaccccaaagaggatgtttttcagcaggtctgtgcagacatgataagaatagctagtatttattgtgttcttactgtgtgtcaggcactctgtcatctcatttaactttacaatcatcctgtagggtagatactattattatccccagtttagaggtgaggaaactgagcatagtctataagtgaagatgttgggattagaactcagggagaagtaatctagagttgccctaacctaaatttttctgtatattactttttcttattattttccttagaatggtcctttatgtgtattttatattttatatgagtagagtttgcatatagagaatataccttatattttcatgaacatcacagtgttacatatgaattactaggaaatggtattgcttgctttttgaacaatgcataaaataaataatgcttttaatttcaggttttatattaatatcataaagtcagatagccattagaaggtatttcaaccttccaaccaatgtagagattcattctacatctgtgtaaattttttaccatctgttatgtggtgataatagttcttacttcttaggaatagtgtgaaatagctaatgagataatataaagtacatagcataatacctggcaagagtaaatacccaataaatgttagcattattatttat

SEQ ID NO: 4261 - DNA, 1114 bp, Homo sapiens
ttaaaataaaaatattaacatcatatcacagtactgttatataatttaaaattatatatttaaaagtataattcagaattatgaaagataaattttaaaaatcttaacttgggtcatgaaaaatggtatgaactcttcaataagcatttattgaactacaatgtttaaggcattttgttgggtgctgagcacaagagaaaaatattaacaaacagaagtataagacttgtttagaggaagagcaagtaagtagcccaatatgattggagaataaggtacatagatagagtgataggccataaatctatttgaaggttacttgactgctttactaagaactttagatactattctgtagaaaattgaaaggttttaatggtttttgagtagaggagtcacatcatatctgtgtttttgaaagatagaaataaaaatatagacattataataaaatctatggaatatttccagagtagtacttattattctcaatgtctatattaacaaaaaatgtctagtttgactaggaaggtttacaatgaatcatattaatattgaagaatctagagaaagaaaatgtaatcaaccaaagtaaaacagggaaagaaataccaaaaataaaatgaaagcatccattacgtatttatttaacaaatatttgttgactgcttacctacaatgtggcagacactagctatgcctacataatggtaagtaaaaacattcaatcattttttttttttttgagacagggtctggccctgttgcccaagttggagtgcagtggcatgaacacagctcactgcagcctcaatctcctgggctcaagtgattctcccaccttagcctcctgagtaactgggaccacaggcatgcaccaacaggtttggataatttttaaattttttgtagagacaaggtcttgccatgttgtccaggctggtctcgaattcctgagctcaagcagtgcttccaccttgtcctctcaaagtgccgagattataggcatgagacgctctgcccagccatattcaatatttttattttcatggaatttatgacaaagtggttgagaataataaaaagaatccttctaataaatgcaaattactta

SEQ ID NO: 4262 - DNA, 1076 bp, Homo sapiens
catttgattctgtctagcacactttgtggatctgttaattccaatagccctcaagaatattttactagaaaatgtcagagtatccaattaaatgtggattctagaaaaattagattggccagaactgatgtcttcctgttcccaagtacctgtagcatttatttatattctttgtggaagaaatgtgatgcttttgattatgccgtatgtttgtactttatatattattttatataatttactagttgtttttcctcaggaatatttgaaatacttgtttcttagtactggaccagttaggttattacatgttaatgagacaatctttcaacctaaagttttgtgagtcttgcattctttccacgtattgagtcttaaggctaatcattttttttggtggtgctatttccgaatactgtagttcgttgcaaataattgctcaataagtatttattgaatagcattaaatttttattcatttggtggcatccaaatcttgggagtagaacttgtggcaagatgacaggactgccagttttcaccaccaatatgcaatgatcttgctctctttttatttttacttttattccctactttctcatttcttgtgtgtgtgtgtgtgtgtgtgtgtgtgtgttttaactgtacagaactagagggaattagtgatcctctggcttaaatttgtattgtagaaaaggaaactgaggcccaaagtagtaaagaggcctgttcaatcaaatcacagttaattcgcatgaagtgcaaaaaaattaaatattttttaaaaaggtgaatattggcataacaggcagtagaacccaggctcctgaatcctgcttcaagcttcatctccaggcttcatgatgttgctttctcttcctgctattcattttttccactcctttgtttaccttttccctgtgctttgacattacagtggctttatatcatcgaggatctctgacctggccccgttttatgggggatagtggcaataacatgtgtaataatttacaatctttctctgaagattgcacaggccccatgttctttaaaaaacacacttctgacct

SEQ ID NO: 4263 - DNA, 1028 bp, Homo sapiens
tcttctgtttggtctcttgacaagggggcgggacttccgcagaaagcaagattgggcctatccgcgatgagaacggcgtggagggggaattaaggctggaactggagagggaggggtctgcggtcagtcggacgcggcgctggaaatccggcggaggacctagaagtagcgggagcgatctgtgggcggggcgaacggcctgccggccgacggtagggcctgaagagcctagggtggggctcgcggtgtcgcggagggcgtggaagtgtgtcagggccagcgtgccggccctacggaagccgagcctgaggcgagatctcgccttttgtattttcactgactcatatttcctttactcaggctcccacatcaggacgagaaggagccctcgagttaccgtgggagctgtgggagctgccctgtgactcttaggaagatgccgtaccttggctccgaggacgtggtgaaggagctgaagaaggctctgtgcaatcctcacattcaagctgataggctgcgctaccggaatgtcatccagcgagtgattaggtatcacctacctcccttcgcgtgctaactgctccctttgcaatccccatcagggctcactagccccagtctctctgaaagggtgaattagctttcacacgtggcagttatatggttcggtcttcgtcctgctgctttggagtaccatgtcagtctcccctctgcagcatcttttactcagctgggtagtttcctccatatcacgggcttgagcaattactggtgactcttggatctataatatagctagtacagacttccttttttagcttcagacccacgtatcccactgcctgcttggcatttccacgtgcgtggtttatcaaaagtatgtccgaaatagcccggacattcttccgtcttcctcaaacctgttcagcttacatttgtgttgatgaatgccaccagcagccgactatgcgtgggagccaaccttgaggacacctgatctctcacttcttatgtcagatggtttgaat

SEQ ID NO: 4264 - DNA, 1062 bp, Homo sapiens
agatcacctgaggtcaggagttgcctggtcaacatggtgaaaccccatacaaatattacaaaaattagctgggcatggtagcaggcccctgtgatcccagctacgtaggaggctgaggcatgagaattgcttgaacccgggaggcagaggttggagtgagccaggatcgtgccactgtgtactccagcctggaggacccagtgaaactgtgtctcaaaaaaaatagaaaaatctgccggtcatgatggtgcacgcctgtaatcccagctcctagggaggctgaggtacaagaatcgcttgaacccgagaggcggaggttgcagtgaaccaagattatgccactgccctccagcctgggcaagggggagattctgtctccaaaaaaaaggaggtatatatacatgtgcttgtgcctgcaggtatgtgtttgtgtgttctaggttttgaccacgaaaaaagaactgatttacttgtggcattttaatacatgccaaaacagtacaagatacctgagaaactctgcaacctgtgctcttcttcttcataaataactgagtccacataatggtgatactgggatctgagagaattggtcttaggccttatgctgcaagtactgctcatcactactaagagacccccttttaatgcggaggtgccatttttataatgcattccagaaagtaatcaattgatgcgtgactaggaaaatttagaggagtttttaatcacatgacttcacctgacgagatttcacaactataaaacctcccttttttcaaaaaattattaagaaaataaaccaggccccagtccagggaagtagcttctctagagcaggctttcttataattacgtggactaattgcctatttccctgtctagtggggactggatatgcacattttgtagagatattggaaagccagaagttgaatatgattgtgataatttgcaacatagtaagaaggggaaaactgcgcaggggttaagccccgtggaccaaagggtaagtgtcaaataagttgatttgtcactgggattcagtagttgtctgcctat

SEQ ID NO: 4265 - DNA, 1265 bp, Homo sapiens
atagtatgtactcttttgaagatacctagtatcttaatgcactttattacccaaaatggcagaaattcaagtatgtatatttgatttgattgctaatttaaatgttgatgctgcctaatctgaggctgacactgtgggaatatatgtgcttttttttcttaatgtctttatcttatgatttcccaattgatatttaattttgagactaatgtggatttttttccctttaagattactttccagttgcgtcatattttgaaagcacggtgtgatcctgtccctgctgctaatggagcaatacgtttccattgtgatcccaccttctgggcaaagaatgtagtcaatttaggtgagaaataatgagttttatgaatataacttggaacactgaattagaaggagaaaatacttaaagcaaatttagataaaatttttaactttataaaactaatgttttacattttatgtaaaaatatgttgttattcattggaaactcactttagctgtggttttgtgtggctgttattacatcttaagaaagttgagcgtctactctgtatattgttttttaatgtgtgctgtttctagtcccccgaccctccatcttttaaatttatattgactgtttcatatagaaatcttagcaaatgattcattgtctggaataatttcatagatttttagttgtttaattaagccaaattgtgcattagcaacagacttttaggatgctaatgtgtccagtagttaggtcctgaggaatgtttgaaagataagagtagctcttttcacatggaagagaaatggattttccttttgttacagcgtagtatggacctaaagaccatagatgaaagttacagagagctcagttaaaacacatgcacacaaacttcctagcaattagagagctatttacagattgagtaaactcactttcagaacagttaagtcctaaacagtgggaattgtaaaagcagaggctggttgccctttttttttaaaaaaaaaaaaaaagtaatctttgcatataataaaaaaaaattatattcaaatttagctatagccttagttctgacatcagccagctgtttttgtgtgacgtagtagctaagaatggtttttacattttcaactggttgtaaaagcaaacaaaaaccaaggactgtgagacagatcttatgtggcctgccaagcatgaaatatttactctatagcccattacagggaaagcctgtcaacctgtgccttaaatcacatcttc

SEQ ID NO: 4266 - DNA, 1031 bp, Homo sapiens
attctccagcatttcttgttttgcaggtttgctgacaatgaatactctcatcttcttgtcatatgaaaatcctcaatttaagctgggcacagtggctcactcctgtaatcccagcactttgggaagctgaggcaggtggattgcctgagctcaggagttcgagaccagtctgggcaacatggtgaaaccctgtctactaaaatacaaaaaattagctgggcgtgggaacatgtgcctgtagtcccagctacctgggaggctgaggcaggagaattgcttgaacccaggaggcggaggttgcagtgagctgagatcaccccactgcactccagcctgggtgatcaagcgagactctgtctcaaaaacaaaaacaaaaaaaatcttcaatttagaaggataatttgctctagaattctgggtgggcagttttttctttcaacattgaaaagatattgatattactactttgtattctggcttccattgttttggatgtcactcgtattgttccttcctgaatgttttatggcttttctctggctgctttcaagatttcctctttttctttggcctttcccttttgaccatggagtttttagatatgtttgtctttctgtttatcctctgtggcgttcgctgagctgattttcatcaaatttgggaaattggccattattcctcaaaacagattttccagccagttgtggtagctcacgcctgtaatcccaggaatttgggatgctgaggtgagaggatcactttaccccaggggttcaagaccagcctgggcaacatagtaagaccccatctctaccagaaaattttttaaaattagccaggcatggcagtgcttgcttgtagtcccagctacttgggaggctgaggtgggaggatcgcttgaggccaggaggttgaggctgcagtgagctgtgatcatgccactgtgctcactccagcttgggtgagagagtgagacctatctccaaaaacaaaaaacaccccaagtctcctaggacttcagttacacgtat

SEQ ID NO: 4267 - DNA, 1047 bp, Homo sapiens
gacagtgcagatatagaacattttgtcatggcagaaagttttgttggactaatggcctgtaatcccagctctttgggaggccgaggtgggcagatcacctgaagtcaggagttcaagaccagccgcgccaacatggtgaaaccccatctctactaaaaatacaaaaatattagctgggcatggtggcgcacatctgtaacctcagctactagggggctgaggcaggagaatcacttgaactgggtaggcggaggttgcagtgaggtgcgatcacgccactgccctccagcctgggcgatagagtgagactccatctcaaaagaaaaaataaatgtttaagcactctttcagctgtatcccatggggaggaaaaaaccaatataaaaaaatatatatatacacacatatatatatatatacacacatatatatacacacacacacacacacacacatatatatatagttttttttctttttttttgtttttcttgggttttttttcggacagtgtctcactctgttgcccaggctggagtgcagtggcgcaatctcagctcactgcaacctctgccacccagattcaggcgattctcctggctcagcctcctgagtagctgggattataggcgtgtgccaccgcacccaactaatttttatagttttagtagagatggggtttcaccatcttggccaggctggtcttgaacccctgacctcgtgatccaccaccttggcttcccaaagtgctaggattacaggcgtgagccaccacatctggcctatggttttaattttgtgtttggttcatttacatttataattgttacatgtatctgatgtattgattctttaacatataaaatgcttcattttacttagtaatatgctttgagaatctttttttcttctttcttttttggagacagagtcttactctgttgcccaggctgcagtgcagtggcgtgatcttggctcattgcaacctccgtctcctggggttcaagctattctcctgtctcagcctcccgagtagctgggattaca

SEQ ID NO: 4268 - DNA, 1003 bp, Homo sapiens
tcggcctcccaaagtgctgggattacaggcgtgagccaccgcgcccggccccaaattcttgtttcaagaaagctgtgagaaataattattgttgttttaagtcattaatttttgaggtaatttgttacatagcaatagataactgatacactttttagagagctgtcttttcatgtttttatattaaaatagtttttcctccttttttttttgctgttcttagtagctttataataataagcagtaagttttgttcattaaggtaatttcactgccctctctacgtataccttggtcatcttcaagattatctcgactgatcttgaccttttgctcctttttttttttttaattaaaaaatttctttttccaagacaaaccttggccattcaccttttgctcactcttatactaaaatgtattatcttgtgaaagttcattttaaaaacttattaagctgtgtgtggtggtacatacctgtagtcccagctactcaggaggctgaggcaggaggatggcttgagcttaggagtttgaagctgtaatgtgctatgattgcacttgggaatagcaactgtactccagcctgggcaacacagagagacgccgccatctctttaaaaaagaacagaaaaacaacgacaacaaaaaacctgtcagtgtttttgttggaattgctttgaatatgtaaatcagtttgggagaaaatgtctttattgtgtctgcctatttatacacatggtatgcctccacattttcttaagtccaaaaatgtttttgagtgtatattttgagacagagtctcactttgttgcccaggctggagtgcaatggcacgatctctgctcactgcaacgtccgactcccaggttcaagcaattctcctgcctcagcctcccaagtagctgggattagaggcgcccgccaccatgtctggctcatttttgaatttttagtagagacaggatttcaccatgttggccaggctggtcttgaacttctg

SEQ ID NO: 4269 - DNA, 1059 bp, Homo sapiens
ccatagtaagacacataggattcagtgttcttgtgggaacctgggttaggtaagagatttagagggaacccagaaatacagattgtgtttgactgatgtggctgagggactgaggttatgaaattggctctctgaaatttatgaaggagagagaataatatgtaaatcccctcttcatttctttatcctttctttttgaaggagggggagtaagtggaagggactaaccaaatgctgtcaatcttaagtaatatttctctctaaccaatatctaaaacaaattgagtctggaatccaccatgtttttgattaaaaaaaatttttttttgagacagtctcgctctgttgctcaggctggagtgcagtggctcgatctcggcttactgcagcctctgcctcccaggttcaagcgattcttgtgcctcagccacccaagtagctgagattgcaggcgcatatcaccacgcctggctaatttttctgtttttagtagagacggggttttgccatactggtcagactggtcttgaactcctggcttcaaatgatctgcctgcctcagcctcccaaagtcctgggattacaggcatgagccactgtgtctagccatccaccgtgtttttagatagtctagaaaataatttgtcagtattaactcctatataccattctgctttgctctttaaaaagatcaagctgtgctggaaagagcactagattgggtgttaggggacatagttcagctctttagctattttacgctaaaggaagttcatactgtttttgtccttcagtttccctttaaaatgtagctgatagtcgtttacttatatctcaccaaggcaaataataaatgtgaaaatgctttgtaactgagaaatgcttcaacaatacaggatattattgatcaacctcagatatcatctctggtctggagatcatagctagtggttttaactcaccatctttttcaagtgattttgaaacaatgatgagtataatgccctcctgcctaactggccttttcctgtttctcttaatacatttattcacaccctc

SEQ ID NO: 4270 - DNA, 1077 bp, Homo sapiens
acccagccaaatgtctgattttttatagccactcaagtgtaattatttaagtaactttgatatctctgacattgaaaaaggaaatatctatttgttatttataggcatttatattccagattattgtgctgtttactttctagtagaatatagaatgcaccatgcatttctgactctctttgtccaagcacttcatggtgccttcatccttcatctaacgatgatgctttctagttatcacagcaagttatctacttcctatttaagtgactgtcatactaagccatggaaaaagtagaagacatgcattatcaaagctgagtacagggcagttccagttcctaatctgacaccctaattttatgattaatagtcttgtgctccctccactggcctgaattgctttaggtgtttgattctgtagcctgactgaaggtgaaatttaataatcatcaggttcagcctagatgtgtgaagatgactaatttagggctgttactactgagaaacaggacctaaaattttcttgacttgaactcagccctttgaggtaagtaaagctttgactagagcactgaatgtactggataattccggggagccattccaggatgcattttttaaaaatgctcttaatattttgatctatagtataacttcttttgggacagaatgcattgtatcaaaaagaaaggaaagacaattagaggttgagtctatcagtggctcggaattatacataagcaaatcactgggacgtgtagactattttttctgcaagtccacagtttccttcagtggggaccaccccagattgctcaaaatttagagataaatgagaatagaggatagatgctatccagttttaattggtattgctatgactgtttaaatagtatgcttccataattttattcttttaagaaagtcagctaatggatgtcttcttccacttaatttttttctcttgtgtgtagcaccatttactgatacaagtatatattcattgttagtaatatgtggcaaggagagaagggaactggacagtttcttcaatgtgaggaaaatttttatttt

SEQ ID NO: 4271 - DNA, 1054 bp, Homo sapiens
aacccaggaggcagaggttgcagtgagccaagatcaccaccactgcactccagacttagtgacagagcgagactctgtctcaaaaaaaaaaaaaaaaaagaattaatttattacaaaaatattgtatactgctatgtataatctcttctaaaacctcattctacctaactttaggaaattaaatatggcagaacattaaagctgacaatctgaaaaataccacaaataatgttttgttagtattattatctcaccatcttaggagtgcctttatgtagttgaattacttaatagattacaggtatgtttttacatatgcaatgtatatgaattatgtagggataggtgggcaatgttttagtggagttttaaattaggaaattataaaatgtgttaacatatttttgtgtcattttaacaggattattcaagatcaggttgtagccattttcaacaaggatcactgatcaaaattttctttttacaaagagatttacaagttaaacatgaagggaaaatactggaatcatttggattctgacaggataaagaatacaatatttcacatttacttgtaatggaacctttgtaagattcatcacttgtcattcacccagttgggaacatggatgttggtttttctcgtactactgttcagacactgtcaagaagccactgcaaaaacatcaaacaaaaaatttctcaatgggaaggaagggctaatggtatatctaatccagaaaagtggtgtccaaaggactttggagtgagatataactgtcaccaagagatccgtcttaagaaaaatcctatagctgagagaaagagcaaaaacttggatgtaaccagccgtgaaaatgtgggtctagatataaatgaaaataccaaaagccatgatcaaagtgagaatgaaaataagaaacatgaatatgacgatacacacttctttaaaaatgaatcagaatccaactgggtatgttctcgggtcaaagaaattgaaagctgtaaagaagatgtcttagatccagagacttcattacctccaggaaacttc

SEQ ID NO: 4272 - DNA, 1050 bp, Homo sapiens
acttttttattttaaaagatttgtttccaaataatttgggattttccagatatctttttgttactgatttctctttcagttccattttgggctagagaacattctcagtatgatgtcagtcttttaaaatttattgagtcttattttatggcccaacatatggtctattggtgaatgtttcatgcacacttgaaaagagtatttttggtggcacgcgtctatagtcccagctactcaggaggctgaggcaggaggattgcttgaacccaggaggcggaggctgcagtgagccgagattgtgccagtgcactccagcctgggcaacagagtgagactctgtctcaaaaaaataaaaaaaagaaagaaaagagtatgtactttatgtttgttgagtaaagtgttctaaaatgtcaattaagtcaagttgattgatagtgatattgaaatcttttatatatttactgattttctgtctatatgttttatcaactactgttgaaaagttaaaatccccaactaaaattgtggatttgtccatttggctttttagttctgatattttcttgcttcttacatttttgaaactcttattaggtgcatgaacattaggattgctaggtattcttgatgaattgcacctattaccttctttgtaatgtccttctttatcactgctgttatttcttgctcaggagtctaccttgtctgatattaacatagacaatccagctttcttatgatagtgtttactgtttatgtctctttaacagatctatctctttgtattcaaagtgcatttttttatgaacagcatagagttaggtcttgctttttaaattaagtttgataatctttgccttgtacttagagcttaacccatttatatacagtataattattgatatagtcaaatttaagtgtaccatcttgctattcattttctgtttgttccatgtgagttttttactattgttgttaccgttcttagggttccccctccaactcccctgcttttttggcatcaattatttttttagaattccatttcat

SEQ ID NO: 4273 - DNA, 1035 bp, Homo sapiens
atctctattttagtgggcccatgtttagtctttcaccatcctttaaactgctgtgaatttttttgtcatgacttgaaagcaaggatagagaaacactttagagatatgtggggtttttttaccattccagagcttgtgagcataatcatatttgctttatatttatagtcatgaactcctaagttggcagctacaaccaagaaccaaaaaatggtgcgttctgcttcttgtaattcatctctgctaataaattataagaagcaaggaaaattagggaaaatattttatttggatggtttctataaacaagggactataattcttgtacattatttttcatctttgctgtttctttgagcagtctaatgtgccacacaattatctaaggtatttgttttctataagaattgttttaaaagtattcttgttaccagagtagttgtattatatttcaaaacgtaagatgatttttaaaagcctgagtactgacctaagatggaattgtatgaactctgctctggagggaggggaggatgtccgtggaagttgtaagacttttatttttttgtgccatcaaatataggtaaaaataattgtgcaattctgctgtttaaacaggaactattggcctccttggccctaaatggaagggccgatattttaagttgattattttattgtaaattaatccaacctagttctttttaatttggttgaatgttttttcttgttaaatgatgtttaaaaaataaaaactggaagttcttggcttagtcataattcttatattcactgaagtgcctttatagaatgctaatattaatttcaaacttttggatgtgacatttggaagtgttggaatatctgagttcctcatttcatcataacatcaaatatatcaaagcctgctttaaagtattaccttggggatgattcatagctatttgtcagatttgcatacattaagatgccattggagctcttttgtctcgtttttgcattactgcacaatctagccatcttggtataggtgga

SEQ ID NO: 4274 - DNA, 1030 bp, Homo sapiens
tatatagggccaggttataattggtggaggtatgtttagatttctttaagtaaaataaacagcacaaataaaacagtccagttcatagcttagtgaaatacactgggtacttaatctgtagcctcctggctgcagtagagttgtcatttgagttactgtgttttcttaatcttttccaggaacacagtgaccatatttcttttctgcaggcatatagaatttggtgggttttcttttatgtagggtgatattggatactttttgtttgtgattatatattagcaatttgagggacaaaccagataggcagaaatgggcttgaatagttagatgcttatttaaccttggcaatagcattgcattccctgtggtttttaataaaaattgaacttccctccctccctgcccccttaccctccacacccccaggattcttacagaaaacaagtggttatagatggtgaaacctgtttgttggacatactggatacagctggacaagaagagtacagtgccatgagagaccaatacatgaggacaggcgaaggcttcctctgtgtatttgccatcaataatagcaagtcatttgcggatattaacctctacaggtactaggagcattattttctctgaaaggatgatctttgtgttctgaatctttatggggaaatgaggttaccacactagggaagatagagctttttaattatgggaagagttggttttaggttgtttgacattgagaatctagggtaattactgaaagttaatactggaatttattttacataatatactgttactataaagtttgataatacataagtgaagcttgctactgggaatgacttggaaccagagttgttgtaattagagatcacgaaggaatttcagagaggaaaacatctccaagaaacatctttcagtatgtaatggaaaagataggccaggcacagtggctcacacctggaatgtcagtgctttgggaggccaaggcgggaggatcactttcagcccaggagttggagac

SEQ ID NO: 4275 - DNA, 1030 bp, Homo sapiens
tggattttctcctctaggaaagaattagtactgcataagatgattaaaaataatgcttttgtagtttcatttcggaatagtgaatgtactatgattgttgtgcgctcaaatcattaactgcagggttttttttttctcccccccacaggggtttggtgcagaaagaaagatccgtcaagctggtgtcattgactaaccacatccacaaagcacaccattaatccactatgatcaagttggggggaatctggtgaagggttctgaatatctccctcttcatccctcccgaaatctggaatacttattctattgagctattacaccagttttaacaccttcctcgtgttatgtttaaaaaaataaataaatttaagaaaaccattttaaataatgcacagttgcagcctggaaaaacttaaggtggcgccttatagtatcaattttaggagctttatttggtgcatttaacgcaactggtaattgcagaatccactttgcctgtgtaagtgaaaaatatagactgttatcttgttggccctatgaaattctgcacttttcattatatactctaccttcattaattacttctggcaagatgttctgccttagcactcagttgcattcttttcctttttcttcctgttcattatgctttaattctgaggaccatatgagggtagaatatattatcttttaaaaattacaaaaatttgtataggcaaaccatttcttaaagttgatggccaaattttaaaatgttatttttcatatcatttataatcttgtcacaatccacttaaagaagtttggttatatttcagtgaaaattttcttccagagtaggttttttttcgtgggttggggggtaactttactacaattagtaagtatggtgcagaatttcatgcaaatgaggagtgccagcagtgtgataatttaaacatatttaaacaaaaacaaaaaaaatgaatgcacaaacttgctgctgcttagatcactgcagcttctaggacccggtttcttttactga

SEQ ID NO: 4276 - DNA, 1671 bp, Homo sapiens
aaagaggatacttcagcagcttctttaggaaatactaaagcttcttgcccttatagaatttccacttccttggaagtaacatgcccagtttaatttctgattggctatgaggagcgcaggtgtattaaacattttcagtaagcttttttctcctcaatagcaaaaattagattcttaagattgaaagaccaattaaaaattacagcagactgagctaggcttaaggcaagactaccttttattcatatgaataatcttttagaaaatgctggaataagacatttttacagctgtaccaatcctttggcacaagaatatgtaagaactatagttgtttttattggtttttgttcttgagattgttttcattctgtttttgactgtatctctttaggaggctgaggatggcattattgcttatgatgactgtggggtgaaactgactattgcttttcaagccaaggatgtggaaggatctacttctcctcaaataggagataaggcaagataattctgctcattcgagagagggttaagagttgtcatcttaatcataaatcctgcaggatgggttcttcaaattttatcaagttttgctgaaatatattttgtgtttaagagaaatacatgaatatcttgtatttgaaagcagcttattaaaagtgtctgtcaagctctttgttaatcaaagccttgttaatctagctgtttaaacgttagataaaacatgcttaataaaatcgttattggtaagaaagttaaaacagttactactgaaacattatcaaagtaaaagcacaccaaagattttacgttgttgttcattttttctcatacttaatatgtttggtttttggatagccctctagagaaattcagaatctataaggaatacagactgaaagataaaagtttgatcctttgtgaaaagtgggatgagacataaatgttttggtgaaaatcaatttcattgaagtaataacaaaggatatttggaatgaaaagcatgcgctgggggagttataggtcttgttttctgagttaaggagattggtgtggaagtgatatggtgttaatgagcatccttaattttcacaggttgaatttagtattagtgacaaacagaggcctggacagcaggttgcaacttgtgtgcgacttttaggtcgtaattctaactccaagaggctcttgggttatgtggcaactctgaaggataattttggatttattgaaacagccaatcatgataaggaaatctttttccattacaggtaaggcgtgactttcaggaactttacagctaacttaccatccattctttggtgttggaataaaaaacatttagtattgattgattatacttgttgaggttcagatttcatattggtagaattatggcaagatataaactgaagttaatcactgatcttactatatacagagcctgtggccaaaagaaatagaaaggcctgtgccaccttattttttgtgttggtaccatagagttggccatttggtgtataatgtagtgtaagagtaaggggtctgactgggtgtggtggctcatgcctataatcccagcactttgggggctgaggcaggtggatcccttgagcccaggagttcgaggccagcctgagcaacacggtgaaactccatctccacaaa

SEQ ID NO: 4277 - DNA, 1502 bp, Homo sapiens
agtttcacagccagtgaaaatattatttgggtttcagggtgtgattgctgccatgagagatggttttggtttcatcaagtgtgtggatcgtgatgttcgtatgttcttccacttcagtgaaattctggatgggaaccagctccatattgcagatgaagtagagtttactgtggttcctgtgagttgtttctgagaaaagttgggaggtgtttcttgatgctttctttttcaattgaaagttaattttgttttatcatttttaggatatgctctctgctcaaagaaatcatgctattaggattaaaaaacttcccaagggcacggtttcatttcattcccattcagatcaccgttttctgggcacggtagaaaaagaagccactttttccaatcctaaaaccactagcccaaataaaggcaaagagaaggtaggttttgcataatccaaatgatttttgtagctgtttatttctcttctgctttaacagcacatagtaatagagtacatataatcagcggaagtttgtctctttcagaatttctgtcatattaacagtgaactaaacaaagtaaggtttcttaaccttgggattattgacattttgggatgaatgattctttactgtgggggatgggatgtttagcagcatttctggcctctacccactggaagttagtattctgaccccttttccctgcctcccattgtgacagccaaaaatgtgtccagacattgccaaatgtcccctgggaggcaaactcattccaagtagagaactagttatataaaatgatagtactgtcttccaggcaatttaaaactttcaaagttgggtgtatcctcagttcacacatttaaatttcatttattgaaaaatccactaaataggaaatagaaagatgtctgagatgaattctcctttcaagttaataacaaattgagagttttatagaaacaagtaattcatatagaatataaaatattgctattgaaggtcagcgatagtgctctggtgaaaattaactggtagggtatgtgatggttttactaacagatggagacaggaaagagcattcttcacagagtaaaagtatagatgagaaaaattcagggtttctttaggaagcaatgagtaactagtccgacaggaatttttttttttttttttttggttttgtgtgtgggtttttgttggtgagggaggttaggagaaataaggatgaaaaatcaggatccagctagactgggagggtgttgattgctgctctaaagaatttagaccttattgtcaggtgcggtggctcacacctgtaaacccagcactttgggaggctgaggcgggcggatcacgaggtcaggagattgagaccatcctggctaacatggtgaaaccccatctctactaaaaatacaaaaaaattagccgggcatagtagtgggcacctgtaatcccagctactcgggaggctgaggcaggagaatggcgtgaacccaggaggca

SEQ ID NO: 4278 - DNA, 1049 bp, Homo sapiens
attattttttttctagtactggtgctgtaagtgctcgcaacattatgctgttgaaaaagaaacaagcccgctgtcagggagtagtttgtgccatgaaggtaagtgttaaatttgagaaacttgagttttctttggccacttgaaatgttgtacttcaaactccagcctttgtttttttttttcttttttatcttacccttttaaaatatttcactgttaacctcaaaagtagtctcttaaaattccttggttgctaatacattatcttctttaaaattggctgtttaattgataatattaggttgtaccaaattatattattgtgactacagtataattttacaaaaattactggttttaagttgtaatcataaatttgtacagagtggtaataatgttcttggttttttattttgcttcaggaggcatttggctttattgaaagaggtgatgttgtaaaagagatattctttcactatagtgaatttaagggtgacttagaaaccttacagcctggcgatgatgtggaattcacaatcaaggacagaaatgtaagacagtcagttaacttgatctttggccttttaagatcagagttggtttatgtttttaagaaacacttaaaattatgtgattcttccttcctctgtccccccaccacctccaaccccttctgatttagggtaaagaagttgcaacagatgtcagactattgcctcaaggaacagtcatttttgaagatatcagcattgaacattttgaaggaactgtaaccaaagttatcccaaaagtacccagtaaaaaccaggtaaataatctttttcaggagagtcctatttcgcctcagtagtaatagaataatatggtgtggtatactgagattttatcttattcagttaatataatgtggtagtggaacaactaaggacctcttgttacgtatatttaaactaaaagagaaaccagatttatatattcataaatatggtgtttttttttttttttttctttttttgtgacagagtctcgctctgtcgccaggctggagt

SEQ ID NO: 4279 - DNA, 1044 bp, Homo sapiens
gcataatcaaaaaatttaaaaagaaaaattccataggacttccaagtgtcttagtttgcccaagtatgaccttagttagaacattaaggtaaaatgttccttttaatcacttttttgggggttgtgggggggatctttttctggtttcttttaagcactaacaccagctttttttgtttggaatgccttatataaaattgtttttttgaaatgtaactatagtctctgggcaaatgcttccacgtgtgtaagctttttgaagttggattgctgctcagctgtggactcgcagaagtcatcagcaccatggaggggaagtgtgtgtttatatgaataaagtgacttgtcataaagcatttaattttaagaaatttggcttaaaatgccagtataagaggtttttaagtaagtaaatcacagtatacagtgaatatgcatcctgccaaaatagtaataatgatttattaattcacaggaagtgttttatctgacttacacccctgaagatgtcgaagggaacgttcagctggaaactggagataaaataaactttgtaattgataacaataaacagtaagttctttttttttaaattttctcacctaagcggtttttttttcccccctccattaagaaatttgaatagagttaaaaacctaacttgtaagtctggatagttttcatgaactttcaattcatcaactaatgctttgaggtctatgaatattgtattacagccatgatgcagggtctcagaggaagatgataattaaaacattgttaggcattttaaggacttgttctagagatcagtgaaggtttttcaaaaaatagtgctttgaggtaagttttgagggaggggtatagtcactatagagaggtgagaaaaaagcattatgattagaagtatcatgacatgttgggggaaaatggccaaaagtttggtcgaactgaccagaaggtaaagtttgagcattcttctatgtaggaatctgcgttgtttaaaacaaggaagtgtgattggtttagatctttggaggtggt

SEQ ID NO: 4280 - DNA, 1063 bp, Homo sapiens
tgaatacatttttacatgctgttaggcaagcaactaaattgtggatttttttcccccctatttaaagaagaagtcaagtaacatttacctactgggtccttcctaccaccacctttgttagcatctttaattttttataaacaaggttctgttaaattatctacttccatttgtcctatactttcatgtaattgtttttgtgataacttccattttgcttgttttttgatggtgctgattaagaaatatttgcaatgccattaaaatatagtttagccaaattattaggaattctttgaaaagtattaacatgtcacatgtcacatcaacttatctaaagttgtttgagtggtgtgtttccctttggaaaaataaaataaaggcttcctccaaatggataaaggctagggaaagagagctctagtcagcaaagattctgggagaaggggaaggctttttcaactcttttggtatgtgtctagggatgagacggagactcgaacagtagagcccagattccaacattcttgttggggaacaacttagagtcttaaaatgctagctttgatgctttctaattctggttcagtctccctttgggtgagaaaaagaggatttctatctcctacctgcagtgatgtgtggcaggattggagacttgagaatggggatattttgcagctttaaggcatatatatttcagatcatatcattgtgttcttgtttaatagtaatcagaactatagtctaaacatgaggccaagtgcagtggctcacgcctgtaatcccatcactttgggaggccagggcgcagtgcaggggccggatcacttgaggtcaggagttccgagaacagcctggtcaacatggtgaaaccccgtctctactaaaaatacaaaatttggctgggtttggtggcgcacacctgtagtcccagctacttgggagactgaggcagagggatcacttgaacccaggaggcagaggttgcagtgagccaatatcgtaccactgcactccaggctgggtgacagcgagactccatctcaaaaataaattaatt

SEQ ID NO: 4281 - DNA, 1060 bp, Homo sapiens
tcctgatttttcagtcagatgtgggaactattgagcttacttttcatccctagcaaaaaccccagagccagtgaataaataacttggcagactagctcatgatagcataatggtcaatatggagaaatgttggatggatagcagttagtaagagactgattttagagaagtctccaggtgtatgctgccagatgctatcctcgccctgcttttttcagagacctaatgagtagttctgtgagtacctatgtgctacgtaagcacttattttaggctttttacgtgcagcaactcatttaaccatctcaacaactctgtgagacaggtgttaaggtaggagaatgaatgattaaaagataaactacaaagagtctgataatttaaaattagtcaccaaattggaatactagattaaccaacagaaggcattttaaaagcattaggttatagtttttttatttgggaacaaacgatccattacggaggaactgaaagaaaacctgatttcgctaatgtgatttgtgaagaaatgatggggatgtgttttagttttacaaagttataaaacttcagtctacagaatcaaggagtgtaatcactcagtactttatattggtcgggtacattaagaatagtagtgaaatgcactttaatgaataattacttagaacctatccagaagacagcaattagtgttaaaaatggttgtgttcagaaaattggaagaaacagtggaagtcaaggggaggtatgtctgagaatacagagtagttttctaaagatcttatggtgaaataggctaccttttccaaattgattgtcaatcagtagaagccaagcagaccagattaggggggaaaaacaacttagatgttgtaataaattacaaagcatagatttccaccccctctccccaaaggaacttggaaaccagttaggtgctcccactttacttttgaggaaaaaatcccagagatgttaaaagtacttgagagtcaggactgaaagccagtcttttgacttttatgttcttcagggaactttaatcaatttcttgagt

SEQ ID NO: 4282 - DNA, 1084 bp, Homo sapiens
gttgccacaggcattcatgcagaagacttcacttgatgctgggcttagaaaatcatagaatgcatggtcgctgctctgaagaaagaatttagtggcatattctcgcttgacttatgtgctgtttcatgcctagaatactcagctattttctttctcctagaattctgcctgattttccaggttcacttcaaattccacttatttaaaagccttggttgctttgatggacatgcagttgtggataaacaataaataatatttctagatagtctgtgacataatagatacctagatactaattgagcaaaataatttttggcatttttgtcctatactctgttttttttttccatgtttacatcttgtcttttcagcaagattgtctatgctctcatggcagggacttcttttatgttttccacagagctagatccttataaaatacttgcactaaattaaacattatgccatgtaactgagcttatttgggggaagaggtcaataaagactatggaataatttgaggtcttgggtatgagataccaaaggaggtagttgctagtacttgagagattgctccaaataacatcagatgagcatgcttccaagtttcctgcattacttgcatgacccatgattctaagttaatgaaatgagtttgtccctcttctcacccactgtccctgattattttatgtatgttatacttaatgtcttcattttttacctttagtatgaagtgtaacagaacagactttaccacctgaaactgctgcttcaagttcagatcaggcaaggaacaaacctcgtaacaactaacaagaccaaagaagagtacacttaagttgaagacacaacacttgatctgaaacaagaagtttgtgcctactcaacagctttgaaagagcacttcccaacgctgctagtagtctttgttttcttcagtgctgtactgtgagattgcccggtacagcagcagttgtattctttattagcttggtagatcattttctctcgctcttttttttaatactagcaactttcatcctttgaaacgtgtgctgaaaaagaagaatcagcaaat

SEQ ID NO: 4283 - DNA, 1031 bp, Homo sapiens
tgctgggggtgggtggatagccaggattaaaaacttcccatctagaatggtggaaaaataactgaagatgtttgacaggggagatgagaaatgaaattggagagtttttgttttgttttgttttttgagacaaggttctgatctgtctcccaggctgtagtgctgtgtcactatcttgttctctgcagccttgacttcccagtcctaagtagctgaggctccaggcgtataccaccatgcctggctaattttttgtatttttagtagagatggggtttctccacgttgcccaggctggtctggagctcctgggctcaagcagacctcctgccaaggcctcccaaagtgctgggattacaggcgtgagccaactcacctggccaaaattcaagtttttgatagtctggtggtggtatgtgacagaaaatggaaagtgtgcacactggaagttggcggatatattagacacctgagctaaaatatgtcacttagtaggataagagatgaatacaaaagatatagcgagggaaatactaacacaacttgcaacattgggtatggtgatggagaggggaagaatcaagatagttaaagaagtggccctacctcaaaccagttgtattactctgagtggaggctgggcataggtttgtttttgtttttttttttttaaagcttcccaagtatttgagcaccattaccctgagacatatatctagtctgggtaataggagaatgatctaaataaagttgaaagatcagacaagtgtatgtaacatttgatatttgaaggaacatgggatgttagagaatagaaaatggccagatcagctgttattgagtttttattttacatgtgaggaaagtgaaacttagagagattaaataacttgttcatggtatttactagtaccagtgattgcgattaggctcttctggtctgagctatttaatcagctctgacctctcacctgataatcattcttctgatgttttcaaatatccatttctcagcacgtacacctttttct

SEQ ID NO: 4284 - DNA, 1057 bp, Homo sapiens
agaggttcataaagtcacaacaaagcaggcaggtgttttacatccagctaagcaagcaaggtagcaagaggcttggagtttatcaagggcatggagtcaaaaggagagatcacttcctccaccgttccctgccaagtgctgggaattcaaagatgattaagacacagcccttgatcttgaggcactcatgcctttatttagcctccattttgcctttgattagaatttattccctgtttagtctttgctccttgagggcagggactgtgtccttttggcatcccctttctcccaatccctcagtacctaatagagttaagcatggctccagctaaggtagttgtgtgcactgaccctggagcaggatctgtttatttcctttcccacttctgtgctactaagtggaggccaaggaaaagcaatgggaaaacctttggtgatcagtgcctctcaaactttaacgtgcgtacagatcacatagggagcttattcagctttattcggattcagtgggtctgcatttctaacaagctcccaggtgatgctcgtgttgctggtctgggaacatgctttgagaacccctgttttagatgtggcctgaagaggtcagagattcagcagtggcacttgtttctgactgaagcagggtgtgccctgcttcttggcttactcacttggcttgtttttggcagttcttttaatttcagttaccactttacctttattaagtctcttttttacgctaatacttgatgctttctggaattaccgggaggccacctgtccattgttcattgcatttcaccttgttgttctagaacatcagccatgaagtgtctttgggtctccaaccatgtgtgacaaaagagaacgtaacctctatcccccaaccttgacagttaatatcgcgaagctgctcccttaaaacaagtgatgctatactgagcactgaaacaaatcatgtcatggttgctaaggaattaaagagagaatgctgccagcaagatggaaataccagatgggctgggagcacatcttacagatgaattaactcggg

SEQ ID NO: 4285 - DNA, 1050 bp, Homo sapiens
cctgagaataaggggtagggggttgggggttaggggatagttgggagcaaaattgcctccaggtaagaaccactgttttacagtttaggcttgggtatcagtgtgtaggctcacattagcaatgggaataatagggaagacaacaaagttggtagaatttggaacttggaaagttagcagtttccttttaatcttacatatttgttttaagggtgtcttcaggacctcagcaaaccctcctagcatttcctgttcattccaacatcccacaggtatctttgttgataagggctccccctactgggcatgatgtccttaagccttcagtttacaaaagctaagatcttagctaggctattcgagcaaccaccccctttctcccctgtcactattgtactaaagaagttcagaggccatctaccatcccattagtggaatagttccacgtaagggccttttaaagtcctagttagattcaaagacttctggaagagaggacaaagttcagtgcaagcatcagtgacccctccactctgaaatgagatatcagggttcaagtcagccaactgttatacaaaacattgttacctggagtatctccttgcttcattcccaaagtatgtgcttatctgtatcctcagtgagtctctgccagtgaccatgtgtctgaccctgagatgtgttttcttaattcaacaactgggaaaggctctataaaagtatcccttccttttctctccttatctcctctgtggcaccatggacttgggaaacccagtcatggctaaaatactaccttgtttctgaggcccatactgagtccaatagggtggcagaatttctagaaggaatgcctttgatattagcagggctttaaaatcccctgaaacaccctagacatatgtaacctaagagccaatttatggcatgcatccattggtttcaggagatgttaggggcagaattcattcattcaataattatcgaataccaactatatgccagatatcgggttaggtgctgaagacaggaagagatatgaacctgcct

SEQ ID NO: 4286 - DNA, 1090 bp, Homo sapiens
ttttttgtgtgtaaataataatttcttcaaatgctcttagaaccagtttatcatcctgctggttccctcatcaattattgaaggcaataaaagctttgacatagattaattctatattggtaagagagtcatgtttttaacttttgaggatttttctttgacatcatgatgcatttgagtgaaaaaatatataaattaatattttatatgacatacaattaacaaattaagtgttaattagatattagattagttcgtcttactccctaaaaatatatgtttttaagtgggtcaaaaactcttctacatattcagtgtttatttaccttgtattgggatctatatgccagaagtaattgatgattgtgagaacagaaaatgcaatctgaaatgacgtctgatgaattgacagagaccaggaaggggctggaactttttcctacaggtgatgggaaccactgaagtgttttaagtcggagtgatgtgagttttaaaagatgatttggcagcagcggaaaatgcatataacaccagttagacattattgtaatggcccaaacaggacccaatgagggcttaaaacagaacaatgataacaggaatggaaaaatgaagtcaaatttaaggtaaaaatcagcaaaattgacattttgcaggtgcaaaaaagggagaaatcatgaacaactcccatgtttagtcattgtagccagacttggggagtggaggtgctattaactgagacagggaacacagaagttgaattaggtttgtggtggcaggttgaggagcctacaacaagaacggtggggctgacaggcattgctcctttaaatggtcattgcccctttaagattctgcccttcccccttaacccacccaggcccctgctggatttccttgccctaatttacagtcagcaccaaagcttctgagcatgcgctcaaggaagagctggactaattaaagctctcctgaggttcaaggtattgcatctgtggctcttagcaaagagttccatttttgagagcatattttctccagcttaccattttttctcatttttctttttaaatctttttcctccataact

SEQ ID NO: 4287 - DNA, 1063 bp, Homo sapiens
aaaggagggaactttggacaggtgctgtagcagcaacagaatggaggctctggggcttatggggtatggggattaaattcacactgaggcaggagagtgttgagagggaatccagccatcttctcttcctgggctcacagggtggtttatcctgggggttgttgtgcagcagttctctgatgtcaaaaatgagcaggcttagggaaattgatctactttggtagagattgtgggctgtccaccaatatctagctaccttactttattaaaaatagaatccttaatttttagctaggcaaatgcctcctacccctagttggaataaagacatttttcagttttcttgcatcagaatgggtttgcatgagtacacctgggcagtgatttgtcagactttgggaaaatatgatttttttgttggcaagaaagcagcctggatggagctccagtgaccatcttaaaccactagacaaaaactcatgttgaagataatggagctataagatagtgactgatgatgactgtagagttgccatacttgtcccaggctgccaacatctggatttcattgacatgggagagaaataaatgtacattttatttatgctactgttttgtctgttttatgcaaccaaatctaacctaatctttgtccatataacaaaagtcaaaagagtataatgcaaactcatttataactttttaacaatggaaatatatgtatctcatctaaggacacatcttccaaggattttagcacccaagaagccaaagtattcattcaaagattgaggggtgaccagagtcttggatggggcaagtccatcaggtcagttcttgggctttagtccatcaggctctatagaaacttcaccaactctctttactgcacaaccaagccctccactctcatgagaggggagctcatgtcctctaagccccatgtctctttccactgaaagagcactgctctcagattcccattttccccaattctattcaatttgtgtcttgttaacataatcttcctttaaatcagatgcaatacaactgaggatgactc

SEQ ID NO: 4288 - DNA, 1032 bp, Homo sapiens
tctcagtaaactaggaatagaggggaaactttttcaacttgttaacaaatgcctacaaaaaaccctgcagctaacatcatctgtaatggtgagaaacttgaagctttccaactaagaccaagaataaggaaataatgttcttctcaccactccttttcagtattgtactataagcactaactaatgccataagacaagaaaaggaaataaaagttatacagatgagaagaaagaaagaaaattgttttagttctcagatgacatgaatatctatgtatacaatccaaacgaattgaccaaaaacctcctggaactaataaaaaactatagcacatttgtaggatacaaagttaatatacaaaagtcaatcacttttctataacagcaatgaacaagtggaatttgaagtttaaaacacaacaccatttaccttagcaccccaaaaatgcaatacttaggtacaataacaaaatatgtcccagatttatatgagaaaatcaacaaaactgatgaacaaaatcaaagaagaactaaataaatggagagatattctatgttcatagataggaagactccttattgtgaagatgtcagttatttccaatttactctataaattcagtgcaatcccaagcaaaatatcagaagtcatttgtggatatcagcaaactgattttaaggttaaatgggcaggcaaaagaccagaatagccagcaaaatattgaaggagaacaaaattgtaggactgatactactcaacttcaagacttactataaagctacagtagtcaacatagtgtggtactggtggaaaaataaaagacaaatagatcagtgaatcggaatagagagcccagaaataaaccaacataaatatggtcaactgatctttgacaaaggagcaaaggcaatacaatggagcaaagatgatcttttcaacaaatagtgctgtaacaactggacatccacatgcaaaaaaatgaatctaaacacagaccttatgcccttcacaaaattttactcaaaatggac

SEQ ID NO: 4289 - DNA, 1057 bp, Homo sapiens
agagagtgctcagcctaaccttagaacacatttataactgaatacagtgttttcaatttgtacataatagttagaatattctattaaagttatgaaacacggagaaaaaaaagaaaaagtgcaaatgagtcccaatttataactgatagatttgatttttgaagacagagaaaagatcaaacccacagaggtgtcactcaaaggagcactgtttgtacaagtcacacaattgcaagaagtttttaaaacgagctgcaaagttaaaatagttaagcttggagcaaacattcctttattaattccaccttttgagtgttacataatacccaaggcatacgatatggaaatgcaatttgttgtaaaagcagatagttgctttataatgggaacaacaaaaaataaaaccagtgtgcttttgccttttggtatatgtgtgctgcatctaactgacaagggggaagaagatgaccacatatagacagagcaagcaagttgaaatcttgaaaagttttaagtgttccaagagacaaaatacttgaaggaaataatttctgagtaagatccctctatagaattacatggaatattttaggggatttttaaaggttttgcccttgcaaaactttatgtttaactttatgtttgccattagaatttgaagacacaaagtaaaattactcttactgaaagtaagattactttccctgtaaatagtctggtaaaagatcataagaggaatgatattcctcttattgatttgaaataagtactattaatttgaaaaaattcttttaattattaaataatggtgatttatccttcttttacattttcttccaaattgatagttcacatatatacaacagattttgaaagtttgaggaatgttgcttgataggtcttaggtttaaatcctggagtagtgttgacatctgagacatatgtctgggcttctgaccctggtttctgttaaccaaatattggaggaccttctccttttaaaatgcaaaccaggagctgaacttaatgatcttaatggttcttttgaacagtaaca

SEQ ID NO: 4290 - DNA, 1068 bp, Homo sapiens
gagggggtcacagtttggaaaaagtcatcagggattctggaactaagtctgataaaagattccagtgaagccctgttctgagaacgagcagactgcaggggaggccatgggattccccaggccagtgtctgtgctgatccttcaagggtctgcaggtatgcaggtggcctgggctgctcggcagatactttgctgattcccagctgaggggagcatggtggcgattgctcagccattttctgacagacacacagacctgccttttctcccccaagtataccgtaccctcctgtgagacagtgtgtgcaggcaccaccaccttaatcctgctgttgcctgacatgctgattctcatttattatgctgcatcaacacattagaggtacaggagcggctcagtcatgaaaaaagaaggtcttttgccccatttctttatttcagagatgtgggctttcagtgggaatttgctgactcctactttataggctgagtcaatgagggaagatgactggcgtttcctctgtctaaatgggaggttgccagagcgctggctgggactaggatgtgtaactaagatttcagtttgaaatcttagatttcagttcacggcgataaagaagtaggtgctgcacacaaatatgtaaagcaattgtaggaaatttgaaaggaaaaaaagaaaccgaagccagtattttaataattgctttttctgtgtattttgtattgggctgggggatagcatcaaaggttgaactttttgagctttctatgaaaaaccccaggaccttctttctttggccatttctatggaaatgcgatgtcagatggatggtaatggtgccctccagtggctgtgagacctcattgcgcattgtctactggagctttagtcttctgagacggaggaaaactgctgaatactctggattcatctatgtctacaatgttgcatttatgaaaaactacactgtgctaggcgcattctaggacatgaatatgaccacaccctctttcaccgggtgtttctgtagcaagttttcatattcttttcaaacaatggtttctctg

SEQ ID NO: 4291 - DNA, 1043 bp, Homo sapiens
ataatatcttatagtatggatgttactatcatgtgtttaatgatggacatttagtttattttgagcaaataaatttaaacaaccccttccctgtttgtcccttgtcattccccagatgcttccctgcaggtggacacagtggtccccaatgccacggtctctgagaaggcagctttccagctggactgtagcatcgtgtcccgctccagccaggactcccgcttcgctgtggcctggtattccctgaggactaaagctggggggaaaaggagcagccctggcctggaagaacaggaagaggaaagggaggaggaggaggaggaggacgacgacgacgacgacgacccaacagagcggacggccctgctgagcgtgggcccagatgctgtctttggcccagagggcagtccttgggagggcaggcttcgcttccagaggctctccccggtgctctaccggctcacagtgctgcaggcaagcccccaagatacaggcaattactcctgccatgtggaggagtggctgcccagccctcagaaggaatggtaccggctgacggaggaggagtcagcccccatcggcatccgtgttctagatacaagtgagtttcccaagtacagagggaggatgtcactgttggttccaactgtgtctggaagataaatttgagcttgattatgggttaataaacagttttcttaactgtcatgggcatttattagtaggatttgagatatggtgggattggacatattagttcatataattgacccttgattacccatgcaaaaatagggatagaaattaaagtgataacataccatataatctttataataaactcgatgttctaccagattcaattttagtaatatttcattatactagtatattgttaggtgttactttgttattttttagaatattggaactagtctttagcgaattagcaagcgtttcagactcacaagggaaagggaaaaaaatgaaggctgactacctcactgtcattatttctttttgtccagtttctgcgttattgt

SEQ ID NO: 4292 - DNA, 1056 bp, Homo sapiens
atagtaagtggcagagccaggattcaagtccagacaggcagtttggctccagagtccaagttcctaattttattattatatgttctagacaagtgtttttcttctcaggaatcctctttggtactgtatacttgtatttaatgtttcctctctctggttaaccacccctgatttcctaatcccctttagcaaatccttaaatttgttttttggaagttggggtcataagacattggtagaggttcctcaagacacagtttgctgatggtgtagaagttttatcttgtgcctcttttaactcctgattcttccagcttctgccacaaggtggctctaagacttgcggataccagagctccgaaccagcgctgtcctctcttcttttgctctccctgcgtaccttgcccctcaaaacatagattcttagccctgctctggtgtcttccatagaaatgtcccctgctacccccgttttaaagaatattgtgttaaatattcttattccatcagaatcaaataggaacccagggactgttgactcactcatgctggtctgtttaccatcagccttccactgctgtgatatcatttatcgcagcaagcttctttgtggtctgtgccccagactcgtccctgctggagccacctgctgatcctgcccccatatcagtattcatcagaatctctggttggatggcacagttgacttgtggatctgttatttgaccattccctgtgtgtgcttcctgttgcatatgcatatccccaacagaatcttcaaggaatgccatcactgtcaacgttgccattgatctagcttagtctgatccccattgatcacatagtgtgacccctcaaggggtgcttaggcaagactttcagccagttcacatgtttgattattagctcttaatcagttcttttctcttttaattgtgaagcataattgccttgcttccttctgattttctttagctcaaaacaccctccaattacatatccttaaatacagaagcagtaagggaaatgttagcactcattttccaaatgtttatg

SEQ ID NO: 4293 - DNA, 1045 bp, Homo sapiens
caaatgactgcagttttctgcattgttttcctgtgaggtccctgatgttttgaaagagccaaaaccagacagggatgctatcaggttgcagttctgctctgctgtggtgtttctgtgaaatggagaggaggattttgaggaatgtgtagttgggtttacttttgtctttatttgtgggcacgtttcctgagtggggaccactgataattaggtgttctttggtgtaggggcccagatggacagcgtgggacccctttctaagggattgtcacagtgagagggctgagcactgaagtttatcttgcagcatgcgtgctgggagcagcccctccaaattggtgcacgtgtttggggagggcagagaccagggcatagactggctggcaaactcgcctgctgggctgaagagtcctgaccttgcaactggaagctctgctttcctgccctttccctgattcctgctaattttatgacctttcatcagtcacctgacctttctggacttcagcatcctcactgtagaatagaaacaatgatccctctttcacagggatcggaggatctgtcgcatgtcaaagccctttctacacctgtgacaacacaagacgtgcccgtagacacctgagcatgggcgtggcagaaggccaagctcacacccaggaagccacctgcccttctgctcctcatccttgtcagtcgctgtgcctgcatccccaggaggacctcacgggactgggagggcctgggacaggctggccacaggctggcctcagatcaccaggcattgagacctcctgctagcctcaggctgacagtaataaatgtacaaaggaggacagagctgctgaggagcagctgggagtccagacacaaacgactgtcggaggagtgagtcagggcctctgaaggtcacttgaggagtgtccgccctgaatcattgacctgcggcatgaatggagaagtagctgggataccagccctggggcagttccgttgggtggatctttagaagagagaggtggcgtgggaggggtaagagcactga

SEQ ID NO: 4294 - DNA, 1026 bp, Homo sapiens
ggaaggtgtgataactaaaggatataaggtgtcctaaatgccttgactgccttaaataatgtctgaaactcataatagatttgtgcaatcagtggttctcaaactctcgtgtgcatgttggaatcactggggaagcttttaaaaattctgatttcaggcaacaaccccagatcagtgaaaccaaactcgcttagggagtgggacccaggtctcagcctttgagctatctcaggtaattccatgcatggttcagtagagaaccagtgggtgagttcactagcgccagtgccctaccacccaacgcatgcagacaccctgctggtagtttagttagtcttctgttcagctgtgggctgggatacaggcagtgtctccatgtcacctgtatgctcaggcagagtcaagaaggcagggagcccttcatttgccagtctcttcatattggatctgtatttgttgtactgtatgtgtcattcgcttagtgtctgggtttaaatcagcaattagtgattcatgtggattcaacaggacacaaacaaggaaagcccttggggaggtttggatgtggggtggggtgtgtggctaaggcgggaaagagggctgagtggcagggtggggcccagggcaggagaagtaaccatcaatgggaaaacaaggcaatgtgacatttgtgccttttgtttcttctggctgctcaagtaatgtaaggctgcatgctggtccccctgctgttcgctctctgggccactctgtggagtggagctcgggccctggcacctggcaggtgctgtcattttccctccaccctcatcttcatgtgtaaacaggtgccatggaggaaaatgagcatcaaggtggctttaaaggggcacagtggcagacatccagatgcaggctgaagtgggaaggtttggaactgtaggcatgcatgtggatctctgcctgatttggagccccactggtggaacctcatctttctcttcacctgatggctctcagtatggcaggaaggaggcctggctacta

SEQ ID NO: 4295 - DNA, 1034 bp, Homo sapiens
gggttcaagtgattcttttacctcagcctcctgagtagctgggattacaggcacccaccaccacacccagctaatttttgtatttgtagtagacagggtttcaccatgttggccaggctggtctcaaactcctgagctgaggtgatccacccaccttggcctcccaaagtgtggggattacaggcgtgagccaccacacccagccaggacttcttgatttctgccttaatttcattatttacccaaaagtcattcagaagcaggttattcagtatccatgtacttgtatggttttgagtgaaattgcattgtcttgatttctaatgtgattgtgctgtcttccaagagattgtttgtaatgatttcatttcttttgcctttgctgaggagtgttttactgctgattatgtgatcagttttcaaatatatgccatgcggcaataagaagaatgtacattctgtttcttggggatggagagtttggtagatgtctatcaggtccatttgatccagtgctgagtttgggtcctgaatatctgtgttaattttctgtcttgattatctgtctaatattgtcagtgggtgttagactcccacacaataatagtcggagactttatgtctctttgaaggtctctaagaacttgctttataaatctggatgctcttgtgtcacgtgcatttatatttaggatagttagatcttcttgttgaattgaacccccaccattatctaatgtgcttccttgtctttttttaatctttgctggtttaaagactgtgtctgaaactagaattgcaacacctgcttttttctgttttccatttgcttggtagatttttcttcatccctttattttgagcctatatatgtcattgcatgtgaggtgggactcttgaagacagcataccaatgggtcttggttctttatccagtttgctactctgtgtctcttaattgaggcatttaaatcatttacattcaaggttagtattaatatgtatggatttgatcctgtcatcatgctgttagc

SEQ ID NO: 4296 - DNA, 1081 bp, Homo sapiens
agcagtgtgatgttagattgcataatctctgtgtccactttgtcaactgtaaaatagagggtggagtacaggaagacagggtgcatgtaattggatattgggatatctctagagataaggtacacaaatgttaaataacacctcttgcttagtaagcattggttattttcacgtgctaagtactttcaaaaacaactgtaaggggatacagctttcaaattctcttaagtatttgaactcatcgtctttaaacccttacccttatttatgtcatattaagggtttttagcctattgaaatgttggggagggtttttattcatctggtttagtctttcttccttagagatgagtaagcacaggaaaaataagcatttccaaagtcagcaaatagtgtttgtcctaataagccctaatatagacaaatggccataacttcaatcaatgaattatcaagttataaacttaaaaatatacacagaaacaatctagtaatttgtcgaaccttgaaggacactgactgcttaatggactttagtcataatatgttgtaaccctagattaactgaaatgggtgaaatggatatgtatatatagaataagtttgtgcaaagagaagataacctggttttcaacttctttgaaaacatgttttagtataatctttgtgcatcgtttagtaagtataatatattctattaagtttcatgtttgtcttatgtaatgatttggaaagcacatccaggtctttcagtgtctcgggctcatccttctcatactgtttcacttcatcctgtgtggtcagtgtagaaggttatcagagcagaatctgtactgccctaagaacaagtctgggacttccagagcatctttaaagtaagttcctattatcagtttatttggcttttgcctctttttctaaaagtaaattataatgttaaaattccagtttaattaaggtatgtttactgatgttatgggatggcttactttagactcatcaaattctgtaaaactggaaaagaaattgaaaggccttaattcttacagcttttactcaaggaaatgagcaaatctagcac

SEQ ID NO: 4297 - DNA, 1046 bp, Homo sapiens
ctgccttgatgttgatggctgctgactgctcaaggtggtggctactaaaggttggagtgactgtggcaatttcttaaaataaaacagcaatgcaattttccacatccgttgactgttcctttcacaaacgatttatctctagcatgcaatgctgtcctttagcattttactcagagtagaacttctttcaaaattggaatcagtcccctcaaaccctgccagtgctttaccaactaaggttgtgaaatcttctaagtccttattgtcattccagcaatgttcacagcatcttcaatatattccatctcaagaaactactttgtttgctcatccgtaaaaagcagctccttatgcattaaagttttctctcgagattgcagcaattcagtcacatcttcaggcttcacttctaattcaagttctcttgctatttcaactacatctgcagttactttttccatggaagtcttgaactcctcaaagtcatccataagggttggaatctactcccaaactcctattaatattgatatgttgacctcctcccatgaatcacaaatgttctcaatggcatgtagaatggtgagtctttcacagaaggctttcaattgactttgtccagatccatcagaggaattactatctgttgcagctattgccttacaaaaaatgtatttggtaagtaataagacttgaaagttgaattcactccttgattcatgggctgcagaatggatggtgtgtaacaggcatgaaaatttcatcttgtaaatctccattagagactttgggtgaccaggtgcgttaccaatgagcagtaatatttttaaagaactcttcttttctaagaggtagatctcaacaatggcttaaaatattcagtaaaccagccagtcgcggtggctcacacctgtaatctcagcacttttggaggctggggcaggtggatcatgagatctggagttcaagaccagcctagccaacatggtgaaaccctgtctctactaaaaatacaaaaattatccaggcatggtgtcacacgcctg

SEQ ID NO: 4298 - DNA, 1074 bp, Homo sapiens
aagttaaaaaatacaactcttctctaaatacagcttttttaaaaaaagttatgttcacaaaataggtttttcattgtttttaaattaatgaatattttttaaatttctctgtttttatttctaatgagaactggtagatataaatgacacaaacaaaagatgtttaaggtcctcaataatttataaaaacataaaaatgtctgtgttttatatagatatattttggtcctgagaccaaaaagttttagaattgatggctgtttattgaggagtttatgatataactaagctatgtcaactgtttgcatgctcagccgtatttgagattgtaggttgtagtttttaaaatttctttctcttgatatttctaaatcgggcttttattttcacatattgagtctggcttctgttgattatgttaattaattaggttgaacaaatgtaaaagtaagtaggtttttagttagtaaatatcttttcaaaagccttcaattcttccatcagtagcgaaactaaaggtcacatggattggcaatagttttatgtcactcctttcgtagcactgccttgtcacctcagtatctcttcaaaataattgtttttaacatgaaaaattagacgtgctttctaatccaggtctgtcatccagttgtgattctgatttgggtgtatcataaggtagacattggtttacttaccaaaattaggaagcaacctagatactctttttcaaaaatactgcttttgaaactcttcaagttattttacaggaagatttcctttccttttttattagtattacttgactggcttaagattcaattgcctgtgactcttatgtcatttttctcaacaaaatcattatctttttcattattaaatacttattaagcttttactaatgtgccaaatgttgtgctggatactactggtaataaagtgacaagcaagacagatacagcacccgcctgcatggagcttagggtcttgcagaggagaaaaatgttaaactaattagtatatgaataattgtttaaattactgtacagggtcaataagaggatacaacaaaga

SEQ ID NO: 4299 - DNA, 1030 bp, Homo sapiens
aaacggtattagcactctcttctgcccctggaaacatgaggactctctgactgctctgggggttcccgttcttttggaagccctcagctggtcttcagcagcagtgatgacattaaggaaaattgcattctgctgcagaattcagtcccttcatctttctcctttctctagagcatgaagctaggggcccataaaggatccaatatcaaaaggaagagggtaataccactacatggagaagaaaaaaataataattaccaaatttcctgaatagtaaacagcttttaaaaagaagaaaaagctgaaccctttgatagcttggcccttggtctgcccgtgaatgccttaaggattatatcatcagactgactccagcagcccgcgctattgtttcagaaagaggaaactagaaagaaggaaaagaagaagaaaaggggatgggtgggagcatgtctgccttttggggaggagagcgtttgatttttggaagtgcagttatcaaatgtaaggctagaaagacaaattgaacaaattctcagtgtctgtgggcaggaggtttctggggccattttttccttttggggggattaacatagcctttggattcaataacttttctatcacagatgaaattagctccgaagagaaataagcgacctgagattgcccagaaatgttattcctgaaaaccatcacctgggggcagtcttgggactgttaatttcctctacctcactggtagataattcactactttttttcaacgatgtagtgtttctttatctgtggttgaggagtgagaaaaatgggcaagagaaaaggaggcttaggcactagaactttcactctcctcaaccagccaggaagcgaccccatgtgaatgcgcaggacgttcttgaagtcgcagaagttttcctttggagctctgaagcggagagcctcgaaagctggaggcggaggggtgaggccgtacacactaactggtccaccgacccttaagatctccgcgccggatgagatcgagaagccg

SEQ ID NO: 4300 - DNA, 1033 bp, Homo sapiens
caggcagatcacctgagctcaggagttcaagaccagcctggccaaaatggtgaaaccttgtctctacttaaaatacaaaaaattagccgggcgtggtggtgtgtgcctgtagtcccagctactcgggaggctgaggcacaagaattgcctgaatccgggaggaggaggccgcagtgagctgagagtgcaccactgcactctagcctgggtgacggagtgagactctatctcaaaaaataaaaacaaaaagaagactgaaaacaaaagcaaaaatgatatagaaaaatgagaaaacagaggcctcaagaaactgcaggcagaaaccaaaccaaaccaaaacccagaaagtatagagagtaaaatgattgctcagaaacttcagactggtagagtcagagaagaggtgtcatcataatgtctaagaatcaggctactgccattgaggaccattgaaaataagctttttgagagctttgtattattattatttctctttctttgagactgtcataaaacagcatttgagagctttttctaagaatgctggatttcctatagctgccttggaaacttccagttcttgaagtgcttcattctttgtgaggccggttgagcctggatttttccgagatgcaggaagctactcatttctgtagtctgctcatatccacatattcacccactctacctaagcaataattttttatctttctctttccactttacctctattaggcaaatgcctacaccaaaccagaaccctactgaaaggcagtatgaaaaatgtagtttccaggctgcagcccctgaaaatcaagaggtagcatagaagggagagaatggtgctgagatgtcaacagataatccagtacactctctaaaaagtaacaggaagctatttgtacattttaaggatacagcaaatttgatatgacttatacttttaaaagagaattgattaaaatacagagaatgagttttaggaagagaagaatatctggggccatctatttagaggctatttcactagtct

SEQ ID NO: 4301 - DNA, 1047 bp, Homo sapiens
atcatgtgtctaactattgcgttcctaaggactcagaagaaatggatgatgtgaccaaagagctccaggagaagggctgtggggctcgtaccccctcaccaagtttgtctgagagctctgaagatgaaaaaccaacaaaaaagcgcaaaaaaagacaaaaaggaaaaaaagaaaaagagacaactgactgggaggtacaggcagagcaaccatcctcttcgtcacccagaagcaagacagtaaaggaagaggacaaccctggccctaagaagcacagcagcaagaactaggagagagctcagaagtcagtgcccagggaggggcggaagctccccaaggccaggactgcctactctggttgggcagagaaccgagagagggagctgaagaaggggaaacccaagcacgagcacaggtcctcaagcaggagggaggcaagagaagaaaagaccagggataaggacagagggcggagctcaggcacactttctagcccgtacaacgggcgttctgaagggcgtagtcatagaagtagaggtaggagctgagataaatcccataggcataaaaggacccagcgctgccgggagcaggagtctttgaattccagtgactgtaggcgtcactgaagactgttcagctgctcggtagatttggaaataattatgttttttaaatgcagtcaaattcagttggattgttactatttttgtatctaaaactcctggggctggattcttttaactccttgagtattagagtcattgagagggctgcagtttcaacagctacatatcctagatattcttcgtaccattcattgtccctgaaccagagtacgtgccctgaatgttgattcataaatatggctcttgaacccgtagaaccaattgaagatggaattttcaggaaagggaaaataccagataattccagaattctagttttgtgtttgatgtttagagctcagcatcgtgggacctttccagttactcggtttggacagcttgatgtgaatgaatgggataggatttttaagatcaacca

SEQ ID NO: 4302 - DNA, 1043 bp, Homo sapiens
tttactatagtaacctttttggtatctgtatatatcccataacatcatgctgtataccttaaatatatacaataacatttattttttagaagtttttataaagagcttcaaagaaaatttaaagacatatttacttgtttttttaaagtaaaagaaatagtttactgcttatttaaaaaaaaaacaaacacatatctcaaaaccgtttgggctggggtaattatgccaaaaaacaatctcaagatttcaaagggggaaaaaaaagtccttttggagagcaataattgatcatggaagttgaaatagcgcatgccatccatactgcttcatctggaaaatggtatacaatcaatatttttttttaccaaaggaaataaatatttgctaagtttaaatttacatttttctgagagattacagcataatgaaaatttcagagctactgtttaaatggaagaaataaatggagcaaagtcaactatgtgcagtaattttatggaatcaatgcaaatgtgatcctagaactttgatcccagaacaaagtaacagcaacttcatctatgattatagccccttagttgatggctgtttgtttatttgacatggtctatgtaataatgcttcctgcctctcagcactactacctacatacagttgtggtttggtcagtcaccacaacccgtgcagaatacttttattctactctgcattgccccaggtcttgcacagtcttggaagagaaggccagtgtcctggatgtgaatttctgacagaaatagtaaccagattacagatcctgaacaactgaccttacttaccttatcagtttaagacattagtcaagtgtgctattaatagttttctaaggctgccataaccaagtaccacaaactgggtggcctaaaagaacagaaatgtattctttcacagttctggaggctagcagtctgacactgaggtgttggcagggcatgcttcttaagactctaaggaagaacccttccttgtctcttcctagccgctggtggctcttcgcaatcctt

SEQ ID NO: 4303 - DNA, 1116 bp, Homo sapiens
ggaataaagataagaattacaattgacttctcttcagaatccacgcaagcaaaaagagagtggagtgaaatatttagtgttaagaggaaaaaaaatcaatctggaattctgttccctgtgaaattattatttaaaagtgaagaagaaataaatactttcttagacaaacaaagatttagagaatttgttacaggacacctgccttgcaagaaatgttaaaagaagttcttcagagaaaaggaaattgatataggtctgaaatttggagctacataaagaaagaaaatgcatcagagaaagaataagtgaaagtaaaatggaaactttaatctttcttattcctaatttagctaatagataacaattcattcaaaataattatagcaacaatgtatttgattacatatgcatatatatatgcttatttatgcttatatataagggaaatgaatgacaccaatgatacaaggatgggaggaaggaattaggcatattttgttattactaggtatttgtaccccctgtgaagcagtaggtgttatttcaaagtcacttggattagtggtaaatgtatggtgcaaagtctagggcaatcatgtagaaaaataaaaaaagtgtaatagatatgctaaaaaaggaaagaaaattgaatcatataaaatgcccaattaaaaactacagaaaagtatggaagacaaaaataagaacaaaaaaaaggcagaaaagtgtggaagacaaaaataagaacaaaaggccacaagtagaaaacagtagcaaaaatggtagatgttaatccacctatgtcaataatcattttaaatgtcattggtttaaatataccatttaaaagacagattgttgaagtggatcaaaaaaaccaacaagaatcaacttatgttgtctacaagaaacccactttaaatataaagacacatatggatttaaagtaaagagatggggatataccatgataaaactaaataaaagaaactagctaaaaggggatcaactgtattaatttcagacggaacagactgaatgtcaaggaaagttatcaaggataaagagaaacattacttaatgataaagaggtcaattctctaaaaagacatgata

SEQ ID NO: 4304 - DNA, 1050 bp, Homo sapiens
tgtgatgcctccagatttgttctttttgcctagtcttgctttggctatgtgggctttttttttcttacatatgaattttaggattgttttttctagttctgtgaagagtgttggtggtattttgatgggaattgcattgaatttatagattgcttttggcagtatggtcatttttacaatattgattctacccattcatgaacatgggatgtgtttccatttgtttgtgtcatctatgatttccttcagcagtatttcaacgttttccttgtagagctctttcacctctttggttaggtatattcctaagcattttattttattgcagctgttgtaaaaggggttgagttcttgatttgattctcagcttgattgctattggtgtatagcagtgctactgatttatgtacattgattttgtatctgaaactttacagaattcatttattagatctaggacctttttggatgaatctttgggttttctaggtatgtgatcatatcattgccaaagagcaacagtttgacttcctcgttaccaatttggatgccctttatttctttctcttgtctgattgctctggccagggcttccagtattatgttgaatagaattggtgaaagtgggtatccttgtcttattccagttctcagaggaaatgctttcaacctttccccatgcagtataatgttgcctgtgggtttgtcatagatggcttttattaccataagatatatcccttctatgctaattttcctaagggttttaatcataaaggaatgttagattttgtcaaatgctttttctgcatctgttgagatgatcatatgatttttgttttcatttctgtttgtgtggtatatcattacgtttatttacttgtgtatgttaaaccaaccctgcatccctggtatgaaacccacttgatcatggtcgattatctttttgatattgtgttgaattcagttagctatagaagatttttgcatctatgttcatcagggatattggtctgtagttttctttttttgttatgtcctttcctggtt

SEQ ID NO: 4305 - DNA, 1046 bp, Homo sapiens
tcaaaaacaccctcccctccctgacacacacatatcttatatgtacatggaatgataaggagtatcaactacttttcttcactgattaacatagtctctacttgcaggcagatttaattgggaagccaaattattaagtaagatagcttgatgggtatggaatcagagcaaagggagttcattaaagcacctcattggctagggtaatcaagctatcattacccaaagatccatctccagtatgggacacacgtgttccttgggcaacacattgctggcctgtgccatagtgccaattgacttgggcagttctttaaaacacaaggccagagttttcccagtagagcttcttttttaaagtttccacccttcaagggaacatattctttctttagatatgttaatgtgcctaactttgtttctataagtgtattaagtcttgtcctcagagttcttaacactttttgatgaggaagggtgtggtcactatttcctttgattaaaatgtggatcttctatcttgaaaaatgcgtatatgcattctcaaaactgtatacagtttcacaagttaataaacccaagttaagaactcctacatttttttcctatcctcagagagctgattttttcttctcaatttctcttacttttcttttttttctccatcacccgcctcacacccatttccccaagtccccagagtccattctatcattcttatgccattgtgtcttcgttgcttagttcccacttgtgagaacatactatgtttgattttcccattcataagttacttcacttagaatagtggtctccaacttcatccaggttgctgtgaatgccattatttaattcccttttatggctgagtagtattccatggtatatatgccacactttctttacccacttggttgatgggcatttaggctggttccatatttttgcaattgtgaattgtgctgctataaacatgtgtgtctacatatctttttcatataatgacttattttcctctgggcaaatacccagtagtgggattgctg

SEQ ID NO: 4306 - DNA, 1064 bp, Homo sapiens
ctttctctcttttactcttatcactcttagtaggattctttccattgccatactattcttcccgccccccaccacaccccctagaatcagtctgactttgttaatctcccaaaagcagagctctaattatgttgttcccttgctgagaagcctgtgggggcttctcataaagtccagacttcccacagaacgtttaaaactttgtacagtccgggccggcgctgtggctcacgcctgtaatcccagcactttgggaggccgaggcgggcagatcacgaggtcaggagatcaagaccatcctggctaacacggtgaaacctcatctctactaaaaacaaacaaattagccgggcgtggtggcgggcgcctgcagtcccagctactcgggaggctgaggcaggagaatgatgtgaacccgggaggcggagcttgcagtgagccgagatcgcgccactgcactccagcctgggtgacacgagtgagactacgtctcaaaaaaaaaaaaaacaaaaaacaaaaaactttgcacagtccggatccaaaatacctctctagaccattgctatcttacatagatcctttgccctagagttcacaaaatttccaagtttcctcggagctactcccttttacttccttattaatgccattacctcttcttggaaaggcctttcttcctatccttatctgtctgtactctatcattctttaaaaacaaaacagaaatatgtacagctttttgcaatgtcaattataccacaataaagtgttttaaaacaaacagcaacaaccaaaaaacctcagatatcggttccaaaaactttgttcttaagctggaaatgattgcttccattttgaaattttataggacattgtatctctcttatagaaaaaaatacatcctttatattctgtctctgtttttagacatttgctttaagatagatggaagagcatgctctttttcatttagaccttttgtgaatacctcagcagaaaacagtttagtatgcaccataccacaggtgcagcataagctgctactcaacaggcagacctcacca

SEQ ID NO: 4307 - DNA, 1063 bp, Homo sapiens
tccttctgagatttcgtatgcatctcttcagtttactgtggacattccttttcccatatttctaagcaatggagaacagccttttggtagtatcttgataagattcttgctcatttcccttggaatttttgatgtagcccctgagccagatgcaacttaaaaaattacacacatttgtgtccaggagcacagttatcaccaggtagatgcatacaaagagagcttctactaccttttcttgtaaagtaagctaatgtcgttgtctgtataccaaattgctttaataccatatgctcatgtgatttgttttactcttaccccaaaccaatctctattgactcccacaagtcttcagctggtgatttcagggtcgaagagatgaccttaagctggccactacgcttgcattgaagtgcctgtgataaaggcaactttgggaaattttgcaacttgatcactaaccagcataaaagcatgaaaaaaaattgatttacaagaccgtgattgggtgtttggatcttatgttttctctgatttcaagtcttaccttcaaggatttatttatttatttacttatccacaaggaacaatttagcactaaaatgttcttatctttttctgatgtgaggagaatcatgagactacaattataaacttaacacaaatagaagggggctgagaaaggtggtatctacagaacagttctacgatctggaagtgaaattccagagagtacacttcaagaaagcataccaagtcccactgtccatgaggctgactcttgatggatgacaaggctattagggttggggaacaggccagaggagagcaaagtctgcctagatttggtcatttgctgtgggatgtgcctggtgggacagctgtctcatgagtctgcccactgtctgaggccgtgttcttgaagacccctgagtaagagacaatttcttagacattaatcactgtcattcatttagctctgtagtactttattgagaaagtctccaagtatctactaaaactatccaatatgaccaaaataaagatatctcctttctcattt

SEQ ID NO: 4308 - DNA, 1051 bp, Homo sapiens
gctgtctgttaacaactcacatagctcacataaacccctggtgcagtcttaacctgttttctcttttgtccttcagtgaaatagatgattaaattgcatgtctttctgctgtaggagtgttacacaactaggaccccaatccagataacacacacatgtggctgtgtagatctttaagattaatcttgatttttccctgccatcctctatagcacatataccctgagactctattcaactatctgtatgtagtaatgattttcatgaaaaatgtttaaatgcgtaaatatgatgcaattactgcagactacacctttaagctacagtatgtatgatggttaattttatgtgtcaatttggctgggccacagaatgccaagatttgtggtcaaacattattctgggtgttttgtgagtatgttttttagatgaggataacatataaatcagtggacttcgagtacattgcccaccataatgtgggtgggcctcatccaatcagctgaaacctgaatagaacaaacagactgatcttcagaggaatcttctgcatctgctctcttgggtctccagcctgtcagctgaccctacagattttggacttgccagaccccataatggcatgagccagttctttatgataaatcaatctctctctctctctctctctatacacacacacacacacacacacacacacacacacacatcctattggttctcttaggaggaccctgattaatcagtgtgcaaaaacaaaaagaaaagacaagtatatgtcctcaatttatctggctattttttgaagatgtgttttatattaaagagatgcaaagatcactggagacaccatccgcaaaattgagagtctggccacaactcttctagtaaaacctgactttcagtcactttccctttctagccttagtttcatctctgtaaaagaaggttaaacgaagggatttccaaggtctgtgatttcctgaaatgcaaacatggaacatttgagccagctgctgagaaagtgtctagagataataattctgagggc

SEQ ID NO: 4309 - DNA, 3246 bp, Homo sapiens
aattgacctacgcatctcctcctccttggacattcttttgtcttcatttggtgcttttggttttgcacctctccgtgattgtagccctaccagcatgttatagggcaagacctttgtgcttttgatcattctggcccatgaaagcaactttggtctcctttcccctcctgtcttcccggtatcccttggagtctcacaaggtttactttggtatggttctcagcacaaacctttcaagtatgttgtttctttggaaaatggacatactgtattgtgttctcctgcatatatcattcctggagagagaaggggagaagaatacttttcttcaacaaattttgggggcaggagatcccttcaagaggctgcaccttaatttttcttgtctgtgtgcaggtcttcatataaactttaccaggaagaagggtgtgagtttgttgtttttctgtgtatgggcctggtcagtgtaaagttttatccttgatagtctagttactatgaccctccccacttttttaaaaccagaaaaaggtttggaatgttggaatgaccaagagacaagttaactcgtgcaagagccagttacccacccacaggtccccctacttcctgccaagcattccattgactgcctgtatggaacacatttgtcccagatctgagcattctaggcctgtttcactcactcacccagcatatgaaactagtcttaactgttgagcctttcctttcatatccacagaagacactgtctcaaatgttgtacccttgccatttaggactgaactttccttagcccaagggacccagtgacagttgtcttccgtttgtcagatgatcagtctctactgattatcttgctgcttaaaggcctgctcaccaatctttctttcacaccgtgtggtccgtgttactggtatacccagtatgttctcactgaagacatggactttatatgttcaagtgcaggaattggaaagttggacttgttttctatgatccaaaacagccctataagaaggttggaaaaggaggaactatatagcagcctttgctattttctgctaccatttcttttcctctgaagcggccatgacattccctttggcaactaacgtagaaactcaacagaacattttcctttcctagagtcaccttttagatgataatggacaactatagacttgctcattgttcagactgattgcccctcacctgaatccactctctgtattcatgctcttggcaatttctttgactttcttttaagggcagaagcattttagttaattgtagataaagaatagttttcttcctcttctccttgggccagttaataattggtccatggctacactgcaacttccgtccagtgctgtgatgcccatgacacctgcaaaataagttctgcctgggcattttgtagatattaacaggtgaattcccgactcttttggtttgaatgacagttctcattccttctatggctgcaagtatgcatcagtgcttcccacttacctgatttgtctgtcggtggccccatatggaaaccctgcgtgtctgttggcataatagtttacaaatggttttttcagtcctatccaaatttattgaaccaacaaaaataattacttctgccctgagataagcagattaagtttgttcattctctgctttattctctccatgtggcaacattctgtcagcctctttcatagtgtgcaaacattttatcattctaaatggtgactctctgcccttggacccatttattattcacagatggggagaacctatctgcatggacctctgtggaccacagcgtacctgcccctttctgccctcctgctccagccccacttctgaaagtatcagctactgatccagccactggatattttatatcctcccttttccttaagcacaatgtcagaccaaattgcttgtttctttttcttggactactttaatttggatcctttgggtttggagaaagggaatgtgaaagctgtcattacagacaacaggtttcagtgatgaggaggacaacactgcctttcaaactttttactgatctcttagattttaagaactcttgaattgtgtggtatctaataaaagggaaggtaagatggataatcactttctcatttgggttctgaattggagactcagtttttatgagacacatcttttatgccatgtatagatcctcccctgctatttttggtttatttttattgttataaatgctttctttctttgactcctcttctgcctgcctttggggataggtttttttgtttgtttatttgcttcctctgttttgttttaagcatcattttcttatgtgaggtggggaagggaaaggtatgagggaaagagagtctgagaattaaaatattttagtataagcaattggctgtgatgctcaaatccattgcatcctcttattgaatttgccaatttgtaatttttgcataataaagaaccaaaggtgtaatgttttgttgagaggtggtttagggattttggccctaaccaatacattgaatgtatgatgactatttgggaggacacatttatgtacccagaggcccccactaataagtggtactatggttacttccttgtgtacatttctcttaaaagtgatattatatctgtttgtatgagaaacccagtaaccaataaaatgaccgcatattcctgactaaacgtagtaaggaaaatgcacactttgtttttacttttccgtttcattctaaaggtagttaagatgaaatttatatgaaagcatttttatcacaaaataaaaaaggtttgccaagctcagtggtgttgtattttttattttccaatactgcatccatggcctggcagtgttacctcatgatgtcataatttgctgagagagcaaattttcttttctttctgaatcccacaaagcctagcaccaaacttctttttttcttcctttaattagatcataaataaatgatcctggggaaaaagcatctgtcaaataggaaacatcacaaaactgagcactcttctgtgcactagccatagctggtgacaaacagatggttgctcagggacaaggtgccttccaatggaaatgcgaagtagttgctatagcaagaattgggaactgggatataagtcataatattaattatgctgttatgtaaatgattggtttgtaacattccttaagtgaaatttgtgtagaacttaatatac

SEQ ID NO: 4310 - DNA, 1074 bp, Homo sapiens
ttccagtttttctgcagagattggaattgttactagtctttaagtaatttctgggagttttgtttcatttctttttataatattatgagcatgtttgttctatttgtcttttataaataatctatagtgaataggacttttcaaataaattaaattgacttagagataaaatgaaatgtgatacatgggaaaactacagaaggactgggtaaaacctagaaaacttcattttctgtaggtatctatagtaagctcagtcttttaaatacttctaagcctttgattatagaaaggaagtgggcacctcagagcttctggcacccaatctagcttgtaagaaagtttaagggatatgggttgctcagaggtatttgcctctgtatgatcttagattccagaaatcttactttgtagtagtaagtcacaggcaccagatacatagctgatgttgctctgtttgcttcttagctcctgtttcaatggtggcacatgtgttgatgggattaactccttctcttgcttgtgccctgtgggtttcactggatccttctgcctccatgagatcaatgaatgcagctctcatccatgcctgaatgagggaacgtgtgttgatggcctgggtacctaccgctgcagctgccccctgggctacactgggaaaaactgtcaggtaattgacttccttcccattcactcagctcccctagagcagctgaatattatacctgttcactttctagtctgaataagttccttctaaaagagaaaattgtggatctcagggattccctgagataatctaggtaacttcttaataacttgcagattccaaaatggtgctggcaatatgatatagattcacaaacataagatcttgaaaagaggctaaccaagaactgcagaaaaatacatgtgggaaataaacacagatttttgttttttgttttttgtttttttgttttttacattggaagcacaaaaagaactgaagaaaatagagaataatcaaaataaccttttaaaggtcagatgcaacatctaagtgtttaataatgataattgttgtatcttgca

SEQ ID NO: 4311 - DNA, 1048 bp, Homo sapiens
aaaatgacctatgtagagagcagaggtggagagggtagttagctaccctcattttcttttactgtttccaaatccatttcttcaaatttgtcaaaggctctggtctttacccaaggcttcatacatgccaagtttgaaaacaaagtcctttttgaattgctcaagcatacgaaaaacatcccatgccgtcacagctgaaaatgcctttccctccccacatttagataactcactaaaagggctgaatagatctttgtgaaaacttccaaaagcaatttgcttccgggctgttcctcagacatgagaaattatagtaggaaaagaaatttgagagatttacaagcaattgactggatgtctttagaatcgaggggctttagactttgctatcattcccatcataataaacatactggaaacctgggtgagtggtgggttggcaagcactttgttttctctggcattatatcattataccaggatatatcaggtgttttctggggaggacagagagggtatggtataagtagctgtcactgagaaggtgagaagtcaatatgagtgatctgtaggcagcatggaaaggaaggcccggaatctgtcagaacctgccaaagatgttcctgcagttatttggagaattaaagcaagcaacggtcagacaacattaaaaaaatgttgatctgtaatgggtggagaaagacctggcatgtatcagggacctgggtggaaaatccattaaaagaggcattatgaatagagtctgaagttctagagtaagaattcctgttccacttatatggcctaagttggtagtttggtgtttggataggggagtggatggaagaaatattttacagtttgtcagctaaaattgtggtagtcactcactgggtacttaaagtgagatatactacccagagttaccttcagtgcgttctctcatctgtgcttttatgatagtaaagttttaagtaagtttctttgtgtttcaagtaacagaccaacttgagctagtttaagtcatcatttacaaaaaataaacaac

SEQ ID NO: 4312 - DNA, 1003 bp, Homo sapiens
attctacaattttttaaatgtactgaaattattctttttgaatcctcctatttatttctgtgacttctttggtgacaaagttagaaaaaagtggaggtcagtagggagatatgaagggacgcaggtggaagcagtgagcctgggcgggtgatggagtgggcgatacgtggcacaggggtcagtgagttaatctgggctcattcagagaatggaagttgtgtgccaagaaaactggttggatagggataggtcagggattccctcttgcattctcacacttgggggcatgcgtcattttcttttcttttcttttctttttttttttttttttgagacggagcatcgctctttctcccaggctggagtgcaatggcgctatctcggctcactgcaacctccacctcccgggttcaagctattctcatgtctcagccttccaagtagctgggactacaggtgcctgccaccatgctcagctaatttttgtatttttagtagagatggggtttcaccatgttggtcaggttggcctcgaactcctgatctcaggtgatccacctgcctcggcttctcaaagtgctgggattccaggcatgagccaccatgcctggccgcatgtgtcattttcttgggtgttatactgatcgtatatttgcaggtttgcttttgtgacagacttcttctgggggaaaaaaagtatccttctatctttttacttttgtccagttccaggtatccctgtttttttcttcactcttccttccttgttcatgggagtttttcttgaggacttcaagcccagcttcggagaatcctggttgtgtcatctcatctcctttctgctctcttctctacctaggctttccaccctcacacctcccggggtctgaaaatggaaagataagggtgtttccctgaaagttgctcttctgtgtggggatgacaggttctaaagactcttttctggtccctgccctcattgccatgattaatcagttaagtg

SEQ ID NO: 4313 - DNA, 1046 bp, Homo sapiens
ttttttgagatttttttcattgagttggatattgcaaacttgtactggattgagagaatatgtacatttagtaaagtatatttgcttttttttttttttgaaccaagagagtcccctgaacaccctactgacaaaaactaaagatgaaatatgatgaataaatatttgagagaatcacatggtgttgagttgtctctgccacatgattttgatccttgagggccaggtctgtgctacacacatttcttctctgtactacagaacttgtctggcatgtgccccaaattcagagtcaactgagcagcaggtcttagtcacagcatctatgactcctgctttcccacctttagaacattctataggagaggctgatggtgagttggagtgtgtttctatgttcttttttcctttgaagagataggatcagttgaaagctgaccccacccacagactttttttgctatctcttttaattaattaaggagtggctgaaattttcctctttgttgacttatgcattggcgggaactttaaaattcatctagtctttctgtccatcccatgctggatctgatgtttacaacattctagtcaagaggtaccatattttctctcttcttgaacatctcttgtggtagacagctctccacagcagtttattccatctttggccagctctaattcttagaaagatcttcttatattcagctgtaatccgtctcctcatgacttgtcctcattgacatctactcagaaatttgtctcagagtcctgagacctgtgcaggtgatagggacccaaagagatgcttgtctgtagactttactgagctgacacccagctctccataaaaggagtcaaacccagtgaggagcatgtctgaggtgattgctcaggtaaagcatcttagccctacttgtttcatacctccctgcacaggtgggcactggtgggagaataacatttatcaagcagtgtttccctaacctctcttatgataagaatagctcaggtgttctcatggagattctgattcagtgcatctg

SEQ ID NO: 4314 - DNA, 1032 bp, Homo sapiens
aataatctctgttgtttatgaattactcagtctaaagtattttgttatagtagcctaaagagactaagagagcatcacctgccctgtcacctcatcaccgcattactgaagctatactaacaacagtcacttttagtgggtgcttcatgcatgagaataaagggaaaaaattgcaaggcatactaaaatccaaaaaaagaaaaaactacaatttgtgtcaacagagcaagcttcagaagcagacaaagatatgattttggaattttttttaaacctctggagactatgctaaggacctaacgaatgaagtagacagcattcaagtgtagatgggtaatgtaatcagaaagacagacatcgtaagaaccttcaacataatgtagtgataaaaaatgtggtaaataactgaagaatacctctgatggcttattagtagactggactcagccgagtaaagaatctctgagcttgaggatttatcatcagaaatttcgaaaactaaagaaaagacacactgaaaagaacagaagatgatatccaagactgtgggacaactacaaaaggtgaaacagagtaatgagaataccaggaggagaagaaatagaagaaagttctgcaacaaccatgtctgagaacttccagtgttaatgtcagacaccaaaccaaagatccaggaagctctgagaacaccaggcagaataaatgccaacaacctacacttggacatataattttcaaactatatgaaataaaagataaaggaaaactctgaaagaaaccagaagtggggcagaaaacaccttacctacagagacacaaagataagaactgcattcaacattgcagaaactgtgaaagcaagacagtgaaatgaaaaattcaaaatgttgacagaaaaaaacccaccaacctaagtttctgtacccactgaaaccacccttcaaaagtgaaggagaattaaggccttcctcagaaaaataaaaattcaagaaacttgttgccaggagacctgtcttgcaagaaatgttaaat

SEQ ID NO: 4315 - DNA, 1045 bp, Homo sapiens
atggtcttaatgcttgtccctcacataggattccagaacattcatgttggggtctgagttttagcccttatcataggatttcagaacagtgctcttggggtttgaatgtttgtccttcacataggatttaagaacactcctgctgtggtctgaaagtttgtccttcacataggattccagaacactcctgctgtggtttgaatgtttgtccctcacataggattcctgagcactgctgccgtggtctgaatgttttcccctcacataggattctagaacactgttgctggggtgtgaatgtttgcccctaaaataggattccagaccactgctgctggtttctcaatgtctgtccctcaaaaaggattccagaatactgctacgagggtctgaatgtttgtctctcacttaagactccagaacactgtttcgagggtctaaatgtctgtccttcacataggattccagaacactgttaggagggtctcaatgttttcccttcacatagcattccagaacactgctatgagggtctgaatgtttgcccctcacataggattccagaacactgctgctggggtctgaacgtctgtccctcacataggattctagaacactgctgttggggtttgaatgtctgtccctcacatagaattccagaacactgctgcgagtgtctgaatgtttgtcccgcagatgggattctagaacactgctgcgagggtctaaatgtctgtccctgacataacatttcagcacactgctatgaggttttgaaatgtttgtccctcacataggattacagagcactcctgctgtggtctgaatgtttgtccctcacataggattccagaacactgctgctgggctctgaatgtttgtccctcacataggattccagaacactgctacgaggttctgaatttttgtccctcatataggattccagaacactgttacaagggtttgaaagtttgtccctcacataggattccacaacactactgctggggtctgaatgtttgtccctcacataggattctag

SEQ ID NO: 4316 - DNA, 1036 bp, Homo sapiens
ctaattatgtacttttagtagagacgggggtttctccatgctggtcaggttggtctcaaactcctgaccccaggtgatctgcccatcttggcctcccaaagtgctgggattacatgtgtgagccactgtgcccggcccttaaattctatttcttaaaaagagtccgttcaagattgatattatagatactcctcaacttacaattgtcttatgtcttaatgaactcatcctaaattgaaaatattgtaagtctaaaacgcatttaatatatttaacctactgaatatcatgacttagcctcacctaccttaaacttgctcagaacacttacattatcctacaattgggcaaaatcatctaccacaaggcccattttaaaatattcagtatctcatgaaatttattgaaaactatactgatagtgaaaaactggtcatattgatgctcatcattaatgtacacagatgaaagcaccattatcaagtcagaagagcacaagtcaaaccactgtaagttgaggattctctgtactttcttaaatgtttgatagaattcacctaagaaagcatgtagcctataattatagaaatctttttaaattaaaaaaattcttcaatacatagagaagctattactttttctatttcattttgcatccgttttaggaattagttttacaaataatttcccatgttattttaattgtcaaatgtattggcctaaagttttcataattatattgatgtctgtaggttctgtagttacatcctctatttaattcccattatctacattatgtagcttctctaatttttttcgagataaatcttgctagccattgtttattaaaaaaatttttttcaaagaaccaatttgtgggtatattaattagctccaccttttgttatttgctatgttgttggtttacatttttatctttatcatcttccttcttcttaatttggatatactttgctcattttttagcctcttaaaaaagaacctaaaggtcattgattgaagccttttattttca

SEQ ID NO: 4317 - DNA, 1025 bp, Homo sapiens
cctaataattgctaaattagagacgtaaaagtaaaacaaaggcacattgtgtttgagtaggaaatctatagacatctagctggttttcccatccagccaaaaaattctaaatataatcatggtacctgcactcaaatttatgttaaataccaacctcaataaaatcactctttcttctcattctttttgttatttatatgttgctttccttaagggaagaatacaaatgccttgctaagaaccattctgtttggttgtaggctgcataaggggagtgaacacaaagtacatttgaccacaaaatgactctttaaaagtcagaactacggtagcatgaagccaaacgaggtaatctacaataaaattttctatgcttcttttccttctttgctctctttctactctaataactgcgattcacacaggtaatgaagagtgtaattccttgatagaaacacagctccaagattaatcctttctttaactatgaagttcgcgtgtccaaaatctgtggtagttgctgtctgatttttgatcactgatggtgatacagatatttatcatcaactcacaacttcccaaatctttgaaaagtcttactattgatggttcaactagtagaaacatgatgtaaaatatctgaaaataaagtttttatttattagaatgtaaataataatacaaattgtaataaggtgtaaaagttctttcttcactgaagcagtaccatgttgtcctctaccccacaaatgcactactcccccgtggtctaatgtattttaaaagtcttgtaattgctattaactcagacaagtttacttaacttgttctaagcttctggcatttactacagtttactttcaatcactcaaccatctctgttatatatgttgttttccatgagaaatttgtttattagtaattaagattcttcagggataagaaaatatttgaataactaagtttgtgcataaacacattaaggtcaaatacccatgacattattgtgtgtttctgtgtactag

SEQ ID NO: 4318 - DNA, 1064 bp, Homo sapiens
ggttaaatttttagctaagaaattatgcttcttacatgataaaaatcatacatgccaaaacttaccatactttattaaacaacataatgtaaggtctgattcaacagaaatattggagtggtgattttttaaaatatgtggaagtatatatttgttttcaaaatattagaaataaccatgatggaactataaattcaaacagtttgagctaagcagataaacttgcatgcatgaaaacacattaaacagactcatttggctgggaatattcattgcaactctcaaggctagaagtgtttttgtggctcatctcagtcattgcttccctcccgttgtattcccattctatcattaaataaatgtaattcatctctaaatgactatagtaaaaagaatctagaatctaaaacttatttctttagcaatttctttatgttgatctggttcagaaggtcacatggtatatggctgaattagtttcccagctcatatgccacttggaagactgagagtgagaattaggttgattaatgaacaaacattatgagaacattctccagaaccgttgtttagatagcaggactagtctactttgacacataattacacatttagaaaaccccgctgtaactgtacacatgggattttcttgaatagaaaatttgactaaatcaaataattgataaagagaaaaaagaagcagcaagtgaacctctgtctttttgaagttggactttctctttctccaaagccaggaactctacttgtaacatgcctacctcattctttttactattattatactttaaattctggtacatgtgcacaatgtgcaggtttgttacatatgtatacatgtgctatgttagtgaccttgaaatatcttgctgtaagtttctagctctatttttgatgttctctcactatgtggcaaagaataacccggattttataattcaagattcatggttttgtagttattaacactgggattgtcattcagtggcttctggaataagcattgtgttggctttctgtttttataagtatctgtagcagcagaa

SEQ ID NO: 4319 - DNA, 1035 bp, Homo sapiens
tctctcagttcatcctcattacgttgggcaaacagtcatgctgcagggtatagattatgttattctgttactttcaggtagaattggggtctaggttataattgtttctaagtttagattctgaatgagaatcagcagaggtagaccaccactgctggggcctggggattgctgggaaaaaggcaggaaacaaatacagacctgaccatggagggtttgtgtttcatggctcccatctgggtacccaaggaacctacacgtagctcgtgtgtggagagcctacattgcccactcaaagcaattgaggatggaacagtcttggggctggagctcattatttggaatgataaccacatctgcacagagaggacctgataagatgttgtccttccatgtatatctgggaatcctgtgtagggtctctctgtaaggacaggagcagtgttggctccttggcctctagttagcctcacgagtagtctagtaaaggctttgccaacttgtcaccatctgtggatattctggccagctcttgttttcaccctactgacttcttcagacactaggcttttgcttcagaccattcatggtttttcttcctcttcaaatcagtaatcaataaatcctcttcaaatcaataaatttccactcctttaggaaactctgatcttctggtcatgccaaggtttaattaactggtttaattgtttttctgttttcttggtttctttttccttcttcctgggggtttctagtaattttagtttgatgtctcactttctccattttttatttcttagttttcttctgtgattattttcactgcagctgcagggcctaatcctgggttggcagataactagcacttactctgccctaattggaatccgggagagataggaggtgctctagtgtgaaaatgtgtttgctcctctctgcttctggtagtctctctgtaggagtactttacgtattctgaatgttcacttcttatgagatacatgatgtgcaactataggttgaatgtctctgatc

SEQ ID NO: 4320 - DNA, 1035 bp, Homo sapiens; identical to SEQ ID NO: 4319

SEQ ID NO: 4321 - DNA, 1029 bp, Homo sapiens
ctgcagcatttttaaaaagacatatagctgaaattttgtcagtcctaaaaatattttgtatttctctgcccagatttgcatttgggtagatcgtgctgtagaagatatatcttgctttaagatagctgccactgattagtttattttagtattttaatcaacttattgccttgtaatctttcctttttcattctctaaatttctgaaattctatctttcatgttccccaggaaagactagtaagacgtgtttttattaataagacattatcctcatttcaccatgacataatttgggctttctgttccaagttatcctacttgaatgctggacacttccacctgaatatttgtcattttcacctcaacccagcacatcaaaacaatcccttattacctctttaaaagaagcttctctctccagccttttcctagtcagtatcacatcttttgagccaggcatggggattgcagtttcagatttcacctcaagtcttcctcttctggttcctgaagctccggcaacctctactttgaaacattgttggcctcttcatcccatcccatgtcaatatttagcccatgccctgttggctttgacttaactcaatcaccttaacccagtgtcttaaaattcttgattttgagtttcttatccatccagtttatttacacctgaactctttaagcatgaaattaatcattcttctgttcagaagccttcgaatgtgaccacagctttttccatatagacctaaaacttatattcttggcctttgagagctgccttccctacccactgatatatgtttctcgtgcttcctaacacctacatgcttctgtttgcttagtgaccaccccccacccactcatcagcagtttgtattaatttaatgtaaagctgtgtaaagtttattgattgataacatctgtgtcaagatcatggtttttattataaagagcagttcattgtgttttttccttgtcgacgaatggtatctctgttcattagaatacataatattttatg

SEQ ID NO: 4322 - DNA, 1029 bp, Homo sapiens; identical to SEQ ID NO: 4321

SEQ ID NO: 4323 - DNA, 1072 bp, Homo sapiens
tgtggaatgccagctcttctctggcttgcttcctactatcttgcaaaggtgcagtacccatttccttcactcactgaccttaacacaactctgattacactgagaactccttgaggtcaaggacaatgatgccaagaaaagcacttaggttttggcaatctttaatctccaatactttcttgtcgactttatcaatgaatgtatgctggtatgctgtcaagattttttaaaaactatttatttcttttttgtttttatttatttatttatttttttgagacggaatctcactcttgcccaggctggagtgcagtggcgcaatcttcgctcaccgaaacctccgcctcctgggttcaagcaattctcctgcctcagcctcctgagtagctgaatagctgagtagctgaggagccctgagtagctgggctcccaccaccacgcccggctaatttatgtatttttagtagagatgaggtttcatcatgttggccaggctggtcttgaactcctgacctcaagtgatccaccagcctcagcttcccaaagcgctgggattacaggcgtgagccactgcgcctggcctattattattttttgagtggctgctcttagcccagcagcaaactttgagggatataagcttgcagatgagttgaaatgcatacacatgaatgcacaaatgtgaagttaaatgccaaaacaaaaatgtaagccatcaattcaaaagtgataacaaagtgtttatttcagaaacttatactaagagttactgtgagccaagaacttttataaaacctagaaggggaggcagacattttaaataagcaatgtaaggcagagtcgggtgagtgctatactagaggtaaacatcagatgacctggtatgaatcctggtttactaaggacaatcttgatttttgcctgttgcccagaggtaattatgatagcacctgtttgtactatcagaagagtctcagttattaaattatagtcatataaattataaactaagtacagttgaagtgaaaagaaattattagttctgactgggaggttggggaaaggtttctat

SEQ ID NO: 4324 - DNA, 1073 bp, Homo sapiens
caggtggaactggaaggggctcaggtgttacgcagtcggctagaagaagttcttggaagaagcttggagcgcttaaacaggctggagaccctggccgccattggaggtggggaactggaaagtgtgcgaattcatcacaagcatgcctactgagcactggcgggtcagactgcagcccaggatggaaaaccttgtttgcactaaccagaaagatccttgtctgattttggcagaattaaacggtgacttactaatgatagaactggtacaagtagcatcaactacaaagtgaaactcactttagcctacatggatctcactgtacatacatatcaatccctaaattgaatggtggaggttgcaaagtgtatttgcacattttaaatcattctgttttagtttttccacttttattcattcttatccctagccccttctcgttccctcatcccttctgtgggccaataaagtttattcttccccaactttcacaatccatttcatatgttccatatcatatcataaatgcatgtgtgtgtattatttttgccattcagtcaactcctctttgagtgagagcattttttaaatcaaaagcatgcaagttttaagatgagagagcgggaaagagattgagagtctataagaatgactttgcaaaagtgatataatccttatcagaaggtaatcaaaaccaggagagtagtcttgtaatagtagactgcaagtattgggaaggccaagttaaagaacagaggcaagaactatgaaagtgatcatagtcaacttttatctccaatactgtctcagagttgactgttgtacacaagtgaaattagattaggtacagattaaattctacttaaaatttgttctttattgattcctttaggtttctttaaaccaagctcatgctatttagtcagaacatgacttctagaatggtcttccagagtcagaattctctgtttacaaagataatttcaaatgtagtatccctctttacattcagtgtttcaccaaataactcattatagccagaagagggtattgcttctttcatttgtggcact

SEQ ID NO: 4325 - DNA, 1033 bp, Homo sapiens
agtggctcatgcctgtaatcacagcactttgggaggccgaggtgggcggatcacttgatccgctcgaacaggagttcgagaccagcctggccaatatgacgaaaccctgtctttactaaaaatacaaaaattagccaggtgtagtggcgggcgcctgtaatcccagctactcgggagcctcaggcaggagaatcacttgaacccgggaggcagaggttgcagtgagctgagatcgtgccatcacactccagcctgggcaacaagagcaaaactccgcctccaagataataataataataataataattgtaaagcactggtgaaaaaaggaagcgctgtgtgattgctgcttagagttatgacattagatccgtgaaattagatttagaaacatgaaacgagaaatttgagtataatcagtgtttatcaagtattcatgtgcaatgtactgtgctaggtatttaaattagcactaatgctcacaactctacacaaagtaagtggtgtcggcccaattattatagacgaagaagctgaaacactgatttctcttttaaaatgggagtggagaatagtcatgtaactaataaatgccagagctatgattcaaactcaagccttttgtgacttcacatacttcctaagaagattcatttcctagagcacatttttcccaccttatgctttaactcgctctagcatagagttctcttcaattttttttggaagaggcctttcagccttagagattcccttccccctgcctttcctccacagctagttgcatattcaactatgatgttgaagaaatactaggaccacagctcagagttacagactgaaactaaaagcttgtttgttactatgctggcatctcttttagaagatcactcaatgtcatggcttcctaaattcagtttagctagctagtccaaatagctcttagtttttttctaccttttgccatagctagatctataatataaaacctgtgtttgtatttgtgacagaattatcatattttatcttttga

SEQ ID NO: 4326 - DNA, 1031 bp, Homo sapiens
taatgtaaatagtactgcatgcagtgaggcatatttcctaaaatagcaaacattcctgcgttaccatggagagatctgacttggaggttaaggcaagaatgtgctctaaatgctcaaggcagagactgaaaaccttgcagtgattagtagctcaggcagctccggacaacttcatatgagatttttttttagagtagcttttcagtatccccttcttttgctgatgaatgttgaagctggagactcatttacaaatccccgttcaacattactgtctcccagacaaccttcattaataatgtgtctctgaagcaggccttagcagctaaagcaatcattgctctaatccttttgagcagcaaaggaagtggaaaaataggcagctgctttacaacttaatcaaaaatatttactgagcacttgtaatgcacaaggtactgttaggtgaaggaagaagaacacaaagatgtgcaggatttagtctctaccttctagagattacaataggagaaagtcactgatgaaaaaaatacaaggcagtacagaaaggaaaaatcatcatggactggggtcagaagcaaagattttggtctctgaggaatgagtaggattttaccaagtagatatgaaaaggaaaggcatttctttattcattcattcaatgattattgagatctagaaagatactgttccaaatacttcagaagcagtcttagtccactcaggctgctataacagaataccatagactgagtggcttataaacaatagaaattcatttctcacagttctggaggctgggaagtccaagatcaaggcactggcattttcagtgtctggtgagggcccactttctggtttatggatttcctgctgtgtcttcacatggtagaagggattagctaactctctgaggtctctttttataaggacactaatctctcccaaagcccccacctcctaataccattatgttgggggttaggatttcaacatatgaatttggaggggaatacaaactttcaaaccat

SEQ ID NO: 4327 - DNA, 1035 bp, Homo sapiens
ttgaaaatgaagaaaacaatttttttttttttttttttacatagatccaggttgtcagatcctttagggtcaccaccaggaagattatttacagtgaaggacactttttgaaaaggtatagggggcctgaggtagaagagggaatacccagttgcaagtgaatcccaggctcagaagggtcatacagtctcatgattaaggccctgatgcgtatgcagtatggggtcaaactgttggagttatagtctgtgctcctccgctttctcagtgaacaagtcagttaacctcctgatgtctctctgtcctaggcagtaaaatggggatcatcatgtcttcctacttcaaaggttgtggtaaagataaacgaaataatacacatggaagtactttgtacattgtcaaaaccaatgtagatgattgttgttgtgaagatagtataattgtatctgattaattttgtaatacaggcccaagtcatccaaaacagccaggaattaaacttttatttgtataattcagattttatgagaacagcatagagacgcctagacacagagatgtattataaataaaatatgtgtatgtaaaataaaccagccgtctcttctccctgccccatctcttcttgtctatccccatccccaatccaaaataagctgggctcctggttgtagttccctgggtgctaaaaagcaggaaatactccccagacatttgtgtacccttcccatagggctgttttgaaaatatgacaattagcaaagttataggttaaatcgtctattgggcatcatccttgagtcattgttactgcttttgtcttagaaatatggcgtcctttacatgcacttactgcttctgtagcacaaggcagccggagctctcagtctgaacaggtagactctcattaccttttagggctacaggagagctagtgggcattctgaaattcttcacaaagtgatagttctctcactggcctttggtaggagcgtttctatgagaaaacgtgtttcaagcatagaatttcaggat

SEQ ID NO: 4328 - DNA, 1051 bp, Homo sapiens
ccggttgttcctttccatgtttagtgcttccttcaggagctcttttagggcaggcctggtggtgacaaaatctctccgcatttgcttgtctgtaaagtattttatttctccttcacttatgaagcttcatttggctggatatgaaattctggttgaaaattcttttctttaagaatgttgaatattagcccccactctcttctggcttgtagagtttctgccaagagatccgctgttagtctgatgggcttccctttgagggtaacccgacctttctctctggctgcccttaacattttttccttcatttcaacttcggtgaatctgacaattatttgtcttggagttgctcttctcaaggagtatctttgtggcattctctgtatttcctgaatttgaatgttggcctgccttgctagattggggaggttctcctggttattatcctgccgagtgttttccaacttggttccattctccctgtcactttcaggtacaccaatcagacgtagatttggtcttttcacatagccccatatttcttgaaggctttgttcatttcgttttattcttttttctttaaacttctcttcttgcttcatttcattcatttcatcttccatcactgataccctttcttccagttgatcgaatcggctactgaggcttgtgcatttgtcacgtagttctcgtgccttggttttcagctccatcaggtcctttaaggacttctctgtattggttattctagttagccattggtctaattttttttcaaggtttttaacttctttgccatgggttcgaacttcctcctttagctcggagtagtttgattgtctgaagccttcttccctcaacttgtcaaagtcattctccatccagctttgttccattgctggggaggagctgcgttcctttggaggaggaaaggcactctgatttttagagtttccagtttttctgctctatttttccccatctttgtggttttatctacctttggtctttgatgatggcgatgtacagatggggttttggtgtggatgtc

SEQ ID NO: 4329 - DNA, 1022 bp, Homo sapiens
caggcagatcaccaggctctgcctggattccctctctgtgagctctggggcagttaagtaggacagttgtatggcttactttgcttgtttctctcttctcttggataactttcctatgttgtctgacatccagtgtctgaaaataattattttatatatcttgtcctattttttagtaatttctgtcaggggtgaaggggaatgaataccaaccctattaccgcatgctgtctggaagtagaagtgtctttctagccacgttataaattagtagttttcaaccctgactacatattagaattatttgggggaggtctttaaaaagctgatgtaaggcttcattccagaccaattaaatcagactttttcagattgaggtcttagcatcagtgttctttaaatgcactacaagttttctcatgtataccagggttaaagaacctccatattaaagaaaaggttgcatttataaatcattctgagaaacttttgtattctgtcatttcagctaagacacagaggcggttggcttttatttttgtagacagtgtggaattatagaagcttttaaagaagagtctggcagacatagatctttgttttagagttgtaagtgtggcaatcgtgtgagagatgggcttaagtggattgagtgaagatcactgagaaactgttgcaagtggttcacggccaaaggtaataagggcctgaacacaggcattggtattgggaatggcgaggaagagataggttggagaatttgagttagaactgataggattttttgattaattgagtgtgggaaatgagggagatggtggaaacaaatgttattctccagtttattactctagacaagtaaactctgtctaaacaaattcctaggccagtcagagagtaaatagtaatttcattaactgagatagataatatggtatgagaagcagatgtcagggaaaggagagaattaatttagtttgggatatccaaaaggatatctcatggaactgtctcctgacctc

SEQ ID NO: 4330 - DNA, 1031 bp, Homo sapiens
ttcaatgcttttgggttgcaaaagaagagggattattgcatatatggtaattctatatttaattttttggaacgaccatactgttctctacagcagctgcaccattttacattcccatcaacagtgtacaagggtttcagtttccccatatcttcatgaacactgatattttctgtttttgttttttaaaataattgccatcctaatgggtataaagtgaaatatcattgtggttttgatttgcatttccttactgattagtgatgtaaaagatatttttaaagtttcatatttactgacatatttaccatttccaatattcttcattattttcatctggtatcattttccttctgcctgaaagaatttctttaatccttcttattcttgtgcagatttgctggtgggaaaattctttcagcttttgtatgtgaaaaagtctttatttcaccttcatgtttgaaagatattcttgctggttatcaggactgactacatactttgtggggctcaatgcaaaataaaaatgtagacccctctgttcaaatattattaagaatttcaagtcatcaacaacagagcattaaaccaagccagtccttctgagtgcaaagccctgtgtgactacacgggttgtatgcacaagaaacctactctgctggttgtagaattccaggtgactgctctttttttccttcagctctttaaagatgttgctctgttgtcttttttttttttctgagatggagtttcgctctcgttgcccaggctagagtgcaatgatgccatctcggctcaccgcaacctcgacctcccgggttcaagtgattctcctgcctcagcctcctgagtagctgggattacaggcatacgtcaccatgcccagccaattttgtatttttagtagagatggggtttctccatgttggtcaggctggtctcgaactgctgacctcaggtgatctgccctcctcagcctcccaaagtgctggaattacaggcacgagtcactgtgcctggcttctctgttg

SEQ ID NO: 4331 - DNA, 1146 bp, Homo sapiens
cattcttacatgtatcattctgtgatcaaatctccagcttactataaatgatacctacattctaaagagccaattctagttgtaccagcatggccttagagaaaagtaagggaatacaatttgtatttatcttctatttggtcggagttaagtatttaaaacagtaaggtagatctcagatccaccaccattaaaaataaataaataaataaataaataaataaataaataaataaataaaatagtaaagtagaaagaagagacaaagatccaaacctttcaaaatgaaaaatgaattttaaatataaggttatattttattacctactgctgagaccatcattgcataaatgaataaatagaactaaatagtccagtcacagtggctcacgcctgtaatcccagcacttttggaggccgaggcacgcagatcacgaggtcaggagacagagaccatcctggccaacatggtgaaaccctgtctctgttaaaaatacaaaagttagctgggcgtggtggcatgcgcctgtaatcccagctactcgggaggctgaggcaggagaatcgcttgaaccagggaggcagaggttgcaatgagccaagatcacaccactgcactccagcctggtgacacagcaagactctgtctcaaaaaaaaaaaaaaaaaaagaactaaataaactcttcttcccccacaaatttaccagtttagccattttaagtgtacaggtcagtagttgcattaagtacattcacattattatgcaacaagtaccaccatccatctccaaaattttctctttttccaaaactgaaactctgtatccattaaacagtagctacccattctccctcccctacctcctggtaaccactattctactttctggctctatgaatttgactactctagccaccttttatacgtgggatcatatatttgttgttttgtctccagcctatttcacttggcataatctcttttagggtcatccgtgttgtagcatgtgttgtaattacgtacttttttgtgtgtgagatagtcttactctatcattcaggctggagtgcactggcacaatcatggttcaatgcagctttgacctcctgggctcaatcgatcctcccacattggcctcccaaatg

SEQ ID NO: 4332 - DNA, 1023 bp, Homo sapiens
cctccaccagggattacaattctgctccccaagaggccccctaagaccacagaagataaggaggaaacaatacagaaactagaggtgaggaggaagtgtgcatagagacctcctgagccctggatccattccctctctcttggcccatgtgtgcctcaatttttcccttctgtgaactgaacctgagtttctattcctattcatccccacatgagaccctggagaagaaggaagaagaagtaacttcagaggaggatgaggagaaagaagaagaagaagagaaggaagaggaggaagaagaagagtatgatgaagaagaacatgaagaggtgaaggggactccttccaccttagtccccctccctttaccctctttatactagggttgctctcctcagagggttggcatgccaacagagatagtgccccccagggtaggggcttctctctacttcatctgccccccttctacaaactacagctggaagagatgtctcaggcctggaatggtgtgactgagaggaaaggggtctggtacacaggaaggaaggtgaatgccaaattgacttttacttttttttttttttccatttcaggaaactgattacatcatgtcatattttgacaatggagaggactttggtggtgacagtgatgacaatatggacgaggctatatactgaagaaggactctggaccctcgtgtctttctttaggatacagagagtaactgtacctattatttgtttcttcagacaagcaaatcatttggtcagagttcatataatctgtctgttccctggagatgggaatagaggatgatgacagtttattttctacacttcccctccttccacatttgtatcacctttgctatcttggggaaagtgcaaaggacaaacatctcaattgtatgaagggagaaaggagaattgaaagaagaactggggttgttagagctgagatgactgtacacatacccctgcccaatttatatagctctttgtggagataattaggggt

SEQ ID NO: 4333 - DNA, 1033 bp, Homo sapiens
tcgttttcctgattgcaaatgaagactaccttcccccaggacagaggctctgtattttgtattcttagcagtttgcatggtgtctggcacataaagatgctcggtaaatagcaaaatgatctactggttctcctgctttctttccatccactctcaagggtaaccaagcagttatccatggccacacccaccctaacctctaatcttaaatatgctaatgaacattcagtctaggcaaatgcctttacttttcactcaggttggatgccagtgagatccaggtggacgaaaccatcttcctgctggagtcttacattgagtgcaccatgaagagacagtgatccagaagaagcatcttcctcagaagatctggggggatggaaagcaaaataaaggaggtgcctggatgcattatttgcagtgggataagtcgcagagtcttcaactaaacccccctctctatcccctgcagcccaggatacacctgaaagaatttggcatatttagatccattgctgtagtctcccctcatcaaatcttggcagtgggaagaaccttaaatcaacaaggttaatcatctatcagatgcatctgttcccataaagaagttacccacacctatggttacctatatccctggcaataggaaacttcctaagaagttaattttattttcagatgtctatgcctgttctttattttgttgagataggtgatagatagatagatagatagatagatagatagatagatagatagatagatagatgatagataatttgttgttgttgagacaggatctcactctgtcactcaggctggggtgtaatagcgcaatcacagctccctacagccttgacctcctgagctcaagcagtccttccacctcagcctctggagtagctgggactacaggcatgcaccacacatacccagctattttttatttatttatttttttttttgtagagacagggcctccctgtgttgcccaggctgatgaactgtaatttttaacacacacagtgtaggg

SEQ ID NO: 4334 - DNA, 1067 bp, Homo sapiens
gagatccctagaagcaaaagatccacagagaggataagccctaaaatatgactatagaatttgtccagactaccactaccctacacaagctcaagctcagcagagaatatcagggagttaggctaaaaaggagaagctagaaaccaagaaactgagcagaaacattagctgctgcaggtatgacagatttcacagtttaagtaaattaactgcttactagtaccaaaaaaattaacaattctcagaaaaacaaaacagattccaaagtcactacaacatattaccttcaaccaaaacttgctagacatgtaaagaaacaagacgatgtgaccaatgttcaagataaaaagcagccaatagatactaactccaagtggatccagattacacatttaacaaagacttgaaagtaaccattacaaatatattcaaaaaagtgaaggaaagcatgatacaagtgaaaagagagaatcccaacaaagaaatggaaacttttaaaaaacaacaaaatagaaatccaaagactgaaaactacagtaacagaaataaaaattttactaggtgggcttaacaggagaattgagatgacagaagaatcagatccataaaaattcaggctgggcatggtggctcacgcctgtaatcccagcactttgggaggccgaggtggttggacacctgagatcaggagttagagaccagcctggccaacatagtgaaaccctgtctctaccaaaaatacaaaacttagctggccatgctttcacgtgcctgtagtgccagctacttgggaagctgaggtaggagaatcacttgaacccaggaggcaaggttgtagtgagctgagatcatgccactgcactccagcttgggtgacagagcgagactgtctcaaaacataaaataaaaataaaaattgagatagagtaatagaaattatttaatctgaagaatagataaaagattgaagaaaaatggccaggtaatcccagcactttgggaggccaaggcaggcggatcacttgaggcctggccaacatggcgaaaccccgtctctaccaaaaata

SEQ ID NO: 4335 - DNA, 1050 bp, Homo sapiens
agtctcactctgttgcccaggctggagtgcagtgacgtgatttcagctcactgcagcctccacctcccaggtttaagcaattctcctgcctcagcctcccgagtatctgggattataggtgcgcaccaccacacccagcttatttttgtatttttggtagagacggggtttcaccatgttggaccaggctggtctcaaactcctgacctcaagtgatctgcccaccttggcctcccaaagtgctgggattacaggcgtgagccaccatgcccagccttattgtcctgaatttttttaagtctattttccttaattttttacaatcttttacatatctgacttagatctcaacttccttcgttccaactacttaaaatcatttaagtcctctatatcatctttgttatttaaaaagtacttttaaaatgtgtattttcaaggtgggatttcatagaaatctatatcacagtgtataaaagcataggctctgaaatcagactgtgtatgaatttgaatccttgatctaaaacttaatggtgtgaccttgaactagttactttatgtctttgtgcctcatttgtaaaatagaggtaataataatgagttaagacttagaaaaacaagttagagcccttagaacaatgacccacatatagctaaggacaactactgaaattattaatagtctctacagtacaatcatttgcttttcatgctttgccttcatttattcattcatagattcattcacttaataattttagaaaacctagtttacgccaggcactgtactagatgctagggatagaatgatgaacaagataatcatttcttaccttcatgaagcttattagtctactctctttattaaagttattattacccataagtaaatggtaacaggttttgaattgcatgagtattttcacatttcatatttcctccttcaacacttttctgtagtaagacccatagtcaagttaaagaagccttaatgtaagagataacattagacataaaggccaggagcagtggctcacgcctgtaatc

SEQ ID NO: 4336 - DNA, 1113 bp, Homo sapiens
ttaagtactgaaagaaaaaaaacccctacaacctggaattatttacccagtgaaaatacgtttcaaaaagtgaaggtgaaataagaacttacattaaaaagctgaggccaggcatgatggctcatgcctgtaatcccagcactttgggaagttgagggagggagattgcttgaggccaggactttgagaccagcctgggcaatatagcaagaccccatctccaaaaaaaaaattagccagctgtggtggtacgcacctgtattcttacctactcgggaggctggggcaagggcattgctgttgcttgagctcaggagttggaggttgcagtgagcaatgatgcagtgcactgcagcctgggtgacagagtgagcccttttttctaacaaaaacgaaaaggctggcagagtgactttcatttctgggaagatggaataggcatgcttttccctattcctaccagtaagtagaaataaaaccctggacattttctatacaataaacataaggagactctgaaagatgaagagaaaagggcagaaacttcagacttcaaaaaatgacacagtgagttagttgtctgctctctttagcccatgtggaccaggaaaggggcagcctaacaagggtccactttcattcttttgcatgtagatatccagcttccccagaaccatttgttgaaaaaactgtcttttccccattgaatggtcttggcacccttgtcagaaatcatttgatcatatatacaggatttatttctgggctttttattctattccattgatctatatgtctttgtgttagtaccacactgttttgattacttgagctttgtattaaattttgaagtcaggaaatatgagtcttccaactttgttctttttaaaaaatttttgtagagacaagtttttgctatgttgctcagactggtcttgaactcttgatctcaagcagtcctcctgcctcagccttccaaagtgctgggattacagacatgagccaccatacccagcttgttctttttcaatatcgttttgtctattcagggccccttaagattccatatgaatgtaaggtggatttttctatttttgcaaaaaaaaaagttgt

SEQ ID NO: 4337 - DNA, 1046 bp, Homo sapiens
tggagttaacttgaattgattgtatgtagcacagcacttttgcagtaagattggtgtgaaatactaaacactatggattttgtaggtgtcaggttaaatggtcaagggatacctacattaagtcatatattaggtattgatgatcttacttcttttctgttcccctgtacaaaacacttacctaacccagcttgtggttttaggacagccaaagctcactgttgttggttagtcctaatcactacacgggtctcataaatgagacttgtttgaattttggtacattggagcatgttggttggtattacacggcagcatttcgaatgagtgcagctctgtgtctgtcagaaaggagagataagactactttgaagggaattaaatatgtgagtcctctttttaatggtgctttttgtaacctttaatgctgaggtacagagctgcttttcaatatttcataaaggagtggcagacaagagtggattttaaagctgttcttcaaacgtaatttgtcactggactctgacacacctggaaattatatgatatgatacatacagaaatgttgtgggttttttccataaaactttaataaaagtattatacagcaataatatctgagttattgattgatgactgattatattatcaaggtctgtttgccttggtgtctcagggcctaaagaatgtaaactgcaagaaaacacatttgaaagaagtcatggggtaggggacacaaatgatgtcctactttttctcttctttttgtttcaggctatgccaacattataggaatgcagacttcatgatttgattttcagcattttctctgctggctgcacatttagctatcatcctgtactggattagctgagctcttagaccaatgattctcatccctggctgcacattcataacacctatggagactctataaacattggtggtcaatccatttccaccctagttaaatggaaatctctggtatggggtccaggcatctgtattttttaagttcccccagataatgctaatagacatctagg

SEQ ID NO: 4338 - DNA, 1027 bp, Homo sapiens
gctgaggtccagtcctcctatgctgacttcatattctttcctatattatcattatgccaggtctttccaagtaggtttttctcaggtattcctcatttccacaaaacctgtggaagtgtaaaagtgaattgtttacctgccttgcttctgtcgtatttaggctttgtgtcagcatgactctggagtgttaacccgagaagcattcatggtggataatacagtacgggggaaggtagaaggatacacttgttcttaatcggatttgcttgggttctttgggatctgatggattttgcctcctgtaactgctccttggatgtcatttaatttgcctaggcttgccatctcctcctgtggtacatctgtagtctacaacacagcctgggaaatggtacctcttgctgtcttcttactggttctgactcaggtgaaggtgtttgattattgtggcttagcttggttctgacccattcctgattctctcatattgtttaggcagtttggaattgatccattggattgggtgtctttctgaagaggattttgacatctactttgttcaaggatagagagggattcctaggttccctctaaatcagagagatcttttggaagtcatccctggttttaaatgaaaattagacctgctttgggacttggaaatagtttttcagaaggattgtttctttttttcctcattgtctttaagactttcttctagaaatggatgccagaatattttgttcttttttgtttttcttgctagttttaggcccaacattagaatttaaagtagggaagggagcaaggtaggagactattatttcttcagcccttttatgtgtcagaaactgtgtcagatattctcatgtaatcatcagagcaaccttaatggtaggtgttatcttttgtaatgatgagataaaaagacttggacacactaagtagattacccaaggccacaagtagaatgatgataggagtcagaattggaactaaaacttatttgacctcctgctcttatatc

SEQ ID NO: 4339 - DNA, 1048 bp, Homo sapiens
tcctactatgattgtttttgccttgtaacacaactcttccttgtgtgttgtgggcaagatttttgttttagctctcttaaggaagattagtagatgctgaggcatgagatttctgccctggactgataatttttctaattttctgtaataggattgtattattgatacatactagagtgggtgcattattgaaaagagatagcgcattctagtttaaatttctcaaagagctctgaggaagagtaagctgtttggtttgtctgtgcattaatttcatttagtaatttttttagtaatttttttctctttctcttagtgtgacccagccttactccctgagcccaaccatgttatgctgaaccatctctatgcattgtccattaaggtaagtggtggccctggctcttcacagagctccctggaatgagaggtcaagggtaacatacgttctcagtggttactttctctgctatttcattgaagctgaagctggcagtaatgatcaaattatagaagaactctcttttttttaactactaggttgtttgttttaaaatctcagtctctgtgttctggctggctgaattgccctctgataggacttttttgctgcccagttattttttgggtgactagaatctttacactaactgtttacttaagtttgtgttcatagcataggatttcttctgcagaaaaagcaggtttagcttccagttcaaagaatgcttgaatgtgatattaaggctttcattttttgaaggtggaattgagctactttcaggtgcctcattcatatatactcaggtgcttgcatctctcctatacactagttaaaggagagatgtgaccagatttgccctgtcccgtcaactctagagtcctccttggtttttctgctgctttagagtctgggttggaaatagccattctgttctgtcttgttatgtctttgtggtttggctattggaataaagttatatagctctgcagttatcaaaccaggctgattatcattagagtctcctggagaagattgtaaaaatac

SEQ ID NO: 4340 - DNA, 1055 bp, Homo sapiens
ggaagagatgttgccaggcagaaagttcttaactgctaaatacacaaaccaattttcatcaatatctatctcctctttcttttctattactgaaacaaaaaatagcccactttctcccaaaagtcaatccagccacaggtggactaagcctatcccttccagccttctgagagctctcattttcccctctggccatcccctctgtctgttggatctttccaatcagcattcagacaggctgtagaatctttccgtgctaaaaaaaaaaaaaaaaaaaaaaaagcaaaacaaaacccaggtctagcattctattaccccttagagccaaatttctccacagagttgacgagacacagggttcacttcctcacttgccattcgacctttaatcattttaaaccaacttccacccccagatcatagtgaccactatttttgttaaggtcaccactggccactttgctaatctcatcttactccatctcttagattctgccagttgctcacttcattcttgttaactcttctcctggtttccataacacctcattttcctagctttcctcccacctctccaggccttctttatctgcttcctttgcaggtcccttttttacctgatctctcaactttagagttcctctggactctactctgagtcatcttctcttctcatgctgcaagttctctccatgccaacaactcccaaatttgcaggtccattccagcagatctgtatacacatctacctgcttgacatctccctggatgtctcaaacttaacaggatcaaacatgaattcttcaattctgtgtatagccttcctcctgaaacctttttccttcagttttccatatcttaataaatggctcctttatccacccagttgctcatgccagaaatttggaagtaattcttgatacctctctccctaaacttcaactttcccatatcaagtttgaatagttctgttgaatgaatgaagtcttggcttaagtgtttctttttcagaggagaagaatcccttaatgccatcaatctacataaaattttct

SEQ ID NO: 4341 - DNA, 1081 bp, Homo sapiens
acttaggcaaactgtactggttggtctctatggtcctttcgtttgtgctttggcagggaggtgcggggagaggtcagggaatgatggacaaaagaataacaaaggaaaactctaacataagctttgattacactgtatcctgcttactgttatattactatttactagtctattttctcttcctttcccatttgggtttcatttatttctaattcaacatactgtttcaccaatgagtgttcatggtgtgcctatggcatccccaaggggctgcaggaagaggccccagcccagcccttacctctgtgtgtttcctgatggagagctcctcactttagggttactggaatgcattgattgaaatcctgagcttgcagtcacaaacgggacaggctcaccgagttcctctcgggttgcagcagaaacagctgctgggggcagtggcactggcccactgcttgctgggtgcgtcccttagcgctcgctgcctgtatgcctttttcctctttgtttttctctgctgtggaagtgggtcctttccccttgcagctccagcattctctgggtgcgtgcctcctgctgccagaggaaaatctcgcatctccagggcatactacaggaaaaggccacccaaaaaaagttgggagcaaaaacagagacataaaacaccctcacaacaggatcaaggtgaaagcactagccaactcagcgaagcagctagaccatgcctccacttccatcagggtgaaagggtgatgctcccattgtggacaaaggctcaggggccacaccagctggagggtgactaggacttcctgccaagcatgcaagcctcccccgcaagcagcatggaccaggcaagggtgagcaggtgagaaaggcagttttctctttagctatgtattctcccttacatttctgtagttttgaatacaaaaccctcaaaaacttgtgtctttcttttttcaaaacaatgctttgaaacccctaggtaccgcagatccatagtgactatctggtgtttcagttctgatggcaaacaacagcactgaaatgaaacaacccccccaatttcaaacca

SEQ ID NO: 4342 - DNA, 1074 bp, Homo sapiens
acctatcaatgatgttgaggactgaatgtacctcaggtgtaatgtatttggagatagggccttttaagaggtaaagtaaatgaggtcatatgggtaggctgtaatccaatatgactggaatccttataagaagaggaaatgaggacacagacacagagggaagatgactatctgcaagtcaaggagagaggcctcagaagaaaccaatgctgctgacaccacgatcttggacttctagcctctagcactgtgaggaaataaatttctgttgtttaagccacctagtctgtgatactttgctacggcaggccctagcaaatgaatacacttgtcttgtctttcccccgccctgtgatatttatcagtgccggatattacatatttgtgtatctatatgcttatttccctgactaaaatggaagctccatgaaggcagatttcctcttgttcactgatgtgtccccagcacctggaatagtgcctagtgcatgccagtgctcagacacttggacatttgaatgacatatcccctctgtcacttctctccggggcccaaggccaccctcctaggttaccacagtggcttcctaatgggccataccctcacttgctttccatcaccccctgagacctggcccctgcatacctctccagcttcacccctcacatatctccctagccagacctatagtatgttttaaaaaaaaaggaaatcgcactcctctggcctctttaccttggcacacatttttccatcacctgacccctgacccacactcccttttcctgtgtaatccaattatctctaggcctcccgtgtttctgtttgtccttcaatagaaggttgtttgtcttgtcttttattgtatttctagaaccaagtgcagagactgtacaaagtggacctcagcaaagatttaccgaatgaataaatgagttcagaacgctgacttaactcttctgttggcacccaggtggcttctatgcactctccttccactcaccaccagggggaagcatggagtaaaggaaaacaccaaggctttcgctgggttcaaattctgacagcgtatt

SEQ ID NO: 4343 - DNA, 1162 bp, Homo sapiens
aaactttccatgttagaatcaaacccccctcctcccagacctgcttctcccacacacttccctatctgaatgaaagacacctccactctccacccagttgccaaatcagaaatctgtctttgttttctttgtctcacattttcctatgtctaatcagttaagttttatcaatactacctgtttatttctttaatctattcacatatctttatcctcaatcttcagcatccccttcccatcctcagtctgctggttactgtatttcctattttactaagaatctaaaagagatcagaagaaaacttccacatcccccaacacccaaccaccaaatctgctaacccagttgcattggtgcttttatagccttccttcctccctcttactaagaatgaaccaacactattcctatcaaagcccaaccctctagctttacattgactcctagtgtcttttttctggattgtcaatttttttcctgaccaattattctattagcaatacaaatatgctgtaaaatctcttaaacttttttctctgcatctttgaactgctgttctcttttccttctccccttcatagcagaactcctcaaaagagttgctacctctaattcttcccttccagttctctcatgaaccagctacaattaagtattcacccccaccactccatggaaactgctcttgtcaaaatcatcaatagcctttgtgtggtgaatccaatagccagttttcattcttcttactaagcttctcatcagtattcctagactatttccttcactggcttcgacaaatgctttcttggttttcctccaatttctcgactttgttcctgctgaatctacctttttctaatccgtaagtgttggggtgtcccagggcttactccttggaccttttttccaccttttcccctacactcacccactaggtgatctcaagaatttccagtttgaggccgggcgcggtggctcacgcctgtaatcccagcactttgggaggccaaggcaggcagatcacctgaggccaggagttcgagaccagcctggccaacatggcaaaaccctgtctccactaaacctgcctctactaaaaatacaaaaattattatatttttataaaattattataattttataaaattattatatttatgg

SEQ ID NO: 4344 - DNA, 1055 bp, Homo sapiens
aagagatttgcaaggatgatcgaacagagagctgtggacacatccttgtacatactgcccaaggaagacaggtgaggggctctcactgctggcatgaagtcacgcttggtcagacatccaagtgtatggggaagaggagttcatcaggcccactcacacctgacagctgatgtctcctcgtgtaaggaggctgaaccccattctgcccacctaccagtaggccctaggtcctcgcacttctacagctgggactggtggcctagtgcttctgttccctgttatgcagaaccaggagccaccaccctcatgactttatcacttgccttttccttttgctttaaggtttaaaggatttgggtggggggagctgaagaaagaatattcatttctgtctttagtcatcatgttacaatttgcaaaccattttcacattctcactgtgaggtgagagagatacctttctccctggctttatagataaagaaactgaggctgggagatattgcctacctggtctaggcccagctagcaagtgatggagccagaacttggacccagatccactgactgcctattctgtgttttcgctatattactagcagttagggttctgtttcctgactaccagaatggaaagtttttctctcaccaaatttcagaagacacctttttttctgatttgttgagagcattcaacttgcactaaaaataggtgacttgatagaggaggggaggtaggaagtagccctgggaaagatgagtaggggggaaaggcatctaacagttcaagaatttgcacggttgggtgcccaaggataagagcccctgactgcattccttccactcagggtcagtgtgtccacttctgtgcaagcctagggcatctagaaggttcctgccaagccacacagcttgctgccactccctgggacttgccagcttcccttttctgcttgtgaaggggtgccaccatacctaaattgttacttacttccctctcctttatcaacacacacacacatatttagtaaatattttaagctgtcaggatcatg

SEQ ID NO: 4345 - DNA, 1091 bp, Homo sapiens
gcgactgcactccagcctgggcgacagagcgagacggcgcaaaacaaaaaacaaacaaaaaactacaacagaaacacccgcttctttggggaagaccatgggcggggaagagagggaaaggaggcagaggcagacatcactgcccccgcaggctctggcaccatgttggtcggctgagtggcggagggtggggcagaaaagcagaccgggacgaggaaggcgctgtcggtgacatcacggatagggcgacttctatgtagatgaggcagcgcaggggctgctgcttcgccactggctgtttcaccacgaaggagctcccgtgccgtgggagcgggttcaggaccgctggtcggacctgagggtcccagctgtgtgtcagggctaggaaggctcgggggtgcgcggggcaagtgaccatgtgtgtaaagggtgaggtatatggagctgtgacagggcagaagtgtgtgaagtcatacttacctggcaggggagataccatgatcacgaaggtggttttcccagggcgaggcttatccattgcactccggatgtgctgacccctgcgatttccccaaatgtgggaaactcgactgcataatttgtggtagtgggggactgcgtccgcgctttcccctgaatttttgtaatgaaaaaatagactcccctataagggttattcttaaaactgcagttttgtggcttgggtggcatgttaagtgttctccttacagtcgcaatgatgggaaacagaaagtaacgtgttatcctctccgccgccgtgagctcttttaacactaagtggccgcagggctcttctcttccctttctacttggggctgctttttgcagatcgcttcatagtctccagtcttttgggttctcatgctctgtgaaaaccttcgtgttttttcatagcccccagagtcacccttcacacagcctctgcttctaaccgcagcctccgcaggagtttgtaggatgtctgtgctagcggggaatgtgttctcacctcctagagccagggaagaaactacgcagtcgggtgctgttctttgggatgaaagcagggtccccgttcggttgttaacata

SEQ ID NO: 4346 - DNA, 1021 bp, Homo sapiens
cagagcaatgcgtagcaggcccccgcggaggattaacacagtggctgaacaccgggaaggaactggcacttggagtccggacatctgaaacttggtaagactagtctttggaacttgcccactccatttgagtggaaccacggcgtgcctttattagcagtttggttttggttttgacttggtttgaattgcttgacaggactagtcttgggaacttgcccattccatctgagtagaagcgtggcctgatcacccacagcgtgcctttattggcactttggatttggttttgacttggtttaaattgcttgacaggactggtcttgggaacttgcctactccatttgagtggaagcgtggcctgatcacccacagtgtgcctgtaccggcactttggtttttgtttttgacttgacttagattgcctgatacttcggttttggttttgacctggcttggatttctggatactctgattttggttttgattttggtttggtgtaaactgcagaagtgtgtgtgtgccctttttacctgttttttgttttgtggtgtgtggcgtgtggtgtgagcgtggtgttttgtcttgaagaaacatgggtcaggcacaaataagccccccccactaggaactatgttaaaaaatttcaagaaaggattcaatggagactatggagtcactatgactccagaaaaacttagaactttatgtgaaatagactggccagcattagatgtaggttggccatcagaaggaagcctggacaggtcccttgtttcaaaggtatggcataaggtaacctctaagccaaggcacccagaccagtttccgtacatggacagttacagctggttttagaccccctttccctgcccgcagtagttaagagaacagcagcataagcagctggcagaggcaagtaaagaccatcagagagaaaaagaggccatctataccaattctaagttaatttagactaaacaaggtcttattaatagcaaaggacaattgaaatcccaa

SEQ ID NO: 4347 - DNA, 1023 bp, Homo sapiens
gttctagtctgcgaaataaaagtcattatgtgaagaagagtacccaggctccatctggccaccgaaagtttgcttcacaagataggctaaggaccagcttctttgggcgaaaacagatgccggggcgggagggaaaaagggagaggcagacgtcacttcctcttgctggttcaggcagcgggttggtcggctgactggcagaaaggcagatggggcctgggaaaggcactgtcggtgacatcacggatagggcgacttctatgtagatgaggcagcgcaggagctgctgcttccccacctgctgcttcgcctcgaaggagttcccgagccttgggagcgggctcaggaccgctggtccggccggagagtcccagctgtgtgtcagggctaggagggctggggggtgcgcggggcaagcgaccgtgcgtgtaaagggtgaggcgtacggggcggaggtgcaggagctcatatttacttggcaggggagataacatgatcacgaaggtggttttcccagggcgaggcttatccattgcactccagatgtgttgacccctgcgatttccccaaatgtgggaaactcgattgcataatttgtggtagtggtactgcgttcgcgctttcccctgattttttgtagtttcaagaatacgctgtactctaagggctacttttttctttcattgatttgtgtcttggacgtgttattcttacagtggaaggctgggaaataggaattaagatgtcgcttctcccactgaggagaaatagggagcgtcagccttaacacaaacaaactagcgcgaaggccgtacagctcttccctttctacgcagggctgctttttgcagagattggtccatggtctccagtgtcttgggttctcacgctctgtgaaaatcttcgtggttttctctagcccccagagtcaccttttacacagcccctgcttctaaccgcagccccctcaggagtttgtaggatttctgtgctagcggggaatgtgttctcacctcatagagc

SEQ ID NO: 4348 - DNA, 1095 bp, Homo sapiens
tactttattatcaccacagaatttgaaatgatttctgtagttaacagtcagattttatttttagttaactaagacaaagtgaataattcactgtgagccaaattctttcttgattcctctttttggagcagtccatctttatgggaaaaccagcctagaatggtgatttcagtttcaggtgatttcgatagaattgtatttggctcagaaatgataagactggggccaagaaaaattttaaacttttttttttgtaatcatattactagtttgatttcatatgaacttcctttgttgactttcttttccattaatttaaaagttccagtatcctcaatatttgatgtcttatatgtacagaatcctttccagctgtaagtcatcagcaagtaaaaaatttagtatggcaatagttttcataagaggttttttaaaacagaaaaatgttgacattgccagcctctgggttgcattttgggatatgctacatttcaaaggtatcttttaaatctgaaggcaaagactttttcaacatctgaatattctgatttacagaaattaaaaaaaaaaaccccggaacattacacaggcatataaatttgaatcaggaaaatataaaattagctgattatttttattcagtaaaagtgccttggcacagaactaaaattgataacttatggttttagcatgtagataagtacatgagagtaaatcacatttctatatgaatagaaatatccactttattcatgtatagattataaaactatactaaacaaaaagtaatcatttactattacaaaaattattaagaaccattacaaaaattctctgcctactaattttcaatcaccatagaaatacagtatttaataatgctgctgctgtacttacataaaacatattaagaatagatgttatatttctgtgtttgaatattgagcttaaacataaaacatgtttgaaatgtgtttgtgtgtgtctctcacacacacacataacatgtacatacctgaaactcatactgcaattgcaacacatcttaagtttttccttttaaacataccaagataacattctaaaatgaagaat

SEQ ID NO: 4349 - DNA, 1046 bp, Homo sapiens
agtgtcctattcttatgctggggagcctgaggtccctgtgtgaggattagacagtggattgttatgtgtgtaggggaatcagcttaatgtgtctgtccatgtctgaatttattgcagaaattgaaaagaaggggaaggggaagaaaagaaggggaagaagatcaaagaagaaaagaagaaggggaagaaaagaaggggaagaagatcaaaacccaccatgccccaggtgactttcagcaattgtggatgcttaattctgtgttaacacctggaggcaacagattcagggaaaccagagtgtgtttgatgtcatgttttcaacgaaggctgaattactcctactgtcattgctgttggttttcattgcagtagatgtttaggtttccatttcttcctccccttatcttttactaacgtgccataggttgaccatacttcaaaagctgtactctcatggccactgcatcgaattttgagcatattttatggaaaactattgagctcactcttttcatgatcacagtttgctgtgtgtcatgaggacactaactcagagtgtcctttgactcccttaccagtatgtcacctgggcaattcactaggtcactttctctctctctctgtctctgtctctctctctctgtctttctctttcattgttttctacctggccctgttctatcccaacatataggcaataaattttttttttacctcattaatggatctatcctttttcttttctaaccacttccttatgtgacttctgaaatctagtggggctctgtggtttctgattttccctggctgcttctttagttttgtctccttttccaggctcaacggcgtgctgatggaagtggaagagcctgaagtcttacaggactcactggatggatgttattctactccgtcaatgtactttgaactacctgactcattccagcactacagaagtgtgttttactcatttgaggaacagcacatcagcttcgccctttacgtggacaataggttttttactttgacggtgacaagtctccacc

SEQ ID NO: 4350 - DNA, 1046 bp, Homo sapiens; identical to SEQ ID NO: 4349

SEQ ID NO: 4351 - DNA, 1045 bp, Homo sapiens
aaaatgtatttctcgaactcctaggtataaaactcaagtatccactatttaaattcttttttgctcacttctagtatgtttccagtctcaatagaaatcgatgccaatccagaaatacaagcattattctaatacttctcacacattactggtatggatgacattttctagatctccttaaatactatcatttttcactacttgtatcttaactgttaagttcaacattttctgtaatattaatatattgtgaaaatttcctttctttcttatttgtcccaggttcaatgttttgcagtctctacctcaccctgtgaagcataaacattgtacatgctgtacaaataatacatcgttcatgtacttagagattgcacaatttttatttggttgacaatagctaatgttttcttcttcattttctatttcctgatttttctttatttagtatatactacactgccataaaaataagaacgttttacaaactaaagcaaaaggaaccctaggaataaaatgcacaaataaaatatataaacatacgtttagatgtaccacgtacacttgtaatttatttagacttttaattttagtacaattttaattaaagtctgtgtattatctgtcatcgtcttagtattttttatataacaaattgtgtaaatcaaaaagtatcaatgtcattgtaaactatcttggcagaggttgatctccaaggaataatttctctcctaaattatgccaatccaaatttcactctaccgtcattcttttcatcagtttcagaggaataataaatttcaaaattgttcaaggtacttcttttagttcaagtaacatttgacaggtgtaaaactgtagacagactgatacaaacgtattctaattgactcaaaattatatgggacctattttaaaatctagattttaaaatgtcgtgtcaacatacacatgttctccttgtgaaataattgttttttattctctggatagaataatttaatctttaaaccttccattcactcttagaaacaatatattacat

SEQ ID NO: 4352 - DNA, 1045 bp, Homo sapiens; identical to SEQ ID NO: 4351

SEQ ID NO: 4353 - DNA, 1059 bp, Homo sapiens
gaccaggggtggggaagggagggaaaggagatagaggtagacttcacttcctccgccggctcccgcagcgggttggtcggctgagtggcggagggtcgggcggaagagcagatggggaccgggaaaggcgctgtcggtgacatcacggatagggcgattcctacgtagatgaggcagcttaggggctgctgcttcccacgaaggatttctcctgctttgggagcaagtccaggaccgctggttggacgtgagagtcccagctgtgtgtcagggctaggagggctccgggtggcatggggcggggtgggggtgggggtgcgggtgcgcggggcaagtgaccgtgtctgtaaaggttgaggcgtatggagctgtcgcagggcggagatgtgtgaactcacacttacctggcaggggagatagtatgatcatgaaagtggtttttccagagcgaggcttatccattgcactccggatgtgttgacctctgcgatttccccaactgtgggaaactcgactgcgtaatttgtggtagtgggggactgcgttcgcgctttcccctgaattttccagtgcaaaaagcagttggtatgcaaaggtctacttctcgcttttttttgctgtataatcttggtggtggtgtgttattcttatagccggatggcagggaaacaggaagtaacatgtcgccgtcgttcctgccggagaaataagcgtcaggcgttgtgttcctgtttaacacaagctaagtagcgcgaaggccgcacagctccttcctttcaacatgaggctgctttttgcagagattggtccatagtctccattctcttggggtctcacgctctgtaaaaatcttcttgtttttccctagcccccaatcaccttttacacagcctctgcttctaagcgcagccccctcaggagtttgtaggatttctgtgctagcggggaatgtgttctcacttggtagagccaggtacaaactacgcagacgggcgctgttctttgggaagaaatcagggcctttggggctcttagtgttcccgttgggttgtagacata

SEQ ID NO: 4354 - DNA, 1089 bp, Homo sapiens
tcattactcttttgccaaaaaaaccagcgacaaaagactaactcagtggaccaacctttgtttcttcattatctctaccttgattctgtccttttatttcctctttcctctaattctaattctgcttctgcttcttatttcctccctggattagaactttacttacctaagctaccagttaggttaccttctcagaaccactaaggcagcagtttgacgttgacaattgaagatttaggattagaaaaaagaaacatgaatgaatttgtgacgttttattataggggtatgtaatgcaggtagaaagacctttttcagagttaagagtttgatccgacaaatgagctattttgatatttataactttgtttagtaaaagtttcctataaaaacatttggtttggatgtctttgttagctttgagtcgacacttgaaaaggccgcttggaagtttctaagtctttctggatactctttccgataattctccaagggttgctggggagaggcactggtggttcagtggtagaattctcgcctcacacgcgggacacccgggttcaattcccggtcaaggcaagaggttcttttgctcttcactatggctctttacccttctgccctgcagaattacactgcataacctaatagtgcatttaagggcttggccaccacaaggtaaactgacaacaacgctgaccaaagtagcagcaaaagacattcaggagactaacccgggacccacgcagttgttggactcaacaaaccgctaagcaaagtggcaagcacgtagtgtttctggtgagtcactgcagttttgatattggtacctgttactttcatctgttctctgggcggattcctgcaaacccaagaaccatcagtttcctgattcgtgtgctggaccttgggcttaccgctgagccactacggagaggaacaagaaatgaagctcccggaaggagagaagctgcgggcggggcaatcacctcggaggtccaagaggcctcagcggcccaaagaaaggggaggtgtgtgcgggagaatctcaatggagatgaggagagcagcggtgactggtccttgcgc

SEQ ID NO: 4355 - DNA, 1031 bp, Homo sapiens
ggggtctctgcgcacctccccaaaggacaatggcaggaggaaaaggagaaagagacagacgtcacttccttcgccagctccggcagcgggttgatcggctgagtcggcggagggtggggcggaagagcagacggggactgggaaaggcgctgtcggtgacatcacggatagggcgatttctatgtagatgaggcagcgcaggggctgctgcttcgccactaaggagttcccgtgcagtgggagtgggttcaggaccgctggtcggacctgagagtcccagctgtgtgtcagggctaggagggctgggggggggggggggggtgcgcggggcaagtgaccgtgcgtgtaaagggtgaagcgtgtgaggctgtggcggggcggaggtgcaaaagctcatacttacctggcaggggagatactattatcaaacgaaggtggtttttctcagggcgaggcttatccattgtgttccggatgtgctgacctctgcgatttccccaaacgtgggaaactcgactgcataatttgtggtagtgggggactgcgttcgcgctttcctctggtgcttttgtggtgcgaatagtaggtgagccgtaagtgtttttgtaattcagtgtgcgggctcgtgttttgtggctgtgttctgtccggtcagttgtttccgttcgcaacggttagttttcgtttgtgaggccatgtttggggacagcttagaactatccacttactctcttgggaggcgaatttcagtctctgttggttggggtgttctcccaggttagctgccgcggtacttgctaggtggagctcagggatcaagggtcgggagctttctggtttgttcagtgctcccagggcttctaacatctcttaaaaactctggtgttttctgtcatcctcggagttacctcttagcctctggtttttttgttgtttttttccccccctccctaagacaagtctcgctgtaccgtccaggctggagaagtggcgcgatcttcccatctcaggctcccgagtaggacaaccac

SEQ ID NO: 4356 - DNA, 1027 bp, Homo sapiens
aacaaaataagattgaaagagaaccaagaggaaagcctttataagctttcctaggggtggggtcaagaacgagtttttcattggtcctaatatggcttcagaaccggccaatcaagtcaagagtcggtgttgttacgtacgcattgctgaaaacgcaaggtccgcacacggaccaatggaaatgaacgactttcggagccctaatttgcataaggtggttataaaagaatcaggcccgcccattctcttacttcttttcttggctaagccgcgtttgtactgtgtcttaccatgcctgaaccggcaaaatccgctccggcccctaaaaagggctccaagaaagccgtcaccaaagcccagaagaaagacggcaagaagcgcaagcgcagccgcaaagagagctactccatctacgtgtacaaggtgctgaagcaggtccaccccgacaccggcatctcgtccaaggccatgggcatcatgaactccttcgtcaacgacatcttcgagcgcatcgcgggagaggcttcccgcctggcgcactacaacaagcgctccaccatcacatcccgcgagatccagacggccgtgcgcctgctgctgcccggcgagctggccaagcacgccgtgtccgagggcaccaaggcggtcaccaagtacaccagctccaagtgagtccctgccgggacctggcgctcgctcgctcgagtcgccggctgcttgactccaaaggctcttttcagagccacccacctaatcactagaaaagagcttgttcacttattcccttagtttcttttcataaagtaagttattttagtgtgaaggtcatgggaaatggcatacgtagctttttaactatttggaactcgaggtccccagtgcgtcattggatttgcttttgaatctagagcgtgtctttactcattgtgctgcttagccttcccaggagtcggttctcaattaggctgttgggaatccgcctctttacccgcccccactcccgccccacacgcgccctggtggctcc

SEQ ID NO: 4357 - DNA, 1049 bp, Homo sapiens
tcagctgcccttgcccttggcagctctctggccctgaagctgcctgagacccgggggcaggtgctgcagtgaaggggtctctagggctttgggattggcaggcacactgtgagaccaacaactccttccttcccctccctgccctgccatcctgacctccagagccctcactccccactccccgtgtttggtgtcttagctgtgtgtgcgtgtgcgtgtgcatgtgtgtaaaccccgtgggcagggactacagggaaggctccttcatcccagttttgagatgaagctgtactccccatttcccactgcccttgactttgcacaagagaaggctgagccccatccttctccccctgttagagaggggcccttgcttccctgttccaggggttccagaataggcttcctgccttccccatcattccctctgcctaggccctggtgaaaccacaggtatgcaattatgctaggggctggggctctggtgtagaccatggaccaaaagaacttcttagagtctgaagagtgggcctcgggtgccctctcacatctcctgttggatgctgggggagaagcaataaacctcagccctctggcctccactttcctctcaatttgggctgcaaatatgaagcctgaattttatgaaattagctttctgattcttatttattaatagattaagttctgaggcagctccgcaggactgtgtgtgaatgtgtatgtatacttacatatgtgtgtgcatgtgccatggggcggggggtatcactatactgtcctcaaatataagccaagggtaatttcagcggatgcacacacaaccctgcctcccacagttcctcccctaatctggtttctgtgttgagcctgggatggaggagccctaggccagcctgggataagagtcccacagtctagggagatctgagggcatccgacaaggcccatctccttccctcctcaagaagcagaggcctcctctggagtgagaggctccacccactacagcacaggcgggaatagcacagctgccctcccatgctccc

SEQ ID NO: 4358 - DNA, 1093 bp, Homo sapiens
aagacattttctcctcactaccattaactcttcctttttccatttcctctataggcatgcctcctcctggctccttcccacccccagtgccacctcctggagccctcccacctgggatacccccagccatgcccccaccacctatgcctcctggggctgcaggacatggccccccatcggcaggaaccccaggggcaggacatcctggtcatggacactcacatcctcacccattcccaccgggtgggatgccccatccaggtaggtgtgctttgttgggaaagggagggaagagcttggtagagcatctctgttaccactcaccctgctgccctttgttcctcaacagtaacagtttcagagttttcctttccttcagacattctattataaaaacatacaaaatgctctctaacatctaccaccctgaatccatttcttaagtttttctgacaagtagactctacttgccagtttttatttctttaatctttagttccattctcttctctgactccacctcaaagtggtgacctaattgccaaatctcggggacgcttctgctccttatctagtttgacctctgatatacttgaaactagttgtgtcctcctgtttgaaattcttgtctctttttgcttttgcttttctagatcctccacccctctctctgacttcttaatctcagctaccgtgatagactcatgtctacttgtgcctagatttttgtgcttgtttctcttttctgcatatatctatagttttaattgggtatatactgatgcctcctaggtctgtatctctagtccgtagctgttgatattccagatccttgatgctgctgcttaatagatagcgtcatttttctatccctctccttcaaatccattcttcttctagtgttcttttttttcaggtgcttaattcatgaatctgagagctatgtttgactgctccctatcaccccactcttaataccaagtcttatttgtatcagtggcatctctccccatggccagtgccctagttcagtctctcattgcctcattattttacacttaatttgttgtagtaatctcttgccactttgact

SEQ ID NO: 4359 - DNA, 1196 bp, Homo sapiens
ctaatttttctattttcagcagagatggggtttcaccatgttggctaggctggtcttgaacttttgaccttaagtgatctgcccgcctcggcctcccaaagtgctgggattacaggtatgagccactgtgcctggcctctgtataggaatttgagtcttaggctttagccattgaaaatccattgaagaatttagaacagtgggatgtaatactataatactggcattttaaattgctcatagtggttgcctgtggaggccaatcaattgacggagagaggtagagggaggagttagggagctatttcctggggtgcaggttatgaaaacctgagatagaataaaagagctgtagcctgtggaaggttttgcagggatttgagagatatttaaggtaaaattagtaaaacttagtgaaagattatttgtgtggataaggcaagagagaagtccagggcggctccctggcttgtgacttggatgattggggactatttgctacaataggcagtactggaagaggaatagtttgaaaggatgggagacagagatgagagaataagctcatgtttttatatactgaattttaagtgcctgtatgattcccaggtgaggtggaaagaatttgggggtgcagatacatttggagtcatgaacatttgggtgcttagggctgtgaatgaagtttcaatgagaagatggaaggcctaaggctagaatggtgggtgcactaagtttggttcagtcacagaaatgggagtccacaaagacgaccaagacacagggccagagaagcaggaagagtggtcagtaagtgtcaaatgctacaaagagagcagaagtaaggatgattgtgttcatcttatatataagccagtgccattctctttctgcagaagcctatttttgtaggttgaggacaaggagatttgcagggaagaggagagtaaccgccaacaaataggagcaggggaggaaacctaaaggaacccctcttgctttgctttgtaattttttttttctgtgaagtaggaggcaaggtcatttgacaggagtaaggggaggtgatgtggcttgggtgggaggctcaaggagcatggtgaaggtatgggatagtagctcagaagattgattgaggtactaaagcaaagatagcagtgtttcaataaaagcaaggtggctgaataacatgttag

SEQ ID NO: 4360 - DNA, 1025 bp, Homo sapiens
aacattttatataacacctcatttatactcatagcaatgccataaaatagatactgttatgcaaccttacagattaattcattcaaagtatgtattagtgtgatttaggcactgtttaaggtcctgaggatgctatagtgaatgtcagatgaagtatctgctaagcaatagagacgttaaataatttacccaaggtcacaaatcaagaaagtaacaggtaggatttagatatagctctaacggattccaaaaggaatgtctgcaaccattgttacattatgccactgtttacatatattggatgttctctgtgaatatataaaggcataaaaataggtggaaccccagtttttttttgttgttgttgttaaaaatggtcttgatgaatccaagaaagaaatgtgtcttggtgctgaaaagcatacttgcacaataatgcttttcctctcttccccttgcctctcccttctccctctccactcacttgtacctgggtataaactggacagtgtgacctgctttggcatttgaatgagtttgtgctttgagaactaggagaatgttgtttgcttgtttctttttggcttcctgaaagttcgtgcctgcttgcaggttctttcttgtagcacaatggtgagtaatgtgttgttaacattgtaatgtggtcatgcgagttggaattttttttgttttccctcagttctctctgatgagtatgcaggtagggactcttgagtcaaacttgcctgctcaattcattcaaatagaaaaagctttctgtattcagaggactagaaaagagttttgaggttggaaacaataccaagatccaatgtcttttgcccagctgaaattcagttttgttagcattctaggtttattctttagcttgtgctatctaagagaggacttgttttagattacggccactattaccgtgtgccatacctgggatgtgtggtctttactctggagttagcatcttcagaacaggtgcaaggatttattttgagcattatctcgta

SEQ ID NO: 4361 - DNA, 1385 bp, Homo sapiens
gttgacttttattttccttatctttttatacgtactacgtaacgctttgcttagaaattcacatgctgctaatttttcagtctttggcctctagtactgtatatttaggagatttttgaggaggctggatccctttgtctttcagaatctatttcaaaggtggaaaaggacagagtagagaaagaggtggcggtaagactggctccaaagagttgctaacccctaaatatttaaaaaagtttctatgctatgtaacttctgaaaacatgtagaaaattttcttcctactaaatgagattgcattcctgatggggagaagacttcagggacggaagctgggtggctagggagaatcagaggtagttaaatatttgctgtgtataacttacaaatacattatgcgcaaacaatgaagaattaattatacgctttgtcttcattgtttttcaagtagttcttttaacgttcagtaaccaacctgctgtgctagtctattgatattttgaaggctgaacaaaactgtaaaataaatgaacttgatgttgctcctctgcaggctgaatacccccgaccgttctaatttccactattgacccagcttgcctcagagcacctccctgacaaagtggccagttactatgtacttagagattgcaaatcaatgcaaatattagctcatactaggaataattaagaaggtaaatatgctgaaaacatatattccaaaaccaaaatagattttttcgattttaccctcatttttgattatcaccacctttctgccaataattatccgttaacatgaataatttagaattgaacagatatctgctttggacattacactttcaagatagaaggaaagatggaaggaagatagtgccaaactaattttttattgtcattgccttatttgacttattccttgcttttaatactgaagactccctcggaaaaaaatgtaaaactttgccaaagcaagagctggctatctactgacttgtataaggcccggtgactggtaatgaatgctaatcattaggtggcctttagtggccttatgttgccaacaacttggaaaatttcccaaagctttatttgtttaatctttcttttgagacccctatttaaaaaacgacttaatttggagacgaaaatctaatttttaaaaaccacatacacctttcccagaatctgttgatgatcaataattgttttgatctgtgtgagttgattggtgccaatattagtgatgatatctgggtaaattctatttatatctgcatctagcaactccctaagttgaactgcatactttattccagggcatggggatcaaaggggttgaagaagcctaggaatgagtggagagctgcctggtagtc

SEQ ID NO: 4362 - DNA, 1050 bp, Homo sapiens
gtgtaaagggaggagtgggaggaaaaaaatatgtatagtgccaacaggtaactaaaaaggtaactatctgcttgtaaggtaaaaagaactcttggggcgggttgcggtggctcaaacctgtaatcccagcacttagggaggctgagcgggggcggatcacctgaggtcaggagctcgagaccagcctggccaacatggtgaaactccatctctactaaaaatacaaaaattagctgggtgtggtggtgggcgcctgtaatctcagctacttgggagattgaggcacgagaattgcttgaacctgggagatggaggttgcagtgagtcgagtccgcgccactgcattccagcctgggcgacagagtgagatgaaggaaggaagggaggaagggagggaggaaggaaggaaggaagggaggaaggaagggagggagggagggagggagggagggagggagggtctgcacctctgcattccagcctgggtgacagagtgagactctgtctcaaaaaaataaataaataaagaaagaattcttgggttaaagggtaaatcaaaatggaaattaaagacaatactgaaaacattacaaagcaaaacctatagtgtacagaaagtggcattcaaaagaagatgtatagctttagaaatgcactcaaagaacataaaagattgaaaatcaatgaaccaaacattaaactcaataagctaggcaaagaacattacaaacaactcttttaaaagttgggggatggaattaaaagagataaagcagaaattaatgaaataaaaaacaaacaataaaaggcacactcaattagtgtactaaaaatctgattatttgataaccaataaaacagaccaatctttggcaagtctgattaaaaaaagaaagatggagaaggagagaaaatataaaaatagcatcagggccaggtgcagtggctcacgcctgttttcctagcactttgggaggccgaggtgggtggatcacttgaggccaggagtttgagaccagcctggccaacattgtgaaaccccatctctac

SEQ ID NO: 4363 - DNA, 1056 bp, Homo sapiens
tggccactgtagtatagtttgaagtcaggtaatgtgatgcctccaggtttgttctttttggctttgctatttgggctcttttttagttccatatgaattttaaaatagtttttcctaattctgtgaagaatgttattggtagtttgataggaataacattttatctgtaaattgctttgggcaatatgaccattttaatgacattggttcttcctatccatgagcatgggatgtttttccatttgtttgtggcttctctgatttctttgcacagtattttgtaattctcattgtagagatctttcacctccctggttagctgtattgctaggtattttatttttttagtgacaattgtgaatgagagtgcctttctgatttggctctcagcttgactgttgttggtgtataggagtgctagtgttttttgtacatttattttacatcctgcgactttgctgaagttatcagctgaaggagcttttgagccaagactatggggttttctaaatatggaatcatgtcgtctgcaaacagaaatagtttgacttcctctcttgctattcagatgccgtttattgctttctcttgccttattgctctggccaggacttccaatactatgttgaataggagtggtgagagagggcatccttgtcctgtgccagttttcaaggggaatgcttccagcttttgcccattcagtatgatattggctgtgggtttgtcatagatgactcattattttgaggtatgttcctttaatgcatagtttattgagagtttttaacatgaagagagcataatatttttatattgaaataatcttttagaaatggctcattcctgatctgtcaagcatttaatcaagatcactgtttttcttaactagaaagactgtttaatattgtaaaagtaaatcataaacttttttatttacatatctttccatttgaagcaaataaaatgtctttaatgtaggacactattatttaagattattctcttaataatagtagtaaataataacaaccacctttcattaagcttttacta

SEQ ID NO: 4364 - DNA, 1035 bp, Homo sapiens
tgattgaggaccagaggtccagtcacaagtaaccagccactagccagctgcttcaggaaaatcaccctcttgcccctgtggctttcagtgaggatgatcagaatggtcttgggagtgatcctggctcacagttttctcatgtgctgactgaagggtttttttccttggctcaacagctttgaaagcacatcttcagtaagataatatgtaggcattttgcaaagtttaaccacctgcgtaccaccgttcttgccaccaccagctggttttgtaatagttgcaggaaacttctccttttgcttttcaaccttggatttcacagctgagtacttcctcttgcacgtggcctttctggaatacatagcagatggagaatatctgccaatccctctgacaatgacaggattttgactgcaatggggcttcctgttcttgggcttcttagccttgaggttaccctttttcaccttgccaccagcatcagccttcttgacttcaggtttcttctctttagtatctggcttctcaacttgttcaccctccatcttgtaagatgggaaagagctgactttttaataatggccattctgactggtgtgagatggtatctcattgtggttttgatttgcatttctctaatgatcggtgatattgagctttttttcatatgtccgttggctgcatatatgccttcttttggaaagtgtctgttcagccgggcgtggtggctcatgcctgtaatccaagcactttgggaggctgaggtgggtgaatcacttgaggtcgggagttcgagaccagcctgaccaacatggagaaacctcgtctctactaaaaatgcaaaattagccaggcatggtggcacatgcctgtaatctcggctacttgggaggctgagacaggagaatcgattgaacccaagaggcagaagttgcggtgagccgagagtgtgccactgcactacagcctgggtgacaagagggaaactcagtctcaaaaaaaaaaaagaaaaaaaaagggaaagaaaagtgttca

SEQ ID NO: 4365 - DNA, 1026 bp, Homo sapiens
ctgcctcagcctccagagtagctgggactacaggcgcgcgccaacacatggtgaaaccccatctctattaaacatacaaaaattatacgttttattggcatcagtcacttttcagagaatatttgcttcactttttcttgtgcaaccaaaagatgtctttgatcctatggaaggagaagagaataattaaatttgaaatcttgtatacacaatttttattaaaatgtcaaaggacagttacatgtttctatagaattagcatatgtatatatatacgctctatctatctatctatctatctatctatctatctatctatctagagagacagggtctgttacccagggtggagtgcagtggctattcacaagcacgatcctgctactgatccgcacgggagttttgacctgctctatttctgaccttggccagtttacccctccccttaggcaacctcgtggtcccctgttcctgggaggtcaccatattggtgccgaacttagtgcggacacgcgatcggtatagcacactacagcccagaactcctgggctcaagccgtctcctgcctcagcctcccaagtagctgggactacaggcacgggacaccgcgcctggcaaagttaacaaatatttaactgcagtaaaactaatgtcagtagtttctcaggcattttcattggcttttacaaagtcacaaaattgggtaaaatgagggccatttactttatttaaaaaaaagaggccgagcgctgtggctcacgcctgtaatcccaacactttgggacgccgaggcaggtggatcacaaggtcaggagttggagagcagcctggccaatatggtgaaacctcgtctctactaaaaaatacaaaaattagccgggcatggtggcacgtgcctgtaatcccagctactcaggaggctgaggcaggagaatcgcttgaacctgggaggtggagcttgcagtgagccaagatcgcgccactgcactctggcctgggcaacagagtgagactctgtctcaaaa

SEQ ID NO: 4366 - DNA, 1114 bp, Homo sapiens
aggttctattcagtaatatggttcatggatttagtggtgactgataagattttatttttgaaggaaaaattgcttatactaagtccagagacatgcaggtgagcccttttgtcaggctgcaaatcatgacatgccgatggttgtttattttgtttttaggtgtgcattctttttcttcttagcaattcctttatgatcaccttcccttcttgtttcactccctcccgctctctcaaaaggaacttgggaaacttgtgaaacccaggaaaacctttagtcttatacctcaactacctttcagtcctgtctgggttttaaataagtgaagtagaagaaattgagtattttctgacataagaatatattatcaatacagttttatgcagtaagctctccttaccataaatgtttcttggttgacaacatctaagacaatattagtgggatgaagaaagaaaagcaggggtgcttttggaagcagtgttagtgttcctcaaaagtcggaacaattgcctgttgatatattaataagacattaaagtcaaattttaatgttggcctctcaaatgatttggataccactctgcaaagtatttctaacctttaattcccagttttaaaacagatataataatagcatttaattggaatatactaggcagctggaaaagtatttgaaactaaattgacattaaaattaagatttgttttcaagtggatgtccattaaaagtagaaaaatatttgggataagtgagtgtgtgtttccttacatggctactaaataaaatataatgagtatacaagtatatctcctcttttgctatggaggctccatgttcaaggcaatggctttttaaatcttggctatctaaaattttttccctttgttttgaatatttgtaagtttttaagaagttagtgtcagcaaattaattgaagttatgcttctatactgggacatatttaaatactgagtatagtactgctgctactgcttctacaatgtaaaatgtatgacttggtgttttaaagtaaaaattatgatgttacttgtggagaaactaaaaatgttgtacaactgaccgaaagaaaacccttggggataagtttag

SEQ ID NO: 4367 - DNA, 1030 bp, Homo sapiens
actttgggaggccgaggtgagccgatcatgaggtcaggagattgaggccatcctggccaacatggtaaaagcccgtctctactaaaaatacaaaaattaggccgggcgcggtggctcacgcctgtaatcctagcaccttgggaggccgaggcaggcagatcacctgaggtcaggagttcgagaccagcctgaccaatgtggagaaaccctgtctctaataaaaatacaaaattagctgcgtgtggaggcgcatgcctgtaatcccagcgactcgggaggctgaggcaggagaatcgcttgaacccgggaggcggaggtgtggtgagctgagatcatgccattgcactccagcctgggcaacaagagcaaaaagtccgtctcaacaaaacagaacaaaacaaaaacacaaaaattagcggggcatggtggtgcgcacctgtagtcccagctactcgggaggctgaggcaagagaatcgcttgaacccgggaggcggaggttgcagtgagcagagatcgtggcgctgaattccagctggcaacagagctagactccgtctcaaaaaaaaaaaaaaaaaaaaagaaaaaagaaataacatggtattttaaatcttgaatgtaagttttaactttacttttccagcaaaatcttaaaaatttgaaaagtcttgacctgtttaactgtgagatcacaaacctggaagattatagagaaagtatttttgaactactgcagcaaatcacatacttagatggatttgatcaggaggataatgaagcgccggactctgaagaggaggatgatgagggtaatcgttcttaatactcataagtgtgtcataattatagcctctgctgtagctgtgcaaattagattgggcctggaaatttaggtgtgaaaaaaaaaatccacaacaagatattagtaagacaagaaaaaattaaaaacccatagctctagccagtatttcttctttcagatttcccatagtttcagggaatttaatgactattataacatgaagctctgtg

SEQ ID NO: 4368 - DNA, 1028 bp, Homo sapiens
aggggagaggggcaaaggactgcactatgggaagtggggcagcccctgggtgctggtttggaagaggaggcactaagggaggacattagagggaaaggagcatccctgccctccctcatgtttcccctaccccaccccaccccaggaaggcagatgaggggttagcatcgctgagtgaggacggaagatcacccatctccatccgccagatggcctatggtgagccaagggagagggactggaggagggagttggacagccccctcctctagggaagtctctaaatatccacatgttctaagtggcttcttactttccttcatccgtcacttccaaagaaagttggtctggagggagagtagatgtgaaagaattgtaaccgggaatggggaggggtcagtggtgaacaggcaatagtgtgatctctgacattgatgagatcctcccttcccccagtttctggtctctccttcggtatcatcagtggtgtcttctctgttatcaatattttggctgatgcacttgggccaggtgtggttgggatccatggagactcaccctattacttcctgacttcaggtaagatccaccttctatctagcctttaccccccatccatccttgtccctgatctgatttattggccttccctgagagacttctttggctcaacatctcaggagcctgggagaagatcagggatgtatctcctccccatctccctccctgcagcctttctgacagcagccattatcctgctccataccttttggggagttgtgttctttgatgcctgtgagaggagacggtactgggctttgggcctggtggttgggagtcacctactgacatcgggactggtgagttggagacaggggcctgagttagggagaaaagcatttaatggtgagtgggatgtgggggaaagggtatcctcacttcttaacatttttaacttacctgggaggaggaggaaaggtgagtctttcaaggtctctcacctcagcatcatttctatcacctgctct

SEQ ID NO: 4369 - DNA, 1032 bp, Homo sapiens
cccgggcgctgtcctcgtgcccggccgagactagggacttaagcagcccgggctggcccagccggggtcagaggctgcagtcgctcccgggcgctgtcctcgtgcccggctgagactagggacttaagcaacccgggcctccgagccgctcgggtgagcggtgcgaacacggcgcggcgcggcgcggcacaggcggggcagcctccaggggcgcctggagcgaggcggcctgggagagccgctggtccgggagggaagcgccctggacggaggtacccgcggcccccgatccgcgtgggtccaggctctcccctccacgcagcctcccctgcaaactcagtcactcctgcctctcccgtgttgggcagtggtggttcagattgctgggacttctatgagcttcggtttttttcctcagtaaggttttacactcgggactcagcgaaaggacagcgtgctgacttctgagtcagactgatctggatttgaacctcagctccagctcttgccagctatgtggtcttcgacgaatacttccacccctgtgtggtgcagtttgctcatctgcaaaatgggactaatctaatatatatgatgggcttggatatgtctctttatgcatttatacatggaagaatgcaccccaaactcagtagtattggtgacatctggggagggatgcagggttgggggaggactgaaaaaggcttttgctttttactctgcgttatgtttattattattatattattatttatttattttttttgagacggagtctcactctgtcgtccaggctggagtgcagtggtgctatcttggctcactgcaagctccgcctcccaggttcacgccattctcctgccctagcctcctgagtagctgggactacaggcgtctgccaccacgcccggctaattttttgtatttttagtagagacggggtttcatcgtgttagccagaatggtctcgatctcctgacctcgtgatccgtccgcctcggcctcccaaagtgctgggattacaggcgt

SEQ ID NO: 4370 - DNA, 1085 bp, Homo sapiens
aggccaaggtggagggatcatgaggtcaggagtttgaggccagtctggccaatacagtgaaaccccatctctactaaaaataaaaaaaattaactgggcatggtggcgggcgcctgtaatcccagctacttgggaggctgaggcaggagaaccacgtgaacctgggaggaaccccggaggtggaggttgcagtgagccgagatcgtgccactgcacttaagcccaggtgacagtgtgagactctgtctcaaacaaaataaatacctctctagtgaggtggctcacgcctgtaatcccagcactttgggaggccaaggcgggctgatcacttgaggacagaagtttgagaccagcctggccaacacggttaaacgccactactggtggcgggcactagtagtcccagctattcaggaggctgaggcaggagaattgcttgaacccaggaggtggaggttgcagtgagccaagatcatgccactgcactccagtctgggtgacagagcgagacttcctctcaaaaaaaaaaaaaaaaaggccaggggcggtggcttatgcctgtaatcccagcactttgggagcccaaggcgggcagatcacccgaagtcaggaatttgagaccagcttggccaacatggtgaaaccccgtctctactaaaaatacaaaaattagctgggtatggggtcacgcgcctgtagtcccagattgcagtgagccaaaatcacaccactgcactccagcctggcgacagagcgagactccatctcaaaaaaaaacacctccgaaaatttggtgtcctttactaataattcttgggaagtagaaaaaggatatacgtagcaagcttttgttcccacactatacttggtttctaatttgcagttcccttcttgacctgcatagaataatagttattttccattgggaaatgagaaatcttcaacattgaggtaagttaggatttttttttttttaagaggtggggtctcactctattgcccaggctgcagtgcagtgggactatcacggttcactgcaaccttgaactcctgtgctcaagcaatactcccacctcaacctccaa

SEQ ID NO: 4371 - DNA, 1048 bp, Homo sapiens
agagtgaaactccatctcaaaaaaaaaaaaaaaaaaaaaagggcaccggacaagatacagccatttataagaggccccagaagaaacaaccttcgataccttgaccttggacttctagcctccagaagtgtgaggaaataaatttctgttgtttaagccactgagcctttggtactttgttatggcagcccccaaaaactaatacttaaacaattcatctctggttcttctttctcttttcctgcccacctcttaaacattggtattcctcagagttctacatggtcctcctttctcctgttacatagtcttcctggataagaaagggctctacaattagacttgaattcaaatgctagccatcaattaaaagctggctataaattcccaaatctacatttaattttctttttgtataaaaaatggggataagaatatgatatgtttttcttaagagttgttgggaggactaataataataatagggtgggtgaggtggctcatgcctataatcccagcactttgggaggttggtgtgggaagagctcttgaacccaggagtttaagaccagcctgtgcaacatagcaagattctgtctctccaaaaaaaaaaaaaaaaaaaaatttaattacctatgtgtggtagtgtgtgcttttagtcccagctacttgggaggccaaggcaggaggatcacttcagccaaggagttcaaggctgcaataagctatgatcaagccactgccactgccacttgcctgggcaacagagtgagactgcatctcagaaataatatcttttcttggccgggtgcagtggctcacatctgtaatcccagcactttgggaggctgaggcgggcagatcacaaagtcaggagtttgagaccagcctggccaacatagtgaaaccccgtctctattaaaaatacaaaaaattagccgagagtggtggcaggcacctgtaatcccagctactcaggaggctgaggcaggataatggcttgaactcaggaggcagaggttgcagtgagacaagattatgccattgc

SEQ ID NO: 4372 - DNA, 1079 bp, Homo sapiens
acaacaacaaaaaagcggagattgggtttataaaagagctttctttggagagagctactaccatgctgtgagccctattcaatcccaaagagaagaggtggggaagggccaggtgaggtggctgacgcctgtaatcccagcactttgggaagctgaggcgggcaggtcacctgaggttaggagttcgagactagcctggctaacatggtgaaaccccgtctctactaaaaataaaaaaaattagccaggcgcggtgacgggtgcctgtagtcccagctactcaggaggctgaggcaggagaatcgcttgaacctgggaggtggaggttgcagtgagctgagatcgcaccactgcactccagcctgggcagggggagcaaaactccatcccccaccccaaaaaaaagagatgaggtgaggagtaattctatcttctcaatcctagagacagtggcttcaagaccactgaaacattttgtatttgtccttgggtaagggataatcattagactgtgtatgactcacggtagaggaatttcaaggcaaaagctgactaacaacagagcctgatgtaacaaagtagagagtcacatcctggaagtcaccacactggcttctgataaacggtcagatatacatgaatcctgtggaccatgtgtggagccagtttaaatcctactcaagagaactgcctggatgcatagtggggctcttcatgtggaaaagaacactggaaaacaaaaggataatgagagagtggtggctatagaaatagaatacatcacctcacttcaggaagttgccactgcctttggaaagcgcccccagggaagcctctgatggagccatacaaatgctcatgagataattcttaacatcagccaggcctagacagcatgaagccactaataacccttcctcttcattctgccccattcctagaaatatcagtgtagcaaaaggagagaagccaactaccccctctttcacagaggcgagctggctggctctgttgaccctagctgtggggtagagagattcttacctatgatgaaaattgatgtgttaatatatttcgga

SEQ ID NO: 4373 - DNA, 1049 bp, Homo sapiens
agtgatttctttcctcatgatgtgccaatctgcattgctggaaacctgctactgaaagaagttaaaagctgcctgtgaatgtaacgtacaaaagaaaggttaccaaaggagaaaaaactccagcgggtgtacggtggctcacgcctataattccagcactttgggaggccaaggtgggtggatcacttgaggtcaggagtttgagaccagcctagccaacatggtgaaaccccatctctactaaaaatacaaaaattagccgggcgtggcggcacatgcctataatcccacttacttgggaggctgaggtaggagaatcgcttgaacccaggaggcagagtttgcagtgagccgagattgtgccattgcactccagcctgggcgacagagcgagactccatctaaaaaaaataaatgaataaaataaaacaagtacaaatttaaactagagacacaagttaatggtgtttattgtggtggggttagtgagccatcccatgatttcctcctgagtatgttatccctggtttgtgtttgccagctggggaatgaggtgaggtctatgaggctgaatgtgggatcattcaatttctttctttctttctttttttttttttttttagaggcaggatcttgctcagtcacccagaatggagtgcagggtgcaaacactcactgtagcctcaacctcctgggctcaagtaatcttcccatctcagcctcccaagtagctgggactacaagcacacaccaccacacctggctaattattttttgtagagatgaggattcaccatgttgtccaggtgagtctcagaacacaggcttaagcactcttcccatctcagcctcccaaagtgctgggattacaggcataagccactgcgcctggctgagaatatattttcatcctttcttttgtagagaggatctcgttttgttgtgtaggctgctcctgaactcctggcctcaagcagtctttccacctcagcctcccaaagtgcagggattacaggtgtgaaccactacacccagcagttagtgcaatt

SEQ ID NO: 4374 - DNA, 1405 bp, Homo sapiens
ttatttttctatgtttgttatccatggatatcccagaaaggcagataacgttgtttcgtggataggaaaagactgaaattctattttttgattttttttgcaactcccttatggataggattgagacatgccaggtagcctaatggttgttaaatgtggaggaatcatggggtagagactgggttggagttcagggtttttttcccctattacttgacagtgttgttttttttttttttcttctgtgttcgtccgcagtggccaagttgaatgatgctgcccggggctctgccagatcctgagacgcttcccctccctgccccacccgggtcctgtgctggctcctgccccttcctgcttttgcagccaggggtcaggaggtggctcgggtgtgggctggagaggcagaagccctttcctgttggtgtcccagcacatggagccccttgggctgagcaccaagaccttgaaccttttttgttttaccttttttccaaataacagttgggagaaatatcaatgaaattctgggggtgggggtggggttgaaagggtggggtgggagatatggaggagtatgaattagggcttggagttggtaaaaacattcctgactatccttcttaaccacgtggctgatgtggggtaggtatgaggggaaggaagtggagtagcctaatgaaaaggggttctagttgagctctgtagataaatgccttgtttcagtgtggttggagacctggtgtcagataaaagaaactccatccgcacagacagatgcaaacagctcctctagttctgcagagctagttgagaactcaacattaatcattttaaaaagtactgtccttgaaatagatttgctgtgggaagaagggcagtgagtgtgggagaaaggagccgtgagcgtggggaaccccacagagcccaaaggactttttcagtattcgaaataaacaaaacaaaaacccatgaaaaaacccaacccagaaatattctgaagcagttggtgtgttttattggggtttgggagggggaagaaaacaatactgaagacattgttaatgtgagatgcggctgagttccccaataccatcacttaggaaagggagcaggaatgttggcataaaccttgcccatccctttgtttctgtaaccaatgtagaaggtgcatcaacctcagtttgtggctcacaaaatgaggcatttaagatatttgatctaaatggtttcttgacacctaagcctagtccaggtttagcagaaaaggaggcccagtctccttttccctctgtcttccattccttttcaagttcccatgtttgtgagggagaaatgtgacaaaccaaaagaaatatattatttctttgtaataagccaaaagaaactcaagtctttctgctgg

SEQ ID NO: 4375 - DNA, 1059 bp, Homo sapiens
actccatactgttcattgtaaaactaaaagtgaggaaggctcgtgggtggtgaacctctgctctgtaatactgggaaagtactacagaggggaaccatttgagggatacatgaggagagagtaaattgaggtttggggattataaattcaggcaagagaaccttatagatatcacagtcttgagggtcaaaaaaaaatacttaggaagctagccatggaagcttcttgcctctgacccagcccactttcccagcctacctctgggccttagctgctaaaaagcttctctggcagcggagctgcaggcctgaggaaacatgctcagtcatgcacatgtgttgacccatgtttcagatgcagtctgatgccaggtatattgttagggaaagaggaagaagggtaaactgagctagcccctggggctgagtactcctgcagggctggaggaacaggttcttagaagatgattcaccttggaggaagctggggaaagtggttagggagggagaggaggaagactgagaaatctctgcatccccagaactcagcaacccagctcttttatcatgaggagaggtagccatgctgactcatgaacaggtggaggaaaggggttgcaggtgaccagcatcttcaatctagttaccaccagcttggctagaattttattgaacgcaacttgctagttatgacagagaggaccagggtgagaactaatgctcaagagagcaagattctgtaatcctcttgccctctcacatcacaaattctgatatgccaaacatttggcccaatgagaatgactgatagacttgctgatgtgcatgtggggggatgaggtgtgtatatgcctttctcctgactggccattcagtgttcaggctgtcattcaaattggataggagaaagttggtgaggaaggaatggagagagcaggatccctggactccctggtccccaaactccttgactgtcacttgtaattgtatataatttttgtgtttcttgctccatttcctcatgctgtcatccttaaagtccatctgggaaggggaaaat

SEQ ID NO: 4376 - DNA, 1042 bp, Homo sapiens
atactcctgcagcaaatgtatttttcttgttcagagtggtcctccttaccaagagagagtctactttcatagccatgtagctcctgatcagatttttagttcccaaaggtacctaaagctgactgagggattatattatcgttttttaaaaaaaaaatttggccaggcgcagtggctcacgcctgtaatcccagcactttgggaggccgaggcgggcggagcacgaggtcaggagatcgagaccatagtgaaaccccgtctctattaataatacaaacacttagccgggtgtggtggcgggcgcctgtagtcccagctactcgggaggctgaagcaggagaatggcgtgaacccgggaggcggagcttgcagtgagccgagatcgtgccactgcactccagcctgggcaacatagcgaggctccatctcaaaaaaaaatttttttattttccttactctcctctgcaatgactgtaggattataaatcattacattggagtgtgcttctctgtgcggatgaaatggtgggtgaaacatccctgtggaggatcccagttattgagtcttagtcacagatgataatgtgatgctgatttgcatttaccttgctggaggcaaggcaggcgtgggcaggctgtcacagtcatggaacatgtgtgggagctgtgagagtcagaaggaaaatacattatcctcatgaacaggcccagtttctattcctggtctgggagaataatcattttgaggttgttggcttgtggttgatctcctggtggctaggatagccccatatttatccttctctatatcttattcatttctgtttctccagttccaggctattgccctgtacccagtaaggtcctcagttaccctttatgaataagtgattttggtggaacgatcctctactgagtggagtacaaaggatggcaggggctatcccttgactccaaaactatatactctagctgggaaattgcttatgtacctgaaaaagtcagaacacactggggagaagacataagtacatgtaattaa

SEQ ID NO: 4377 - DNA, 1049 bp, Homo sapiens
tccagattcaaacaaagcaactgtaaaaaaaaatttactaaacaattgatggaatatgaaggcttactggagttcttattgggttgttttaggtatgatattggtattacagttctttttttaaaaaatcctaatctcttggggagaatatgcagtattttttggatgaaattatatagtagctggaatttgtacagaaataatctgggtttgggtggggtgggtggtaaagatgaaagattatattgataactgttgaaactaggtgatggctacatagagctacataatctctctactttgtgtatgtttgaaactgttggctgggcatggtggctcagcctgtaatcccagcactttgagaggccaaggcaggagcatcacctgagctcaggagttggagactagcttgggcaacatcggaaaaccttgtctctgcaaaaaatacaaaaattagccaggcatggtggcatgcgctggtagttccagctacttaggaggctgaggccagacgattgtttgagtctaggaggttggggctacagtgagccatgttcacaccactgcacctctactgcagcctggttgagtgacaaagggagacacaaaaaaaaaaaggaagggagggagggagggaggagttcaatcaaaaatgttaaaaaaaaattggggttgtgttttcttaccacattactcagttttagacaatatcctactgactccctgtagtgaaagatgatgaaatcagtactcttcgcagtttcttctatctctactcctcaatacttttttttttttttttttttttttttttgagacagagtctctcttactctgtcgcccaggctggggtgtagtggcgcgagcttggctcactgcaacctccacctcccagattcaagtagttctcctgcctcagcctcccaagtagctgggactacaggcacatgccaccacacctatctaattttttgtatttttagtagagacggggtttcaacatgctgcccaggctggtaatattttgttgaggtttataacatatatat

SEQ ID NO: 4378 - DNA, 1020 bp, Homo sapiens
tggattttattttttatatttttatttttattttttgagatggactctcattctgttgcccaggctagagtgcagcggtgcgatctcaacccactgcaacctccacctcgtgggttcaagcaattctcttgcctcagcctcctgagtagctgggactataaggtgcatgccaccacgcctggctaattttttatttttagtagagacagggtttcaccatattggccaggctagtctcaaactcctgacctcaagtgatccacctgcttcagcctcccaaagtgctgggattacaggcataagccactgcatctggccagattcatatggattttaatttatgcctcctattaagataaaagattattatgtttcacaataatatttggcatatgagttatttttcaggtcttatccatatctttcttgttcaaatgtttaataccccagcaaagctcactcctggaaaaagattttgggatcctataaaaaacattaactaggcatcaataatgtcagaaaaagggaaaatactactgtaaggaattctgaatgattttattagttttatttttacttcaaattttccattccattgcctcaaatattaaggaggaaataggaaaattctatacattatttttctcttctcctttttgaaacaagatattctagtcataaagggcaacaagtccaagtaagaagtttgaataacccaactggcaaaaggaagatatgtttaacgaataagtaaataatatttaattataattatcatattatcgctgggcatggtggctcacacctgtaatcccagcactttgggaggccgaggcgggtggatcacctgaggtcaggaatttgagaccagcctggccaacatggtgaaaccccatctctactaataatacaaaaattagctgggcgtggtagtgcatgcccgtaatcccagctacttgggaggctgaggcaggagaattgcttaaacccaggaggcggagtttgcagtgagctgagatc

SEQ ID NO: 4379 - DNA, 1083 bp, Homo sapiens
agggatgtagtgacttgaggatcacaataaacttttagcctctgcagatgaaaacagagatgcacttcttaggtcattccctggctaaataaaatctgcctggaaatctgtagaattccttgtatgatttatatatatacatacatgattgttagtaaaagcaaagtatatagggaatcatttccccatccttcaagagtggcctttctgcagtgttttctactttggccaacaaggatcaaaacggttaactccttagtgaggaggaggagagtggtatggggaggtagtagctcagtgcttcctgttcactgagacatctcaaagcccttaacactctagtttttaaatgtcctactggacattttgccagtttgcaaaattacatgtaaatggactataagcaattgtgtaagccatatgtcatgctgcaggctgcaaattgttcttaaaatggaggatttgtaattaagaaagccaatgcaagaaatgagtgaagctaactagagtaaacttatgaaaagctgtgaatttcatcatcatagaacattgcttttcagtctgaacattcttctaacaaaccttggatctgaggcttcttgtcctttgcggcagccacagtgggtttttgttgttaggggaaaaataaaaaaccttgcccgcagcatctggttaagattagggcagtttcctgcctaaggagggaagggagagaaaaaggaagaagaaatgcataaggagaatgaggagatatacaatgtctcagaaaacaggaaacattgtcctattttcccttgtcctcttctgacaagatctgggaaagtaccagaatttaggcacgaaagagaagaacgcctcgaagaaatgatcaggaggcaaaacttagacggaaatctctcctttgtgtattctgaaccccactaccaccttgctatttgtctgtctccaagcctgctagggaccctggaggaaacgcactgagcccattctgattgtccagtttctatcccccatttctggttgtgtacgtgtgtgtgtgtgtgtgtgtgtgtgtgtgtgtgtgtgtgtgtgtgagagagagag

SEQ ID NO: 4380 - DNA, 1033 bp, Homo sapiens
caccacacctggctagttttgtttttgtttttgttttgttttgttttgtttgtttgtaaagatggagtttcgccccattgcctaggctggtcttgaactcctggactcagtgaccctcccactttgacctcccaaagtgctgggattaccggcgggagccgctgtgcctagcccaagcctttttattcttcttgaatcctgagatagagaggaagaggtggatagtgacatagagaaagtgaggaaacatgtattagaaaaaactttcttatcgatgaactacatttagggtggaaacctgtggctgtggatcaggtgtgaaccagcagttgcttacggagagatgcatgtggcctgaagtgtcttacttcttcctgtgaatagaaatacttgttttttcagagtaaaatattaacttctatttctttttcttgcgcaggaactgaaacatttgatcttggaggcagcagatggctttctgtttattgtctcatgtgagacaggcagggtggtgtatgtgtctgactccgtgactcctgttttgaaccagccacagtctgaatggtttggcagcacactctatgatcaggtgcacccagatgatgtggataaacttcgtgagcagctttccacttcagaaaatgccctgacaggtgagagttatgtgtatgggaaatgaatgagaagtcctttcttgtttttttcctgagacttaagagatgttttagctgttaaattggtttgttgactctggcaaggcttcaagaattttctactttaatgaatatagtcagttctttttatccatatgagattatctactttgtggctcagccttagaaaatatttcattggtgataatattttacatttatcttaatattggtataaatagaacagtaaaagccaaacctacaatacttttttttttccgttctaaaagaattatccatgtttttatctcatttgtatggataattatctggtattttttctacctcctggtgcttggctttgtgctaggttcaatgat

SEQ ID NO: 4381 - DNA, 1047 bp, Homo sapiens
atttacttcagtatcaatcaagtattcccttaatgccaccaatttaatcaaatgattagaaagaaggagagaatatagtttgagaaaatggaataagaattttccaaataggatggtctacttaaaactacatactttgtagctatatacattgaaatagttaatatgttctaacagtacatgtgcaagtattcaacagactccagttatgcaccttttgtgggcaaaccaggtgtgttgtgctgtgagaaatagaaagaatggtgagacaaatggttttctggtggaaacagacatgtaaataaataaattaaacatagaactagttctataatagaagtgctgtaatgaatcctgtaaaatgcagatatggaaaatgagttggggagtagtgttgtggattttgggaagcacttgagcaaaaacctagaagtgtggaataattgggttatgcaaagaaagtcaagtggtttagcatgtttttggtagataataggaaggtaggctgggatctaatgatggaatgtttaggtgttaaagaatttagattttaatttttatgcagtggggagacataaaaaatgtattagatctggtagcattttaaggattgattgaaagcagggcgactacttaattagttttggtaaaagatgactaggacagtgacaaagcattggaaagtagaatcgataaaactgaattatcactggaatgtgagagaatagttagattttgaggcttctagcttaggaggatgctgttaagaatattggaagagcacggcaggtttttttttttaagagggaaataatgattcaggttttgggatgttgatgttgagttgctggtagaatatttataaatattttacagatacttgaaattcaagtctgctgaaagctcaggaaaaaacgttagtcatgtctagggctatagacttggttattatttcgtagtggggaagagtgaatatggtttcccaggaagaaagtatggtattaataaagagggcttaagatgaactttggaaatgtctacatttaa

SEQ ID NO: 4382 - DNA, 1034 bp, Homo sapiens
ttttttgagatggagtcttgcagttgtcgcccaggcttgagtgcaatggtgcgatcttggctcactgaaacctccacctcccgggttccagcaattctcctgcctcagcctcctgagtagctgagattacaggcacccgccaccatgcccagctaatttttgtatttttagtagagatggggtttcagcatgttggccaggctgatctcgaactcctgacctcaggtgatccacccacctcagccttccaaagtgctgggattacaggcgtgagccaccactcctggccccagttttgtacttctttgcctagtttgggactatgaacaagaggaaatgtagctttgtttgacttctgccacttcctctttccattcttccatttgggtgggtgttccggtagcttgtgttgagaaattttaacttcttaatgttttgtattatcagcaggcttaaagtatttattgttggctttcctcaggctggattttgatgatgatggagaagggaacagtaaatttttgaggtaagagactgaaaaactttccttagatgtctgatattaaaaattagtttatgatctttatacttctgacttgtaaatttttgtccttaggtctaaggagagtacttcatcctaaaactataaatattcatatatctcagaaaatttttaagcattccgttaatatctctagagaaaggacctcagtgaggagaggacggcatttacaaaccctctgtatcagttctctgctacttcatagcctaaaaagaacaacagttcgttatttctcaattctgtggattgactgcatgtttattctgcttatctcacctagactcactcataagactgcattctcagctggtcagctgagaactggactcagctgggatggctgggtatttctgtctatgtgtttttttatcctcaaggaggccagactgaattttttcatgtggtgatggctacaatctacagcacaaatcccagtgtgcaagtgcttatcaagcctctgcttatatgacat

SEQ ID NO: 4383 - DNA, 1050 bp, Homo sapiens
cctttaagccttctcagtgatggggcttaatgctcatggaaaacaccacgagcaggattacatcaaccagggacagtttcaccatctgtaatgtggaaagcagcataatcatcaaagagatacttaaaatcaattcttgtttctctactttagtagaaggaaacaatgatgtgaataacttgaaacagcatttaacattaaaaaatcacttataaatctttcattttgtaattaatcagatacttgtccaccctctaccaccaggcaagtggattttaaaataatttttttttttttgagacagagtctcgttctgtcacccaggctggagtgcagtggtgcgatctcggctcactgcacctccaccctccaggttcaagcgattctcctgcctcagcctcccaagtagctggaaatacaggcatgcaccaccacgcccggctaatttttgtattttttagtagagacggggtttcaccatgttggccaggatggtctccaactcctgaacttcaagttatccacctgcctcggcctcccaaagtgttgggattacaggtgtgagccactgtgcccggtcaataatttggttctttaaacaaacactaggaatgtgctagttagggggagagataacgaggtggccacagaaatatccatcaagtagaataatctacatgcaaagactcatggtgagactgcattgttactgcaccaaagttaaagccatagctctcagagtgttctgccactgcttacctctttcttggcctgtttgatgtctccctcatccttgatgcctagtcctgaggtggaggccttctcagcctccattcggcttcccccagcccggccctccccaccttcattagtcttgaaggatgaatggctatcagagtcagcaaaaccaccttcactgacactattgcagctcaaccatgaggccaccttgttcttgggtgtctcttcggaggaaggtggattgcagccacctacagggattgagggaggaacaggaatatgtgggggtccaagatctggggggtggga

SEQ ID NO: 4384 - DNA, 1049 bp, Homo sapiens
gagttctctgcatcctccctccttgcttgtcacccagttgcctttaaaccaaattctaaccagcctatccccaggtagggggacgttggttatattctgttagagggggacggtcgtattttcctccctacccgccaagtcatcctttctactgcttttgaggccctccctcagctctctgtgggtaggggttacaattcacattccttattctgagaatttggccccagctgtttgcctttgactccctgacctccagagccagggttgtgccttattgtcccatctgtgggcctcattctgccaaagctggaccaaggctaacctttctaagctccctaacttgggccagaaaccaaagctgagcttttaactttctccctctatgacacaaatgaattgagggtaggaggagggtgcacataacccttaccctacctctgccaaaaagtgggggctgtactggggactgctcggatgatctttcttagtgctacttctttcagctgtccctgtagcgacaggtctaagatctgactgcctcctcctttctctggcctcttcccccttccctcttctcttcagctaggctagctggtttggagtagaatggcaactaattctaatttttatttattaaatatttggggttttggttttaaagccagaattacggctagcacctagcatttcagcagagggaccattttagaccaaaatgtactgttaatgggttttttttaaaaattaaaagattaaataaaaaatattaaataaaacatggcaataagtgtcagactattaggaattgagaagggggatcaactaaataaacgaagagagtctttcttatgccttccttgcagttatgtaatattttcttttttaaatttcacatgcatgtaatttgagcactttgaggggccaaggagggtggatcactagaggtcaggagtttgagaccagcctggccaacatggcgaaaccccatctctactaaaaatacatctagctgggtgtggtggcgggcgactgtaatctcagctact

SEQ ID NO: 4385 - DNA, 1044 bp, Homo sapiens
ctacctccctgcccttctcctccttcctgctggaatgaactaaagcagatgtcaagcaggggctggtgggggtgcctactcccttttccactctatctttagatttcaaaccttaggcttacagcccctcaatatctctctgctaacaccagtgtctctttctagttaggcctctaatcttctgtttctgtttaccagcttcccagcaactttccttttttaaaatattaaaaatttaattcaggttctcttaattatcctcatcctgctgttgcctccgcccttaactctatccctattaggaaccttgtttcccaccgaataagagttaaggtaagaggtagctcttcacctgatgacattccatttaagttttggggcatctttcctgccctctgccaacctccctgctggcccaggtgagaggaggaagaggggtctggaaagaaacccagaatgcggcagaactaggagtaagtccatctcaaggtggacttctgatcattgaggatggtgagataaataggttgaaaacaatcatctgtgagtttaggagtcttaagatcctcacagcacgggagcagggagaggctctagaacaaggtttcacaaccgagatgcctttgacattttgggctgaagtgttctttgtaaggaaaacctgtttcctattttgtgcattacaggatatttagcagcaaccctggcccactctagttatgacaaccaaaaatgtctctatacattgccagatttctcctagggggcaaaatcgcctccatttgagaaccacaactctaaagtcaagatatttttctctgaagtgatttctgcttggcacgctaccctcatcatcttactcatcttaagcccgagccatggatcaactaggagcccatataaatgaggctcagtagggctgcacataatctccaaacaattctttattcagtgttttgcttgtgtttgcatgttgctatgatggacaggtccccctcctccattcttgccctctggagaagtggttcctgcagtgtagagata

SEQ ID NO: 4386 - DNA, 1124 bp, Homo sapiens
cttgtcctgtcacccaggctggagtgcaggggtgcaaacatggctcactgtagccgcaactcttgggctcaagtgatcctcctgcctcagcctccccagtagctgggatgacaggcacatgctaccacaccctgctatctcgtttttttgtgtgtgttttttttgaggcggagtttcgctcttgttgcccaggctggagtgcagtggcgatctcggctcactgcaatctccggttcaagcgattctcctgcctcagcctcccaagtagctgggattacaggcatccgccaccacgcccagctaatcttttgtatttttagcagagatggggtttcaccatgttggccaggctggtctggaactcctgacctcaggtgatccgcccaccttggcctcccaaagtgctgggattacaggcgtgagccaccacgcccggcctatctcttgtttttaaatcagtctagggtgccaaagcatcagggttcccggcctgcaagaaagggagattcctgttcatgttaaagtgtcatatttatgaaactgccctttttggaatctttgaggttgtctgtactataggactggggaaatgcaagtgagtctaagaagaaacccagatgtgtcctaccctggctggcagtagtgagaagggaggaagttcttccttggacactagtactattggaaagttccttatgtctggttcactgatgaagcttgaggatagaattggtgaggagggaggggagaacaggtcacagctggaggggagcctgggccctatagggtgtgaggcagagcagagtggcagataggacatgtggacggtggggaaaatattcctcatgggacagaagatacctggcacatgtacccacaacctgtacacagatgatctgtactggacacacgtggagatatggccatgccacgcatgtgcaaacagaggtgtacacacaggagtgcagtgatacaggacacagataaacagaatgtacacagccttcaggaaggatctcaaggtcaggtaataaaggaactgctgctgactggcttctgggagggattggatttcactggagggaaatcaggaggaatagggcagcaaacagagagggaagaaa

SEQ ID NO: 4387 - DNA, 1022 bp, Homo sapiens
cagccagtttgggccagttgcagagggaagggccttgagtgacaatgacagctggctggaactggggcagtgctggagagagggttcttttcccccaccccacagggtcttctggggatacaccaggagaggagcctgctggcttgcttcaggggagagggaacttcgctcctcccccacttttccctgtctcccctttcagggccggcttatgggtgagggggcaccccctggggcctgagctgccccgcacaggatgccccgtgccccccacttcatgcccttgctgctactgctgctgctgctctcacttccccatactcaggccgcctttccccaggaccccctccctctgttgatctctgaccttcaaggtgagtgcccagtacctaccttgccccatctctgtgaacaattagagactgagaccccctgtgtgggaggcaaggtgcaggaaggctcccagcctcaggaagctaacagccagaccagcaaaaagaaggaaacaggtagagtgagctgacacctcctgccagctgcttctcatccctgggcctggtttcttcacttagaggcagcatcgtgtggaggttaagagcatgggctctccaggagattgagaccatcctggctaacacggtgaaaccccatctctactaaaaatacaaaaaaaaatagccggacattgtggcgggcgcctgtagtcccagctactcgggaggctgaggcgggagaatggcatgaacccggaaggcggagcttgcagtgagcggatatcgctgcactccagcctgggcaacagagcgagactccgtctcaaaaaaaaaaaaaaaagaacatggactctcagctagaccaaaccttagcaggtttgaatccctgccaagctgctcactagctgtgtgaccttggttaagttacttaacctttctttgtctcagtctcctcagctgtaaaatgaatataatagtattctgagccagtggtgggtactcaggaggctgaggcaggaagatcacttg

SEQ ID NO: 4388 - DNA, 1043 bp, Homo sapiens
gaaacttcagggggagaggagcctgaggtgaggctcaagaacatggcttatgagcctgcctccctccactccagccatcctccccagcctccttgtctgccaaaaattccttggcctggggcagttttattggcaagattagggaatgggaactggacctttcccagttcttgggctgaatctagagttgagtcctttagactcaaaaggctctttttatatccttgttgcctttcctatcctttttacctttccctggccttagaacagggaagcagagactccccctcagcttcttcctcatctccaactatgtgacataatttatttggtgctaatattgaagtaatatttatttgctatattttatttcttcccactcttagctgaaaaatggaatttctatagccctggggtgaggagaacccgggaacagtgagccagtgactgctggttctccactttccccaccttgttagccaaacatgttattgaggatgaggcaatcggtgatatagcccaccacagagaatggatgactgttggccttttctccaatctcaaagtgacagatttgggctgattctttttttttttttttttggtaccccattcctgttgaatgggctcagtcttgacaaaccaattccctgtaactttttcacaattcttgactctgagaaaaagcagcactgtagggacctgaactctccattctaccagttcacccttctgacctgttctgctcagcctgtggtgaggggaacagatggaagaaggctttccttggggtttgaagaggaagccagttgtgggagtctctttgttacaccccctcccctccagaccctctctctctatgccttcctcctcactgcatatttatttgcgatttgtagcactgatctatggtacagttgttttgtttcttaaacagaagtaggtaagggaacctcagtaataatggaaatctgcctcagtctcctgtttggaaatgatgagaggtgagataagtaatgtttatatacctcctttcttctgtg

SEQ ID NO: 4389 - DNA, 1035 bp, Homo sapiens
ttttttgagacagagtcttactctgtcgcccaggctggagtgcagtggtatgatctcggctcactgcaagctccgcctcctgagctggagattctcttgcctcagcctcccaagtagctgggattacaggtgcccgccaccatgcccagctaatttttttgtatttttagttgagatggggtttcaccatgttggccaggctggtcttgaactcctgacctcaggtgatccacccgcctcaccctcccaaagtgctgggattacaggcttgggccaccccgcggcaattcccaggttttcaacatcagtaactggcttaggagaccctgaaggaggagcaagttcagtggggaaaaaacaaatttatttttgaacatgttgaatttaaggagtttgtgagcaattcatgcagtgatgagaggtcagttaaatatgcaaatctggtgttccaataagagatctgggctgaaaatacaaatttggaagtctttagaatatgggtggtaattgacaatattggagtgcatctgagcatgtagggagaaagctcagagtgagaaaacagaggcctgatagagtcctgcagacactaaaatgtgatagtttcatacaagaggaggagctttgaaaagagcctggaagtgaccaacgagttggagaaacccaggagagtttgtgttaaaaatgccaggaaagagaatgtctcaagagagtaattgctgctgagacgatgattagtagaactgagaagtgcccattggttttggtgagatagaggtcagacattaccttagcactttttggggaccaagtcgaatcaaagtatattggggagcaaaacttttcaagcttggccatgaagggtagaagagggaatggaagctacagaggggtgtgagattaaggtaaagttgtttttattttattcgaagatattagaaattatgtctttcatgagaaagaactgagtttaaagaaagagaagaaaaaacggttattaatagtgtaggtttttggagatgggaggcaaggctg

SEQ ID NO: 4390 - DNA, 1043 bp, Homo sapiens
tacaactttagttacctaatttagatcattcagaaaaaaaccacacataacaaaatgcaaaagggccaaaatattaccaataggtgatggggtaaaagatacatgagtattccttgtactattcttgcaacttcgtaggtttgaaattatttcaggccaggcacggttgctcatgcctgtaatcccagcattttgggaggccgaggcaggcagatcacgaggtcagtagttcaagaccatcctggctaacatgatgaaaccccatctctactaaaaatacaaaaaattagctggatgtggtggcatgcacctgtactcccagctactcgggagtctgaggcaggagaattgtttgaacccaggaagcagaggttggagtgagccgagatcgtgccactgtactccagcctgggcgacagagcgagattccatctcaaaaaaaaaaaaagaaaaaaaaattatttccaagtacaacatttcaaaataaataaataaaatatgtggacatgaattcaaagatttcttcttatctcactctcttccaggtcggaagtctatgcgtcagtctacagctgagcatacacgacaaacgttccttcgggtacaggagaggcagggccagtcaagacggcgaaaggggccccactgtgagcggccactaacccaggaggaactgctccgggaggccaagatcacagaagagcttaatttacggtcactgggtaagtctgtggtttcagaaaaagtgagtagaggggctgaggggcatgagaaaaaccatgagacctggaggaccaaagaactggagagatggaaatttgggatgatggaatcagaaggaagaaatggcggagagtaggtaattaggtgcaagagtctaggcagttatgagcactctgaagaacaagctaaggtactttggtgtaaaataagagttgtatagaactgaggtcaaatcctcgttctgctattcatttgctttaagtctgtaggtaaattacttattcacattttgcttttcttgtttataaaatggggtatat

SEQ ID NO: 4391 - DNA, 1022 bp, Homo sapiens
ttcagaggactattggatgaaggctggagctaggagaaaggacagcaggaagaaccttgctaacagagttgagatttgggggttagtggtggaagtaagttgcaaatactgtctcactcttcccccaggctccctacctgatttatgtggaagtccttgaatgtgaaaactttgacaccaccagtgtccctgcccggatccccgagaaccgaattcggagtacgaggtccgtagaaaacttgcccgaatgtggtattacccatgagcagcgagctggcagcttcagcactgtgcccaactatgacaacgatgatgaggcctggtcggtggatgacataggcgagctgcaagtggaggtgagagggcttcagggaggtaatgctgggtcacaggagctttctccaggagctttcactatattggaaacaagacagcatatcccaaggcagggtaaggcaagtatcctaatgagtggtgtaggtagtgaggggtaatatggggaaagctctgaacaactctagcctggaatagattcaggtggagttcattttccaggtgaaggattcagatttaaatgtaaagaggagcttctaggccaaggggagtgagggaaatttaatgaaaatatttattgaacacctacataaagttgtcatagaatagcagaggatgagaagtcatacattaattcattcaagaaatttttattgagggccttctatgtgccagacctgagtgctgtatgctagtgaacaagacttggcccctgcctacaagggatttatgacctaactggaaagagaacaaggccagtaagcaagtagttgtagtgtggtgagagtcaagtcatgggggaaaggataggacattataagagcaccagacttggggcgggcatcacaagagatttcctggaggaagtaatctctcagctgaggctggaagcatgggtaggaattagctggacaaagagtgctggacagagggaacactgcatgcaaaggccagaagacaagagggag

SEQ ID NO: 4392 - DNA, 1048 bp, Homo sapiens
tttttggtcttggttgtactgagggaggaagaagaggttgtgtggcccggtcgaacttgtggcagcctgaaggccccctcaggcggcgccgcgggcagccccgcagccggggcctggtgcagcctccgcggccgctgtcagggaagcgcaggcggccaatggaacccgggagcggtcgctgctgctgaggcggcagtgtcggcagtccaaccgcgactgcccgcaccccctccgcgggggtcccccagaggtaagctactcctccttcatgagtcacctttgccctgttgggtgggggggggggtccctctcccaccctgtcccgcacagtcttccccacctgagttcgactacgaaactgccctcttggtgtcagctgcaccccgggttccttctccaccctttcctctcaggcctggggtcctcctccgctttttggcttcctcttctattagctcctccctctgcctcggggattcccccctccctcactcatccctgttgcctacgtctcgaataattcttttttttaagtcatgaaccctttccatatcagacgactcccataatgcccatccttgtccttcctcgtcgtctctgcccctgccccaaaccttttccatggactccacctttatctcttttcctagtttgcacttttcctcctatgtccctgtgcaactccagcactgggttcccatttccctgagctaaagattgcatccctgtcttcctgtgctgcttctgattccattacctcactgtcacccacctacccagccagctcctggcttccaagaattgcctgttcccttctccttaagggatctcgggcccttgtcatcaatccaaaagtaccatttacattcttactttgaacctagtcctcactcttctctgggatgcattatgatccctataactttctttagcttctctttctccctcctcaatcccccaactttctagaggtttctgtctgtaggggagagatttgacagtgcccttcccattcaggatttccaactttgacacctccctcgagttt

SEQ ID NO: 4393 - DNA, 1016 bp, Homo sapiens
ttcttttcttctttttcaaaataaggtttccctatattgcccaggctggtctcaaactcctgggctcaagtgatcatcttgcctcaaccttgcaaagtgctgggattacacaagtgaaccaccatgccctgcctacaattctttttttttttttttttttttttttttttgagacagggtcttactctggtgcccaggctggaatacagtggcacaatcacagctcgctgcagcctcagtgttacaggcataatcatcacacctgactcaattctttatagaaggaatctgatagaaattcctttatagaaggaatctgatagaaatttgatagagatagcagccaaatggtaattattattttattttattttattttggatagcgtcttgctctgtcgcccaggctgaagtgcagtggcatgatcttggctgactgcaacatctgcctcctgggttcaagcaattcttctgtctcagcctcccaagtagctgggattgcaggcgtgcaccaccacacctggataatttttgtatttttagtagagactgggtttcaccatgttggccaggcaggtctcgaacctctgaactcaagatatctgcccacctcggcctcccaaagtgctggaattgcaggcatgagccactgtgcccagcccaaatggtaattctactgactcctttattctctccctagacaatattaaacaacattcaggtattgacctacattcttttcagtcttctgaaaaggtgtctttcttttaaacattggagcagcctaggacccccaggatggtctcaccaccccaggaatacaccatactttccctttgaggcctttaaacatgctccctgaaatgtccacctcaactggagtcctgattccctccttctgcctcacctgccatccaggccagatttccttgtcctctgggaagcctccttccctggctcctccaggccaggggcccattttaacgctcacaaagcctgccacacttaacctcatca

SEQ ID NO: 4394 - DNA, 1083 bp, Homo sapiens
tctaggtgaccctgtttaataggctttcacagactggggaatgctcaagatgtgatgggcctggtggtacaggtgtgacatttgttaccacccatttctcccaccccaccctgcttttttgtttgtttgttttttcatcccccagcacactataatatagtgaactggaaaagtcccttccagaaacagcttggccagctttgtgaacctttgacatctgaaaacaaccaaggatccatctgggcttctcttccccagctttttgcctgatgccattttattgacagacaatggactttgaagtcagcctttgcctttgagaaagttcaagaactatggttggtcacgtctatctacaacctaatcctactctttggtagtctctgcagcagccacagccttagcagagctggggttcctgtcttctgcacacgattgactttcttgatgggtaattttttttaagattataccaacagtggatcagctgggttttggccaggaagttgtctttgtggactctgcctgcatggcttagtagtagaaggaaatttttttttggttttgttttttataattcagtttaatcaataaacatgtatttattgactgtttcctgtgttgagactgaatgtgtggaggtttcagattgaaagctcattgtttggctttacaagtttgttgttaacggacaatgcaaatggagggatggttttattttttccttcagttctcactgaatttctgtactttgaatttgctgcctatattttctttctcaagaagtttggagaggatttgtgtcagaatcgcctacagtgttcattttaaaaattcaagctgggcatgatggctcatgccagtaatcccagcacttgggaggctgaggcaggaggttgcttgagctcagaaattcaaggctgtagtaggctatgatcatgccactgcacgccagcctgggcaacagaatgagacttttgtctctaaaatattcaggtttagaaccattccagggatggctgatgccccagctgacttgagggcaacctgatgcagaatagttctactagattatttttaaag

SEQ ID NO: 4395 - DNA, 1930 bp, Homo sapiens
tgatttttttgtatttttagtagagacggggtttcaccttgttggccaggctggtctcaaactcctgagctcaggtgatccacctgcctcggcctccctaaagtgctgggattacagacatgagccactgcgcccggccccagccagattcttgagcactcatttcattttctcccctgcttctaatatgtttcctccttcaactcttagagctatttgttcttctctcctagcagagtgagaggctctgttttttcggttttgatggtctgtgctctaatttcatagggccttgctattcaagtaccagtagtattaggtgggagcttgttagaaatgctgactctcagccccgccctaggcctactgaaccagaatgtgaattttaatagatcctcagtgacttgtatgcatattaaagtttaagaagcatggtgacaggaaaactggcttaggttgagattagggtgcactgaagaagtgtctcttttgttgggggcattgtcactggctggtgatctctagcttagccagcagaactccgtaactcataccacttctttgtctttctcagcaatcatgttccacggaagagccccaagtatttggctttgtttaaaaattctgtgaggtaagaaaaaacttattggcagcatcttaatttttcaggtttttacattaattttcaggtttttcattatttggagaggtggttatgtgaattaatttcagaaaaaggagaaagtgggagggcattccttttctttcttaagcctcaaagcttaatggtctcaagtgtcactgctgtgtttgtcttacatagtctcaattctcttttttagtggaatcaagctggcctgcacttcatgtacctttgttacctctgtgggcgatgctatggccaagcatttggtattcaacccctctcacagatccagcagcatcctgccacggggtaagtaggagagaaggggattagttgagcaaggggaggaaaaaagatacaggttcgtactgtatgcatcaggagcatacctacttggcctcactcattcactgttgagatgtgctggacctaattagaaaccttccgacctgaagtttatataaaactgggaaagctggtcactgcgaacagcgtatttgtatgtagtaagttgaatcccagggcactgtctttggagggcttattttttcactgagctaactatttttgttgtttcattttccataggactcacttggatagctcactcaaggtaacaaaaactcacctcacaatttaatttctggtttgcagtgtgtttactctgttattattattattattatcatattattgtttcaatttcctagttgaactgagatttctcctcttctctttgctcctcacccctttaggcatggccagactcgtgaccgagtgcatgaccggaacgtgaagaatatgtaccctcctccttccttccccactaacaaagctgccactgtgaaatctgcgggggccaccccagctgagcctgaagagctactaactcccttagccccagcactcccatcaccagcctcaactgcaaccccaccaccaacccccactcacccgcaggctttagcccttccaccgctggctacagagggagccgaatgtctgaatgttgatgatcaggatgaagggagcccagtcacccaagaacctgagctagcatcaggtggtggtggtagtggtggagttggcaaaaaggagcagctgtctgtgaagaagcttcgagtagtactgtttgctctatgctgcaatacagaacaggcagctgaacacttccgaaatccccagcgacgtattcgccgttggcttcgacgtttccaggcctcccagggggagaatctagagggcaaatatctgagctttgaggcagaagagaaactggctgag

SEQ ID NO: 4396 - DNA, 1029 bp, Homo sapiens
gaacagttggatttatgaaacaggaaactttttggctatagagacccacaataagatggaaagggaagattagagcagtatcctttagtgtcatctgtccctgtctccaagtgactatgcctccccttccccacagtttctgtgagccagcagccagtctcggctccagtgcccatcgctgcccatgcttctgttgctgggcacctctctacatccaccaccgttagtagcagcggggcacagaacagcgacagtacaaagaagactcttgtcacactaattgccaacaacaatggtaagtgggattattgggaaataataatcctgggctagaggggtgaaagaataaaaaaggtctcagggacagccctacctgtttagttaggtacagatgtggttctactagttggaaaatgaatttagtaatgattctctgatacggaagtgatttctgtagatggtgctattccttctaagttagtgctgactcggtactggtgtttcaagtgagagagcagtagattcttgctattgataatttcttggagagaaaatgtcaacccaaaattcctgttaagatttttttgtttggttggttggttgtttttgtttctttaatgagaaaaattccattagtttggtaagaattttcccagggcagttctgtattttctctggcagattcatttgtttattggttcctgagtatggaagataggatagggttgttgtctacatgaaagaaatggtgaaagactagtgtttttagtgtattttattttattttttttaatagaaaggctatatagtattggtttctatttaatttctaatgtctatttctacactcctaagatgagttgttgaccagttatgtctcaagattcataactgaagtaggcactttcatagagtcattgcatcgctgcgagggactttattttttaattattttatttcctttaaaactaaaacagctttagtactacaaaaataatatatgcattgtagaaaaactataaagtgaaa

SEQ ID NO: 4397 - DNA, 1022 bp, Homo sapiens
ctcggcctcccaaagtgctgggattacaggcgtgagccactgtgcctggcctgagaggacaaatatttttaaaaagaaatgatagttctttatgtatagaatgtgggatgatttttttttaattgccctcgttttcagaacatgtattcagtttgatcagtgattttcagtcttggcactattgacatttagggtcggataatctccaggctatcctatgcattgtaggatgttctgtagcactcctggccactacccactagataggtcagtaacacctctcctcacccccaccctgattgtgactaccaaaaatgtctctagacattgccaaatgccctctggggggcaaacgtgacctctgataaaattcactgtcacttatgaagattccttaattatttatttatgccttttatgaactagggttcccttgatgtaagctaggtacaggtgttgaatgaatcccttctgcagatgtagtgtatagcttgggcggtgcctgatatatgttggagaacactggaatatgatgaaatattttagcactattgggaatttaattgaaggttcgaaatgagctcttgttttgaaagtaaaggtgtaggctttctgctgtatctaaatctctgttttccacctctgccaccaccccctcatgcatttgcttgaaaaagatccttactagcttaggaatagttgagaatttcgtttgaaatgtttgacatgatctgtctatatcttgtgttcaaggaaagatagttttgtttgtttgcgtgtttgtttgtttgtttgtttttgagaacagggtcttgctctgttgcccaggttggagtgcagtggctcgatcacagctcacttcagcctccacctcctggacttaagagattctcccacctcagcctgttgagtagctgggactacagatgtgcatgccaccaacactctgctaatttttctactttttatagagatgagatttcaccaagttgcccaggctggtctcgaacctctgggctcaa

SEQ ID NO: 4398 - DNA, 1044 bp, Homo sapiens
caggtgatccgcccgccttggcctcccaaagtgctgggattacaggcgtcagccaccgcgcccggccgggttttacttctgtaggcatttacccaactagaggaaagggaaacggagggggcagggagggctgctcgttggcaaacgattaattttgagacactattgctcagggtctgagagcttgaactctgaattcgaactgttagcacaatcgttctcaacttcggggtgcataaaaagtaacttgaaggtggttaaacgtacaatttggggggcctcatcccccaaatttatttgaatggagcagaggggggttgtcatctttacattttcaaatgagcagtcctggggctgagactgattaatgtaaccactacattgagaattactggtctaacataaaagtgttcaagatgttgaaacaagtgacaccttgtgccgttgatttccttcccttttccagagctgtgttggtggtgtatctcaaactaaaggaggtaacagaatggactcttgggacgaacctgatttagttagagtttccactcccatcttgaactagtggtataatgtaggaaagcagttctcaaagtgtggacagatgacccatggggatctcctcttaccctttcagggtagcctcaaggtcataactattttcaaaataatagtaagatgctatttattgttttcactgatacactgatggttcaaaagcaaggctgggtaaaactactggcggtaccttagcacaaagcaagtcaggggcaccaaactacttgagaatgcccttgaagcagtaaaatttattattctatttttatttttttgaggcggagttttgctctgtcgcccagggtggagtgcagtggcactatctcggctcactgcaatctcttcctccctggttgtatttttagtagagacagtgtttcgccatgttggccaggctggtctcgaactccggacctcaggcgatccacctgcctcggcgtcccaaagtgctgggattacaggcatgagccaccgtgcccggcctat

SEQ ID NO: 4399 - DNA, 1027 bp, Homo sapiens
taactgacttttaagaaggcccttgggccaggcaccgtggctcatgcctataatcccagcactttgggagactgaagcgggcggatcacttgaggtcaggggtttaagaccagcctggccaacatggtgaaacctcgtctctactaaaaatacaaaaaaaattagttgggcctcgtggcggggacctgtaattccagctacttgggaggctgaggcagaagaattatttgaatccaggaggcagaggttgcagtgagctgagatcgcgccactgcactccatcctgggcaacagagtgagactgtctccccccctacaaaaaaaaaaagagaaaaagaaggctctcaatattgcccaacaaccatacttcatgtttccctagtttattcactctcctcccttactggatgagtattttctgcctttttctttcttcttatgcctctaatactttcccttctcaccctcagttggtctcgcttcctatctcactaagagaaaataaaagcagtcagaagagaactcccagtctcccattgcctcacatatcctcccccctgcatctgtgcctgatgttctgcttcttcctgctgtgagtgaaccatccacactcttagggagaccaagccttccatttgtgcgctgcattccattttctttggcctactgaaggacatccatctctgctagatgtttcgtatcagcatataaacatgccacaactgcatttctctcttcccagtctctctctctctctctcttttgttttgggtttttttgttttgttgtttttttgttttttttgtttttggttttgagaatgagtctcactgagtcactcaggctggaatgcagtggcgtgacctcggctcactgcaacctcctcctcccgggttcaagtgattctcccacctcaacctctcaagtagctgggattacaggtgcatgccaccacacccagcttatttttatatttttaatagagacagggtttcacaatgttggccgggctggtctcgaactccta

SEQ ID NO: 4400 - DNA, 1098 bp, Homo sapiens
cagacctgagcataatcctggctctgtcaatagctcgctgggtgatgttgagcaaatcattttccctctctcagtctctcattttcccaaggaggttggaccagatgatccctgaaattcccttccattttgaagtgacaagcttatggggagaagaaaagcagcaagataatcttagaaattgggagaatatgttatgaaatagaatgcacctcccattacttacttttctttttcttctgtcttttagaggtcattttcttctgaggaagtcattcttaaggactgttctgtccccaaccccagctggaacaaggacctaagactgctctttgaccagtttatgaagaaatgtgaagacggctcctggaaacgtttgccttcatataaacgtacacctactgaatggattcaagacttcaaaacccattttcttggtagaaacagccactttcccattaatatatctgagcatcaaatataaagctaagaacagattgaagtactagttactacctgaaaaaaagaaagaatataatgcaggattatggttctatagtcaccaattttatagaccagaaatcacaataaattttgcagattggagagcataaagcctattgtcaagaataagactgctcccaccctggcattcttatcaccattagcaagagtgaagaaagggccccagagagcttccaccctcctacaacctcatcacctctccgtcttgaggctgtcatctaatctcatttcaccctttatcccatatctggttatatcaccctaagaagcttagaacactcaggttatacccacatctcccagtatctaaatccccagggcaacccacccaacacccaaaacacacacatagcaattcctatccttctgtgtttttttactaatatacttttttagcattataattttatagaaaaattagcctaaagtacagagagttcccatataccctttatcccctccccacccctaatttctcctattattaacatctcacattactgtggtgtatttgttacaattgatgagccaatattaatatattattcttaattaaggtccatagtttgtttt

SEQ ID NO: 4401 - DNA, 1027 bp, Homo sapiens
acaagacagctccaggcactcagcatcccaatacggtcaggacaccattcgtggacacccggggtcaagcagaggaggaaggcaggggtaccaccacgagcattcggtagatagctctggacactcagggtcccatcacagccacaccacatcccagggaaggtctgatgcctcccgtgggcagtcaggatccagaagtgcaagcagaacaacacgtaatgaggaacaatcaggagacagctccaggcactcagtgtcacgtcaccatgaagcttccactcatgccgacatctctagacactcacaggcagtccagggacaatcagaggggtccaggagaagcaggcgccagggatccagtgtgagccaggacagtgacagtgagggacattcagaagactctgagaggtggtctgggtctgcttccagaaaccatcgtggatctgttcaggagcagtcaaggcacggctccagacaccccaggtcccatcacgaagacagagccggtcacgggcactctgcagaccgctccagacaatcaggcactcgtcacgcagagacttcctctggtggacaggctgcatcatcccatgaacaggcaagatcaagtccaggagagagacacggatcccgccaccagcagtcagcagacagctccagacactcaggcattccgcgtggacaagcttcatctgcagtcagagacagtagacactgggggtccagtggtagtcaggccagtgatagtgagggacattcagaagagtcagacacacagtcagtgtcaggccatggacaggctgggccccatcagcagagccaccaagagtccgcacgtgaccggtcagggggaaggtctggacgttcagggtctttcctctaccaggtgagcactcatgaacagtctgagtctgcccatgggcggaccaggaccagcactggacgaagacaaggatcccaccacgagcaggcacgagacagctccaggcactcagcgtcccaagagggtcaggacaccattcgtgga

SEQ ID NO: 4402 - DNA, 1051 bp, Homo sapiens
ggcaggtgaatcgcttgaacctgggaggcggaggttgcagtgagccgagatcgtgccactgccctccagcctgggtgacagagccagactgtgtctccaaaaaaaaaaaaaaaaaaaaaagattatttcttcctctggttttatagttgagaagctgatgtctcctcgacttccaactggaaccttgaacccccacatttctggaccttgagcattcctcaagtaggaagatgtaatgcaccttgacctctttctaaataagacacttccccaaataaggggagttgagagtgaacagtcttcacgtctccacccacttccagatcccagaggagacagacatcggatggctggtgagagagaagcctttaatgaaagatgagttgcaggcttggaccgctactcttgcgcccttggtgggggtgggggtggggtgggcaagggtggggttatggagagggataagtggggtgaggtggaagcagggggaagaggcaggtctgggagggtggagaggaagggcgctgcccaatgtggctgtctgctcaactgttctcccagaagaaattgttacaggccactgtgagagcagccacaagcaccacatactcctggaagtccacctccccgtctccattctcgtctagctccttcatcaccttgtccacagcatccacatccttctgggcctgtggtgggaggagaggaagagggaggtgtatagggaagggtacagcactgagtcagaggcaagggggtggttgaggagcaggaggcaaagatgagcgagaggaactgcattgaattatgggactcttctaggcctcctcaaaggtcttgagggcttctgttgcctacagcataagctctttcacctggcagaatgaataataatgacaccagttaccgtatgttcagtgcctataataaagcaagcactacactaggagctttacaagcactgtctaatttaattctaatacaaataatgtgaggtatgtttcattatttccattctagagaagaaacaaattggtaatcggtggttaaa

SEQ ID NO: 4403 - DNA, 1441 bp, Homo sapiens
ggaaaatgcttctcagtccacgtgagtccctctctaaccatttggattaagataaactttttaactgcagtgaatagcaggatacccccatacttcctctgacagaactattttgcctgtgacctcgtgtctggatttttatttttaccttaaggaagcaaattaagatttagagaaagcagagaatgtatagttctggaaatagcatagtcagcttcaattctaccttaggcatggaaatacatgatcgtattgattttaatgtttgggtcactattactttcagagttaaagttctcatcagactactgaaggacttgaggattcgttttcctggctttgagcccctcacaccctggatccttgacctactagtaagtaaagatgggcaattggagttcctcatcatccttatttactagtagtagtagtagtagtagtagtagtagtagtagtagtaactctgaaattcaccagagtctgaaatttggtgaagcttaaaagaaattttattggtagacaagtaatccaataaaaattcaacatttacatgactcagagacatttgtttaaaaaaaaagaaaaaattcaaagtttttttttttttttgtatattcaatgaaatgagtagttactgagttatagtgtcccgttttcttctcatgactgctaccatttaatcatggtagtagagagaaatgagtgagcagccatttcagaattgcttctgaacatgaaaattttggctagacttagaccttaatgaccagttttcctcgtgatcatttaaggttttagtttgatgcctgtaatcccagcactttgggaggctgaggccagaggatcacttgaagccaggagtttgagaccagcctgggcaaaatagcgagactctgtctctacaagagaaaaaaaaaaaaattagccagttgtagtggcttgaacttatagtcctagcttctcaggaggctgagtcaggagggttgcttgagcccaggagttcgcggttacagtgaactatgattgcgccactgcactccagcctggatgacaaagtgaggccctgtctctaaaaaataaagttctagttatcagaagtgccattttgatggcacacctactggatttattatttttcagggccattatgctgtgatgaacaaccccaccagacagcctttggccctaaacgttgcatacaggtacagcatgctttgggtttagggttggttgtaaactattttgtgcattcctttaatacctcatacctccctgtgttctaggcgctgcttgcagattctggctgcaggactgttcctgccaggttcagtgggtatcactgacccctgtgagagtggcaactttagagtacacacagtcatgaccctagaacagcaggtattgggacagatatgaactgagttgttttgccccactcttt

SEQ ID NO: 4404 - DNA, 1088 bp, Homo sapiens
gcagtaaaaacaagtgtagaattttctgtttttaacctttttctgtcgtagtaatagaaaaaacaatctctcctgtatattatcttcggcaaatagaatgtagttgtttacttctggtttagtgtgaaatggcctttccccgggtcaagccagcacctgatgaaacttccttcagtgaggccttgctgaagaggaatcaggacctggctcccaattctgctgaacaggtatgttcttttggctgtcttccagaaatgtctctaaagcagttaaaagtattggtaaagagtaactgttggtaaggttaagaatggtgttaacagagcctgaaatccacaaagggtttaattgttctccttatttctcattgtgggtggagatagccaggtggatatataaacaaattacatatgcattcttatttttactggggacaaagagttgttctcttcccatatattcaaggccagaatgaagtgtttttaaagccctatgtcagtattgagtcagcttgtatggaagggattaggagaaaatattcaaattctgagaaattgcttataatttttcattttcaagtattgtttcatactgtttttcaggcatctatcctttctctggtgacaaaaataaacaatgtgattgataatctgattgtggctccagggacatttgaagtggtgagtttttgatgatttagttttaggaaagggcagctttggtagtgtggaaattgccttggctcttgacttttaattttcagttgtctattatccaaagccaagcctaaaatgagaaagtacagtggaatttctttgtagtactgatcttggggacaagacttgtatcattgttatgctagctgtgatgtatcaggctttcatgtggtggttttgggggtgatttcacctctgctacttcttaatttgggtaacaggtagctgtgttgtaacagttctgggaggacctaggcacctttttttcttctaaattgtttttccccgaaatcctttttccaacagcaaattgaagaagttcgacaggtgggatcctataaaaaggggacaatgactacaggacacaatgtg

SEQ ID NO: 4405 - DNA, 1097 bp, Homo sapiens
aaagaacctagtcttatgggcctttgagggtggattgtcaggggatgatagaaaggattttaataagtcatcctgaggaaatttcacctagtgagagccacatccatctgcacagccttaggctgcgtgaaccgaggtgaggctgagctcctgtgaaagccaagacctcctggtccaggactttgtagagtaaaaagaaccaccaacacaaaaggggttgagggggctacaatctggagacctggggtctcctactaacttgctatatgatctttggtagagttaattttctgagtatcaattttcttatctgtgaagtgaagagggggatcatctggccaccaagtttaaaattctatacttctcacctgccaaaaccaaaaaacaacttgaggtgaggaaagtgttgggcccagaaaccagggaggaactgaaagtgactcgcgttgaagtggttatgtgtatgacaatgctcttggagaactgccagtcctctatggttacccttgatttgggagaggcagcagagtcatgtccagggcatcagaccagtgacatctttgcctttatgcctctagtcatctgagggcggggactaggcctcaagccccatctcacagccaaccacagagcccttaagggtggttgacaattgaatgccccaggttggtgctttagttatttactccctttgtgagctacaggatgtgtaacttttcccccatcttggtgataaaataggagagcgcagacacagcccacattttgtctcctttcctcagatttcatctgaaccccgctaaaggcagctgtttcacagtctgtctccttcaggggcccaatttccccacagcctgggctgagtactcctactctcttctttaggttctgggctgataaagcctggagagggtacagggtgatgggtgaagccctggtgaaggtgaaaggatagattggggttggggggtggggagcagggaggtgggatggggaatggccttccctgaatagggtgggtgggaggggaacaagacccttttgcacaactctctttaagtttcctttatttcttttttaactcattctgattttct

SEQ ID NO: 4406 - DNA, 1050 bp, Homo sapiens
cagttacatagaagctgcttcttgactagtatagctcggtgaccctttgttcaaccgctgaggtttgatttcttaccctttcttctccccattttcatactcttcccagggattagtgatggaggtgaggtctccctaatcatggtaaagtgttaaccttccacctcctcccttccctcctccttcctcatccttctgtcttcctcaattctccgtctcttttttttcatcactgattgccttgtgtccctccaagtctacttgttactatccatctccaggctctgggccgtgtagacactaaacctcatgccctaaggacaggaggaaagaccctctgtttggagcattattagtagagtgaggatcccaccagttctgcctggcttcctccatccccagaggcactaaaagcagtattttaaggttggtgtcttactccctggaagcctgaaatgggtggaatagcggtaaggcttgagtaaaactaggggacagaggttcttatttgtcgattttattttataatttgaccacagcatctgaactccctctctccctggaataagtatttttcccacatttttggatatatgtatggtagacaatttttttttaagacacagagataaatgttttcctgctttggttacctttcctttcccctttaaaaggaattagctatagaactgctttgtaaagatgcttcttgatattttacttttgttccttttccctaatcattcccttttctccccactcctccagaaggcataacccttctctccacaccccctacccccacccccgtcctaggctcccatcctttccatcaagaccttcattagcttatgatatttgctgccgagatgttataacaaggactcgttcatgtatataagctatttcttgatccatttaaaaggaattgtacattgtgtagaaaaaaaaaaaaacctgaaaaagagaaaaaaaagccctagccatggatattgtgaaactgtgttatgtcattttgtaatgtgcccgtttgtgtatgatccgtgcaaa

SEQ ID NO: 4407 - DNA, 1052 bp, Homo sapiens
tgccaccacacctggccaatttttgtgtttttcttagagacggggtttcacaatgttggtcaggctggtctcgaactcctgacctcaggtgatccacctgcctcggcttcccaaagtgctgtggttacaggcatgagccactgtgcccggcgcaagcaattcttttgtctcagcttccaaagtagctggaattacagatgtgtgccatcacacctagctaattatttctgtttttagtagagatagggttttgctatgtgggccaggctggtctcaaactcctggcctcaagtgatctgcctgcctcagcctcccaaagtgttgggatcacaggtgtgagccaccatgcctggcctggaacttctgtttttaatgtgagtgtttttgcaacattgtactgaattactgtgtttagtcttctgtgaatgcttacagttgagaaacacacacttacatagataactaagaaagaccttataaaaagctgtaaaccaatactaaaccatactatagagtattaacaacatacagtctagactaactgaagttattaaacttgaatttctaaacaggtagacttctgggaaagcctgccagtaaagtgcccagaggagtcagtattagctataaatagatcacaaagtgaataattcagacactgataactatttaaaactataaatgtatatgacagggataagtacagtctttggtaaggagatattaagaagcaaaagtattggttgagttagagtcctttgactttgaattgacacagtattttcttctcagtgtgatacagtagaaaatcaggaaacatcccagctttatcagttagaagctacctttgttgttgttgttgttgtttgagactgagtcttgttctgttacccaggctggagtgcactggcacaatttcggctcactgcaacctctacttcccaggttcaagcgattctcctgcctcagcctcctgagtagctgggattacaggcgcgtgccaccacgcccgcctaatttttttgtatttttagtaaagacgggttttcact

SEQ ID NO: 4408 - DNA, 1044 bp, Homo sapiens
cagtagaaggatgagtaactttcatgtttccactgtagtttttcttgtctagagaatgcttccagcttctctagagaaggggtagatagttttctatctaaccctataggattagatagtttataccaaaaaaagccaaggacttcccagccactaatcagggtttacaatgatggtagatttatcccatagaccattaaatgaaattaccaagtctggctgtgttcctgtgtttctacttagctatgtattataggcagtgttttcccttttgcattttgtgctgtattatacacagcgtacaacctgtgattagttcttttcctcttcttcccctccagggtcacagtgtcatccgttcagctaccaataccacccttccacacatgttgatgtctcaacgtgttattgcaccaaacccagcccagctacagggtcagcggggcccgcctaagcctggccttgtacgcaccacaacacccaacatgaatcccgccatcaattatcaaccggtaagagagagctgagccctaatgtggaaacagagaaatccctttgtttgctttgcttgtcgaaagggccataggttttaagtttttatacatagataaactctaggacaaaaatggttattttggtagggatttaattgagagcagtcccaaaagtagaagctttgaggaattatattaaaatagtagtggaggagagaggttatacagcagagcagcagtaagctaaaaatctgcctagaagagagtgatctagggaataagaagcacaaggatgtgtgacagaaagcaaaatcttatttctgtctcttttttgtttgtttgtttgtttgttttttgagctggaatctcactgtgttgcccaggctagagtgcagtggcatgatcttggctcactgcaacctctgcctcctgggttcaaggaatttccagctaattttgtgtatttttcgtagagacagagtttgaccatgttggccaggctggtctcaaactcctcacctcaagtgatctgcctacctcggcctcccaa

SEQ ID NO: 4409 - DNA, 1033 bp, Homo sapiens
acccggccccccttggatttttttaattcagcatagaagttttcttaacttttgttggaaatagcttattttttccctttcttgtctagtgagccagagcgaggaaggctaactccctcaccagacatcattgttttgtctgacaatgaggcttccagtccccgttccagttccagaatggaagaaagactcaaagcagccaacttagagatgtttaaggtaaaaagaaagaaaaatttctttcttcttgttatgctccttctattttatttaattcctcaagagatttagttctgttttttgactatttactctttggatataaatacccattgatgaaaactttatagtaactcttgacttcaagggctttcaaaaggaactattagaagcaagtggagacgacagtttgaaaagcatatatgtaggccattatactcagtgttatttatctttggaaaatgaaaacaaaagttcataattaagtcatataaagtaaactcttggctgtaaggatactttctgcactctaacctaagtaactgaatatgaagggattcctaagtttttatgtatatctagaggaaatgtggctttaagagatttaggaacattattttaaaagaagacaatgtttctctttagtcattcttctttttgccaggaatctggctgattagcatttatacgtggtctgtcctttaattctgtaagcatttctttgagtacctactgaatgccaggcactgtgccagactccagtgatacaaagataatcctattgccacttctgcttcttgtggaagatgaaggtttcagagctaagaagtaaagattgtctcttgcaggaaggaattctgggtaccttgctgccatagctgaaagtcttcttgtttccttaggggaaaggcattgaggagcggcagcagcttatcaagcagctgagggatgagctacgattggaagaagcccgactggtcctgttaaagaaactgagacagagtcagctacagaaagagaatgtggtccagaa

SEQ ID NO: 4410 - DNA, 1085 bp, Homo sapiens
aatacaaaaaattagctgggcgtggtggtgggcgtttgtaatcccagctgcacggaaggctgaggcaggagaatggcatgaacccaggaggtggaggttgcagtgaactgaggttgtgccactgcactccagactgggcaacagagtgagactctgtctcaaaaacaaacaaaaaacaaccaaaaaaaaacataaaaaaaaagagagagagacagggtcttactgtgttgcccaggccagtctcaaactcctgggctcaagtgatcctcccacgttggcctcgaaagcactggaattacttttgtgagccaccatgcttggcctgaaatatattaatatttcttttttcttttttttttttttttttttggagactgagttttgctctcgttgcccaggctggagcgcagtggcatgatcttggctcactgccacctccccctcccaggttcaggctattctcctgcctcaccctcccatgtagctgggattacgggcatgtgctgccaagcctaattttgtatttttagtagagacggggtttcaccatgttggtcagactggtctcgaactcttgaccttaggtgatccacctgcctcggcttcccaaagtgctgggattacaggcgtgagcccccatgcccagcaatatttcttacatagtaagacttgaaagttaaaattactccttgattcatggtctgtagagtggatgtgttagccacatgaaaacaacattaatctccttgttcatctccatcagagctcttggtgactgggtgcattgtcaatgagcagtaatattttgaaagggatcttttttctgagcagtagatctcagccatgagcttaaaatattcagtaaaccatactgtaaacagatgtgctgtcatccagacgtcgttgttccattgagagagtgcaggcagagtagatttagcctaattcttaccttttttctaagtgatggagtcttgctatgttgtccaggctggagtgcagtggctattcacaggtgcaatcatagtgctctacagcctcaaaatcctgagctcaggcaactctgctgccttagcctcccacat

SEQ ID NO: 4411 - DNA, 1029 bp, Homo sapiens
tggatggatagatgtgcagatacatgaatacacagtacttgcttcttaagatgtctggctctgagaagggtgttgtactgtgtaatagattttggaaatgagctagacctgtgttgtaattccagatttactttctaaagctttgcagttgggatacatctcttcccacctgtgaagtagaaacaatactacctacttagtagcttgttgaaaagatttaagtaagtttcttctccaactggaatggagaaaaaaaatatataagtaagaatacgtgataaagtgtccaatagcatgtttggatttaagtgggtggttaagaaatagtatttgttattattaggatcacagaagaaacaaaaaaagattggttaggcattaaaaggcaatatgcaacattcattttacaaaattttcttttttttgcagaggaatatttatgtgataagttttcagtgaatattatttttacagttttataataggggacataatttaactgtagaatttttttttagtatatttacaaagttgtgcaaccatcacaacagtctgttttagaagaacatttccgatcaccctaaaaagatcacgtgtacccttccgtaatcagttatgttggattttgtttttgcaattttgttgtggtaaaatatatgtaacatgaaatttaccatcttaaccatttgtaagtatataattcagtggatttaagtacattcacattgttttgcaaccatcaccactatctacttgcagaactttttcttcatcccagagactctgttcccattaaacaatcacccctcactccccacccctaccttagctggaaacctctattctactgtgtttttttttttgtttgttttgtttttggggttttttgtttgtttttgttgttgttgtttttgagataagggcatcttactctgttgcctaggctagtcttcaactcctgacactcaagcattcctcccacaccagcctcccaagtagctagaattataggcacttgccaccatgctc

SEQ ID NO: 4412 - DNA, 1051 bp, Homo sapiens
gagtgaggctgcagtaagctatgattttaccagtgcgcttcaggctgggtgatagagggagactccatctcaaaaagatgtggtcttttttacttatctacagaagtgtgtctagtttctcagctgtaagcattcagaggtcagggactaaatacaataattaagtacaatgttgcaaaaatactgacattaaaaatagaagttccaggccaggcacagtaggtcagacctgtaatcccagcactttgggaggctgaggcaggcggatcacttgaggccaggagttcaagaccagcctggccaacatggcgaaaccctgtctccactaaaaatacaaaaactagccaggtgtggtggtgcacgtctgtaggctcagttacttgggaggctgaggcacaagaatcacttaaaaccaggaagcagaggttgcagtgagccaggagattgtgccatcgcactccaacctgggtgacagagcaatactccgtcaaaataaaataaaatagctttgactgtatgtaacacactaatcatgactaattcgttggaactaaaaatgagataggactgaaataaaaaataagaatttaatagaaggcataaaagagcaagaagggccaggtgcggtggctcacgcctgtaatcccagcacttggggaggccgcagcaggtggatcacgaggtcagaagttcgagaccagcctggccaacctggtgaaaccccgtctctactaaaaatacaaaaattagccaggagtggtggcggatgcctgtaatcccagctactcgggaggctgaggcagagaattgcttgaacccaggaggcggagattgcagtgagccgagatcgcgcgactgcattccagcctgggcgacagagtgagactccatctcaaaaaaaaaaaaaaaaaaaaaagaacgcaaagaacaagaaggggttggacacggtggctaatgcctgtaatcctagcactttaggaggctgagatgggaggatcacttgaggccaggagttcgagtccagcgtggccaatatggtgaaaccccatct

SEQ ID NO: 4413 - DNA, 1048 bp, Homo sapiens
cataaaagtggccaagtatatgaaaaattgctcaacattgctaatcatcagagaagtacacatcaaaaccacaatgaaatatcatcacttcacacctgtcaatgtcaagatggctattttttttaagtggcaagggagtgaagaaattggaacccttgcacactgttggtgggaatgcaaaatggtacaagcggccactatggaaaacagtatggaggttccttgacatattaaatatagaactaccagatggtctagcaatcatgcttctagatatttatccaaaataaaatcaggatcccaaagagtgacaacatggatgaagcttgaggacattatgctaagggaaataatacagtcacagaaagataaataactatgtgagtctacttatgtgaggtatctagtcagattcataggttgacagagtcaaatggtggttgccaaaggctgagggggaggagaaattggggagttgctaaacaatgtatgtaaaattaatgtcaaacgggaaaaagctctagagatctgccatacaacactgtacctatagtcaacattaatgtattgtacacttgaaaatttgttaagagggtagatcttgtgttaagtgtttttaccacaataaaacaaaaaaaaacttttttttttttgaggtggagtcttgctctgtcacccaggctgtagtgtagtggcgcgttcccggctcactgcaacctccgcctcctaggttcaagcgattctcctgccgcagcctcctgagtagctgagattataggcgcacaccaccacgcctggctaatttttgtttatttagtagagacgaagtttcactatgttggccaggctggtctcaaactccttcacctcaagcaatccgcctgcgtaggcctcccaaagtgctgggattacaggtgtgagccaccgcacctggccaacaaacaattttttaaaaattaagtatgggcttattaggctgagcgcagtggctcacacctgtaatcccagcattttgggaggctgatgtgggcggatcacttgaggtcag

SEQ ID NO: 4414 - DNA, 1033 bp, Homo sapiens
agccaccgtgcctggcctaaaggcttcgttttaatgtccatgagccttaggcctgtatggaacagagttagaaatgcaaatctctatataaagcagggagccttgaaggttcatactcaagagaaaggaagggaccacagaaaattccatctactagtttgaggaaacaaggaaacttctgtgtctcagcttgggctctggctgggggtagatgggaatgtctcctgaaaatttatgtttggactcaagaatatacaataaggaaaggatcaatagggcaaggatagtccctccaacaaatgttgttgggaaaagtggatatccacagcaaaataatgaaattatcttgtactgtacacaaaaatcaacccaaaatggattaaagagttaaacataagacctgaaactataaaactcataagaagaaaacagggaaaaagcattatgacattggtcttggcaatgatttcgtggatatgacatcaaaaacacaggcaacaaaagcaagtggaactgcatcaacctaaaaagcttctgcacagcaaacagcagaatggaaaggcaatctacaaaatgtgaggaaatgtttgtgaaccatatatttgataaggggttaatctccaacatatgtaaggaactcatacaactcagtagcaaaaaatatatgtatattaaaaaataggcgcttcactgccgtccgttgatttatttctccaggaagaaaaatggcatctgttgcagttgatccacaactgagtgtgatgactcgggtggtcaacctgcccttgatgagctccacatatgaccccatgtcctcagcccatgtcagtacaaaggaccagtgtcctacttgaagtctgtgtgtgagatggcagggaagggtgtgaagaccatcacctcggtggccatgaccagtgtgctctgcccatcatccagaagctagagctgcaaattgcagttgccaatatccgtgtctgtaaggggctagacaggattgaggagagactgcctattctgaatcagccatcaactc

SEQ ID NO: 4415 - DNA, 1029 bp, Homo sapiens
agcctgggcaacatggcaaaaacccatctttacaaaaaatacaaaaattagctgggcgtggtgatgcgcacctgtagtcccagctactcccagtcccagaggctgaggtgggagaatcgcttgagctgcaggaggcagaggttgcagtgagccgagatcatgccactgtactccagcccaggtgacagagccagaccctgtgtaaaaaaaaaatatataaaataagtaggagccatactcataccttgaatttagcctaattagacccattttagacttaatgactttctgaatgaaaggtaatacaatttgtattgtgtttaagccactaaatttgtggtaatttattatagcagccatagaaaactaatagtaggctgggctcacgcccgtaatcccagcactttgggagggggaaggtgggtggatcactagaggtcaggagtttgagacctgcctggccaacataggaaaaccctgtctctactaaaaatacaaaaattagccgggcgtggggacacctgtctgtaatcccagctactcgggaggctgaggtgagagaatcacttgagcccaggaggcagaagttacagtgagctgagatcttgcactccagtctgggcaacagagcaagactctgtctcaaaaacaacaacaacaaaaaaaaaaaacaaaaagaaagctaatgctacagttacgtttcaaaaaaatacggacaatctcctattcaaccacaataccattataaccaacaagattaataataattccctaatattatttaatacttagtccatttgaaaatttacccagttccccatagtatcttttgtagctgtgtttaaaccaagattcaatcaaagattatacattatatttgattatgtctgtaagtctctcttaacctagaacagtctgtatcaccacctctttttttttatatcaacttttttgaagagaccgtgctcattgatttgaaatatgttccacattgtagatttgtcagattgtttccatgttaattgtctc

SEQ ID NO: 4416 - DNA, 1046 bp, Homo sapiens
ccctaccctaacaccactctctgaccccttttcatgtctaatttttttaatgatacttacaaatacataacatacatatatacccacatacatatgcaatttgattgtttctcttttcttttttggagatagggtcttgccttgtcacctaggctggagtgtagtgatacagtcatggctcacttcagcctttacatagacccaagtgatcctcacgcctcagcctcctgagtagccggggctttgtttatgagacatggtctcgctctgttccccaggctggaatgcaatggcatgatctcggctcactgcagccttgacctcctgagctcaagcgatcctcccacctcagcctcctgggtagctgggaccgcaggtgcatgccaccatcctgggctaatttttctattttttgtagagatggggctttgccatgttgcctaggctggtcttgaactcgtgttttttgtagacatggggttttgccatgttgcccaggctgatcttgaactcttgcccaccttggcctcccaaagtgctgggattacaggtgtaagccaccatgcccccagcctgatttctggatttttaactcaataaagggaatgatgatgtctttattataaatatggactataagaagagaaataagttagattggaaggaaggatatcccgtcactctcccataactcaccaggcagaagaaagaacaaccttataggaagggggaagaattcagaactatctagtttgagaccttgatcctattcttgaagtcagccacattttaacattcttgttactgggcctcttctctatttgagagcaattgcatctccagatttctccagttactatattatccttgaattcactgtcaaattatttgtatttcttacaatactaggtaggtgcttcaaaactgaatgatttcaaaagaatcttcacttgacctcttcaatgagatggaagttcttattgcttccagccttcagaaagaaggtcttgttggattatctaattcagagttttaaaaaacattac

SEQ ID NO: 4417 - DNA, 1087 bp, Homo sapiens
accaacctgggcctatttttacttttctgacaagttcttgaaggttataatatatatatttttaatggattagaagcaatttggaggcaggcgtccttctcagttaaagttctgagactccttgtatatggatccgtttctgttaatcttagattaccctttcttccgacttactctcagcttgaagtttgctgcctgaagtaactccacacactttctctcctctgcctagctcctctttttagagtatgtttgcaggagacagagacctttaaagccagttcattcaacaagaaatgttttgagtgcctgttatatactggttaggtgaaaaagttaagaaaatgggctgggccccgtggtttatgacttggaggccacgatgggaggatcacttaaggtcaggagttcaagagcagcctcagcaacatagcaagacctgtctctaccaaaaattagccatgtgtggtagcatgcacctgtagtaccagctacttgggaggctgagtccagaggatcacttgagtccaggagttggagattgcagtgaactatgattgtgccacggcactccagcctgggtgacagaaagagaccctgtctctcaaaaataattttttttaagtagataagaaaatgaattttaactaccagtggcagtgagtcgtgcctggaatcttaatgttttgggaggccaaggtgggaggatcacctgaagctgggagtttgagaccagcctgggcaacatagcaagacccaatctctgcaaaaaattttaaagttagctggttgaggtggcacgcacctgtagtcctagctcttcgggaagctaaggtgggaggattgcctaaccctaggagttcaaggttacaggaagttttgattgcaccactgcactccagcctaggtgacagagtgaggccctgtcttttggaagaaaaaggaaagaaaatagtttaactacataccattcatgacttctgggtgctcacagttttctaagggaaatggacaagtaattcagtaataagacacagaaaatgacatgtttccaaaattccttgacaggccgagtgcaagtggctca

SEQ ID NO: 4418 - DNA, 1032 bp, Homo sapiens
agcattgtgaaggatctctgttcaaaactctgctcccctagtgcctattattattacttccatggtataaaggataaaaagaattttttgtttttctttcatataaaaaatattcctaaggaaagcctacatccgttctactttgcatgaagaaaaacaggatttttaggccgggcgtggtggctcataacctgtaatcccagcactttgtgagatcgaggcaggtggatcacaaggtcaagagatcaaggccatcctggccaacatggtgaaaccttgtctctactaaaaatacaaaaaaattacccaggcattgtggcacgtgcctgtagtcccagctactcaggaggctgaggcaggagaattgcttgaacttgggaggcggaggttgcactgagccaagatcgcacagctgcactccagcctgaagacagagcgagactctgtcttggaaaaaaaaaagaaaaacagaatttttatagatgagtactggagaaggttggaaaaatgtagctaactcctattcctttatttaattatgtacttagattgcttactttcctgttgtttttttttttttcttatttctttcttttgagacggaggttcactgtcgtcacccaggctggagtgcattggtgtgatcttggctcactgcaacctccacctcctgggttcaagtgattctcctgcctcagcctcccaattagcttggattacaggcatgcaccaccacgcccagctaatttttgtatttttagaattttgcatttttagtagagacagttcaagaccattttgccaggctggtcttgaactcctgacctcaggtgatccacccgcctcggccccccaaactgttggggtcacaggcgtgagccaccgtgctcggccactttcctgtttttctttgtgaaagtttggagcagtcattcttacagtgcctagtaataaccaggagagagtagtaaaaatgcagattccttagccccacccaaataaatttaatgtcatgaaatagggcctgggaag

SEQ ID NO: 4419 - DNA, 1053 bp, Homo sapiens
ctgagcaatagcaccaaactagtagcaggcattgtgttctttattgtcatgcagtttaaatttgcagtaaaaaaaaaaaagtttcatttaagaatgttcttgatgaagcagtaaaaattaattttatttaatcttgaccttttagtacttggcttttgaatattttgtgtgataaaatgggaagtactcaaaaaacacttctgttatatattgaagtactgtggttgtctaaggaaaagtacttttacagttatttgggtttccagctaactagttgtcttcttcatagaacagcatttttacttgatgaaagaataaccaacaaagtacgttatttagacttgggtatttggcagatgctttcttgaaaattttcaaggaaaacaactatttttgcccagtgataaaattaaagcaaaaatgagaattttggaaagtttatatactccaccatgagacggtccacttcccagttagttttgtggggttttttttttttgatattatgtaatatgtcaaccttcgaaagagctgcatgacttagtgaactagaagttttcacatgaccaatatattatgtgacaaaatcagatttggtgagagatccactcaaagtataaagtagaccaatgtattttaatgtaataatacaaaagttcattgatagggtttcagagttcacatttgctgctaacctttagaaattactgggttgcttttttttttttttttttttggagacagagtcctctgtcacccaggttggagtgcagaggcgggatctcagctcactgcaacctctgcctcccgggttcaagtgattctcctgcctcagcttcccaaatagctgggattacaggcacacgctaccacacccagctactttttcatatgtttagtagagatggggtttcaccatgttgttcaggctggtctcgaactcttggcctcaagtgatccgcctaccgcagcctctcaaagtgctgggattacaggcatgagccaccgcgcctagcctaggttgctttttaaaaattaagttaaatttcacat

SEQ ID NO: 4420 - DNA, 1023 bp, Homo sapiens
ttctgccttagccccccaaagtgctgggattataggcatgggccaatgcaaagaacctttcactctaatactgcctgttcttcttttcttttttgaggcggagtctcgcctttcacccaggctggagtgaagtggcacgatcttggctcactgtaacctccacccgccgccctcccctcaccaggttcgagtgattctcctgcctcagcctcccgagtagctgaaattacaggcgcctgccaccatgcccagctaatttttgtatttttagtagagacggggtttcaccatgttggccaggctggtctcaaactcctgtcctcaggtgatctgcccgccttggcctcccaaagtattgggattataggcatgagccaccgccctgacctctcatatcaccttttctaaatgattgtctggcacatttgctttcgtgtatgtcagaacttctgtgctgatttgtaaggtgacagtaggagaaagctgtttacctcctgttcattacctctaggcagcacactctaacttgtcacatttaagcatagcgacctttacaatccttggtgcatattactgagcagtatgttacccactgcaaggtcatctaggctctttctttcaagaatgtgagccaaaggtttgtgtagtaaactcagtgatacagaaaagacactgtaagagcatgtaaacagtaatagtctttcataagaattactctcttaccagtctggttggatcggaaaccaaaaatgacaatatagatagcatagtacgatggttaaggacattgactcaggtaagacagtcctgtgttttaaccacgcccagccatttaaggactgtgaaatctttttttttttttttttttttttttttttttttgagacgaagtctcactgtgttgcccaggctggagtgtagtggcgcgatctcagctcactgcagtctccgcctcccgggttcaagcgattctcctgcctcagcctactgagtagctgggactacaggcatgcgccaccacac

SEQ ID NO: 4421 - DNA, 1028 bp, Homo sapiens
atattctgcattataaggtagtgtacctagtttttactttagccaaaattttgataaatacatcttcccaaatagtggtagacacttacttcacttgtcaatcaatcagtcattgattggtaactcccaagtgattgaaaactgacttcccttgttagactaaactgcctttttccagagaactcagcagtgcacattaggttgggtgtgattcccaatttgtgtatcagggattgggaaagcaaatggttttctttgtattagtgcttgattgcctggtgtgctatttctaaacatgtggagaggaatcctcatctccaaagaactgatgttttcttttgaccagttgagctattttctgtttaatgaagaaaaaatgtaactttttgaccatatgaatggggtttggctgttctgtgatctgatttgttgttgtaatagtaattttgaagcattgtggtctgatttctccaaatagactggaccgactcaaagcagacaggactataagaagtaggagaggactaacagctagataaacaaattttggcttgtattattggacaccagtgaataattttaagtgtaagttaaccatttagccatgtttcagcataatgttggctttttaaaaaaacagctatttttcggccagacgcagtggctcatgcctgtaatcccagtgctttgggaggctgaggtgggcggatcatgaggtcagaagattgagaccatcctcgctaacacagtgaaaccccgtctctactaaaaatacgaaaaaaaaaaaaattagccgggcgtgttggcaggcacctgtagtcccagctagtcgagaggctgaggtcccagctagtcgggaagctcagacaggagaatggcgtgaacccgggaggcagagcttgcactaagctgagatagcgccactgcactccagcctgggcgacagagcgagactccgtctcaaaaaaaaaaaaaaaaaaaaaaaggaaaactatttttcagcgtttgtaatggttctaatactgatc

SEQ ID NO: 4422 - DNA, 1749 bp, Homo sapiens
aactttcctcttgccagctgtttccttttatgttgtctccatctttctcattagtgtaattatgaggggggttaattgtgtgattgtcttgaaattccgataattggatggctcacaagtctaccaagtttgagtgaagtaaattctgaacttgcctgcccagagtgatttataaatatacatggtacattctttgttttgtgtgtttttttttttttttttttttttggagacggggtttcgctcttgttgcccaggctggagtgcaatggcacgatctcggttcaccagaacgtccgcctcctgggttcaagcaattctcctgcctcagcccaccgagtagctgggattacagggatgtgccaccacgccctgctaattttgtatttttagtagagataggttttttccatgttggtcaggcttgtctcgaactcccgacctcaggtgagccaccacacccggcctgatacattctatttttattcaataattagatctagttctagtatagcctgttgaacatagcaattcagtgaggtgattattaaagtggagggcaaattaaaagatttatggaagtcactgactgtatggctgtgataacttacattttagtcttaggttttctattattactcctcatggtttggggctcttaagtcagagattgagtagaacgtcactatatagagggtagctatatatttttttcttttttgcattgtttatgatttcagaggataaagataagagcaaccttcacaacagaagtgaaagatgagaagcttaatgtagagtaaaatgtctgaagctctaagtgaaactgttgataagctgggatttctactcttggaacgctagagaggaagagacacttagatacttagtaacagcaaaaagccaggccaaaaagtagaactcaagtgcttagaaactctgtggcaaaagagataaacgtgactactaaaactactttctctttcgtctgtggcacttagttgataacagttgttagcacatttagatgttcaagtttaatttttgttgtcagaaaagtatgaacatttgtgacttgcctaaaaagaacttggtccccctgcaaagatagagggaaggtacagatcggagtgaatgaaaataatcagcaatcaagtattaagaaatgaagtatttgcacacctcatcactgggaatcaatagcatgctgctgatacaggatgagaataagttagggatttaggactattctagttaggtactatcttgtagacactactagagatactttgtcttttggaagacagaaattattctgtaggtattaaatactaatataatgctccatatgattttcatggttttttttccaaggataggcagtggaatcccccagttgccttaggaaaatgtataccacccttacagaagagattggcctagacacatcttgtgctgtatgataaatgaaaaagttgatctgtttattttctctgttcctgtatgatgattaagtcattgagtagtgtatggcagtaattttttttttttttttgagatagagcctcactgtgttgcccaggctggagtgcagtggcgcgatctcagctcactgcaacctccgcctcccaggttcaagtgattctcctgccttaacctcctgattagctgggattacaggtgcctgccaccatgcccggctaatttttgtatttttagtagagacagggtttcaccatgttggccacg

SEQ ID NO: 4423 - DNA, 1034 bp, Homo sapiens
cctgcctcagcctcccgagtagctgggactacaggcgtctgccaccgccatgcctggctaatttttgtgtttttagtagatacggggcttcaccatgttggccaggatggtctcgatttcttgacctcatgatccgcccgcctcagcctcccaaagtgctaggattacaggcatgagccactgcacccggccataaactctgtccctaattttcattgtgcttatgtcttttagtaattatgttaaatctagccattccttttatttttaaattttagtcagtttttggataggtgatatatgcacatggtacagaatttacaattggaaaaagtttacagtaaaaaaggacatctctttctttggagacagaacttaatctacttcttttccctcccctcccccccccccatacttacctcctcttacccttcccctctcctttttccttccctttgcctctcccccccacctcttttttttttttttttttttttttaaacgagacagagtttcacttttgttgcccaggctggagtgcagtggcacgatctcagctcactacaaactctgcctcctgggctcaagcagttctcctgcctcaacctcccaagtagctgggatttacaggtgcccgccaccacacctagctaattttttatattttgagtagggatggggtttcaccatgctggccaggctggtcttgaactgctgacctcaagtgacccacccaccttggcctcccaaaatgctgggattactggcatgaaccaccactcccggctgccttcccttttttcttccctttcctttttttttcacctctttctttcctttcccttccctttttcctttcctttcttttccttttttatttgtgtgtttctttgaggcggaatctcgctgtcgcccaggctggagtgcaatggtgcgatctcagctcactgcaaactccgcctcccaggttcaagcagttctccttcctcagcctcctgagtagttgggattacaggtgcccaccaccacacctg

SEQ ID NO: 4424 - DNA, 1051 bp, Homo sapiens
gacctcaagtgatccacccaccttggcctcccaaagttctgggattacaggtgtaaaccaccacgcctggccagtttttatgatttttaaatgattgaaaaaaaatcaagagattattttgtgacatgtgaaaattacatgaaattcagatttcagtgtttataagtaaagttttattggaaataactatgctcattttttttcatattgtctttggttgttttcatgctgctacaatgtcagagttactagtcacaacaaagatgttaaggcctccaaaacctaaaatatttactatctggctaaagaaaaggcttgctgggcctggcttgatggcacacgcctgtagttgcaactacttgggagaggctaaggtggaagggttgattgaacccaagaggttgaggctgcagtgagctgtgatctcaccactgtactctagcctgggtgacagagcaagaccctgtctcaaaaaaataaagaaaaagaaaataagcttgccagtctgtgatgtaggtgaattctggtcccagattaatggtcatattactggatactcaagctattcttttcttttcttttttttttgagacggagtctctattgcccaggctggagtgcaatggcatgatctcggctcactgtaacctccgcctccctggttcaagtgattctcctgcctcaagcctcctgagtagctgggattacaggtgcgtgccaccacgtccagctaatttttgtatttttttaagtagagatggggtttcaccatattggccagatttgtctcgaattcctgacctcgtgatccgcctgcctcggcctcccaaagtgctgggattacaggcatgagccactcactgcgcccagtaaaaaaaaagaaatttttaatagaatatatatatgacatttgcagctcattgttttagtgactgtataatatttcattgtatggatataccttaatttacctaatctgtccacttctgaggaacagttagggtgtttgcaatttgtgtatacgtgtgctatgataaccagccttccagtg

SEQ ID NO: 4425 - DNA, 1823 bp, Homo sapiens
accctctgtcttccagtttcaaatgattttcctgcgtcagccttccaagtagctgggattacagatgcctgccaccacgcccggctaatatttgtatttttagtagagactgaggtttcttcatgttggccagactggtctcgaactcctgacctcgtgatccacccgccttaccttcccgaagtgctgggattacaggcgtgagccaccgggcctggcatatctatttatttttaagacaaggtctcatgctgttgccaacgctggagtgcagtggtgcagtcacggctcactgcagccttcacttcccgaactcaggtgattgtaccactttaacctctcaagtagctgggaccacatgtgcgtgccaccatacctagctaattttttgtattttttgtagagaggggatttgccatattgcccatgctgattttcaactcctaggctcaagctgtctgcccgcctcagcctctcgaagtgctgggattacaggtgtgagccccacacttggccaatgttagaactttattgggaaagaatatttaggcatatggtaaagagtatttaggtatattgtaatatgtcctgttaacagaaattctgtacttttcctgttgcttacaattctgctatttaatgattttcatcgctattattttgttaacattgaacaatttgagtactactagtactcaaaagtactttaaagtatttaaacttagtttaggaatgctgattgcctagttcatgaagtcttattttataatttcatctgtaatcctgaatctcaaactatggcagaaaatccagggctctgagcaatgatatgagtttatttttccaatttctggagtgaagattccagatgcttttctctgtcttaggcctattgtctcgaaaaatgatagttaattgttctgatagagagaaaacttgggtctggtctcttgtcctgcttgtcagagctgcttactttgtaaccacttttttttttttttgagatggagtctcgctctgtcgcccaggctggagtgcagtggagcgatctcggttcactgcaagctccgcctcctggtttcactccattctcctgcctcagcctcccgagtagctgggaccacaggcgcccgccaccacgcccggctaatttttttgtatttttagtagagatcaggtttcaccgtgttagccaggatggtctcaatctcctgaccttgtgatccctctgcctcggcctccccaagtcctgggattataggcgtgagccaccgcggccggctgtaaccacttaaatctgctggttgtgggaaactgcaaaggcctccacataacatttcttgtatgcctactatgtaaagtagtatgtaaaagatataaacataggtacgttagaggatataaagataaattacaagaagatgcagtcagtagactaaagactacatgtattaaaagactgcagctgggcttggtggctcacacatgtaatcctaacactttgggaggctgaggtgggaggactgcttgagcccaggagttcgagaccagagtgggcaacaaagtgagaccccatttacaaaaaatataagaaaacttagcagggtatggtggtatgtgcctgtggtcccagctacacaggaggctgaggtaagagaatcccttgagcccgggaggttgaggctgcattgaggcatgtttgagccacttcactcgagcctgggtgacaagagtgagaccctgtctcaaaaaaaggaatacaataattataatactaggtataatatgtttgtaaattaagtaacttgcatattaggaacaag

SEQ ID NO: 4426 - DNA, 1029 bp, Homo sapiens
actcaacatttccaacatcatttcttccctgtgattcattgagtcatctaaaccagaaatgtgagcatcattgtcacttctgtcttacctattactttctaaatatttctgaatctagcttcttctgtgtctccattgctgttctcattcaacagctcttattttgggatattgccttgatcgcttacacatctgtttatagtcttactctctttttcttttttttttttttttcttgaggtggagtctcactctgtcactggagtgcagtggtgcaatcttagcttactgcaacctccacctcctgggttcaagtgattgttctgcttcagcctcctgagtagctgggattacaggtgtctgccactacacccagataatttttgtatttttagtggagacgaggtttcaccatgttgccccaggctggtctcaaactcctgacctcaagtgatccgcccacctgggcctcccaaagtactgggattacaggcgtgagccaccgcacccggctgtcttattctcttgtaaactctctatcatcgtgccttcaaaatagtctaacacttactgattattctactttcctcatcttaaaagtatttagtagtttccagttattaaaagattaaaatgtaaactttgagtggtattcaaggccctttatgttgttggtgtttgccttcctatccagccctacttctgtaccttatagttaatgtgtgagcaaatacagtggtttttcttttcttttttttttttttttttttatatagacaagttctggctctgttgcccaggctccatggagcacagtggcacgatctcggctcactgcaacctccacctcctgagttcaagtgatcctcttacctcagcctcctcagtagctgggtctataggcctgtgccactttgcccagctaatttttgaaatacagttctttttaattacaggtagcttctgaatctcataaagaatgccacttcttctgggaaaccttccctgacttgcccaaagagagttaga

SEQ ID NO: 4427 - DNA, 1599 bp, Homo sapiens
acaaggtagaaaagtactaatcagcaggaatcagaaggctgaatctataggctgagtgacccagtttgagtagaggtgaggcttacagacttttgtcctgcctattattccttacttgagaacactctccatgaggtgagagtgatttgtagttgacagcagcatccatctttatgacactgtggtttgccttccctgaccgtatgtgatgtgtgttaacttcctgtttagaggcagtcccagtagggtctgaatataggctgcactcaaatacttttctaggaacagtgttaaccaggttccctgatcagcccttcaaatctaaattctggcagtaacttttactgctgtgcttagcatagggccacagggtggtggcagagggaagtgtgaggaatttgttctgagcctcacaaccttaaagtactttcaaaagcttgtatgctgtcccccattttggggttttgcccccttctcccctttttttgccagacgggcaaggctggacctccaggttgaattttggggaccattgtgtcagtgaaggtatcctaatcatgtgttgagacctctgaattcatctcacctttaagcagtgagtcttgtgtgttgcatgtaaagcattcctcctgtttcaatttactgattcttcttcctttcctcccccacccaccaagctggaggtgcatgtggaggaaaacagcagctgtgctgtcctgatttctagactctggagcatattccatgttagccaccccattgggagtcatgctgacaagcagcccctctgcgcttaacttagaaggctcatgttgcttggctcattgagaaaagccaaccagctttggttgattaaaacaactgctagagaaatcgtaagatttgagccataactgggactgagggactttcttttccagacctttgcagtacttaaagccctgcattattacatatcaaggcacaatagccagacattttctgaggtagtttggagggaaagaaaaagtaaagacacacacccagattgactgtaaatctagtcctggcataaagctgtccacctcttgcttggggaaaaaatccagtctatcagacaataccacatagagttgcagttctcctgcttttggctaagcctaggaaaagatatataaggaagttcagtttatgttacaatgactggattttgtggtgtatcttctattagccatattatttggtttatcctcagtagtctctgtgaagctttttctgtaggtcctgtttggggattttggtggctccagaatccttgaagcagcaacctcctttctttgtgtagcagtgatgaaagcttctgaagaataggtctgatttgaaacagacccctcctcatgttccatcttttaccttctcccttgtggatatatgaaatattcctgtatagcttgaattcatccagtaagaagggagtgtcccagggtcattagggcttttaacctgtctgaggtatttagatggtggcttggtaatgtttgctgtctctcacaaaatcccccttacctttgccatttacctaggttgccatcagctggcaagaaactatcaacagttttg

SEQ ID NO: 4428 - DNA, 1044 bp, Homo sapiens
ggcgtgaacccaggaggcgaagcttgcagtgagctgagatcgcgccactgcactccagcctggacgacagagcgagactctgtctcaaaaaaaaaaaaaaaaaaagaaagagcatagactttggagtctgctgcacctggttcggatccttgccgtttcactttaccactctgagcctcaatttggtcatctgtaaaatggcataagcacctatctcactgggctggtgtgtggacaaccttgtgcagagcctggtacctaaacaaatgattcattcatatttgtctattcgttccaccagtattgagtgctttttatgttccaggcacggttttaggcactaggtatgtagcagattacaaaacagtccctgctctcaagagcttacattcttgtgggggataagaattcctttcccacttctctttggctgtgtcctgtaatggccctctgtctctttggcatcacctgtccgtttcttgtcctctgcctcccattcgttgagcctaactgtctccactatcttggctcccccaggccccatctccttggctaacccctgatccagcctctgttcaggtacggctgctgtgggatgtactgacccctgaccccaatagctgcccacctctctatgtgctctggagggtccacagtgagtctggtatttggcctgggtggggagggtgggtcccatacccagagggctcagtgattctggtggccttctttcctttcatccaggccagatcccccagcgggtggtatggccaggccctgtacctgcatcccttagtttggcactgttggagtcagtgctgcgccatgttggactcaatgaagtgcacaaggctgtggggctcctgctggaaactctagggcccccacccactggcctgcacctgcagaggtatggtgctaccatctgggtgatccctggtctgtccggggctccacaccccttttctctcactcatacacttctgcctccactaaaggggaatctaccgtgagatattattcctgacaatggctgctctgggc

SEQ ID NO: 4429 - DNA, 1059 bp, Homo sapiens
gagcagggcctgaaatccagtctaaacttactagttaggtcctggcaaagggctgtgtatgcccagggaggatttcttttctgatctgcacaaattatatgcataatggaggttctgttggctgataacaggtctcaaagtggggttcaggaaggaataaggttcttgagaacaagtgaaagagctgagaaaatgtggagggaggacagggatggacgggggagtatgctctgacctgtttctctgtcccccaggcacatctcccacttcattcacaacgttcccttcccttccccacagagaccccgcatcctagtgcaggtgagagctgaggctggggccgggctgatggaaggaggggagttggcatcattaccctgagccgtggctcttcttcccttccagatgtctccctatgacaacttgctcctctgtcagcctgtatcctcacccctgcccctcaggtatgtgatcagattgtggggaggggagctttaatgaccaaggacatggtaggtgctgggcaggtgggtgcagctgttgaggtttatgcaggctgggtccaggtggtggctgtgcctggcatctggggaagggtccccagggtatcctggtgaccctttccccacctcggcattgcctgcagtggtgccagcttcctgcagctgctgcagagcctgggccctgagctggctatcacactgctgctggctgtgctcacagagcacaagctgctagtccactcgctgcggccagacctgctcaccagcgtctgtgaggccctcgtctcggtgagtgccgccccgcctggcccatcttccccagaaccatggttctttctggtgcccctatccctgcctggactcttcccttttccttccttgtggaggatcctcagcccctttccctgggcacagcctgcaggaacacatagcttccatcaggagctcttctctagagcctacttccaacagcctctctcaacaggcaccaactccccaaggccaatgccctctctttctctctcctgtgcctcccactgctgcctcaaccccctgt

SEQ ID NO: 4430 - DNA, 1084 bp, Homo sapiens
tgtgtgtgtgtgtgtccagaggccaggtgatgaagaaagccagcctggctctatgagattccttattccctgttctctgggggaacagcaggaggttagcaggactgcacatcctggaaccattctgagcctcctctgccttgctcaggatcctatagtctgagattccaacttggcgtaatgctgtgctggcaccttcaatggtaaccccaccaccgccaccgccaccacacacacccataggctgacttcctctgagttgcagcttcccctccactgtttcaggaagtaacctcccttcccctctgaagcaccccccacgcttctgggcccctgctgcgagctacccaccaggctttttcccagcttctgcaccctggggcgcctcaggacccttggggctcctactccccggggttgggccatggaggcaggtgagaactaggctgttgtgggcctgtttctgtctctgggctccatggtggagggtgtgggatggccgggacttgtctctcacaactgctttggatctaacgagctacctaaggatcctggaggtgtgagaacactggattttgggccagattggtggagttaagctaggagaaaggacacttgggttcgttgaaaagactcttaaagcttgggttttgtgggctttctcagaaacccatggggtcctcttaaaaacctaggagtgggctctttaagaacattggcaggatcacaaggttcttatggtgtcataactagagtaggaaggtcagaaacccttgaaaagactgtaaggttggtatgatgtcatggccagcatgaatgatgtcatggaaggctattacaaaaaagattgtgatctctgtgatgttataactggtgagcctttaaaagggacacatggacaatgtgaatgtcatagctcaggttagctgtgtgtggtggagtttaggttctttgaggggagtgccaggaccattaagtgggagggatctggtctctttaagaagctgtggtgggcagtgatgtcacagggggaagagttcaggattggccgaccccttatcctgcctttctttggaaggactag

SEQ ID NO: 4431 - DNA, 1043 bp, Homo sapiens
ctcttaaagatacaaaaattagctgggcatgatggcgggcacctgtaatcccagctacttgggaggctgaagcagaaaactgcttaaacccgggaggtggaggttgcagtgagccaaggtcacgccactgcactccagtctgggtgacagagcgagacaccatctcaaaaataataagaaagaagacgggatttggagccaaattacttgaacccaagtcccagctctactcctcagcactatgttattggccatattttctcatcagtaaaattggttaatactagctctgcttatccagagaataaattaaatgatctatttgagagggatttatgtactatacacacaatagaagcctggctctgatttcctcttgagtgtatcctggctaggctgaagtagaagggaaattagagggagaagctgtctggccttccttgggaataactattccttcctgccctcagctgccgctcagctttgatggaacaacgcttattttggaagttcgaaggggctgtcgtgtgtgtggccctgatcttcgcttgtcttgtcatcattcgtcagcgacaattggacagaaaggctctggaaaaggtccggaagcaaatcgagtccatatagctacattccacccttgtatcctgggtcttagagaccctatctcagacagtgaaagtgaaatggactgatttgcactcttggttctttggagccttgtggtggaatccccttttccccatcttcttctttcagatcattaatgagcagaataaaaagagtaaaatggtttccttcccttctgtaacttggagcaggaagtcatgggggcagagagggaaaggaggtggttacttaaggccccaatctaccaagtcttccccaccacttctcccttgttttccccctcttctactacttatttcaaacttctgggatacaatttcagctaaaacgtttatttctcactcaaaacttatttcccctcaaccctatacccaaagaagaaataaaatcacagatacataacagaagtattt

SEQ ID NO: 4432 - DNA, 1050 bp, Homo sapiens
aaggggcggctggggaaggatgtcagagaaaccagaagcttgacggtgaatcctcgggttttaaggagagagcaaagtcctgagagggcgacgtattgtccctgctcacctagcccagaatgaacaaacacgcgccagccagggagcagcgagccgagaattcggacgagcctctgcaaccgccatttgccgttctcgcaaagactaccaagaccacaatgcaacggggcgccgagctaattcccagtgagcagcaggcgaggcgccaccgacgcggaagactataagccccagcgggcgacgaccgaacgcccccgggaacaccgggccccgagctcggtcccgcgcccgaggatcctccacggggctagatggctgcgtcgggggcgggagcggaggtgagcgggcgctagggccgcgagcccccgccggcccttcctccagcgccctgcggaccccgcagaaggcgctcgcctccctagcccgcaaaaacatatcgatttttctcgctgtggcaacggggacgtcctgatagatcctctgctccaataggcaactccggccttccctgccctgacctggaacctctgggagggctgcagagtaagtgccgcctctgcgctccgacggaggcacgaggcctgtggagtaggtccctctgttccgacaggtgcgacacttggcgctccatgcttgcgggtgccgggaggcctggcctcccccagggccgccacctctgctggttgctctgtgctttcaccttaaagctctggtaaggaggaggtaaggggagggaaaaggaggtcactggaggacaggatcgttcccggcctcggggctgggggagatcttatccatggacagcgcaggagggggtgccctattttctgggttttgacttttgtcccttcccccaactccgctacagccaagcagaggctcccgtgcaggaagagaagctgtcaggtgggtgattgtctgggaacccgacacgtcccgtcgtttgtttttggttttagtatcttccccatataccaagagcacaggtgg

SEQ ID NO: 4433 - DNA, 1079 bp, Homo sapiens
aaaacatgtagtgcatgaggatcttcctgtgctctttataatctgagattctgatgtttctattgtttgcaatgttcaaactccggtgagccatttcaagagggtattgttatgtgggcaaaacctagaaaagtggatggctgatggttaaggcttgctctttcattgactgaaagctgaaagtgttggttgggtgtgggagggagaggaaatggctgataagggccctaactccctcacccaggaagtgcagcaacacctacaacttcagtaggcaagccaaaggccctacaaaactgggtgatgtaatagctcacttctgtggctgagaaggcagctgctttatcagtctgcagcttctctgcaacaggagcaagtctcaaagagcgggtagaccttgaaatttacttctagttcttgtaacttctctcctttacccccattagataaactgaaatgcaccaaagaggagcacctctgtacacaaaggatgctggaccagaccctgcttgacctgaatgagatgtagaacgccccagtcccaccctgctgctgctcctccctctgacccagactccgcctgaggccagcctgcgggaagctgacctttaactgagggctgatctttaactggaaggctgctttctcctttcaccaccccctccttccctgtgtctttttcgccaaactgtctctgcctcttcccggagaatccagctgggctagaggctgagcacctttggaaacaacatttaagggaatgtgagcacaatgcataatgtctttaaaaagcatgttgtgatgtacacattttgtaattaccttttttgttgttttgtagcaaccatttgtaaaacattccaaataattccacagtcctgaagcagcaatcgaatccctttctcacttttggaaggtgacttttcaccttaatgcatattcccctctccatagaggagaggaaaaggtgtaggcctgccttaccgagagccaaacagagcccagggagactccgctgtgggaaacctcattgttctgtacaaagtactagctaaaccagaaaggtgattccaggagga

SEQ ID NO: 4434 - DNA, 1015 bp, Homo sapiens
ttattgcccaggctggagtgcaatggctcgatctcggctcaccgcaacctccacctactgagttcaagtgattctcctgcctgagcctcccaagtagctggaattacaggcatgtgccactacgcccagctaattttgtatttttagtagagacggggtttctccatgttggtcaggctggtcttgaactcccgacctcaggtgatctgcccgcctcagcctcccaaagtgctggggttataggcgtgagccactgtgcccagccataacaaaaaattttaaatgaaataattaaactaaggtgtgggagtagtaacatggaatttccatttgaggggcagacagagaggagtgggcttttaaaagtacagttctgagacccttggagtggagctgacgacacactcctcagggtgtcagtattgcttttgtcctatttctggcagaggtatgaaggttattgaaaaccgggccttaaaagatgaagaaaagatggaactccaggaaatccaactcaaagaagctaagcacattgcagaagaggcagataggaagtatgaagaggtaagtgaccttctgttagtccctctcgtatcggccttttacaaagcataatgcggtaaatggctcctttgcttcactaagctatactgggatcttttcctgtaggtggctcgtaagttggtgatcattgaaggagacttggaacgcacagaggaacgagctgagctggcagagtcgtgagtatctagctccccaaatcttgtcattaccaatttatcccttcccctttggcttgggcactaatatgaataaattagcattccttcaaccttgttaaacagggcctagggaatgggagtcatctatagtgcttttttaggcccaagaatggttttaggcttccttattctcctgactagtgacaagtgacaaaagaggctttcttattttttgttggtagggtttacaaattgagagcaaataaggactaatacatggtgaacagttaatt

SEQ ID NO: 4435 - DNA, 1635 bp, Homo sapiens
gggtttcaccatgttggccaggctggtctcgaactcctgacctcaaacaatccacctgcctgggcctcccaaagtgctgggattacaggcgtgagccaccgcgctcagcctcttgtatttctaagctactagatggggttttagtaactagtttacaaaataggacagataggacacaaataactatttgtgactattgctgcatttatggcctgggataagccctgatttctttgattagtcctcattctgtcaatgacctcccctctctgttcttcagggttaaagcacgaattgggagctctcagcgacatcaccagtcagcagccaaagacctaactcagtcccctgaggtctccccaacaaccatccaggtgacatacctcccctccagtcagaagagtaaacgtgccaagcacttccttgaattgaagagctttaaggataactataacacattggagagtactctgtgacggagctgaaggactcttgccgtagattaagccagtcagttgcaatgtgcaagacaggctgcttgccgggccgccctcggaacatctggcccagcaggcccagactgtatccatccaagttcccgttgtatccagagttcttagagcttgtgtctaaagggtaattccccaacccttccttatgagcatttttagaacattggctaagactattttcccccagtagcgcttttttctggatttgcattcaggtgttattcttaatgtttctgtcaaagcttcttaaaaatcttcacttggtttcagccatagttcaccttccctgttccaggtttatttaattccaaaggtgagagttggagtgagatgtcttccatatctatacctttgtgcacagttgaatgggaactgtttgggtttagggcatcttagagttgattgatggaaaaagcagacaggaactggtgggaggtcaagtggggaagttggtgaatgtggaataacttacctttgtgctccacttaaaccagatgtgttgcagctttcctgacatgcaaggatctactttaattccacactctcattaataaattgaataaaagggaatgttttggcacctgatataatctgccaggctatgtgacagtaggaaggaatggtttcccctaacaagcccaatgcactggtctgactttataaattatttaataaaatgaactattatcaaataaaacgtatgaatcagtcctttatagttgtcttttaataaaacaggcatttgataatgttatctgcacatttctaacagggtatagggcatgaggatttgcctccagagaattggtgggactgtgtgcataccctggacctacgaccatacacatactccttgggaccctagcacaagaaatcctaaaatcaggactgtggcccttgctcatagatgcctgtgtcaccaacagaaggctgcagaacaaggattctctcaaggtttctggggcaacaggccaggtggccaatcaactcctaggcccagggttattgttggaggtgtaaatgttactatgactactgaaaccttggttactgaactaaacagaggagcctgtcagtctcctcagactgtatcaagcaaatctatagacatgtctgtggaaaa

SEQ ID NO: 4436 - DNA, 1050 bp, Homo sapiens
ttggctattcaggggtcccttggtctagttcagagcaatattccttttgcttaaaaattttttctaaattctcaaccattgctagtgaaagtataaattagtaaaaccactttggaaaataactggtcattgtctggtaagattgcacatgtacctaatccatggtccaacagtttctctcctaccatagagaaattaagttttgctcatgtgtaccaagaaacatgtgcaagattatttataggggcattgttcataatatttgaagaagaaacttaattcaaatgtccacttttcaattattatataggctgagtgcagtggctcatacctgtagtcctagcactttgggaggctgaggccagaagatcatgtgagcccaggagttacagactgcagtgagctatgattgcactgatgcactccagcatgggcaagagcaagaccttgtttctaaaaaataggtagtggtatattcatattctggaatagtgtaaaaaatgaaaaactgaagataaatatatgaagacaagtcctcaaaatacttctgaatgaaaaaaattgcaaacatgaatctcaaaaacatgctgagtgggccgggcatggtagctcatgccggtaatcccagcacttagggaggccgagttgggcagataacacttgaggtcaggagttcgagaccagaccagccaacatggtgaaacccaatctctactaaaaatacaagaaaaaaatcctaactactcgggacgctgaggtaggagaatcccttgaacccaggtggcagaggttgtagtaagctgagatcaaaccactgcactccagcctgggtgacagagcgagactctgtctcaccaaaaacaaaaaaaccatgctgagtgaagaaagccaaaatgccgttcacaagagaatatgtaccatgtgcttccaccccatttatatgaaattctagaacaggcagaactgtaaaagagtacatcatgttgcctgggctgggagaggggagatttccaggtgatgaaaatattctttactttgattgacgtggtg

SEQ ID NO: 4437 - DNA, 1081 bp, Homo sapiens
tactaagttgagcaggcactgtgcgctttggaacttggcttacctgctcagtgctgtggcaagcatgtggctcatcctggaacttctgtttttgtatctgcagaatgaagggcttgggtcgaagttcccaactgtttgtagtaaaatatttcccagctcatcttaaactacccagtgttttttgtttgattaggatggggttgagatcattaaggttaacccaagagcaatgagaagggttacctttacataattttagacttaagaggagctccataaatcatctaattccaccattcatgttaccaagaagcccaagaaaaggaggcagtttaccagaagacgtataggaagtgaataacccagtggtcttttatctttgtctgtactttctccttaggtgactgtcttcctttccttggctttagctacagatgaaattttatctctatcctagaactctttcctgagttccttacatatattgccaactgattacctgacatttccacttagatttgtagtagacatctcaaacccaacatttgtgaatcagaattattgctatcccactgccactctcattctgcttctttagtctttcgcttctaagtaaaagacacctgcttcccttaccaacccccttttgtgtggctctccccagatcactgggacccagctccactggctgaattttccaccctttttgctcctgtgatctggaatggtcttcaattggctagctcattcattcttttgatcttagcttaaatgttacttccaaaaaaggaatgcttattacctattttaaagtaggttccccctctctttattttcacatggtaccctgatttttccttcatagcatttaccataatttttatgtttgtccatttgtttaaaacatgcctctctcttccgctagaccgtaagcttcaagaatgcaggcaccatgccagttttgttcacgactataaagccaggacctacacatagtaggtactcagtaatttcttgttgaatgaaaaacaggttagtgccagggcctacacatagcaggtactctgtaatttgttgctga

SEQ ID NO: 4438 - DNA, 1496 bp, Homo sapiens
ggcttgccccctgaggtggcattggctggaagctcttgcagtcagcaacattggtacccatatccagaactccagtctaaaactggagagagaaaaatatcaaaggaataaagacagatttactgacctggaggaatagccagtgtagtagaggagacagggcacccatatccaaccactgaagacaggtgcagcgcggttcaaaccaaatactgggtaagttaatttcaaatggctttggagtccaacaaacctgtgtttgcatcctagctatcctaattgaggaattttatgtaatctcactaagctacagttttcttatctataaagtaggattataatacctactgcatatggttgtcttgagattaaatgaggtgttatatataaaatgcttcagatgatacatgataaatgctaaacaatctatctgatatattctctaaaaacatacagaatataaaatcatggttaggaatttgagctttagagctagacagaacttgactgaatcttagctctgctaagagctgtgactttgggcatgataattgacctcactagactcagcttccgcatctataaaatggataatgatagaataatgagtgatggtggtaagaatgaaatgagctagtatctgcggcacctaggacagaacctggcatgtaataaacactcagtagacattacctgctggtgtggtaattaggtatgtcctgccagaaatggggagatcactctgattacttttatttcctagcattagattaatatcccaggttctataaccgtgtaaggttcttgagactggcaaagggctgacgacatgaaatttactcctcccagatagtggacagccctctgggccacacccccaacatctggctgaggggctcaaccctacataggttctcctccttccctatgctcagtgagctagttgcttgctcacttagagcaggatgaataaggggctaattctgttcttgacctcttccatatatctctctggacatcctttctcatttccatctggcagtgcgtgcctctgcatacctgattcatgccttgcatttgtagcgaggagaggagatgtaatgattcaggtttctcctttaggcttggggccctgagaactcccgggtgcaatagtcacctggtgaaacatgagctttgagtcacagggtcaggcccaagtcatttctgctaggaattagggaagagtttctgctgccaagggagttttaggaacagttggagcagggtcagtccaggaaacaagagggctaagtccctgcctcgatctcagctgcagctctgctcgtttccgaagtccttgctgtagcttgagagctgaagatttagactgtggagggaatggggctggaaattgttctaaaaatggaaagcacgttgcgtttataagactgctagatggactgcttcactttaacttttggctcttcgccaaatgggactgggaaggtgatggt

SEQ ID NO: 4439 - DNA, 2425 bp, Homo sapiens
gacacagaccacttcccagggagcacgggcatgccttggaatattgccaagcttccagctgcctcttctcctaaagcattcctaggaatattttccccgccaatgctgggcgtacaccctagccaacgggacaaatcctagagggtataaaatcatctctgctcagataatcatgacttagcaagaataagggcaaaaaatcctgttggcttaacgtcactgttccacccggtgtaatatctctcatgacagtgacaccaagggaagttgactaagtcacatgtaaattaggagtgttttaaagaatgccatagatgttgattcttaactgctacagataacctgtaattgagcagatttaaaattcaggcatacttttccatttatccaagtgctttcatttttccagatggcttcagaagtaggctcgtgggcagggcgcagacctgatctttatagggttgacatagaaagcagtagttgtgggtgaaagggcaggttgtcttcaaactctgtgaggtagaatcctttgtctatacctccatgaacattgactcgtgtgttcagagcctttggcctctctgtggagtctggctctctggctcctgtgcattctttgaatagtcactcgtaaaaactgtcagtgcttgaaactgtttcctttactcatgttgaagggactttgttggcttttagagtgttggtcatgactccaagagcagagcagggaagagcccaagcatagacttggtgccgtggtgatggctgcagtccagttttgtgatgctgcttttacgtgtccctcgataacagtcagctagacacactcaggaggactactgaggctctgcgaccttcaggagctgagcctgcctctctcctttagatgacagaccttcatctgggaacgtgctgagccagcaccctcagatgatttccctccaaactgctgactaggtcatcctctgtctggtagagacattcacatctttgcttttattctatgctctctgtacttttgaccaaaaattgaccaaagtaagaaaatgcaagttctaaaaatagactaaggatgcctttgcagaacaccaaagcatcccaaggaactggtagggaagtggcgcctgtctcctggagtggaagaggcctgctccctggctctgggtctgctgggggcacagtaaatcagtcttggcacccacatccagggcagagaggtctgtggttctcagcatcagaaggcagcgcagcccctctcctcttcaggctacagggttgtcacctgctgagtcctcaggttgtttggcctctctggtccatcttgggcattaggttctccagcagagctctggccagctgcctcttctttaactgggaacacaggctctcacaagatcagaacccccactcacccccaagatcttatctagcaagcctgtagtattcagtttctgttgtaggaagagagcgaggcatccctgaattccacgcatctgctggaaacgagccgtgtcagatcgcacatccctgcgcccccatgcccctctgagtcacacaggacagaggaggcagagcttctgcccactgttatcttcactttctttgtccagtcttttgtttttaataagcagtgaccctccctactcttctttttaatgatttttgtagttgatttgtctgaactgtggctactgtgcattccttgaataatcacttgtaaaaattgtcagtgcttgaagctgtttcctttactcacattgaagggacttcgttggttttttggagtcttggttgtgactccaagagcagagtgaggaagacccccaagcatagactcgggtactgtgatgatggctgcagtccagttttatgattctgcttttatgtgtcccttgataacagtgacttaacaatatacattcctcataaataaaaaaaaaacaagaatctgaattcttagaaagttttaagtcctggtttcttgggggaggtgaaaatgggaacaaagggacctgtggccctggggtttctgataacagcaccagtggcatctgacatgaacctgtgggggacagggctgtccctcagcctttggaaaggagccatttcaaagaacctccctttgtgggtaaatttgcgtctgggtggggtggggttcatcaggcaccttttgattacgtacccagcagggcccttccccagcagagcccacgattgattgattgattgattgattgattgattgatttagagatggagtatcactctgtctctcaagctggagtgcagtggcgcgatctcggctcactgcaagctccgcctcccgggttcacgccattctcctgcctcagcctcccgagtagctgggactacaggcgcctgtcaccacgcctggctaatttttttgtatttttagtagagatgg

SEQ ID NO: 4440 - DNA, 1961 bp, Homo sapiens
gtgggatggcattcggctcggggagagactccgtaccatgtcctgtagtgacaaaatcctacgctggaacgtgctgggcctgcaaggggcactgttgacccacttcctgcagcccatttatctcaaatctgtcacattgggtaaggggcctgccttgggatctggaactggtctgtccttcttgtgcccagatcccaaactgcatgctttattgccaggtgttttgtctcccttatcaaagtgagcatgattcactcctcagtaattgattgagtgtccagtctgctgtggtaggaagatcctggtagccccagtcagaaggtgcttcctaacaaggcagctgtttctctttcttgacaactatatcttgtacctccaaaatccccacatgcttctgcctcttaacagcatttggtgcaaacacaggtatatatgtttctcttttttgtactcaggttaccttttcagccaagggcatctgacccgtgctatttgctgtcgtgtgacaagagatgggagtgcatttgaggatggactacgacatccctttattgtcaaccaccccaaggtgctataacccccttctattttccctgacattttcctccttttcaagcagtcatgtaaacagaggaaaaatgtacactgtgggcaaggggaacattgcccacagtggtagcccacaagggaacattgcccacagtggcccaccaccaacattggttggtctcccaagaacttaaactttcttccttttggatgccaagggcttttcttctcttagtctggaattaatctgaatcgaggtggagttagtatgtctagagggtgctcagtcttagccaaacagaaccctaaatacaggggaaagatcatgaccccacacttcctctctcctatgagtcttgagtccctgcttcagaatcttattcctgaaaggtttccatctttctcccgttgcttctgggattcctaggttggcagagtcagcatatatgattccaaaaggcaatccgggaagactaaggagacaagcgtcaactggtgtctggctgatggctatgacctggagatcctggacggtaccagaggcactgtggatgggtaaggagacaggagagcgcagtgaggaccaagcctctgccctgacttgcaagggtgcatcatacctctgcagtctcagggcttgagagccgcctcccctcccacggtgtctccactgtgagctccttatcttacaggtcccaggtgaataatgagtgcttttgtttctctaggccacggaatgaattgtcccgggtctccaaaaagaacatttttcttctatttaagaagctctgctccttccgttaccgcagggatctactgagactctcctatggtgaggccaagaaagctgcccgtgactacgagacggccaagaactacttcaaaaaaggcctgaaggatatgggctatgggaactggattagcaaaccccaggaggaaaagaacttttatctctgcccagtatagtatgctccagtgacagatggattagggtgtgtcatactagggtgtgagagaggtaggtcgtagcattcctcatcacatggtcaggggatttttttttctcctttttttttctttttaagccataattggtgatactgaaaactttgggttcccatttatcctgctttctttgggattgctaggcaaggtctggccaggccccccttttttcccccaagtgaagaggcagaaacctaagaagttatcttttctttctacccaaagcatacatagtcactgagcacctgcggtccatttcctcttaaaagttttgttttgatttgtttccatttcctttccctttgtgtttgctacactgacctcttgcggtcttgattaggtttcagtcaactctggatcatgtcagggactgataatttcatttgtggattacgcagacccctcta

SEQ ID NO: 4441 - DNA, 1015 bp, Homo sapiens
agttaccatggagccggtgctccactcctaggtatatgctgcagagagatggagatctgtgtccacacggaaactaatatgtgaatgttcatggcagcattactcacaagagccaaaaaagtggaaacaacccagacgtccatcagctgatggattcataaataaaacatcaaatatatccataaattgaatattattttggccataaaaagaagtgaagtgctgatacatgcttacaatatggatgcacttgaaaacttgatgccaaatgaaaaaagccagtcacaaaagatcacatattgtatgattccatttatatgaaatgtccagaatagacaaatccatagagacagaaagtagatgagtggttgccagggccaggagtgggagagttggagagatgaggagtgactgcgccaatgggtagaaggtttctttttggagcgatgaaatgttctaaaattgactgtggtgacagttgcagaactctgtgaatatactaaaaatgactgaattgtatgctttaaatgggtgaactgtatggcatatgaactatatctcagtaaagcatttttttttgtttttttttaaacccgatagtggtttcccactgcactgcatatacaagcaaaacctgctgtgatcacccggcctcctctcatgccactttccccatccctcgcatatgctctgtccacactggctctctgtcaggcgcctgaacagccaatccgctggctgccttggggcctttgcttttgtcctgtgtgcctgaaacacttactccagctgtcctcctccatgtctgggctcccctgctgctgctgtcccaggaggtgtcccctgtggtcctccgtcatagctgcctcagagccttcagagcactgtcagcatctggaattcttccgtatgtactggctactggtttagtgtctattctcttccctttcaatctcctcaccaccatagatgttttaagagcacaaagatcttacttggttttgctcaccgttct

SEQ ID NO: 4442 - DNA, 1430 bp, Homo sapiens
tgcccaacatgacccaatttagaacacacatctgcccactgtttaagccatctggaaaaggagaggcccagtctccctccagctgctcttctactaattcatatccttcatctcaataagcacctccttatctttaagcacagtccttcagatgataggttcagtgcatttcctctttctcttctgtgaaatcttctgtgaaatcctttctaggacttcaagtcagccattcattgagaatgtaagaacttactatgaactagatggaagatacaaaaaattgctgcccctgagtgtgtagcagacatatagccatagcagtattgaaatgtgccattggaggtgaatgcagagtgctgtggggacacagaggacactgctgccactgtctgccagggagctgaggaaggttgcatagagaggggaaatgctaattgagtaactacgtttattaactatctcgtacaataatatactttagttgcttcttaatgtgaattatgctgggtctttttttcctttctgtctactgtggctggtgacgttaactaattttatgacttcttttctgtttttttttttttttttttttggagatggagtctcactctgtcacccaggctggagtgcagtggcgcagtctcagctcactgcaacctccgcctcctgggttcaaacaattctcttgcctcagctcctcgagtagctgggattacaggcatctgccaccacatctgactatttttgtatttttagtagagacagagtttcaccatgttggccaggctggtcttcaactcctgacctcagatgatccacccgcctcagcctcccaaagtgctgggattacaggcatgaaccaccgcgacagccatgacctttaatatctaaatgctggagaccactcagagctcccgattcctccatctagttgcttacttgtcacctctgtttggattaacatccctaatatgacatgtccaaagcagaactcttgggttttgcccccttcgcttcatttcccccaagtctttcccagcttagtaagtgataccactgtctacccagtggctcaagtcagaaacctgaggatcatcttttcctctatctcctttacctccttcgtcaactcatccttaagtcctattggttatacttagaatttctatcccaaatcccttcctcttctttccacctccagcgtcagcactctaatccaagccactgtctcatctagactgtcacaatagcctcctaactgatctttatactttatttactcaacacttatttatggagtatcttctattttttttagaacaggaaccaaacattaaccaatagtcacctaaagaaatgtaagatctcatatttgataagtattccaaagggctggagttgcagcgagaatcaattatagcacagtttga

SEQ ID NO: 4443 - DNA, 1031 bp, Homo sapiens
aaagagccagtaggatgggggagaattccactgacctttatgtttacctagcctggtttctaggggtgtagattcctggctagggcccttattccttgtcttgactgtcttcatgacaccaatttggcatttcaggagagcggttaagaaaaggagttgtgtctgtccaaaagctggcaaggccagagctggattgtttggggtagagactggatggccgtcattctcttttgcctccatccctcctccccagagttggaggaaagcagtggattttgtggttagtcattctttggactcacactaaaagaaacattggtgccatgttcaaatatatcagaagacctaggaaataagaaatttgacctacttttctaaatgaaatcccagactgagcaaagagctcaccacatttgaaagcttgaacaaagggggcctaggctaagtccagaggcctagaacaaatgcttttttattttctacataacaaggggaaattccttgttatgtagaaaatagctggagacaaatggtgctatagagtgactcataacaaactacggtgatataggtctagggacaaaagcaggccactgataagtggcagatgcctgatccccctaggtagtggggagtgtgagactgggttataagaagccttcactatcttttaggaccctcccttgaggaggccagtctaccacaattgctttagaatgaaggtcttttggttgctcacaagactataatggtaatttttggctcatcatttttgtgtgtgtgggttttatcttaattcattgttaaagagatagtgggtttcccctgagctagtttcctatcatctgtgcctatgtttgcttcactgagctatggggaaagagtcactggctgctttgtttacaaaaagaaaggacaggctgagccttaaggagtaggaaggagttccttggcctacccttcatctccacaagtgaaaagccccttagcgtagcagaaaattccaggttgaaggtctctttggagaaggc

SEQ ID NO: 4444 - DNA, 1039 bp, Homo sapiens
gctcctgacgcagtcttggctgatttgtgagcagtgctgtttggtggcgcctatcttttcctccttcccttctgccttttagctaaattccccttgattggccctttctccagatattgagcagggaatatagaccttggaccagccagaatcttggctgaacaagggggaggttgactctgttggctgtaatgaagcttctttagaaatgattggttttggccgtacgcggtggctcatgcctgtaatcccagcactttttgaggccgaggcaggcatatcacgaggtcaggagtttgagaccagcctggccaacatggtgaaaccctgtctctactaaaaatacaaaaattagctgggcgtggtggcgtgcacctgtagtcccagctactcaggaagctgagacaggagaatcacttgaacccaggaggcagaggttgcagtgaactgagattgcgccactgcactccagcctgggccacagagcaagactccatctcaaaaaaaaaaaagaaagaaatgattggtcttgggggccggggcggtggcttacgactgtaatcccagcactttgggaggccaaggcaggcagatcatgaggtgaggaattcgagaccagcctggccaacatggtgaaaccccatctctactaaaaatacaaaaattagctgggggtggtggtgcttgcctgtaatcccagctactcgggaggctgaggcaggagaatcacttgaacccaggaggtggaggttgtagtgagccgagattggcgccactgcactccagcctgggcgacagagtgagactccatcttggaaaaagaaagaaaaaagaaaaacatgattgatctccatgcatcaatatcatgcctgcctcctaaggcagaggtaatgaagacttaattcccttctgtaggccttcccctcctccctaagccgttttctgagagaggtgcaggagcaggtgggttggggcaggctgcatacacagtgggggtgggttgtgctgctaagcagcagcaggtccacaatcccccctc

SEQ ID NO: 4445 - DNA, 1658 bp, Homo sapiens
atcctggctaacacagtgaaaccccgtctctaataaaaatacaaaaaaatagccgggtgtggtggcaggcacctgtagtcccagccactcgggaggctgaggcaggagaatggcgtgaacccaggaggcggagcttgcagtgagccaagattgcaccactgcactccagcctgggtgacagagccagactccatctcaaaaaaaaaaaaaaaaaaaaaaaaaaactgagtaatttattactttctttgataatatgttgcaaattgtttagaatacattcacaggcagtacatttctgtcccagtatcactgtatgagcaaatactgaaggagtttgcagacatctgctttacagtagacaggagatagatgttccaattggatatagcccatgtgtgtagtaaagtctggttataggaaattacagattaaaaaagactgttgttgtaaacatgtatccctgcacgcagtaaggttaaacagaagatccacaacaaaccaaattaacaattactaagtcagactaacagttacttatagttaaaaagcaagaatagcagggattggaaaacaaaaccaactcaggagccctgataatagcatgtcctttcctataggtggggaagtctcaccccctgaatgcacctatagagctagagcttggcactgctatgtggaagccagacttctgagaatactgagtttctgagtacttcatttttagacagtaactcttaatcatttaggtggtttttaataagtagacctaggtggtatagatacatctggggtcatttcacaggcccctggggaggtgagccattctttataggaagagctcctcccttgagaggactgaccacccatgtgttggcagtgccgttacgcacggggaagttacgcacagggaaaatgctcgaagggtaggcacggatgaatgatgaattaacaatgggtgatttttattgtgtttgcttgtctgtattttctgaaataaacctattatttttggttaatttttttaaagactttcatccaactcgtcaagttcctacaatagaacagttaaaaaaaaaaagacatcatcacctcacaaccatgggggagttaaaacaattactgagggggaggagatgaaacgtttatgaataagactgtctgcagttacttgagctgctaagattaaatgacaataggagttgttgttctttcaaggcataaactgaccttctgttgaggaaagttcactgctttgccactgtgtcctatgttagattaaaaggggtggggggagcagcggtgcagcttccctcgcacagtagttgtgattaaagcttttctggatcatttctgaagaagggtaaaggctttcagattgtcttgcctgaagacaagaaagcagaggtaagatataactcctgttacttaaacggaggaaaaaaaacatggggaagtggactggaattgcaacagcaagagtttgttgtggttcttgtttgtttttaccttttaaatttgtgaaatacagcatatatatacagaaacatgaataaaacgtaaatgtataatgaaattattggaaagcaaacatatgtagccactacccaagtcaagagctagaacatcaccggtacccaaaagatttcttcccagtcaaa

SEQ ID NO: 4446 - DNA, 1047 bp, Homo sapiens
ccagcgtacagtaggtacttactataatacttgtttaattggattaatgaacttgtcagcagcactgcctgacatgtagtcagcactcagtggtgtatgttcaatgaatgaatgaatccgtgaatagtgagtctagctgctgacatgctcacgatgatgggggggtagagccacaccccacactgccctgggttctgtagtcctcccacctcccctcacttctatcatcctgtcctgttggtcacctgtctgtccctctcctgcagctggtgagtgacacacggagagtgtctgacatccagtggtttcgggaggcctatggggccgtgacgcagacggtccgcgttgtagcgttggagcagagccgacagcagcggggctgggtgttcacgccaggtgagccactctatgtgtagggcacaggaggacacaggctacccaccctgtggtttgtctaccgggcaggcctgggggaagtgaataagggatgataaaggagaatctgaggcctcctgattagggagtagcatggtggacagaatcctgagggtcaaggttcccttggcttaacctaggctatcttctcatggccagtgggctgctttggtggtctggctgggacccacccccatgattcttcacctttgctttccagcccagtaggggctgacagtggtcaggggcaaacctgacaaagctcacttctgtttaacacagtagtggagttagaagttagtagtggagaggaagttctgctgggagcttcagtggtgcaagcccaggacccgctctgtgggcttcagaagcacagctcaggcttccttcctgccctagatcactgtgacttagagcagcagttcagatccaatgggtatgaccactactaatgctgctcatttctggggcactcacatgtccaggcctgtgctaagcattttatatgcactgtctcactttaccatcaaaacagattcagcaggtagatgctgttattagtttacccatggttggatgaggccctggcctgaaaggttaagtctctttccc

SEQ ID NO: 4447 - DNA, 1673 bp, Homo sapiens
agcttggcaccccctggcaaggcaggtgggggctccgggccccagcctcccccaggcttggtgtacccatgtggtgcctgtcggagtgaggtgaacgatgaccaggatgccattctgtgtgaggcctcctgccagaaatggttccaccgtgagtgcacaggcatgactgagagcgcctatgggctgctgaccactgaagcttctgccgtctgggcctgcgatctctgcctcaagaccaaggagatccagtctgtctacatccgtgagggcatggggcagctggtggctgctaacgatgggtgacgctggtgaagtggcccagggaagtgcacatgtctctccctgctcttccagggtgatttttttgatgtttggctcttggtccttgtttccactggctttccatccccatggggcagaaacagtggctcctgggagcagaaaaggaattgaggtgggcaggcagaagagcctggattgctcactgttttgggaaacttacatgttgagatctacagagatccaggaaaccaaagccctgctgagcagagccattttgtggctatttctggaggcccaggagtgtggctgcaagagaaaaggggctggaggaagatccggagggcaggggtgttccctctgctgatgatggatgcccctaacacctgtgcctaacacccctactgaaccccacagctccagccttagtttttggagtcaagtgttaaaggtttctggccagaggaattggggtcttgccatccctgcaatagcccttttatgggctctgggagacagctttagggaataaatggggattttcccctttttctacccactcctttgcttcctccaagacttacccaactccttccccctcagagaaccaaatagcctgaggaagcaggagagttcctggttatggcagtttcttggtgatttggggcttcaagacagtaggtgagagatgctgtcaggacgtatcttcttcataccaaagtcactggtcctttctcagcctctctcgtgcttttctcctaatgaccatatttttgccaaaaattgggatatgttatctgacagaccagaatatttgaagtttgggctgtcctgaaagtctggactttggtggtaccctcctcccccagcccatctgttgcacattatactccgtgtgttcttcaactttcggcgcccttattcccctgccttcctggcttgattgaaggaaagcttgaaaaggcgcagagccctatacctcatttcctccatgataaaaggatccaagtgaggccctgtcacagcctgtgggtaggggatgcggcgggatcctcattgccatggtactcaaaggtagaagagcctggagtttgttgcttctctttgctattctttcatatcctcttgggcctggtgattaattagcaattctcattcctctcagccaaaggcctgcactgggctttatttgtctttttttattttttaagcactgcctgccagagatgggcctggggcctgatgaggaccttagcgctgctcgttctccttttctgttcatgcacacattcctccatggggtggggaaggcaggcatggggtgtggccctcggagaagttaggagtcccccagctcaagatacagtggcaaagacctagtggtcccctacccc

SEQ ID NO: 4448 - DNA, 1058 bp, Homo sapiens
ttacagccacagcttcactgtcctgtccctcaggatggctggctttgatggctcagcatgggatgaggaggaggaagagccacctgaccatcagtactataatgacttcccggggaaggaaccccccttggggggggtggtagacatgaggcttcgggaaggagccgctccaggggctgctcgacccactgcacccaatgcccagacccccagccacttgggagctacattggtaagttgcttggatggaggcgggctggggctagggtgggagtggttggttagggcttctggtctcaccttatttttatccctgcagcctgtaggacagcctgttgggggagatccagaagtccgcaaacagatgccacctccaccaccctgtccaggtatgaagggagccgagataggcagagctggggagtgttggaggcagggctgggatcactgtagagcctccctttcctcagcaggcagagagctttttgatgatccctcctatgtcaacgtccagaacctagacaaggcccggcaagcagtgggtggtgctgggccccccaatcctgctatcaatggcagtgcaccccgggacctgtttgacatgagtgagtgctcgtctctctcctctctgcatccccacctttctacttggttctggcccttctcctgcctatctgctctttccttcctgacttcccttccctgaagtctgggtcttgggtgtgtgttgtgcctgctacttcccctcaccctccctctatacttccagagcccttcgaagatgctcttcgcgtgcctccacctccccagtcggtgtccatggctgagcagctccgaggggagccctggttccatgggaagctgagccggcgggaggctgaggcactgctgcagctcaatggggacttcctggtacgggagagcacgaccacacctggccagtatgtgctcactggcttgcagagtgggcagcctaagcatttgctactggtggaccctgagggtgtggtgagtgtggcagaggtgtgggtgaggggtggcaaaaaggaaggtacagt

SEQ ID NO: 4449 - DNA, 1081 bp, Homo sapiens
atgtaggcgacttccttcagggtccgctggaagccctcccaccctgtgcccatcttaatgacaggcacccgcagcccagtgtctcgaggggcccctccgaggaagaagggtagggtttgggctaggggctgtgtccggggctgcatgtgggcaacagttccgaggaagggtgtgggagctgcctctagtgccttttatcaacactgtccccacccccttcagcctcatgactacagagacaaaggatccagggtctagcaaagggaaggttctaggcctgggaacaggctgagtcagcccctctagacagggatgggagggtggggttagtgggagggagggcctggccactccatctttcatcctccacagctaggccaaggcagcttcccctcttccagcccaggtggtgccctgcctgattgcccttttcccagtggttggcacaactcctgctttcgccctctggtgggctcctgctgaggctgacattgagaaccatcagtgagagctcctttccagcctgttctgccctgcccctgggccccttagagtgagcacagccagtcagagctggcagcatttgacccacttctgcttctcccatcctctggagcaggaagacacagctagagcaacaggcacagtgagaggcacggtttattgccaggttataccctaggacggtgtccttccctccctcctagggtgggaggtcatgtgcgggagttccgctcctcttcttcgttctccagtagataggctggacggtatgtggggtgtcctcctgggctcaggcacttcagggccgggttccgcacggtattctcccgactccccagtgatgtgtatctggagcagggagggtggagggcaagcatgtggtagggtgggcgatcctattggccctccctatcccagcaccctaaaaactcccttacccattcccttcccctaatacccttaccctcggtcatacaggatacagtatgggacaaacagctgacgcagaaaatcccagatgtctctgtaggtccagtcctgggaggtcagagtaatagaatagtcacaaatgctcacc

SEQ ID NO: 4450 - DNA, 1152 bp, Homo sapiens
acaggttggcacagcccccctgctggcacagctctggggagtgctgccccaggatgggagagaatgcagtacctggctacaaacttctctgtggcagctccacagatgaggtcttgctgggagatgctgggtcagcccaagcatgctgcctctcctgtacctggcttccaagcaagaaactgtttcttgcttttccttcagtcagttcatctgggcatcctggctctctcctggagggggcatctttgacaagctttgcccatccacgtggccccttccagctcagctcccactgtgccttaagggaccatgcctgcacagcttgtttctttggcttaaaggcaggaatggtgggaaaggactgtctccacttctttctccatccctccgaggtgaaggtggggatggcactgtcgggctggttggcctccttccggttgaaaaccttaatactgacccgttttgaggctgctaggtgatagcttatgcctgtggtgggagtggttcccagggctgggggctctgaaagtggccccaagacaggtttggagtgcctgtccctctcttcagcctgtccctctttaaggccaggtgtggcatacaccttcacggggtttgcagcagcagaagtggaaggagcagcacagtccaggcaagtgggaagaggcgtggggcagcactgtgaccgatgctatgtagaacccgcacctctgggtcatctgcaaggtgagagggcaaaggccaccagtgtgagtggctccactatttgtactggctctcagcccaacaggattccctcagcctcagcctggtaaaggagccacctcctgtacccaacctcttcaagcagaccccttcctgtgccccaggcccagtttgctccagctacccacctgctgcaagtctcttctcctgtggattgtcatgggcctgaggactgtgagctgaaagacaagagtggtagtagatcaggtactgtatcaaagaggcagagggctgtaagtatgagtgggctgggctgcaagacttctataccatcctagatcactagaccgcacccagcatagagatggaggaaggaggcccacagggctctgacactcactgattttgccactgacagtcaccttcaacctcaagcagcggtcttca

SEQ ID NO: 4451 - DNA, 1033 bp, Homo sapiens
cactttgccttctctgccctctccacctgggcaggtggggccctgtttgtctttgcttttgtcctctcaccttctctcccatcatattccaggtaacctaaaatcctttcctgcccccatgaagaagtagatccaagcactctgccctccaacctgtgtccagggagcaaggccttcaacttccaccactggtcacccagcttaatgaattgactctcattgtctggcttcttttggaaagggtttaactgggttccccaaatgggaacacaccttgcccttcagactctgttgtccatcacctttcctttttccttttatgggaggaaagccagggtagggaagttatgtgagatatggggcagagctggtaaaaaaaagcatacatctacatccatgttctttttttttttttttttttttggagacggggtctcactctgttgcccaggctggagtgcagtggtgcgatcacagttcactgcaactttgaacttcctggctcaagggttcctccaacttcagcctcctgaatagctgggactacaggcatgtgtaccactgtactacctggctaaattttttttaattcaattttttttttttttaagagatgggtctcactttgttgttcaggctggtctcaaactcctgggctcaagtgatctgcccacctcagcctcccgaagtgctgggattccaggtgcaagccaccacactcaacctcctacctccatgttctgggtatcattaaggtaatcagaatcctcctgctgtagtcacgcttacccttctaagcaggttccccaggattcagagagccccggatttctcctggactccatgtgcagatgcctagtatttccattctgaccgttgccctccttgttcttcttgcctccctagttctcctgtgcctcctgttggctctctttgcatctggcctcatccaccgagtctgtgtcaccacctggtatgttcttgacagctgggtaaggggtgtagcattccgttttttggcattggatcttac

SEQ ID NO: 4452 - DNA, 1044 bp, Homo sapiens
agctgcgggatgatatacgagaccaggtttgggtgggctggcgaagggtggcactgattctggggtagggtggcagatgtcaagtgctgactcctccccatccttctccaggtgaaggaaatgtccctgatccgaaacaccattatggagtgtcaggtgtgcggtgagtgggagagcaggggaggctccacatgaccgtgccacgttccccacccaatggctttggctttcccttctggtggcttaaatagtgaccaccgggtagctctgactgtgtccacccctcaggcttccatgagcagcgttcccactgcagccccaatccctgcttccgaggtgtggactgcatggaagtgtacgagtacccaggctaccgctgtgggccctgcccccctggcctgcagggcaacggcacccactgcagtgacatcaatgaggtgagggaggtcagagcccagaagggtacagaaaactggggtgaggatgtcaggaggcacccaagagggtgggataaatgctggtccggaggagaggaatctggagtttaggagaggtcagaggcaagagaaatgcaagatgggagagacagaaggcctggggcaaagactgaaggccatacagggaaggagctggggaaactgcaggggaggcttgagatggcgaccagtggcatggggagggagagagggaaccccgagggaagtggggtggggaccaggagcacaaggcagttgtgtggggagagctgcacaaaggggagacctggagcaatggttcctggatcacaggcagggacctgagtttcccagagggcggcctgacctctgccttctcatctggtccccagtgtgctcacgctgacccctgtttcccgggctccagctgcatcaacaccatgcccggcttccactgtgaggcctgtcctcgagggtacaagggcacacaggtgtctggtgtgggcattgactatgcccgggccagcaaacaggtcagactgggtagtgtgtgtggacaagggatcttggccttgtagaggccaggggc

SEQ ID NO: 4453 - DNA, 1030 bp, Homo sapiens
tgagagcaacaagggttgaggtttttttttgttttcgttttgtctttttgagatggagtttcactcttgttgcccaggctggagtgcaatggcgcgatctcggctcactgcaacctccacctctcaggttcaagcgagtctcctgcctcagcctcctgagtagctgggattacaggtgcccgccaccacgcccggctaggtggtttttttttcttttttgttgttgtttttgtatttttagtagacacggggtttcaccgtgttggccaggctggtctcgaactcctgaccttaggcgatccacctgcctcaacctcccaaggtgttgggattacaggtgcgagccaccatgcccagccaagggttgaattttgaggtgactaacgctgcctggtggtgggggtagggggtgatgtgggctcgggggagggcataccttagcatttgatcccattctctaaccttgataacccctgcctgaccagtaattgacctgctgactgtgggcgagtctcggcagatggtagctgtggcagagaagatccggacagccttgctcactgctggggacatctacctcttatccaccttccgcctgccccccaagcagggtggtgtcctctttggcctctattctcgccaagacaacactcgatggctggaggcctctgttgtaggcaagatcaacaaaggtgactggtgggcatctcctttcttgcaatggtgacctccttaagcactctccctcatccctacttcccaagtgcttcctcattctccttggcctccattagggaccaaggtcccatcaggctgtgcccagacatcaggggcacctggtatggggtgcttataaggtgctttaggagcccatgtaccaaacaatagggtgaggcttgagtcctgatatttatagggatgggaggttgtacttggggatgcctggaaggagggtgaggcatgtctctgtgcctcagcggtgatacagaaaggtctttcagatccctggaacaggtcagtggccacaaaa

SEQ ID NO: 4454 - DNA, 1050 bp, Homo sapiens
ccccgagcggggactgcgggggggtcccccgagcagcatgttttccacagcgcgttatgtttggagcgggccctgcgccgcctgtcgccatggaaacaaaacaggggcggtggcggcggccggagcggaggccgggctggggcttgggtgggggaggggaagagaggctcgcaggctgtcgcttaggtgacgggaactcaggcgcccctctgcttcatccgggtcacggcccgtccgctagtacccacagtgttccacagtctggtccttggctcctcgcctgtacccctggtcttctgcgcctgtccctggtgtccctttcctcttttttggtttcttcactctgacctcactgaccactgctttagattctcccttcagttcccgtcagacgcttccagactcccaagctttcctacgaatgagggaaaatggagaaacaggcacttgtcaggggaccccccaccctaataaagagcacttgctccgccagaacagcaaaattcatgccatgtgggcatccctgggcactatagcaagctagttgcggccactcccttggcatcctttcctgccagctgtggaataatgcccactgtctagcactgcccctgccaggggttcttgccttccacaatcgtggcttccagaaaacagtggcattcggtagcgctgtgtgccgagacccccaacaatgatgactgcggagagggaggcacctgggggaggatcattagggagaggtagaaagcagggaggcctccaggattctttcccagtgcccctggttcccagagctgatgatgcctccagggtgattggcagctctttgtttcagccccccctcacccgcctgctggccccccctccaattctgtccctccgccccccggctcctgctctctccgcctagccttttcccctcccagctgcctgcctgccaggggtagtgagccggctgagaggcatggagacgcaggaacttcggggggccctggctcttctcctcctttgctttttcacatctgccagtcaggatctgcagggtaa

SEQ ID NO: 4455 - DNA, 1043 bp, Homo sapiens
gccgggagactgggctctgacctaggcttcttgtcacactgaacacatccagccacaggcaccagctggttgggaccagcagcccccagcatcctcttgcactggctggcacaaaaagaaacctgctgtataccccccaaagtgtccctttccctcctacctctggggtctcttgctgcttgcctctgctgctctggactgggagagcttctgtcctgtgctgcatgggtatttagactgtgggggagatgccccttcttatagcactggaggaggaaaacaaattcttgtccccctcagaatgagagtggctctttctgatttgcaagggcactatggtcagggcaaaggcatggcccaggtgtttaagtacagggtgacgtgtgcctatgcaatggggtggtaaggcaggcacgaagagtccaaaaaatctaggtggcctctcagctctgccacctctagctgcatgaccttgggcaagctatgtaaccccaattgcctgctccattaaagactgtgaaggtagaatgtttgtaaagctcttaacagtatgtaagccttcaataaatttcagttttccccttgttttcttgatcattctctgtcaccagtgaaatttgttctagtgtctctcatatttaagaaaactctttcaggactgggtatggtggctcacacctataatcctagcactttgggaggccgaagcaagaggatcgcctgagcctaggaattcaagaccagcctgggcaacatagtgagaccctgtctctacaaaaaacaaaaaattagccaggcatggtgggacacgcctgtagtcccaactactcaggtggctaaggtgagaggatcacttgagcttgggaagtccaggctgcagtaagctgtgattgagccactgcactacagcctgggcaacagagcaagaccatgtctcaaaaaaaaaaaaaaaagaaaaaagaaactttcaagacactctttccaaccactaattgtaactctgctcctccttttcacagcaataggttttctttttcttccct

SEQ ID NO: 4456 - DNA, 1028 bp, Homo sapiens
agcgagattccatctcaaaaaaaaaaaaagaaaaaaaaaaattagctgggcgtggtggcgggcgcctgtagtcccagctactctggaggctgaggcaggagaatggcgtgaaccggggaggcggagcttgcagtaagctgagattgcgccactgcactccagcctgcgcgacagagccagactccgtctcaaaaaaaaaaatgtctttgcaaggggatcacacattattgacatttgctttctccatctcccctgttgaggattccatgaaggcagcagctgccttcatttccttactctgccatgtttggtgaatattataggatgagcatagatgggaaggagccttcattgcagtccagaagggctcctcatcctgtccctctgccccttaggcagcacgctggctcttctcctgaacttcctcgcctgcctggccagcttctgtgtggaaaccaacaatggcgcaggctttgggctttctatcctctgggtcctccttttcactccctgctcctttgtctgctggtaccgccccatgtataaggctttccggtaagtgtgttagtggtgggagagtgatggagacctgggatgggccccacgtctgcccatccttcagctctaattcttctcccaccctccccatttttttcctctttgtaggagtgacagttcattcaatttcttcgttttcttcttcattttcttcgtccaggatgtgctctttgtcctccaggccattggtatcccaggttggggattcaggtttgtgaggctgttatccaccctcacctttccctctagatccagccagcactgggtgctgggataggagttgttcagaaaaaggaaatgtggttttaatccttgggaggtactagtttaatgagatacaagacatacttccaggatagagcgcagacagcactcttgacacatatagattgaagggaagaatgctgcatttggccaatctaaggtggcttcctggaggaggcatagaaccatggttgaaaggaggaaga

SEQ ID NO: 4457 - DNA, 1051 bp, Homo sapiens
acatggcagatgtgcttgttacctcacttctctggtcccttggtcctctcagtgactcaacaagtgtctgagaacagttttctagcattactctttgtcctcactaaggcaggaccttgtcacagggtatggtagggaatgtgatctgaacagatacacctcattggtatttgttatccaacagcagttatgatgatcgttcgtccgaccggagggtgtatgaccggcgatactgtggcagctacagacgcaacgattatagccgggatcggggagatgcctactatgacacagactatcggcattcctatgaatatcagcgggagaacagcagttaccgcagccagcgcagcagccggaggaagcacagacggcggaggaggcgcagccggacatttagccgctcatcttcggtgagtgccagcccaggcccttcctctccccactcttctgcaggccctctaggactctggtaagtgagcagtatccttgttctcagctgaacattggggcatgaacactgaggtgggcactgagtttgcctactttcttggaagctctccgactcttgaagggccctggatctgctttggagatggatgggcacggagcatttgtgacccccagtgctctccctggcatgttgggcttattgtgttgggagcagcttctccgccccagcggcctccactctttaatggggaccttgcttgtgaactgcctttttcccccaagccctgggctctgtagcccccttggcaggcgggcttgggtgggggcaaggggagatctgtgtctgcccggaagggcattgtgtagagcatggggttgtgggtgacattggcaacaacaccacttctctgctctgcccatgcctctccctgttcctgttttgggtttggggacttgggattatgcgccgctctctcttctcacaccgatccaccttactgcatctgacgtgttcccttccactgtcccccatcatcgtctgtcccccctggctgggcgcctgtgaccggtgacccctctaccacccaccccgcctccc

SEQ ID NO: 4458 - DNA, 1026 bp, Homo sapiens
agtggagagggagaggaaagggttctgtccaagacagttcaggttaattaattttcttctccattgcttcaccttaagggttaataatgtagagaggagggaggaccacattgatgaccagaacctactggtactttatagcatttgccccaccccacagcttaggtttttctgtcatcctcagatcccacaggcattgcgaagaagctgcttcctatacccaggtataactcaaaatccaaagggatagggccaggatccctattcctaccccatctattctctgttggctccaagagctaccccagagaccttaaacagaaacagtagctgaggcttcttcctagatacctgactagggaagtttgtctctcctttcttgcccaaccaggtcaaagtaaaatgtgagttgacagctcaaagcacttgtaactgctgccccctccctacctctactccccaaaatggaatcatgggatagggaaggcccccatggggtcagaagggcacggtagttcttgcaattatttttgttttacccttcataacctgtcaaacatatttttttctaatgagaaagccaggcccccgccagcacacatgctgtttttaatgcgctgtagttcttgtgtgtctgctgtgctgtgcaaatggagattcagttcaaaataaaatcatttaaaaacctacataaaaagaactctaaacccacccctgcaacaaaagtcactacataaactgttcagcagtattcacctatcagagtatttgttgtgagtatagattatcaattgaaaacactactcttgttttcttaattgtacagttttcaatgtccctttcttaaagagacagtatatttctcttcacccctagcccatcttccctcaccctcctgaatgacatcaggaggtatatccagggtgtctccttccttcctactctcttgaccagaagttaacagactatactgtctctttaaaaataaaatttaaaaagctttgttgtcttttcagacatacatat

SEQ ID NO: 4459 - DNA, 1153 bp, Homo sapiens
gaatgattccgttttgtctaatcaactttcacacctctctcaaacttacaccagcaaacacccactggggagtgtttgcttaagcaaaagttccttaagctgataaacaactttagcaaagtctcaggatacaaaatcaatgtacaaaaatcactagcattcctatacaccaataacagttaagccaagagccaaatcatgattgaactctcattcacaattgccacaaaaagaataaaatacctaggaatacagctaactagggaagcgaaggatctctataaggagaactacaaaccactgctcaaagaaatcagcgaagacacaaatggaaaaatattccatgcttatggattggaagaataaataccgttaaaatggccatattgcccaaagcaatttatagattcaatgctattcccattaaactaccattgaaattcttcatagagctagaaaaaaactattttaacattcatatggaaccaaaaaagaacctaaatagccaaggcaatcctacacacaaaaaaagaacaaagctgaaggcatcatgctacctgacttcaaactatactacagggctacagtaatcaaaacagcatggtactgatacaagagcagacacatagaccagtgaaacagaatagagaacccagaaataagactgcacacctacaactgcgtgatctttaacaaacctgacaaaaacaagcaattgggtaaggattccctattcagtaaatggtgctgggataactggttagccatatgcagaaggttgaaactggaccccttccttacagcatatacaaaaacaaaatatggattaaaaacttcaatgtaggccaggcgtggtggctcacgcctgtaatcccagcactttgggaggctgaggcacgtggatcacttgaggccagcagttcgagaccagcctgatcaacatggcaaaatcccatctctaacaaaaatgcaaaaattagctgggtgtggtggcacatgcctataatcccagctacttgagaggctgaggcatgagaatcacttgaaccctggaggtggaggttgcattgagctgagatcgctgcactccagcctgggcaacacagcaaaactctgtctcaaaaaaaaaaaaagacttaattgtaaaacccaa

SEQ ID NO: 4460 - DNA, 1029 bp, Homo sapiens
agtacttcgggaggccaaggtaggaggattgcttgaggccaggagtttgagaccagcctagacatcatggtgaggaccccatctctacaaaaagtttttaaataattatccaggcatagtggcacacagacctgtagtcctagttactcagtagactgggatggtgggattgcttgagccttaggagttcaaggctgcattgaattatgattgcaccactgtacaacctgggtggcagaacaaggccctgtctttaaaaacaaaacaaagcagtaaaacatggataacttgtctggaccatttgattaattccttttttttatttaaaagattagctctagaataacatgtccattttttacattctgtactttttagcataaagtttatatagtaatctgaaatataattttacctttttatctaaaagtgccgtattccttgaggattttaagttgtgcagtaaaatggtctggattggagcaaggttagggaaaggtgacattatgaaaaaatgatgcctcccccttcttcaaattcatatccccagggcaaaagttgccatattgtttatgaaagaacattaagggagtctgttttcctgttgtctgtagatgatgttcagaagtattttaaccctgatatgatgtttgtttgtttgtttgtttgtttgtttgagacggagtctggcagtggcacaatcaccatgcccagctagtatgattttttttttttagacagtcttgctctgtcacccaggctggtgtgcagtggtgcaaccttggctcactgcaacctccacctcctgggttcaagcagttttcctgcttcagcctctcaagtagctgagataacaggcgcctgccaccacgcccagctaattttttgtatctttagtagaggcggggtttcaccatgttggccaggctggtctcaaactcctgacctcaggtgatccacctgccttggcctcccaaagtgctgggattacaggcatgagccactgttcccggaagccagtatgctctt

SEQ ID NO: 4461 - DNA, 1050 bp, Homo sapiens
gtaattgttgtaattggaattggattttttatttttatttttttatttttattctattattattatttttttttagatggagtctcactctgtcaccaggctggcgtgcagtggtgcggtctcagcttactgcaacctctgtttcccaggttcaagcgattctcctgcctcagcctcccgagtagctgggaccacaggcacgcaccaccacactcagctgatttttgtgtttttagtagagaaagagtttcaccgtgttggccaggacggtctcgatctcttgacctcgtgatccgcctgcctcagcctcccaaagtgctgggatgacaggcatgccaccacgcccagccctccaattggatattttaaattaaatttttggattgtttattgctatgtatagaaatacaattgatttttttttcccaccagtttaccctgacagatgtgtttcatgtattgagtttgtctcctgtaacctaggtgttagtcctaagagtcttttagtggattccgtcatgtgtgtcttgactttgcttaagatcattcacatcgtcaccacatctagctaatttttttattttttgtagagacaatgaggtcttgccatgttgcctgagctggtcttgagctcctggcctcaagtgatcctcctgccttgtccttccaaagtgttgggattacaggggttagccactatatctggcctttatttttaaattgcttctggatttttttcttttttaaagacagagtctacctctcatccagactagagtacagtggcataataccagctcactacagtctccacctcctagactcaagcgttcatcttacctcagcctcctccagtagctgggactacaggtacatgccaccacactggactaatttttttattttttcagagacagggtctctctatgttgcccaggctggtcttgaactcttgagtcaagtccctctttggcctcccaaagtgctaggattgtaggtgtgagccaccgtgcccaggttgcttcctttttttttttttttttgagacgg

SEQ ID NO: 4462 - DNA, 1060 bp, Homo sapiens
gagttttgttttttgtggttttgtttgtttttttgagatggggtttcgctcttgtcaaccaggctggagtgcaatggtatgatcttggctcactgcaggctctgcctcctaggttcaagtgattctcctgcctcagcctccagagtagctgggattacaggcacctgtcaccacacccagctaaatttttttttttttttttgagacggagtcgtgctctgttgcccaagctggggtgcagtggcaagatcttggctcactgcaacctccacctcctgggttcaagcagttctcctacctcagcctcctgagtagctgggactacaggcacacaccgccatgcccagccaattttttgtattttagtagagacggggtttcaccatgttgcccagtctggttgcgaaatcctgagctcaggcagtccgcccacctcagcctcccaaagtgctgggattacaggagtgagccacagcgcccggcctctttttgagtttttatggaagcttcataggcgtcaatgacagccatgtagaaatgtgattgaacaaaatgtagaggatgtaaacccagcatgtcctgtctagacttcttggcctctctgtgtcacattcctttctctagggtatggggcaggaccctctctggagtgagggttttcttggcccagaatcagattagagtcctgccttaggtaggtgaaaggaagacaggagaaggtcaaagagagattctatctcctgaggcccactcctgagacttaaagtgccccaacattataacagggactatgggagttaagagccaggaaccatggatgaaaacatatatatatatatatatatatatatatatatttatttatttatttatattcatatttatatttatatatatcataagaccacacttctgttttttacttttgtgctttttcttgattaaagatttaaaaatggaagattctgatcttttgatgtaatttgatttcacatcaaattatacaaccgtatcagtgatttgtaagtgtctctggtcatacaaaagatttgacctgaaa

SEQ ID NO: 4463 - DNA, 1066 bp, Homo sapiens
tatcaggggccgggtgcagtggcttgtgcctgtaatcccagcaatttgggaggccgaggtgggtggatcacctgaggtcaggagtttaagaccagcctggccaacatagtgaacacccatctctactaaaaatagaaaaattagccgggcgcagtcgctcttgcctgtaatcccagcattttgggaggccgaggtgggcggatcacctgaggtcaggaatttgagaccagcctggccaacacggcgaaaccctgtctctactaaaaagtacaaaaattagccaggtggtgggcgcctatagtcccagctactcaggagcctgaggcaggacaatcgcttggacccgggaggcggaggttgcagtgagccgggatctggccactgcactccagcctgggcaacaagagcgggactccatctcaaaaaaaaaaagaaaaattaaaattagccaggtgtggtgctgcatgcctgtaatcccagctactcatgaggctgaggcagcagaattgctagaaccttggaggtgaaggttgcagtgagctgagatcagaccacttcactccagcctgggtgacagagcgagactctgtctcaaaaaaaaaaaaaaaaaaaattatatcagagtatatacctggaaaggtaattactgaataaaataaaggatttgtcccaagacttaatttcaagctatggagtattaaggtggtgtggaattgaatagataaaagaaacagacctacacatatatggaagcttgctgggtaacagaggcatataaagaactgttcaacaaattgtgcccagtaagttgaaatccctggggatcagaaggaaattggattctgtcttatcctctatacaaaaaatcaactcccagttgattaaatacagttgacccttgaacaacacagatttgagatttgcgatacttaaactcacagatgaactgtgtagcctagaaaaaaattttttagtttttaatttttattttttgtggatacatagtaggtgtagcctagaaatagtcaaaaaaattaaaaagtatgtcatgaacggataaaatatt

SEQ ID NO: 4464 - DNA, 1018 bp, Homo sapiens
tcttgatggctgtagtagaagaaaggaaagtggacaggttcaagagtttaaactaacagaagacagaattttatgatttgtggggagggtgaaggagccagaataaatgatgtggcctgagcttagataaccaacgtcctgccacacgatggatggtcagtatacataatgttagctttatggtatcattcactgatgtagggaatctggatggaggagctagtttgaagggagcgaaaatgaaatgagatgtgaatatgagtttgagaaatctgtgaaacatgcaaaagtagacaattagaagaaaggtctattcagaaaatagaaattcagtagtcatcagaatatagatgatagttaaaagaattgctaaagagagaatagagagtcagacaggaaaaaagctcaggctagaaagtttttaaaaactatagcatttaaaggttggagaaaaggaaggggtcatttttcgttttggtaattttcagataaaactgaagattggtatgaatatttagaagtcacttacatactgatgataattgagactatgagaataaacatgttcccagtgggaaagtaagtataaaaggtaaataacaagtactctgtattgaggacctccgcagttaaatttaatggagttgcaagtaattgaaagttaatcaaaggatattatagaaatagtgtaggcaggattttaaagaattatgaaatcaaatatagctgagagtttgaaattttttcctttttttaaattttattatttttctagagacagggtcttgctctgtcatccaggctggaatgcagtggcgtgatcatagctcactgcagcctcaaactccatggctcaaacaatccacccgcctcagcctcctgagtagataggactacgggtacaggaaaccacactgggctaatttttattttttgttgagacagggtctcagtacgttgcccaggctagtctcgaactcctggcatcaagtgatccttccacctcggcctcccaaaa

SEQ ID NO: 4465 - DNA, 1034 bp, Homo sapiens
aatgatgtctttaaatgtggaaaggaaaaataacatctgtcaacttaaaattttttaaccagcaaaaatatctttcaaaaatggaggcaagataaacattatcagaaaaagaaaagtttaaagaatttgttgccagtagacctacagtagcagaaacactaaaggacgttcttcagatagaaagaaaacatagtaggtagaaacatggatctaccaaaggagtaaagagtgccagaaattgtcaaccaatgggaaaatataaaacacatttttctcggctgggcgcagtggctcacgcctgtaatcccagcactttgggaagctgagacgggcagatcatgaggtcaggagatcgagatcatcctggctaacatggtgaaaccccatctctaccaaaaatacaaaaaagtagccaggcatggtggcgggcgcctgtagtcccagctactcaggaggctgaggtaggagaatggcgtgaacctgggaggcagagctggcagtgagccgagatcgtgccactgcactgcagcctgggtgatagagcgagactctgtctcaaaaaaaaaaaaaaacaaccacatttttctcatattcttttgaagtgcgtgtggaattataccaagataccatcctattctgggtaatcaaatgtcttgatacgttttaaaagattaaactcatgcagaatatattttcagaccacaacagaattaaattagaattcagtaacacaagttatgaaattctctaaatatgtggaaattaaataacacacttctaaataattcataagtaaaagatgaatccccaaaaatgaaatcagaaaatactttgaaatgaataaaaatgaaagacacatagggccgggcgtggtggctcacgcctgtaatcccagcactttgggaggccaaggcgagtggatcatgaggtcaagagatcgagaccatcctggccaacatggtgaaaccctatctctgctaaaaatacaaaaaaattagctgggcgtggtggcacatgcctgtagtcccggctgc

SEQ ID NO: 4466 - DNA, 1035 bp, Homo sapiens
gacagagtagataagggcttcagatttggatatattaaatttggactgtctttggcctatttaggtagagatattgaatagaccgttagaagcagtggtttatacttttagagacatctgtggtagagatctaccagtatatatatgaacttgaatttggcagtgaaagagatcatccagggagaatgtgttaagtgaggtgatggggacggagacctaagaaactcgagcattttggagggaagtggaagaaaagatgtttagtgaaggacacttaaataagaaacatcaaactgtatatgtcacagaagcctaaacaagacttcagaatggaatagattagtcaacattagatgtcacaaagagatcaagaagagttcgatcagaaagtgtcaaatgattgagaaaataagaaaaaatagtctgagaatgtgaaagtttggagcttgaaagagggaaaggagacttaaaattcaggtggcattgaaataaattagagctctttatttccagcaatgtggtagattaggtgtgcagagcaagcaaacaccttgttatctaaaacctgaaaatacatggacaacatttcttacagtatgactgaactttgaagtaactaaataggaaaccagaaacttcagaaagttcaattcaacagagataaagagcattagagctgcttgacatctgcttgatccctggtggctgggagtctggtaattggaacacatccagctggaagagacaaaagacagagcctaggactctagtagaacaaaaaaccacatatgcataaagttggaacccccaaaaggtgacacttaacaatgtacgggaaaatagaaataaacctatcatagaaaaggacagtttcttgttttagttttggctttggaaggaggaagaaaaaggagttcctgaccacaagctcttactaattctctgcctctcctacagatttatattgtttgtcagacccagaaaaaagttaaaataaaatttgtcataggtttgtaatgttcccagttgcattgc

SEQ ID NO: 4467 - DNA, 1048 bp, Homo sapiens
gttgaagctgctcaactgtaggcacagaaggatgtcattggtagataaatgtagcaatgccagacatagctggttctagtgtattgtacctgtttgtttcttttgtacaaacattgagagaagccacacaataaaaacacttgcagaaaagtctgttgccagtaggagccaagaggaagaatgtggatgaatgtacattttgaacagaactacattgcttatggctttcttcatttagtttgtgttggtgtactccttcgttcagctgctagttttgtcctgcaaaatatttatgtgctttaaaagtcatgtattaaccaatacaacttccatattctggtatcattcttgtatttatcaatgatacaagagctatttaactatatagaaacacatacaataacaaaacatactgtatacctttgtgaatttttatatgtataatcatgagagtaatgatattttccttgggagagaatagggagtgaaaaacaaacagccttgggtagctctgaggaactgcagtatttaaagtagtgcttaaaaaactgtcagcttttggcccacatgtgattctttgtgatgatctctacactttttaaaaaattgctcatattaaaaaatgtagcaattttacataaaaatgtggaattctgcttctcagaaaaatcagaacatctggcaacaattagtccacatttcgtggataatagggatggctggggctcagtattggcaggccctttttcattgctgcttgtattcttttgttcgccacagtcctcactgttttctgttgtgtgttgtatctggccctcttcagctatttaaagagggaacttttggatttgagatccctaatttcagagtcatgagaaggagattataaaggatgagtaaattgaggtgaaggtgatatgagatgacaggttaggatgttgaatgtatcatctacatggacattgaaattacccaagaggacagttacagaagttggggtgaaaatggtggatgtgaacctggtttcagggtccttggggaatgagaa

SEQ ID NO: 4468 - DNA, 1029 bp, Homo sapiens
tgcaaagaagattgtagcaagttcagcaatgggattggttaataaggacattggaaagaaactaatgagttgtcctttggcaggtctgatcagtaaagatgccataaaccttaaagccgaagcactgctccccactcaggaaccgcttaaggcttcttgtagtacaaacatcaataatcaggaaagtcaggaactttctgaatccctgaaagatagtgccaccagcaaaacttttgaaaagaatgttgtacggcagaataaagaaagcatattggaaaagttctcagtacgaaaagaaatcattaatttggagaaagaaatgtttaatgaaggaacatgcattcagcaagacagtttctcatccagtgaaaagggatcttatgaaacctcaaagcatgaaaagcagcctcctgtatattgcacttctccggactttaaaatgggaggtgcttctgatgtatctaccgctaaatccccattcagtgcagtaggagaaagcaatctcccttccccatcacctactgtatctgttaatcctttaaccagaagtccccctgaaacttcttcacagttggctcctaatccattacttttaagttctactacagaactaatcgaagaaatttctgaatctgttggaaagaaccagtttacttctgaaagtacccacttgaacgttggtcataggtcagttggtcatagtataagtattgaatgtaaagggattgataaagaggtaaatgattcaaaaactacccatatagatattccaagaataagctcttcccttggaaaaaagccaagtttgacttctgaatccagcattcatactattactccttcagttgttaacttcactagtttatttagtaataagccttttttaaaactgggtgcagtatctgcatcagacaaacactgccaagttgctgaaagcctaagtactagtttgcagtccaaaccattaaaaaaaagaaaaggaagaaaacctcggtggactaaagtggtggcaagaagcacatgccggtc

SEQ ID NO: 4469 - DNA, 1068 bp, Homo sapiens
aagaccagcctggccaacatggtgaaaccctgtctctactaaaaatacaaaaattagccgggtgagtatggtggcttgtgcctgtaatgccagctactcgggaagctgaggcaggagaatctcttgaacccaggagacgcaggttgcagtgagctgagatcgcgccactgcactccagcctgggcgacagagcgagactccatctcaaaaaaaaaaaaaaaaaattcactaatctccctaatgattatatggtaatctggtttcctgaggatctttatatttaaaatgggagtgctttgtggagattctgagattaggtgtatcacctattgtaaaataataaattagcacgctagttttaaaacattttgtgtatttggggaattgacacatgcctactatttgctattaggaaaacttgtaaaaataaattgctgatttttaaggttcttataacaacagtgattatttgtataaatatttgcttaatgtttgcccttctcactagagtataaaccttaaaatttaggaactgggttcattttgttgaatactgtattttcagagtgtagcatgatgcctggcatatgatagatgtttggaaatattttttgaatggacaagtgaatgattcagagttgaattgtatcctaacaacaaagataatatctgcataagttcctgcatcagagagtcctaacctcaaaaagcctgataatctcttctaaaagtttggaatactgaaaccagcctaagagataatttaaaaagaatttttataggtacatagcgtgtttaaatatttatggggtgaacgtgatatgttgatgcaggcatacaatgtgtaataatcacatagtcaatggagtatcaaaaaaagatgattttttaccttcaataaaactgtaggaaataaaagtgtacttcagcagaagagtggggaatatattcttttaaaactgatgagtgcgaaaatatatgaaagttattttgattttaggcaatgtttgcttgactgtaagtttcagaagcttcttggtgattcttaaatttgcatttgcaccatac

SEQ ID NO: 4470 - DNA, 1024 bp, Homo sapiens
aaacaggaaaaaagacatttgctacatgccaatcattgtattagaagttacaggaaccttaaaattcactcattcatttattcagctatttattgggtactaaaatttgtgctattcattgtttcagctgctggggttacagtggtgagcaagccagaagaggttcctatcctcatgaagcttatattttaattatacagttggccttccctatctgtgattccgcacctgtggattcaaccaactgcggatgaaaaatattagaaaaaattaaaaataacaatacaataataaaaaattatacaaaattttaaagtacagtttaataactatttatatatcatttacattatgttaggtattataagtaatccagagatgatttcaagtatacaggagcatgtgtataggctgtatgcaaataccataccattttatataagtgacttgagcatcgtcagattttggtatctgagggggtgggatgggaggtgggaggacttaatctgttgaggggtatagctgacaaatacagaacaagaaaaaagttaattgccctaattgtgatcttatatggatcataaatattcagggatggatcaggtcagtgcaagcttaaatataggtctgagaacataggtctagaatccattacccaaatgttggtgccgtaagtttttttctttttaaaaaaattccctgcaagtgttacacgtttttcttttttcttatttttcttcttcttctttttttttttttggcttttagaaatgtagattgggtgaactggcacagtggtgtttgggagtagtagcatcctttactaacttaatcaagcccattaatacttctgcattgtaatttatcattattcatggaaattagggtaattaagactaaaatgggtccgtgtcaagttttatcactaggttttgaaaaaacttggatttcagagttttttggacttcaggattgtgagcccatcatggagaagataggactttgtactttttattttttgttt

SEQ ID NO: 4471 - DNA, 1050 bp, Homo sapiens
acttcttttttttttattttttttatttttttttgagacagagtcttgctctgttacctaggctggagtgcagtggcgcaatctcggctcactgcaatctccaccagaagggaaacttttgtacctccttcttggaactaagtgaggagactggtaggcgatggaagagaggtagagaggactttaggacaaattaaattggatctttagaccatttaaaaaattttggcttctgctttgagggagataggaagcctacgaaagggttttgagcagaggagtgacatgatctgaatcaggctttgaaaggatcaccctgcaactgaattgagaagactggaagagatatgagggttgaagcaaggaaccagttagaagcatgttgcattttgcaagctatgcatctgacaaaggtctaatgtcagcatctgtaaggaacttaagcaaatctatgagaaaaaaaatgattaaaaagtgggtaaaggacatgaacagacacttctcaaaagaagacatacatgcagccaacaatcatgaggaaaagctcaacatcactgatcattcaagaaatgcaaatcaaaaccacagtgagaccatctcacatcattcagaatggctattaaaaagtcaaaaaaaaaaaaaaaaagatgctggcaaggttgcagagagaaaggagtgcttatacactattggtgggagtgtaaattagttaagccattgtggaagactgtggtcatccctcaaagacctaaaaacagaaataacatttgactcagcagtcccgttactgggtatatacccaaaggaatataaatcataaagacagatgcatgcgtatcttcattgcagcactattcacaatagcaaagacatgggattaacctaaatgcccaccaatggtagactggataaagaaaatgtagtacatatacatcatgaaatgctatggagccacaaaaaaaaaatgagatcatgtacttggcaggatcatggatggagtggaggccattatctttggcaaactagtgcaggaacagaaaatcaaatact

SEQ ID NO: 4472 - DNA, 1072 bp, Homo sapiens
tgtaattttgagcaaaatacttacaatctttggtttccttgactgtaaaatatggtgatatagtaatgataatatttatagcatagagttggcggattctacgagatgatatgtataatgtgtttagcataatgtgtgccatgcagcaagcaaataatgtgtatttgttattattttagttatttattttcttcatttccaaaaaagaatatagcaaagcagattacttccctcataggtaagaatatgtaaaatacacttttgaagtgtatataagcaatgtccttatttgtatacatattttttccattttcaatttttagcatactatttatcttttctcacatgtgaattccaatttcgtattttccctcttcattttagcctaggttttcgtgtttggctttttctttttgagtcagggtctcgctctgttgtccatgctggagtgcagtggtgcgatctcggctcactgcaagctctgcctcccgggttcacgccgttctcctgtttcagtctcctgagtagctgggactaccagtgcatgacaccaccctgttgtagtttctatcaaaacttctttttgttttttttgagacagagtctcactcttgtcggctaggctggagtgcagtggcgcgatctcggctcactgcaaactccgtctcctgggctcaagcaattctcctgcctcagcctcccgagtagctggaattacaggcatgcgccaccacgctcggctaatttttgtatttttagtagagacggggtttcaccatgttggccaggctggtcttgaactcctacctcaggtaatcctcctgctttggcctcccaaagtgctgggattacaggcgtgagccactgtgcccggccttcatatatttatttagtgcttactatgtgccaggcactattctaggtactgggatacagtgatggacaaaacaagatccctgctttgctgtcttaggacttaataatttgggcattttcttttttcgatatagatcttttagtactgatataacatactgttagccagtatattacgtgttgttcaagcaagatt

SEQ ID NO: 4473 - DNA, 1532 bp, Homo sapiens
gtatgagtttaagatgaaagagtctatggtatttgaacatgttgacaggagaactttagggtccatgttttttattctttttatcatctgcaaacttatttctgcagtattagtaaaggactctgaatttggtgataagggaatataatatagcacaagtatctatggctttgttctttgtcagtatctttttgttcctaaactctgagaagtgggtttgtcttttttcagttttggattgggcctgaggtgatttgaagctcctgtcttggagtttagcttagttataacaaacactgagttaatcctatgcaggagacacaaaaatcaataatatatggtctctgtgcttgaagagatgctaattcagttgagtctgaattgtttgatggtggcagctctcaaaaggacaaggaagagggaaacattcctagaagttgaaattttgttacccaattgcaaagagatttttgccactacttactctttgaataagcataaagtgtttatactctgtatgcagctttgtactttaaaaaaatatgttttgtatcatcttgtgctttttttttttttttttgagactgagtttcactcttgttaacaggctggagtgcagtggcgctatctcaattcactgcaacctctgcctcctgggttcaagtgactctcctgcctcagcctcccgagtagctgggattacaggcatgtgccaccatgccctgctaattttgtatttttagtagagacagcgtttctccatgttggtcaggctggtctggaactcctgacagatgatccacccgcctcggcctcccaaagtgctgagattacaggggtgagccaccgcgcccggcctcatctggtgtttttgtataaaggaactattggtttgagaagaaggcaaacatttatatttcttaccttcttttgggatatatttctacagtgcgtttatgtaaaaaggttttgatgtcgctgggcatggtggctctcacttgtaatcactttgggatgctgaagagggtggctcaccagaggtcaggagtttgagaccagcctggccaacgtggcaaaaccccgtctctactaaaagtacaaaaattagccaggcatggtgtgtgtgccggtagtcccagccagttgggatgctgaggcaggaggatctcttgaatccctgaagtggaggttgcagtgagccgagatccaccactgtacgccagcctggacgacagagtgactctctcaaaaaaaaaaaaaaaagaaaagaaaaaggggcctagggcctggcatagtgggttatccctatgatcccagtgctttgggaggctgagccaggaggatcacttgtgcccaggagtttgataccagcctggccaacataggaagaccccatttctacagaaagttaaaaaattagaatgaacacctgcagtcctagctactctggaggctgagacaggggaattacttgacccaggagttggaagctgctgtgagctatggtggtgctactgcactccagcctgggc

SEQ ID NO: 4474 - DNA, 1035 bp, Homo sapiens
tatagagagagaagaacaccggctcccattctggttaaaggtacagccctcttcctcgaagtctgtaggaggcagaaggtcactgaaagttctgagagaatatcaaggacttccttaatcgtctaatgctttagttgtagaactaggacttcaggaatcttcctgattcacctttcttcccttacttttctgcccttctccgggtgattctacaacattttcaaaataatgggtaaaatggtaatttgctaaaggaaattcagagaagagtttctaaagtgtataattggactgtggtctttgtagaaatttcatatgcagagtcccttggaaagatgccttgagcttgtctcaggtccctaaacttagaaagtcctattctttttcccaaattctgacatgtgctggatcagagtgttctcatttccaataggccagtctgccatccatccaggaagaactgcggcacatggctgatggtgctagagaggtaggaaatatgactggaaccactgagatcaactcagatcaaggcctagaaaaagacaactcagagttggggagtgaaactcggtacccactgctattgcctaagggtgtagtcctgaaactgaagccagttgccgaccgtttccccaagaaggcttggagacagaagcgttcatcagtcctgaaacccctccttatccaacccagcccctctctccagcccagcttcaaccctgggaaaacaccagcccaatcaactcattcagaagcccctccgagcaaaatggtgctccggattcctcacccaatacagccagccactgttttacagacagttccaggtgtccctccactgggggtcagtggaggtgagagttttgagtctcctgcagcactgcctgctatgccccctgaggccaggacaagcttccctctgtctgagtcccagactttgctctcttctgcccctgtgcccaaggtaatgatgccctcccctgcctcttccatgtttcgaaagccatatgtgagacggagaccctcaaaaag

SEQ ID NO: 4475 - DNA, 1042 bp, Homo sapiens
attaaagtgagtgtttcctgcatgcactatccaggcacctcaccaacacatatctgttcttttctcttgttattctcaaagaaaagaagaaccttcttttatctaaagctaatttctcctacttatatactagattaattcccctgttgccttttcagggacattgattcattcattacgttcctctggagtatcttcatcctcttaaaagattccacaaatccatgtttccctgtaataattctctttcttgaactttctagaaatgatatgcagtattccacttacatgctttgggtttttgttttgttttgtttttttggtcagacataatcttgcactgtcacccaggctggagtgcaggagtatagtggcatgatcttggctcactgcagcttccgcctcccgggttcaagtgattctcctgcctcagcctcccaaatagctgagattacaggcgtgcccaccacgctcagctaattttttgtatttttagtagatacgggtttcaccatgttggccaggctggtcttgaacttctgacctcaagtgatccaccagttttggcttcccagaggctaggattgcaggcataagccaccgtgcccagcctatatactttttctcaattttgtgtttgtatgtatgcatgtatgtgtgtgtgtgtgtgtgtgtgtgtttgtgtgtgtctgtgtctgtatgtatgtatgtatgtatgtatgtatgtattgagatggagtttcgctcttgtcgcccaggcccagcctatatactttttctcaactctttttacttattgattgattgattgagatggagtctcgctcttgacccccaggctggagtgcaatggtgcgatcttggctgactgcaacctctgcctcctgggttcaagtgattctcctgcctcagcctcccttgtagctgggattacaggcccctgccaccatgcccagctgatttttgtatttagtagagtcggggtttcaccatgttggccaggctggtctcgaactcctgacctcaggtgatccatctgcct

SEQ ID NO: 4476 - DNA, 1756 bp, Homo sapiens
ttaaaacacaataaggaagagagaggagaaaaagacagtcaaaacaaaaactctggggcttcccttatcaattacctaaataatccttgttaaaactaagtgcaggctatgtttccattttctacttttttatgcttcttctcttctgttccttcagtggtggtagcgcggatgttcaaattttcagttctcagtaaagattgtatagacagtcccacggtcttcaggtttttactctgtgctacccaaacctacagtaaatactataaaagaaaacttattcaaacgtaatctttatctgcaaaaactattgaaaaacgttaccatttaactattgctgtaatatagggggttccttgaaatatgataacctgcttgttatagctacttcagcagatcttatcctgttgcatagggtatcagcatatgcttaatcatttaggtatattattctccctttatttctttctatgtaaacatagaaaaggtatagtaatcatacatagaactgacatgctaggtattggaatttttgcttcagccctgcaaacaatctttcaggagggtatggatgggaagttagggttaggaaccttggaagaggaatttaaagggctaaaagaagatagccttcatggataatattttaactaacttctccgttctgttcatttgaactaccatgtacttcagttattttggtatatccttttcctgcttcatgctagaaagtctttgacttgttaagaaagcagggcagtgcagcctgagtagataggataatgggacaagctggacctgggatgggagtaacatcccagggagtaacaagtaatgagagaagaaatgagaatgatgagttcccaccagctccttggctgctttcttacccatatatttctctgtccctagttttttgtttaattttttcttcatttgtatattatttggaagaggaattgtagaggaatgggatggggtgtaatacagaatcatttgatgcatgctaactactttgggaaaagatttgtgtaaggctgggagtttgactgttggctaaagtgaaaaggggggattagtagggaatgaaaattgttcaggctctttgctcatcattgcaaagaattggatgtgttgtggacctaggaaaacactcaaattcagtcatccccgtttgggataggtttgaggaactactggccaacctactaaatgaacaacatcagatagcgaaggaactatttgaacagctgaagatgaagaaaccttcagccaaacagcagaaggaggtagagaaggttaaaccccagtgtaaggaagttcatcagaccctgattctggacccagcacaaaggaagagactccagcagcagatgcagcaggtaacactttccttggtcatattaatattgaattataccaaggcctaactctgaggctttggtataatctaaaattagcagctttgtaaatgtcagagatagttaccttactacgtattaaaaccgtagtatcttcacatcagttaggagcttgagaagtcatcatgttcatgtcctgtggctcagggaagacagcacataaggaccctaatggtattcggaattacagatttcaaagagtcctcagtaatctattctgaaatttaaccttcactgtgacaagtagttttttttcccttttcccttttcttttttcttttttttttgagacgtagtctcgctctgtcacccaggctggagtgcagtggctcaat

SEQ ID NO: 4477 - DNA, 1048 bp, Homo sapiens
aagctttttttttttttttttgaggcaaagtcttgctctgtcacccaggctctggagaatacagtggtgaaatctcagctcacagcagcctcgacctccagggctcaaaacaattctctcatctaagcctcctgagtagctgggactacaggcacacacctacaggcccggctaattattttatttttttgtagagacagggtcttgccatgttctggaactcataggctcaagtaatcttcctgcctcaacctcccaaagtgctggaattacaggtgtgagccagcacatcttgccccttgaaaacttttgatggcttcccctactgtcatttggtgtgtccttaaagattgccaactagttttaaagtattttgcacacaaataattaccttttccataaatttgtctaaaaagatatttctgtttaagaaattgatcattttgagttatcctagctctgtgcttactgatacaagttgactggttgagcaacttctttcctggcataatagtcattccatatgtgggtttgtaggagtcctgaagtgagaaaggttctgatgtaggctctttctgggtgccagcattattaaagtattgtttatagttttcacttttccttcccaacactggagcaacattcaaaagcccattccccaggaaaaccctccctttcctttgcccacagttccaagatgagatgggattctccaacatggaagatgatggcccagaagaggaggagcgtgtggctgagcctcaagctaactttaacacccctcaagctctacggtaggctagttgaagaccttgagatttggaatagaggaagagtttatttctgaaaaggttttcagaagttgcagttaacaatttttcatccccagccagcttctgttactgatgtaaggatgcagagtcctgtcaggagttaggtgtcaagtgaagtctccttgttatggggcagtgcagctgtaggccaagctgtatctgtttgggaagggagaaaaaacagtagctggcatccatatccacttctccgggtg

SEQ ID NO: 4478 - DNA, 1022 bp, Homo sapiens
gcagggcgcggtggctcacacctgtaatcccagcactttgggaggccgaggtgggcggatcacgaggtcaggagatcgaatcacgaggtcaggagatcgagactatcctggctaacaggatgaaaccccgtctctactaaaaatacaaaaaattagccgggcgtggtggcgggcgcctgtagtcccagctactcggggaggctgaggcaggagaatggcgtgaacccgggaggcagagcttgcagtgagctgagattgcgccactgcactccagcctgggccacagaggagactccatctccaaaaaaaaaaaaaaaaaaaaaaaaaagactgatttcatgtagtaaggatcccgtctatgaactctatgaatatgaggtaagaatgcatgaactaagccaacttagctgtattcttctggaaaatgggatgtttcttgataggctagattagtggttcttaaaagttttttggggtcacttatccttcagagaatcggatgaaagacactgggccctcaagttagaagatgagcataagcgcaatcacatgatttatatatatgattttaggaacttaaactgtaatgaaatagagccaatttatatttagatctcatttgaaaacctttcattttcattgttcgggtgtgtggatgttagtatgagtttaaggtgaaggagtctatgttagtatttgaacatgttgacaggatccatatttttaatttattctttttatcgtctgcaaacatttctgcagtattagtaaatgactctgtatttggtaaaaagggaagctaatgtcgcacaagtatctatggctttgttctttgtcagtatctttttgttctcaaactctgagaagcgtctttttttcagttttggattgggcctgaggtgatttgaagctcctgtcttggagtttaacttagttataacaaacactgagttaatcctatgcaggagacacaaagataattaatatatggtctctgtgcttgaagagacgctaattttctg

SEQ ID NO: 4479 - DNA, 1034 bp, Homo sapiens
tcaaaaacctcaagattgctaagtcagtatttgacccattattttaagttacagctcatacaacaaaattctgttatagcagaatggaaccattcatcctgggaacatataatgggatttgatctataaacgtgttttggttctgctgattgactctttgtaacttcttaaaatttgggaagtgtaggctgggcgcagtggctcatgcctgtaatccctgcactttgggaggcggaggcagggggatcacctcaggttaggagtcgagaccagcctggccaacatggtgaaaccccatctctactaaaaatacaaaaattagccaggcatggtggcgggtgtgtgtaatcccagctactcaggaggctgaggcaggatactcacttgaacccggaaagcggaggttgcagtgagctgagatgacagcctgcttgacagagagagactctgtctcaaaaaaataaaataaaataaaataaataaaatttgtaaagtatagaaataatttaaaactcttgttagaattcagttaccttctggtattcagtagaatacagtcatatatcatctcatggtgatacattctgtgaaatgttatcattaaacgatttcatcattgtgtagaaagcacttggataaacctagatggtttagcctactgcatacctaggctatacggtataacatattgctcccaggccacaaacctgtatagcatgttattctgctgaatattgtaggcagttgtaacacaatggtaagtacatatgtatgtaaacatagaaaaggtacagtaatcttatggagccatctctgaatatgtggttcattattgactgaaacattatgtggcacatgactgtacttgggcagctgctgcttctctttcagttgcaaatgcaaacctgttataatctttgactaaataaagcatcctggattctgtaagtccatagatagtaaaaacttcttaaaacacaataaagaagagagaggaaaaaaaagaacaaaacaaaaaccctgggaaagtgagt

SEQ ID NO: 4480 - DNA, 1032 bp, Homo sapiens
actgtcatttggtgtgtccttaaagattgtcaactagttttaaactactttgtgtacaaataattacctttttcataaatttgtttcaaaagatttttcattttaagagattgatcattttgaggctgggtgcagtggctcacgcttgtaatcccagcactttgggaggccacggcaggtggatcatctgaggtcaggagtttgagaccagcctggccaacatgatgaaaccctgtctctattaaaaatacaaaaattaggcatggtggcgggcacctgtagtcacggttactgcagaggctgaggcaggaaaattgcttgaacctgggaggcggaggttgcagtaagcccagattgtgccactgcactccagcctgggcaatagagcaagactgcaagactctgtctcaaaaaaaaaaaaaaaaaaaaaaaaaaaaaaaaaaaaaggagagagagattgataattttgagttatccacgctctgtccttactgttacaagttgactggttgaatgacttctttcttggcataatagccatcccaagtgtgggtttgtgggaatcctgaagtgagaaagttctgacattggctctttctgggtgccagcattattatagtcttgtaatctatagttttcactcttccttcccaatactggagcaacattcagaggcccattccccaggaaaaccctccctttcctttgcccacagttccaagatgagatgggattctccaacatggaagatgatggcccagaagaggaggagtgtgtagctgagcctcgtcctaactttaacacccctcaagctctacggtaggctagttgaagaccttgagatttggaatagaggaaaagtttatttctgaaaaggttttcagaagttgcaattgataatttttcatcccaaaccagcttctgttactgatgtaaggatgcagagccctgtcaggagttaggtgtcaagtgaagtctccttgttatggggcagtgcagctgtaggccaagctatatccgtttgggaaggga

SEQ ID NO: 4481 - DNA, 1063 bp, Homo sapiens
tcatttatagaaagaagtgaggcttaccaggtgtaaggcagaaatgctaatgacagtaatagattctttcctggtttcttctttctaactctgacaaataattgagagtataccctcagggataatcaacacctctagatcactgcagttacttgttaagtatatggctgttagtgatggtacagaggaagtaaacatgaaaaacaattatttcagttaagataacttaattatttatattctttgttggtaggtaattccaacatggaatatttcaccaattaagaaggccaatgaaattaaggtaaacttggaagaaataattgttattcttttccagaaagacttcatcggttttgaaacttaagtacttcctctttaacttttcttgatcaatctttgttttaattccagctttgtttttttccattctattactcttaggtttgtatctcatggaattcactttaacctctgcctcgtgttatttgctttagctgtacattatgctcttaggattttttttttttctgccctgcttcttccccttattttccaaatacgtatgatttgtgtttcccattacttcatttctttctaattgtactaatgtagcctcctcagtttgtggatatccaccttgaagaagatgattcctcagatgaagaataccagccggatgatgaagaagaagatgaaactgctgaagaggtcagtgaatgttagttggtaatatttgtcttaatagagcagggtatactttgcttccttagtaatgtcacttgtagagaggattgagacatggttcttttttcagctcatttctgtgctttaagctgtttttctgccctttatactcccttaattttagaatttgttgtattatgaaatacagcatagaaacgtgcatagaataaaaatgtatagctttggttattataatgcaaatcctcatgaaactcatagcaaagtcaagaaatatatcattactaggacaacccctgtataccctccccagtcacaatcacctccctccccctaaaaataaccactaccctgcctt

SEQ ID NO: 4482 - DNA, 1005 bp, Homo sapiens
tttggtgttagatcctggcaagagttggtgccttctctagatgagctgtctgtacccaggagtcaaagccctgtaactcaaaagcacattgattagttaatagcacccgataaggaactttttaaagggctggcagtggtaatgctggagtccacaacctgtcaggaggctgtaaaaatatatcacaaccttgcagtgattagtttttatagctttgataaagcccagcaacaagccagacaatcaagctaggattcgattctgggggcatttgtaaaagatgttaaaaagcccaaaatactgtattgacacagaaccacaggttactgtaagtaatagttacttatttacccaaagtggtaatctctctgcagtgtaattgtctctccttatgggaagcccacttaactaatcttgaagttaaatttgatgaagagaaaaataatacttgaatttaatcggacaaagtatgttcaaggttttgaatatagcaggtgaacatgaaaagttttctggttactctgaaaatttagacatgtcaagaaaaaccaagagtatagaatcaagttatactggaggaaaacattgcttttatagacctctaagctaaaatatttcagcatctgactgtaaaaacagaactggaagagaaaaagttacagcaactgatgaaaaggttgaaggagagactaatgtctcaggctttctcaaggggagaaaaagctgaaagcagtgagatagaacaattgaacttatgagatatgaatctgagaaattttcaaaagaaacaagttatagaattgaaaagcaaattttcttgtaatttcattaagagcaaatcaataccttgaaacccttactttaacataggagaccattctttagaaagattccacttttaattatagctaacttaatcacataaacaattctttttataaattctcctttataaatcttatgacctgcacagaccatgtatgatatggttgaatgaactttctg

SEQ ID NO: 4483 - DNA, 1027 bp, Homo sapiens
ataggctaatgactggcagcagcttgaagacctgcagctgatagatgaattggtggttggtggacagtttgcctgtggcaactttttccaggtagcttctggtacccagaagcttggagttcagtcccttcaaatccaggacctggtttgtgatacactgggaaagagtgcccactgtagtgtctttgatgtcttgtaacaagtgtttaactccaatttccttagcttcctctgctgcagtttcactggtcacatgctcaaatgttttcaaggctgaagttccatcttcatagacttctactgaaatatatgcttctgtaggcagccctaagtcctttggcttcatgtcactagtgaccaatactgagttacggcagtatcttttcatgatttcattgaaggcagtgtcattcttgtgtagtttagggcctatgtggtaccactcaactattctttccctggcattcaccctcttaaacattctgtatgtgtttttcaaataatcgtgggctaaaaaacaattatctttgtcatcttcattaaaagggactgtaaaactgctggatacatcaagtactttcatttgccatgaccgcaaaagcacatgaagaatgcatttctggtttccaaccttgctgattctgttgaaatgatccaccacattgagcagtacctgggggtggactaccaccttctgcaccaccaggtccagcctcatgatacactctggccaccaggcctggctccctgtgacccactggagtttcttttagcatgcaaattcattataattagtgtataataagcagtgagagcaaccgaatgtcacttttgttgccatcttggttgtaactggttttggctgctttctttgctgcatcctgttttgatcagggttttgttcttgttttgttcagcaggctctctggccagtgcttggaaaacaaatcctgcttctctcctacctcactccccccacagagattatatactccccttcaatcttacagggttttagaagggtgga

SEQ ID NO: 4484 - DNA, 1031 bp, Homo sapiens
tgcaacctccacctcccagttcaagcgattctcctgcctcagcctcccaagtagctgggattacaggcgcctgtgaccacatccagataatttttgtatttttagtagagatggggtttcaccacattagccaggctggtcttgaactcctgacctcaggtgatccacccgcctcagcctcccaaagtgctgggattacaggcatgaaccactgtgcctggcctggtattttctatttttatttaggtttctgcttgtttattttaatgctggtcccggcccattaagtagatttcacaactcactaatcctaatgaataattgagaagcattgatttaatgagctcttcatctttgaggaagagacagaagcaggaattcaagaaaaaatgttaaaaggaaatacattgagatgtaagcagcagttgttaagtgaatgaaatattgcgtggctttttttttctttttagttttctatattttccaaggttactatagtaatatgcataaagaaatttgctttcagaaaagagaaattacgaaactgtggattatttagaaaatagtcagttagaccgggtgcagtggctcacgcctgtaatcccaacactttgggaggctgaggcaggtggatcatttgaggtcaggcgttcaagaccagcctggccaacatggtgaaaccctgtctatactaaaaatacaaaaattagccgggcaatagtggcatgtgcctgtaatcccagctactcaggaggctgaggcaggagaatcccttgagcctgggaggcagaagttgtggtgagccgagatcatgccactgcactccagtctgggtgatagagtgagagcctgtctcaaaaaaaaaaaaaatagtgaattatatatttttttccttttttgtagtattgaggaggaagtataacacatggttaataatgcttttcagttcagcaatcttggattttaatcctcattctgtcactaattaactaatttagagaagacattaatattttcaagttgaattttct

SEQ ID NO: 4485 - DNA, 2737 bp, Homo sapiens
gcctgtaatcccagcactttgggaggccaaggtgggcggataacctgaggtcaggagtttgagaccagcgtggctaacatggtgaaaccccgtctctactaaaaatagaaaaattaagctgggcatggtggtgcatgcctgtaattccagcggcttggaaggctgaggcaggagaatcacttgaacttgggaggtggaggttgcagtgagccaagatcacaccactgcattccagcctgggcactagagtgagactctgtctcaaaaaaaaagaaagagaaagagaaaatagtttctaaaaaattgtatacagacaaccttttatttccaacaaacgtgtgccgagagagagagagagaaaatagttttaaaaaaattgtatacagacaaccttttgtttccaaccaacgtgtatctagaaaagagttagtcgacttattttatacatagcatcagtgaatagtaatgagtggtaggtcatttcaaaatcctgttgcctatattatgtgaataccaggaggtcatctgatacggacttaataaaggttgattttgctttatattgggagctgagccacacctccccttataactctattggtcagtaatggtcagtttgtggctgttaggaaaatgttgccttttagcattccagaactctaaatcctgtagaggtacatgggatattttattctttgcctgtactcataaaaatgaacagaagaaaatacgtttttttcttttcttaacttcttttcttttaactctttaaaaggtgaaatatcagccctcaagagactcacttgctaactttcctttttttctttttttttctttttttgtgtttcttttttctttctctgttttcttacatggttctggtggattcacatttgctgatgctggtgctgtttttcgtgtgatcttcaacgtttttgggtgaccattgaccctgtgacctcaaaatggtgtccaactaaccacttaaaattaacatcttttttttaattaacgaatttatggtatttttttttttcccttggcggggatggggttggggttgttttttctctattctagattatccagccaagaagatgaaaactacagagaagggatttggcttggtggcttatgctgcagattcatctgatgaagaggaggaacatggaggtcataaaaatgcaagtagttttccacagggctggagtttgggataccaatatccttcatcacaaccacgagctaaacaacagatgccattctggatggctccctaggaaacagtggaacagagttttgaccctcagtgactcttcttagcaataatgcatgcatttgatttaacaagactctggggcctgtgctgggaaccatctggacctttgcagaagttagagattcagtgcccccctttcttaaaggggttccttaacaaccacaaaaatccttatttctgcagtggcatagaatctgttaaaatttaattagaatcacaaatttatctcagaagctttttaacagttggtgaaatgtgcttgtccaacaaagcatcctaacagggtcgttcccatacacatttgacctggtcagccttttccaggtgaatagccccagttctgacataaagaaagttttatttgtattttactactgtttggtcaattttgatatataactggttacaaacagagccttactatttattagtggggaaatgattttaagaccgtccttttcagtatttaattctgacagatctgcatccctgttttgttttggattatttctgttttggaaaatgctgtctcatttaaaactgttggatatagctggatcctggataggaaaatgaaattattttttcattgtgttttttaattggggtgatccaaagctggcaccttcaggcacattggtctcatagccattactgtttttattgcccttctaagatcctgtcttcagctgggtcagagaaaacttcttgactaaaactggtcagaactcatcacagaaatgaaatacagtggtctctctctcccagaactggttgcagctaaaacagagagatctgactgctggctataggattttggacttaatgactgaaattgcaaattgtcctttttcttggcattacagattttgccaaaataactttttgtatcaaatattgatgtgtgaaagtgaaggagctagtctgctgaaccaggaatagtttgagatattgaactgtcatttttgcacatttgaatactttgcaggctggctttgtataaacttatcctctggtttcctatatgttgtaaatatttagaccataatttcattataaataaatctataaatattctgcttgtggtttctctgttttcttccacaacccatccatacactgaaattcataaacttttttactcatagcacaatgcaactataacattaccagaaaaatacatatacagaccccaaggtttgcatatagttcccagagttatgtaactgcaaaatgtacccttaaagttcaaatgaaaaggttaaggattattatgctggatattttccattttcatattttagccctcctttatttaacagcgtattaaaaggacttcatgaatgaagcgggttttaaaggaaatatgttattcttggaaagacattttatttttttttgagatggagtctcgctctgtcacccaggctggagtggaatggtgcaatcctggctcac

SEQ ID NO: 4486 - DNA, 1761 bp, Homo sapiens
tcttgcacaccaaatagctgtttaaagtggggatggtgggcacacttgctataaagggtcagatggcaaatattttaggctttaagggccatacattctctgtcacaactatcacactcggtggttgtagtgcagaagcagcccgtggataatacctcaatgaataagcatagctgttgtactccagtagaactttatttacaaaacaggtggcaggccacagtcatagtttgccatacccttggccattgtttgcctaaccttacctttgcagtgttaacaaagtcctcaaggagaatggggctaccttcaccacacctctcagtaattggaactgagttagcatttcaaatcttagaaggaaacataatctcagcatctggggaggccgaggcaggattgctttagcacagtttgagaccagcctaggcaacatagtgagactccatctctacaaaaaaaattaactggacatggtggcacatacctgtatttcagctacttaagaggctgagatggaagggtcccttgagcctaggaggtcatggatgcagtgaaccaagatggtgccagtgcactccagcctcagtgacagagtgagactgtctcaaaaaaaattttaaaaagcaacattatgtaagagatatataaacttttcaaatgtaaggattataaatgctggtatgtttcttttataacttaagaaatgtatacttaaaaaaattttttttttgagacagagtctcgctctgttgcccaggctggagtgcagtggcgcatctcagctcactgcaagctccgcctcccaggttcacgccattctcctgcctcagcctcccaagtagctgggactacaggcacccaccaccacgcctggctaatttttttgtatttttagtagagacggggtttcactgttagccaggatgatctcgatctcctgacctcatgatccaactgcctctgcctccccaagtcctgggattacaggtgtgagccaccgcacctggccacaatttcttaaatcatgaaagtagaattttaggaaaagagtagatgtctggataataatctggatggattatatatactggtcttggaggcaggggagagacttaatgagagcatggtaatggatttatggtgggtccttctctgtgggcctctcatagtgtacccatgccatagcaaatggcagcctcgaaccattgcccagtccccttacctgtgggctgtgagcactgaagggggttgcacagtgtgtaacaaaaaagctatgaactaaattttatttgtggtctctagtcaaatttattttattttatttatttattttatttttgtttattattattttttgagacagaatctcattctgtcacccaggctagagtgcagtggcaccatcttggctcactgcaagctccgcctcccaggttcacgcgattctcctgcctcagcctcccgagtagctgggactacaagcgcctgccaccatgcctggctaattgttttgtatttttagtggagatggggtttcaccttgttagccaggatggtcttgatctcctaacctcgtgatccgcccacctcagactcccaaagtactgggattacaggcgtgagccaccgcgcccggcctaatgtttgtatttttaatagagatggggtttcaccattttggccaggctggtcacaaactcctgacctcaggtgatccgcagcctcggacttccaaaatgctaggattatggtgcaagg

SEQ ID NO: 4487 - DNA, 1699 bp, Homo sapiens
ggatcgtccattatatcttcatgttcagggccagacacgggaattagtggacagtaagtaatgtttttggctcacgtagcactttttgtgaagagcaaagtacagggctctgtatagcaagttggcaaagtgtccctgatggctgttctaacccttgttcatgaactatacacgaatttgtatgggagtttagagggatggagagccacatatttgggtaacgtataaagcagatttacggtgaataattgaacactggcctgcctgggcactagtcagttcattccattcagttttactgtctgtgtttttctaaggagctgtaaaccggatcaaagaaattatcaccaatggagtggtaaaagctgccacaggaacaagtccaacttttaatggtgcaacagtaactgtctatcaccagccagcacccatcgctcagttgtctccagctgttagccagaagcctcccttccagtcaggggtatgttttggggagggatcgttaatagcattatcatttctataaaaatgatatgtgctggccaggcacagtggctcattcctgtaatcccagcactttgggaggccaaggtgggtggatcatttgaggtcaggaatttggaccagcctgaccaacgtggtgaaaccccgtcacgaacattacccgggcatggtggcaggcacctgtaaccccagctacttgggaggctgaggcaggagaattgcttgaagccgggaggtggaggttgcagggagctgagaccatgccactgcactccagcctgggccacagagcaagactccatctcaaaaaaaaaaaaaaaaaaaaaagtgccaagtaatacatacaaagaaaaaaaaatcgtgaaattccaaattccaatcccgaaagttacctgccataggtattctgtttgtgtgttatccagctctccacggtataatgaacacctgatcacacatttcttcatattgatatattctagaaaggagattgatagagcagaaggtatacatgttgtacattttgaagttagtggttttaatttgtatttgtaaacttgatgacaactggaggactaagaaggctgagtctgatgaagtaagactttgctgatacattcctcctagaaaaaagggttggagagagcagccttcactgaagagtatcacagggctgactgtactacccaacactctaccccagttttacaggagactgtctttgctataatttcttattgacttatttcaaagattgaggatttaattatatattctgtttaatctgaagtattctgttcttcctacagatgcattatgttcaagataaattatttgtgggtctagaacatgctgtacccacttttaatgtcaaggagaaggtggaaggtccaggctgctcctatttgcagcacattcagattgaaacaggtgccaaagtcttcctgcggggcaaaggttcaggctgcattgagccagcatctggccgagaagcttttgaacctatgtatatttacatcaggtatggatggatagggcaggggacatgtgaattcttgtcaacttgttggtacagtcaggagtgattcagaaggagcaagagaaaactgggtgtaattaatagtaatgagggatttagataaatgctaggagtaattactttataattagttaaagaaattgtagaattggggca

SEQ ID NO: 4488 - DNA, 1025 bp, Homo sapiens
acagcaccctactgccctttaaataaaggagggctgtgggcagggccatgtccctttctcctctcccctcaacctcttactgctgttctccctttctccgtccttcatggaagccctgggagataacctggcttcctggagttgatggaataaaggttggggtggccataatggtttgttgggggtgagggaaaaaacccacagggaccagaatgttttgttgttcttttgttttcttttttgtaccaaagtcaactgcacgtgttttatatttttaagagatcgtaggcaattagagatcgaagcctcctatctccacatctctgaagaagttgaggggtgggggagagaatgacttctgccttcatctgcagtaacggggggacctatactgacctcttccccagccatttagaaacaagttctagggtgggttggaaaatctccaagagccctgacctcatcttccacctcagcaaccatgacctgaaacctcagcgtgaatttgggggatttttcagtggaacccttgcccccaaatgtcgaccagcccccaaatgtcgaagaattttcttcttgccaattttgttgtttaaaaaaaaaattcagggaaaattaaaaacctggaactccataaggtactgtcttccataatgtctgccaattctgaggaggatggtagtagagagccgggcagtgacctaagttcctctgaaaggggccttttcctctcaccgcaaggacagcctctgcctcactgaagagagggggcactaacaaaagtaaccactgcaaatcttttttttgtttttttaattcacaaatacaaggataaaaacaaaggggcacacaggttccaatgttgggaattccggtatcaggaaaagtgtgttcatcgtatttgtatgccatgctcagcaatcacctccacctattgcccccatccccagtgtcattcattgtcagatccatcccccactaggcccttgttgatctccatgatgtcgggccctggggttacccgt

SEQ ID NO: 4489 - DNA, 1071 bp, Homo sapiens
tgccaaaataacaaaattaagtctgccacactgccccaccctacccctctcccctagggctgtcctctactggcgctcttgcatacccctacgtcctctcatgtcctcacttgttccttatctgcagtggagttgcagcagaaggaccgggcactggtggagctgctgcgagagaaggtcgggctgtttgctgagatgacccatttccaggccgaagaggatggtggcagtgggatggccctgcccaccctgcccaggggccttttccgctctgagtcccttgagtcccctcgtggcgagcggctgctgcaggatgccatccgtgagggtgagggagctcccagggaagagtccaggctcaagcactcaccgtcacagaatgtggacatgtgactagacatggacaaacacagacaagtgggatgccaaccctataaaccataaacggccctgagtgcctcttctgggccagttcctgggaaaggcaggggaggaggtgtggtccttgctgctgctccatatcgtccatgctgcatggactctgctgcctcgtaggcatttactgccctttacctcatcagtggttgtgtgagtgaaaccccactgccagtgcagggggcattcccccagatgcccaagtgtcccacatgtgggggtgaatggcattcccctcagggtcctgtgtcattcctgttctcacctcttcctctttccccacagtggagggtctgaaagacctgctggtggggccaggagtggaactgctcttgacaccccgagagccagccctgcccttggaaccagacagcggtggtaacacgagtcctggggtcactgccagtgagtaccagggcaggggaccaaggtagtaggtgggaggggccaaagttagtagagtggtaccagggatcaagtggtatcagggccccagggaagtgagctcagccatccttttctccttctcaacagatggtgaggccagaaccttcaatggctccattgaactctgcagagctgactcagactctagccagagggtaggtcctcaagaggttctgggacttggcaaga

SEQ ID NO: 4490 - DNA, 1047 bp, Homo sapiens
tatccgcccacctcagcctccaaaagagctgagattacaggcattagccaccatgcccagccaagatttttataatttttctttagctttcagggaatcagttctcaactttataatttgtaaacctttttttttttttaacttctgcaccatggaattttgaaaaggtttttagaaatgcatataaaagtatgaaattgcaggccaggcacagtggctcacgcctgtaatcccggcactttgagaggctgaggcgggtagatcacttgaggtcaggagttcaagaccagcccggccaatatggtgaaacctcgtctctactaaaaatacaaaaattagccgggcgtggtggcataagcttgtaatcccagttacgcgggaagctgaggcaggagaatcgcttgaacccgggggtggaggttgcagtgagtcaggattgtgccactgcactccagcctaggtgacagagtgagactccatctccaaaaaaaaattatgaaattgcctattccaagaaagcagttcaaaataacctgtcctgttgacagatctgtagtggcttctttattaatagtattaatatttataattgtggccaggcgctgtggctcacacctggaatcccagcactttgggaggctgagacaggcggaccactggagttcgagaccagcctggccaacatggcgaaaccctgtctctactaaaaatataaaacttagccaggcatggtggtgcgtgcctgtagtcccagctgcttgggagactgaggcaggagaatcacctgaacctgggaggcagaggttgcagtgagccaagatcctgtcactggactccagcctgggcgaaagtgcaagactctctctcaaaaaaaaaattataattgtggaaattaataatattaattgtaattgatttgttgagcttctgttatgttcaaagcactttaacatttcatttaatcctaatgaaaaacctatgaggaagatattaccttcatttttcaaatgaggaaatagagaggttaccacctggtaaacagtggag

SEQ ID NO: 4491 - DNA, 1048 bp, Homo sapiens
agagtggaagaatggggggtcctcctggtggctgaggcttctggggacatagacaaaaattctaggggtcgtggaggttagggagagagttgagggggaggggagaagtgaggataggggaagggagtctaaagcttagggaagtcactgagtgacttgcaggaggttagatggggcctagagaaggacctactgaggccgaccagaggagttacagtggggtctgatcttagccactctggctgtggaatttgaccttggaatcaaggaggggacagatgtgaatgtgtgcatcccctgtgtgcatgttactggtgtgctggtgtgtcagtgtgtctgtctgcctgcctgccctcctattctgtacccagatgctctgggctactgttttgaacagtggtcagcaaagtagggggttcgtgctctctggccacgaggaagtagcttcatccttagcttcagtttctggttggaaatatcatctaggagctgagtgagcggattggttaggatttctgaagctggtaagagaaaaggctgagaggagctggctggacccttccgggtttgtttatgtctctttgggagagggtgggggtggggttgcaggcagcagctgcccccctcccaacccagccggcctgccttgtgccaggagggcagggagtcctggcacagctattgttcacttgcacaaatgcctgtctgtttgcatcgcttaccccccctctctttctgcttgtctctctctcctggcctgacaggtgtggccgcgtagggggcaggctgggttccaggatgcttgggtctcagggtccctaacctgatttattccttgtggcccttagcaatcctcttccgtttcacccgtacccactcccattgccagtgtctcatcttcattcactaagcaagcatttattaagtgcctttgtgtgtgcagtgatgtctttctgtgttgtttctggctttggcattagtgtttccacttggctgccttcccctctgcctcctgtcttcatcttgtccctggaagctcataaaggag

SEQ ID NO: 4492 - DNA, 1023 bp, Homo sapiens
agtaccctttatccctgcctttgtacccagccccattcccaagtgccctgacctttccacacccagaccccaggaaatgatgaagctgacttgcaggtgaataagtcagagctgaaaggaaggtggtgcctgcagacagcacctcccagctcctttggggcccccgcactgtacccattatcagaaaggacaggtcccagcccagagttggtttaatctctggcttctctccaacctgagtgccctactaccctggtgccagcctatgctgatcaccaacttcagccaagggagcagtaccccttaggagtccttaagggtgatggaaagccctcccctccacctccctggtagttcctagccaggctacctgtcttgatgctaaactgggagagacagaggttccatcctgggttgggggtggagggccagggaaagcagctttaaaaggactttccttagggggttgggattagattttgctatctggaaagcaactggggattcgagtagggcctaagacaaacagagggccggggtgaggtggctgaagtgtggtggaacagtggggtggcagacaggctcttcacagcctgcgccagcccaggccccagctccaaaagtctgtttattttttcaaccgtttgagctgagaccctggagtagagccaaggggggcgggggaggttttttgaaaccgcagaaatttggttccaccctaaaaaggaaagccatgggggagctggttgggggaagacctggctagggggtatagagagcggttctgtgggggcaggtagctactgggatcccttttccattattgtggggagctgggacgtcagacatctgggtgttcatgctctgtttttgtttttgtttttggtggtggggggactggctcttctttctactatgggggctggctgtgtggggcaggtaatttgggaatctggctggcagcagggagtcgggggctgagtgggtggatctgagagggcaaagaggccaccggagaagggt

SEQ ID NO: 4493 - DNA, 1021 bp, Homo sapiens
acaggattttttgtattttagagacggagtttcaccatgttggccaggctggtcttgaactcctgacctcaagagatcagccagcctcagcctcccaaagtgctaggattataggtgtgaaccactgcgcccggactattgctttaatttttttgtttgtttgagacagagtctcgctctgtcccaggctggagtatagtggtgcgatcttggctcactgcaacctccgcctcccagggttcaagcagttctcctgcctcagcctcccgagtagctgggattacaggcgctcaccaccgcgcccagctaatttttgtatttttagtagagacagggtttcaccatgttggccaggctggtctcgaactcctgacctcaggtgatctgcccacctcggcctcccaaaagtgctgggattacaggcgtgagccacggcgcccggcctgctttaattttatatccattacttactaaccctttttgtttcatccattttctagtgctgcattagacgtggaactatctgatgattccttccctccagaagactttggcattgtgtctggaatgctcaatgtcaaatgggaccggattgccccgtatcctcttggcacttggtgatgaagggtcggggggcagggagagccttgcctgcaaagcagcaggggtacttcaaataggctggatatgtgtggctgtcctcctgtcatctctctggataagatggagcaagagaggttggtgtaaattgtgtgagcatgatttagagtagacatgaagaaggaggatactgaagttcagattataagaccctgaaacaagctgggcacggtggctcatgcctgtaatcccagcatttttgggaggccgaggtgggtggatcataaggtcaagagattgagaccatcctggccaacatggtgaaaccctgtctctattaaaaatacaaaaattagctgggcatgatggcgcgcacctatagtctagctacttgggaggctgaggcaggagaatcacttga

SEQ ID NO: 4494 - DNA, 1036 bp, Homo sapiens
ctgtgggcactcctgtgtgagggaaagctacaggctcctgcaggtccgagatcggccgaaatcaggcaccccaaggaagccctgctctggccacatggtgtcccctcagaagactccaccagccggtgggcatcccggggcttctgacaggaagagggcagtagatatattggtgcttgtaccggtttttcgagggctgcagggtgaagatggtaggagagtctggagaacgggtctgctctggtggcttatggactactctgtggaaggggctgctgttctggtagcatcgaaggagctttctacgggagcgctgtcaagaggattttggtgaatttgacgtacttggtttgataactcactttgcttttttctctaaagatgaggctgctgtcatttgtggtgttggctctatttgctgtcactcaagcagaggaaggagccaggcttttggcttccaaatcactgctgaacagatacgccgtggagggacgagacctgaccttgcagtacaacatctacaatgttggctcaaggtaactcgaggccctagagttacagattaagcctatttctggattcttagttttcagatgggaatagggagcatattggtgggtagtggtttctctttgggacacttccagcatcagatatattgagtgaatgaatacacttcgggatctacttttggaaaggaggacattcttacctaagctacaagaaaccatctttcacgtttcgggttggaagaattttagagtagggaagtggcaagaattgtggaaaaactaggagggaaagataaagacacagaaaatacacaatcccttgttacctcaggggtttaaagtgtcatcttccagcctggcatggtagctcacgcctgtaatctcagcactttgggaggctgaggcgggcggattgctggaggtcaggagatcgagaccagcctggccaacatggcaaaaccctgtcactactaaaaatacaaaaattagccaggcgtggtggcggacgcctgtagtcccagcta

SEQ ID NO: 4495 - DNA, 1051 bp, Homo sapiens
caaaaactggggcctgcggggctggatcactatttgaggcagcctcccggctgggaggaccccgccactctttgctgggctgaggccgccaagcccctcagtgtggggactgaatgccccaaggagaacaggggttggagttaagtggtgcaagggctggggaaggtggaccagcttccccaggcctgaaggaagcagctccaggagggagggtgccatctgcctcccacacgcacagcccatcctgcggctgaacccaggtgaaaggggcctgtggatgggggcagttatctgatcccctacctcccactctgtctctaggtcaacgtggaggtaccaggccaccatgctcagtctcaagctgccccaacttcttcaagtccaccaggtcccccgggtgaggggctccacccactgacccaccaacccccattccctagaggactgactaggggctgacgttcttctcttttagctattggggcagcccctcctgcaggcgaactcttaccctcccattccagtgtgagactcttcctctgttctctgaggaacaagcttgtggccctccatctggagtccccttccccagagcgccctgtgtgctgcgctccacccccatcccaccccaatctggctcttcggtttcctatttgttttgtgggttgtgggtactgggacctgtggtaacatcagatcagatttagtttggcttgggggccacgttgatctccagcccagcctctttgaccctgcttccagagatctcagatggagggaaagggtccgggcacagtgacgcccttcctctcccaccactaccctaggtgttctgggaagatggcatcatgtctggctaccgccgccccaccagctcggctttggactgtgtcctcagctccttccagatgaccaacgagacggtcaacatctggactcacttcctgcccacctggtgaggggaggctccgccccaggccgcggccttgagctcagagggggtacccaggcgggcagggaccgtccaggcccacgggctgcagcggcagtc

SEQ ID NO: 4496 - DNA, 2051 bp, Homo sapiens
tgggctgtgctaatgctgggtcttggcccatcttcccctctgccccccatccccaggactctctataagatcctagacagctgcaaacagctgactctggcccagggggcaggtgaggaggatccgagtggcatggtgaccatcatcacaggccttccactggacaaccccagcgtgctttcaggccccatgcaggtgggtcatgggtgaggtggggggatggtgtggaatagggacgaggtaccagagcagactccatccccagaccctccacatagctacctttttttctcttccatcactccttccccagcgcctcaacaatttgctcttcagttcaggaggtcagaccctctccatctttccttctcccattccacaggcagccctgcaggccgctgcccacgccagtgtggacatcaagaatgttctggacttctacaagcagtggaaggaaattggttgatactgacccccaggccctgcagtggggctgactccagatctctcctgccctccctggcagccaggaccagcacctgtagtcaccccaccacacgcagactcatgcacgcacacaggagggaggcctagctgctcagaggctgcagggagggcccaggagccggctgggagggtggggtccctttgttgccaagacgttaggaaagcgaggaaagtgcttggattaggagagtcttgtgggcccctggccagccttcctgcctcagctcccctgctgtctccaggggcaggtggtaggcatgggtacctgcatttcactggaatgggttcttggatctctgaggggaaggaacagcaaaagaggcccttcttcctcacccaagatgcagggtggttggggccaggagtttggaccctctaggtcttgggggaagagctgggtaatacctggtgtctgagtgattctctgcagacccttcccctcctcaaggatcacccatcctcctttcagccccctttatggggaccaggcagctctggagccagccacaggggctgttagagaagcaaggcctggagtggcctgcaccgagtagcagggtcagggttcgtgtgctcctcctcctgctgcaggggctgcacatcccattgccccacttctgctttgtgtctccctctgtctagcttccagggcagggagcaggccccacctagggctgcaggcagtctggcctgtgccagcacggtctcctgtgcccaccagccccacaggtgctgtgctttgtgctcttggctgctgtgctgggacagaatgggatgccaggaagagaagaaagggggtgcagtctgaggccaccaccccccttcctatctaagggagggctgaagacaaggggccggcattcagtgggcagcagaaaggagaggctccttgaagctgctcagtcagaggcccccgtccctccttttgccttccgcaggactgaagacctgaaggggctggcttttggagtgttgaggtgaatatctgggagcagagatcatgaatagctcagggcagtgaatggcgcaccaagagcagggctgtgtgtgggaggctgcagccaggattgcctcagctcctccccctcaggctgggaggatagcacaggctaggggctcggggtggagggtctcagctctgctgcccccaccccagtactagcctagcttcccaagctgtggcttagaggatagttggcttcctgcctctctcctctaaaatagcaagtctgggaaatcctggggtgagtggagtcaccccactcccagttgctggcagagactgagactaaagcatcacttaataaaccccccaagcccaatccctgtctcctggtgcctgtctgtacagaagtttcattggggggtggggcactgaagatggcatcctgaaatgcattttggaaaggcttctttgaagtggatggaacagaacaagaagcaggcaatttgagtgaaggccctggagatggtttgataggcactgtcaagttccttgactgtaaactgaggcggtgcctttgcaggggtgatagtgaaaatct

SEQ ID NO: 4497 - DNA, 1089 bp, Homo sapiens
ttctgccttacaagacagttgggagaaacagaaaatgtaagtgaatataatgagaaagcacttggtaaattgccaagtatattgctggcagaaggtcatgttttcagagaactttgggagccctctagggagccagggtcccttctctgcctgaagagtgtactgaggtgagctcagatacttcctccagagccccttgtcacagcagtctgagcttatctgttttgtctttccctaccttgcccaccagtgatcgatggcctggatttgctgaagaaggaacacccaggggcccgggatgggattcggtacctggaggcagagtttaaaaaaggaaacaggtgagtgtggcctggctggacctgtgctgagccctgggtctgtcttttggataacacatgcttatgaaagccccttgctccctatgggtaagacacatacatacccgtctctactcacagttagctcacctcactgcctggggagtgataccagagataattagaagtcaaggttgtagctgctgaaatagagggtgaccaaagggatcaggagccctgtggggagcactgagctgctgtccttcctctggggcaagcctgtgatcagcacccactggggagaagggagcagacctccctcccccaactttagactgtgaactcctttataggaatttctcctgctttggggttgggacaggtgatcaggtttctcagagtgtgagggcctcatccaggctgcccaggggcttcccacctccctgctgagctgagggagtggtaagaccgaagccagccagggaggggcagctggcagcatgtgcagatgctcagccggtacaggcctgcccttctggcctttggggctggaggagaactaggcagagggtgtagggaataaggagaaagcttccctctccctgctagctggcccaccccctcctctgcatctgctctggctggccaggaagctgcacaaggtctgattgttcggaccttgtctccagaagccctgacttgaaaagcatctgctgcttctcccctcccagctcctcccctgagaggaaccaaataattgatgttatca

SEQ ID NO: 4498 - DNA, 1030 bp, Homo sapiens
gcctcctctgcttgagtcacaggcttccaccccgaagggcttatccccagcccagaggagtgttgtcgttatcacatttatcaagagttttctctgtgcacagcctggtttgcatgtgacatctcaattaacccttgcagcagcccagtgaggtaggtgcttgcatcctccattttatagataagaaacagtaggctgggctctgtggctcacgcctataatctcagcactttgggaggccaaggcgggcggatcacttgaagtcaggagttcgagaccagcctggccaacatggtgaaacctcgtctctactaaaaatacaaaaaatagccgggcatggtggcaggtgcctgtagtcccagctacttgggaggctaaggcagaataatcacttgaacctgggaggcagatgttgcagtgagtcaagatcgtgccactgcactccagcctcagcgacagagcgagactctgtctggaaaaaaaaaaaaaaaaggaaaagaaaagaaaatgtagaaagacaaaggaacattcccaagatcagaaagtatagtcggtggtagagccagggctctggagttggacacactatggatttcttatcctggctcttttctgctgctttagagacttagcttctctgtaggccaagtgggcactaggagttgcggggggtgtagtacctgctgatgggacttctgaaggtaggctttccctctgaggaacgcgtaggcctacatctgtttgaaatgctgggttggtaatgtcagagcctcatattagcacagctccatcttcttgggtccaggcggatctcactcacctacactagttctctgggggagcttttacacaagtgcccccatccccctctcttgaatatggagtttcacaattaccattttagtctaaaagcaactcattggcttgatttctgcagtgggaagagggaaagtttgtctatggtgcctcccttgcttaccagtttgcccacagggcctgtgagaaaatggctgttaggttgaggctgcag

SEQ ID NO: 4499 - DNA, 1047 bp, Homo sapiens
cagatggtcttatgtgtccttcttctgcccaggcctggccttgtgtcctgaggtccaagatcttcttgaaggttgtgaactgcctgacctcccctctagccttctgctcccagaggacatggctcttcgtaacctgcccccgctccgagctgcccacagacgctttaactttgacacggatcggcccctgctcagcaccttagaggaggtaaggatagcatttcttatgccacagctctgtttgtcagtcacaaacagcagcaaatgggttcagatctggggagggagggggcaggatgccctcttccactcagacagggacagtgtccttggggctacaggctgtgcttccttcttcattcagtgagccattttagcttttttcctgccttggcagtccttctaaaggtctgccattggtagtttctactattgtagaacaaccacccccttcctttctctgccttctgtaaagggcagaacaaatagttattagggcttcgaaatctttatcagtctcttttctaactctgggcccagcctgctccgagctgaacatcaaacaatcatagaaagttagagctggaagggaatgtgctgcccgcttagtccagcagctttcacccttaaatctccatcaccacatgggccatctgggggcagcagagggaagtcaagcagacaggccacccagtcctgacatacataaaccacctggctgctccctccaaccagagctgcttggctctgttttatattttagagttctagataagatttttatttgagagggaagaagggttttactgaccacaaaaataagttggggccaggtgcaatggctcacctttgtaatcccagcacttggttgggggccaaggcaggtggatcgcttgagctcaggagtttaagaacagcctgggcaatatggcaggaccccatttctatcaaaaaatacaaaaattagctgggcatggtggtgcgcacctgtagtcccagctacttgggggccgaggcaggaggatgacttcagcccaggaggtagag

SEQ ID NO: 4500 - DNA, 1052 bp, Homo sapiens
gttgagaacagatgagatgtggttggaattgatggtgcctactcctcatcagggccctaggcccctaatgcctggctttcctgacttcaggatccaagcagtacagtgcagccattgccttcaccctggccctcttttcccacctcgtcaatcatgtcaacatacggctgcaggctgagctggaagagggcgagaatcccgtcccggcattccagagtgatggcacaggtgggagaatcggggaggtcatcactatggaaaggttggtgtggggcatggggatgaaggaaaggaacacagactcgggggaagtggtgttggagagcacattccagcttccaggctccacctgttcctcgggctccacctgaccttcctctttccgcagatgaaccagagtccaaggaacctgtggagaaagaggaggagccagatcctgagcctcctcctgtaacaccccaagtgggtgagggcagaaagagccgtaagttctctcgcctctcctgtctccgccgtcgccgccacccacccaaagttggtgatgacagtgacctgagtgaaggctttgaatcggactcaagccatgactcagcccgggccagtgagggctcagacagtggctctgacaagagtcttgaaggtgggggaacggcctttgatgctgaaacagactcggaaatgaatagccaggagtcccgatcagacttggaagatatggaggaagaggaggggacacggtcaccaaccctggagccccctcggggcagatcagaggctcccgattccctcaatggcccactgggccccagtgaggctagcattgccagcaatctacaagccatgtccacccagatgttccagactaagcgctgcttccgactggcccccacctttagcaacctgctcctccagcccaccaccaaccctcatacctcggccagccacaggccttgcgtcaatggggatgtagacaagccttcagagccaggtatttggaccacttcatcatcctgttctggtccgcacctccatgccatagacactcaccagag

SEQ ID NO: 4501 - DNA, 1781 bp, Homo sapiens
tgcagtgagccatgatttcatcgctggaactccagccggggcaatacagcaagaccttctctccaaaaaaaaaaaaaaaccaccacattatctaaaagacaagattattctgggaccatgtccataggttaccagatagctagaggggtccacagctttaaaaaaaagatcacttcaaagggttagtgccccaaaccactttagtttttatgttcactgatgttttctccattcagccaactgagaagtgtctataaaacattaggactggcttttccaaatggaagcaacccatctgagtgaggcagtaaggtggaatggataagaggacagtctctggagccttttgtatcctaactctgctgcttagcagctgtgtgactaatttcctcaactgtaaaatgggagtaataagagtaacctcatagggttgctgtgagaattaagttaatactgtagaatgcttagacaagtttctggcacatgagaaaactgccttccaaagatctcaagctctctgaagttaccaggcagtttcttgggaagggagaggtgagtgctcaggcatatttgactttggccatcagcagcctcaggcagggcaagcccacttttctccttcatgggcagactctccagtaggctgccttctctgtggacctccactaggagcatctgccttagcctcattcacatgtctttctttttttcttttttaaattttgttgttgtcgttgtttttgctttttttttttttttttttaattggcgtcattcacatttcattcttgggcaaattagtttcccatatttacctcaaacctttcacctttatgtgtgtaacttctacccaagacattcatgaccctattcatacttgaagctcatcccttcctcctttttggaagccttcctgtgatgaccttcccgcaaggtgccatcctaggttgagggccctagccctccttttccagttccttcctgtcctatgaatgaatctgcctataagtctctgagtccctgcgtatggccacctgtgatcctctgtgtctctccctgtgtcctggatgagtgtgtctctgccctgaaagacaatgttccaagactggccctggattcttagtctctacatctcggaggggtatttcttcataggtgcgggaaggcagaagaatgggcctacaaatctctttctctttgtctcataggatgcaagaagccagtgtctgcctcagggaaggagatggattgggcacagatggcatgtcaccgatgtctggtgtatctgggggatttgtgtaagaatttgcacctttcattttctctgttttgggttacaggacgagcccaggctgcttcagttgttggtaacacccattacatggttggagagcaggagggatagtttggcttctgataactttttccctcccatctgtttcagtgatcccttcttttcactgcccttccatgagtcagagaggatcagtgaatacaggaaaaagggaaatttctttgagctttgagcaaatgaagataataattctctttcagtagtgggttgggaagattttaatttgatatttttcttctttgagtgtttcttttatctttatggactgctagatgaatagaaacttcagcacagggattgaaattagacatcaaggaggacttaccttcctaacagatgtttctaaggatggaaaagtactcttttgctttatagcccctggggcctctcgtcctgatagacagtggtttctcattaggctgctggt

SEQ ID NO: 4502 - DNA, 1108 bp, Homo sapiens
catgaggaaaccccatctctactaaaaatacaaaattagccaggcatggtggtgcaggcctgtaatcccagctgcttgggaggctgaggtagtagaatcgcttgaacccgggaggcggaggttgcagtgaaccgacatcatgctactgcactctagcctgggtgataagagggaaactgcgtctcaaaaaaaaataaaagactgaaaagatagatttcagacaaaatggcagttccatagtagcatctaggtgatagatctaaaggaaagaaaagtgtcctttccttctctgctgacctctttgcatctgtggtttttctcctagacggcagttctgctactgcgaattgatgacatcgtttcaggccacaaaaagaaaggcgatgaccagagccggcaaggcggggctcctgatgctggccaggagtgagtgctaggcaaggctacttcaatgcacagaaccagcagagtctccccttttcctgagccagagtgccaggaacactgtggacgtctttgttcagaagggatcaggttggggggcagcccccagtccctttctgtcccagctcagttttccaaaagacactgacatgtaattcttctctattgtaaggtttccatttagtttgcttccgatgattaaatctaagtcatttgagaaagttgttatgtgtttttcaaccttgggccatctctcttatctcctggcaaataggtggaggcagaaaaccttactggggagggaaaggagacctggaatgagggcatttagactcttttgccttcttgagggagtattcttcagacttctcagtaaattttggttggaaagacccttttggagttcaaaggataatactgtaaagcttacaaagcaccattttgcattcactgcccaaagaacaagaggaacctgtctaaagcatgggtgttccccatatgtggttgtatgtagaggaacacccagtacatcctagggctctggcatgtgtcctaaaggacatataactttttttttttttttggtgtagttttcagaattctccctttaccatgagttatttttctctgccctcttccaatgtttttacaattccagtcttca

SEQ ID NO: 4503 - DNA, 1032 bp, Homo sapiens
tttgttgttgttttttggggtttttgtgtttgtttttttttagatagggtcccactctgttatctaggctggagtgcagtggcatggtcacagctcactgcatccttgatatcatggtttcaagggatccctcacctcaccctcctgagtagctggagctacaggtatgcatcactgtgcccagctagttttttattttttgtagagacagagtcttgttatgttgcccgggctggtctcaaacttctgggctcaagcaatccttttgcctggcctcccaaagtactgggattacaagtgtgagccactgtgcctggccccctgaaaatctttttcaccggacaggcaagacctcttaagtgatgtttccaacaatccacttttgcccttatccctagctacagaccctagagactagggaaatgggtacaagtatctgaaatcatctgattctccccacctcttccgtccattagagcctgtggggcccggatagtcagccgaccagaggaactgagagaagatgatgttggaacaggagcaggcctgttggaaatcaagaaaattggagatgaatactttactttcatcactgactgcaaagaccccaaggcctgcaccattctcctccggggggctagcaaagagattctctcggtgagtcagccttggatgtatgaccagatgaagtagatcactgaacttcttgagagtttcccaaagggcctaaaataattctgtggtccatttatagctatttaatttggacctatagccacaaattccttttctgcttcctttttttaattaaataatttaaaattttaaaaattgtagtaagcataaaatttaccatcttaatcattttaattgtacagttcagtaatgttaagtatattcatgttattgtgcaagagatcttcagaactttttcatcttgcagaactgagactctgtacccatcaaacaagatatctcatctcctactccctagcaacaactgttttcttattttttacgttgaagttataa

SEQ ID NO: 4504 - DNA, 1030 bp, Homo sapiens
gcctcctgggttcaaacgattctcctgtctcagcctcccgagtagctgggattacaggcgtgagccaccaagcccagctaattttgtatttttagtagagacggggtttctccatgttggtcaggctggtcttgaactcccgacctcaggtgatccacccacctcagcctcccaaagtgctgggattacaggcgtgagccactgcacctggcctgtcatcttgtgttaattcctctgatgtaatgtctgttagctcttgagtttctccaagattcatatcttgaaacccttcaccaccgctatgccagtttttttagccacatccacagtctctttcatgatttccttgattggctctgtcataaatcctacgaagtcatgtacaacatctggacacagtttgctcctgcagaaatctattgttttgggcttgatggctttcataagctttatctataacaactgtggcatcttcagtaatgtaatcctttcatattttcatcatgttctctttgttggggttctctttcataatgttgacttttttttttttttttttggagacagagtctcgctctgttgccaggctggagtgcagtggtgtgatcttggctcactgcaccctccgcctcctggttcaagcgattctcctgcctcagcctcccgagtagctgggactacaggtgcgcaccaccatgcccagctaatttttgtatttttaggaaagacgggttttcaccatgttggccaggatggtctcaatctcttgacctcgtgatccgcccgccttggcctcccaaagtgctgggattacaggcatgagccaccgtgcccagccgacggttctttacatgaagtaccatgtgtaataagccttacaggtccttctctgactgtgtggtctagagtatttgaatgtcttcagtgttgaactcatggggctctgggtagccaggggcattgtccaatatcagaagcactttaaaaggcagtccctttctggaaaagtacttcctgacttcaaggacaa

SEQ ID NO: 4505 - DNA, 1034 bp, Homo sapiens
gggagaggtgggtggaaggagtataatatgacccttagagcttcaccagtccagggattttaaaatcagtgtcttttctttaccacacagactgacattgagattacacgagaggaggacttcacccgaattctccagatggaggaagagtacatccagcagctctgtgaggacattatccaactgaagcccgatgtggtcatcactgaaaagggcatctcaggtgggactttgttactttttccagcctacctttgaggtagacgagggtgggtgatttgttttctcccctcatgtttggcaggggcgtaatagtgtcatggttaagagtactttgattataaaaccagttcagaacccagcttgacatctctactcttggatttgtagatttagctcagcactaccttatgcgggccaatatcacagccatccgcagagtccggaagacagacaataatcgcattgctaggtgagtaggccaggtaaaaacaagacttttcttcccgtgtgtttcctttttgtagttgcgtaacagtcatcattacctgaaaaggtttaataaaggatatagtaacaggtagaaataaccttggcttagctgcctgccctcttcagaagtcctctagtccaacagttatttactgcgtgagtctcatctgtactgcccctaaccattagtgagcagcttgtgcttagacatttgtaattgctaccttggtgggtgtccgttacatttctaaataactgcctatctaagaggttttctttaatgtcattatgatgatttttgaatgaacatttccagagtatcctaagtggcctggattatagcagaaccatcagtttcctcagctacatccttagctgcgatttatgcgattctagattgcattcactacttctgcactgatgtctgtgctcatagaccattctttttaatagacaaggtcttgctgtgttacctaggcctgtctcaaactcctgggctcaagcagtcatcctgttgtcagcctttccagtacctgaaacta

SEQ ID NO: 4506 - DNA, 1229 bp, Homo sapiens
tactttagaaacctgaaacactgggccgggcgtggtggctcatgcctgtaatcccagcactttgggaggccgaggcgggcggatcacgaggtcaggagatcgagaccatcctggctaacatggtgaaaccccatctctagtaaaatacaaaaaaaaaaattagccgggtgtggtggcgggcgcctgtagtcccagctacttgggagtctgaggcaggagaatggcgtgaacccgggaggcggagcttgcagtgagccgagattgcaccactgcactccagcctgagcgacagagcgagactccatctcaaaaaaaaaaaaaaacctgaaacactagctgtttgggaaagatgaacatctgggaaggaaattaagaaattgtctcttgattgtggattaaagtgcagttgtcttttgttcagatacctggaggcatcattgaagactcctgtgtcttgcgtggagtcatgattaacaaggatgtgacccatccacgtatgcggcgctatatcaagaaccctcgcattgtgctgctggattcttctctggaatacaagaaaggagaaagccaggtaaggttcttggccttgttccttaaagtagatgcaagaatctgactgcaaatatgaacaacagaaataaaacgtatgtttattgcatgccttctgggtgcatagtgtacactgactcttagaacaatcctttagaatagttggtattgatttcattttacagatgagggatctgaagctcaaacaagttaggttaattgcttgaggaatacagctagtattggccaaaatcaagatttgaacctggttgtgtttggcttgttttatacgatcatgctgcctttcctaatgcaccaggggaacataaggtaggagttaattcagctttgaagtactaaaggagaatttcagcttaatgcagtggctcacacctataattctagcactttgggaggctaaggcaggtggatggctcgagcccaggagttcaagaccagcctaggcaacatgtcgaatactgtctttatttaaaaaaaattaattgggcgtggtggcatgtgcctgtagtccccactacttgggaggctgaggtgagaggattgcttgaacccagaaggtcaagggtgcaaggagctgtgatcacgccactgaactccagcctgagcaacagtgagaccctgtctcaaaaaaaaaaaaaaaaaaattctagagggcagga

SEQ ID NO: 4507 - DNA, 1050 bp, Homo sapiens
taccgaaatcatcaagaaaaatgtgaaaaacataaccttaaatatactgcataaaggacacttttttttacagtgtgagagctaaaggccttgtttaacctcacctaggaatgtcattgggtgactcaaattttttgccattctgtgaatttccatgaatgactatgaaagtgtcatgaatgttgattttggggttacaaataataagaaatgaaatctttaggataatgaccctgggctatgtaagtttaaagactaatctttctacttcctataggatcataaagaattatttttcaaatcttggcctattgcctttattgtgtaaatgtcaagatgatagtaaaatttttatactagaaacactggttttaaaaaatctgattgcaaccaagtgtggtggctgacacctgtaatcccagcactttgggaggccaaggtgggcagatcacgaggtcaggagttcgagaccagcctgggcaacatggagagaccgcgtcactgtaaaaaataaaaatcggctggatgtggtggcacacacctgtagtcccagctactggggaggctgaggtcggtgaggcaggaggttgaggctgcagtgagccgtgtttgtgccactgcactccaacctgggcaacaaagcaagaccatgtctctttttttttttgagatggagtctcactcttgttgcccaggctggagtgcaatggcacaatctcggctcgccgcaacctccccctctcgggttcgagcgattctcctgccttagccttccaagtagctgggattacaggcatgggccaccatgcctggctaatttgtatttttagtagagacggcgtttcttcatgttggtcaggctggtgtcgaactcccgacctcaggtgatctgcccgcctctgcctcccaaagtgctgggataataggtgtaagccaccacgcctggcctgagagggactattttaaaataagggatgctaattttatttatttatttatttatttatttatgtttttgagacagagtcttgctctgtcgcccaggctgca

SEQ ID NO: 4508 - DNA, 3992 bp, Homo sapiens
ttcgccctcttctgtccatacttttcagtgttgccccagctccgtcccccactgaccgggccactgagccttccaatcatcgtcttcattttggaagcccagtgtcccgctttcctctcttctcttaacctgttcgcttctctgcacaaactcaaactggccttattctcgccgagcctctttccttgacgtgtgctcgtcttgggaagctctttcccactccgcgttctgtccctcagcccccacgcttcccccgcccctgcgccctttctagcctgattgtcgctatgtagctgcacgaataacgtttttttttgtttttttttcagttaggtctagctttatattcttggcccatcccttagtagcggtaatttaaatgtttcaatctgtattacggagttaacagtatttcctagtagaattgtgagaattaaatgaggtaagtcggtagactgcttaaagagggtctggtaaataggtaatatccttggtcactttacgttacatttattttcagtaacagtctcttgaacagcaatcccttttcccgaagtaaccgtacttgcctcactgatcttagatgtaatcgttccctccgtgtccccggcgttgtactctttcccactaaccagttgggttttcccagatttctcgactggtcaccttttccttttggaagatcccttattttttttctttttatattttgagacaaagtctcgctctgtcacccaggctgggttgcagtggcgcgatctctgttcactgcaacctctgcctcccaggttcaagcgatcctcctgccttagcctcccgagtagctgggagtacaggcgcgcgccaccacgcacggctaatttttgtatttttggtagagacggagtttcaccatgttgaccaggctggtctccaactgctgatgagctcaggtgatccgcccacctcggcctcccaaagtgctgagattacaggcgtgagccaccgcgcccggtcccttatttttttctgatgagcaccacctccattgtcttcctttggtatgtttccattctgtgtgtaacttctgtacctcatctgcagagcctggctagccatctcccctcccttaccgtcttctgtatactgactgcctttcagagttattattcattatctctgtacctgggaaataacttttaaggaaaaaaataaaataaaaacgctattttgaaaaaaaaaagccgccttctttctgatggattgtaggtccatgcaggtttttggttacagctccctgagatagatgtaaatcctaagcattgtgggtgttttggtttgatgggactggattgaaagatttacagacttaaattgtaaaggaaggtaatttagagagaggaaggaaataaacattatgttggtttggttataaccactggcttgtctccactgacatggcctgggggtgagtggtgtatttgcaaagctcctttcaggtctgcattaatctctggcattagttggctgtgaccgattagcctcccagttaaagtatgtagtcagttcttagtgatggtaaatgggttactgaggccttcttattacatccaattatgaggtgactatataatttatcttgcaaactgttgagtgtgttctaaacagtatgctgtgggggcgctatcactaattatgctggacctgttagagtatgatccccctatccaagcagaaaaatgtgaatccccaaactctttccctgcttacgcaaagcaatgaatggtcatttcttagggtcaccagccctttgagaatctgataatagttgtggatcctctttccggaaaaaaaaaaaattgcagtatctctcattttctcacataatctcagggagttcgctatcccactaaggcccattcatagatctcaggttatgaatccctgctgtaaatataggaatatttggttagaagaaaagtattaaccaagattccaaagttatttcttaatataccaaggattgaaatacagaaggaagttaacagccataaggacatatgtttacagttttttgagatatggttgacatataataaactgcacttatttaaagtgtagagtttgataagctttgctctgtggatataccatgaaacctgcattcttatttttcaaagacggggaaataaatagcttgtgtacgatggggcagtcctgggctgttgacttgtgtttttgtctattttaggccagaacacaaagcgtgaatccggaagaaaagttcaatctggaaacatcaatgctgccaaggtcacaaatcttttaagtgtttatggtagtttgcctccagctatctttcctggtatttggtcatagccatgtgtcctgtgcatctagactttatagagtaggcaaataggcagaggaaaagttgacctctttcagaacattttcctgatgatgttaggggaaaggaagccctccccttctgagttaggactgataatcttctcgtattaacttgtgcattattctgttgctgtgtattgttttatagtattctatttgtgtttgtctcccatactaaactgagttacttgaacataagtactttattcccttttgtattcctagtgcccaccgtagatcttggatagatattcggtaaatgtcttttgaatgaaatagtgaaatagccttatatctgatttaggatggtgtagaggccaccgtcatggaaagaaatactaagacatggacttctagtaattaggactgctgggaaacaagctctgggagccatttcccccttattcttgtgaaaagtcatttctgtatccattctgaaagcattcccaaggggagaaaaacaacagagctagccacatcctatatctaaagtggcatgctatgtctaaagtgatggctaaccatgctttaggggtgtcattaaaaacactgactctggctgggcggaatggctcacgcctctaatcccaacactttgggaggctgaggcaggtggatcacttgggcccaggggtttgagaccagcccgagcaacatggtgagaccccatatctaaaaataaaataaaattaaaataaaataaaacactgactctgtgggttgttcatgccccttttccctattactccaacatttctcacactgtcctctgatttgtgcttgcgtattttatgttccctttccattagactattgcagatatcatccgaacatgtttgggacccaagtccatgatgaaggtaggcttatctcttcctaaaactcttaggctacaatttttttcttcctgttatctaggacactttaaatataacttttgctttcatcttagatgcttttggacccaatgggaggcattgtgatgaccaatgatggcaatgccattcttcgagaggtgtgttttgtttttggttttgtttttttgctttctgacagttctgtaaacataaaggacctgttaagatacaggctctgattagttttttagggctgctataacagattaccagaaactggttggcttcaacaacagaaatttattatcttatagaatgaagctagaagtctgaaataaaggcgtcagtagggccatgctccttctgaagtctctagggaagaactccgcttctcccttctgatggttgctggctttctttggcatgaacttggtctctgccttggtcttcatgttattccccttgtgtgtctcttacacaaggacaccggtgattggtcttcgagcccaccctaattcagaatgaccttatctaacttggttacatctgcaaaaaccctattttaaaataaagtaaaattcacaggttctgggagttatgacttcaacatatcttttttttttttttttttgagacggagtctcgctcttgtcacccaggctggagtacagtgatgtgatctcggctcactgcagcctccgcctcatgggttcaagcaattcttctgcctcagcctcctgatta

SEQ ID NO: 4509 - DNA, 1081 bp, Homo sapiens
gcactccagtctgggcaacagagcgagactctgtctcaaaaaagaaaagaaaagaaatagttgatcctagggcccgtttctgcccttgctctgcttttttaataagcatttcaaaactcctgaccaacgttaggagactagagccaagcacagatccccctctagagagatttaaaggtaatagagtcctggggtcctgtcttagctctgccgctggctttctccatgacttggagcctgttcctcaaacttgaggctgcagttgcctcatttgtaaagtaataatagataaatcttttgattattttctatgaaccagatactgttctacatgctttttgtgtattaacttgctcagtcctcacaacagctgtgtgatgtaggtaggattattacctccagtttataggcagagtaagtaacttacccaaggtcacatggcctaagtggaggtagcctggaagtttgacctcatagctcatgcctttaaccttattgctatattgcagagataatactgtcttccctgcataaaaacaaagggctggagcaaatgactccctgagtaatagcatactggtggggtattgggatgattgaggggtgcgttccctatcacagcactcccactaccacagtacagcctcagggaggacattttctttctttctttctttcttttttttttttttgaaacagagtctcgctctgttgcccaggctggagtgcagtggtgcgatctccactcattgcagcctccacctcccaggttcaagcaattctcctgcctcaacctccctagtagctgggattacaggtgcgcgccaccgcctggctaattttttgtatttttaatagagatggggtttcaccatgttggccaggctaatcttgaactagggaggacattttctaaactgtcccaaacaggatacagcatgaaacaatagtgctgtgtaaatcatgaaacattcagtgattctatttattctgtgacagtgcaaccatcagtttcttctttaaggtagacattttatgacgtaatgaacaccccctcatggggagatctgctggaaccttg

SEQ ID NO: 4510 - DNA, 1074 bp, Homo sapiens
aaaggcacatgtcagtgttcacagatgtccacccgcttgtggccacggggtcacacccgccccaggacttagtctggctgtcccagctcccacggccctgcctgggaatgaatttccttcctgtggtttcccagtgtgttgggcaggagatgggggtggggtaggactattgtgggagtggctgaggacctctttatacggggtgattgggggacactggagcttatatggagctccttccccacttgccccagcataggcatttggacctttgggtctcagtgattatattctctttgttgtaactcccctgcccccgccaacacaccctgtatgtttgcatatgtgtgtatatgtatgtgtgtgcatgtacatttgtaaagggagaggtctctggtctctctggggggaagggggggaggggggaagggaggaagggaggagcttttactcacccctgtagggacccaaaaggttgagttttttacctgagatcacacagcaaatctgtgtcagagctttcgtctttccactcttttaggcacaacttcatagtagggagggattctgggaagggagacatacagtccgtgttcatggaagccccagtccaagggaagaagcaggacccagagagcctcatgatccttgtgttgggggatgggcatggggaattggctagagcttctgtctgctgtactcaatgcctgaaagattggtggaggacttggaggggtggcaggtgctgtccgtgtccaccccactctgtgcttggtgcccctgggctggagggcctgggcatcctggctctgcccccttggctcctggttcttctcataggctgggagatatgatagtctttctggctgctgttatataatctctctgtagcagggttttttttttttttttttttttttttaatctttcctgggagatgtgatagggaagagaagccagagggagactcttcaggttggggggagctaaaggagcagtagtaaggaagcttggagtgggaggtgccttggcccccgaggaggccttggggataggccctcattgattatggcc

SEQ ID NO: 4511 - DNA, 1029 bp, Homo sapiens
gctgggaggagcttgcctgcctggccacagacagtgtatcttctaattggctaaagtgggccttgcccagagtccagctgtgtggcttttatcatgcatgacaaacccctggctttcctgccagatggtaggacatggaccttgacctgggaaagccattactcttgtgtctgctactgccctcccacagtcaccccaatattacaagcactgccccagcggcttgatttcccctctgccttccttctctctgcactcccacaaagccagggccaggctccccatccctacctcccactgcatcagcagtgggtgttcctgcccttcctgagtctaggcagctctgctgctgtgatctgcacaccctccaacctgggcagggactggggggatgcagtgtgtgttagtgcccatgtggcattgtggcactgttgccccccatggcggcatgggcaagatgaccttccattagcttcaagtcttgttctcttgtctgtggtctgtttaatatgtgggtcactagggtatttattctttctcccatccttacactctggatcattgtgcagacttaatcagggttttaacgctttcatttttttttttttttttttttttttgagctcaaagagagttctcattttccctattcaaactaatacccatgccgtgttttttaccttggatttaaagtcaccttaggttggggcaacagattctcactcatgtttaagatcttgttatttcagcttcataagatcaaagaggagtctttcccttttctcttttaccctcaggattctcatcccttacagctgactcttccaggcaatttccatagatctgcagtcctgcctctgccacagtctctctgttgtccccacatctacccaacttcctgtactgttgcccttctgatgttaataaaagcagctgttactcccacatctgttgttaacccttatttcattttctgtagagccggcctttaagttctggaacacagctccctgagagaactggggaatc

SEQ ID NO: 4512 - DNA, 1122 bp, Homo sapiens
actaagaccaccttctatgaggagcagggtgactactacagccagtacatccgggcctgcctggaccacctggcccccgactccaagtaggtgctgctttcccgtacttggaaggttacgagtgacttctcacccctgcccatgtcacctttgccctgctatctcccagctttgaaaggggaatctcacccagcacagcacagtcccttcctaagtctggtctttgagcctcatttacaaagtcttgggctcaagtgcagcccccctcctctgtcttccatcagtgagaagtcttcctcggggtctcatttcctttccagccacagaaaacaagtttctttggtggtaaagtgtttattggatgaattctctggggccttcttttaatcaggagttctgggaaggggaagaagcagccttctcttcattacactgctgctcagctcctggaaaagggtgtcttggtggaaattgaagatcttcccgcctctcagtatgtgtctttggagggcaggatgtcagccccttcctgtcctctaacctgggggtggagctctgggctgggcaccgggtggaagagaagaagcatggtcccgatcttgaaggagctgctagaatgatggtggagacagagcatgcccagacagaaagtgaagggctgtggacatggtctagcacagttctagatgccctgaggcagagggtactgggaaagctttccagaggtgagaacagctgcgtagggcggggcagataaagagatggtgtggggagcagaagtaaaatggagaagacagcgagctgggccctctgggagtgacagagggaaaactggttctggatgacaccgctgcccaggatgaggagcagtgggtgcaagaatgtggctgtagccctggaaagaggcagtgggttcctgttttgaatcctgttcctgacagcttcagaaacgtcatctttgacatcacgccgggagatgaggcaggaaagtttgaagtaaatgccaagttcctgggtgtggacatggagcgatttcagcttcactatcaggtgaggggacagtcccatgagcctgcaggacatctgctgggctttaggtgctggcctgaagagagcagctgg

SEQ ID NO: 4513 - DNA, 1035 bp, Homo sapiens
tctttattttttattattattatttttaagacagggtctcactccattgcccaggctggaatgcccagggcaagatgaggatgttgaaagggggaacccacagagtttataaccctgctccccaaacctggagaaccggattaagagtttacaattaggagtaagaaaagattgttctaggcttaagaaagtaaagtacacaatgagctgtaaacttctgtctctggtaccctaggagtggaaattgcttttaaatgaatttaattacatttgtaggtggcacatccataataggaataataatgataatacagtctagcacatttgaatagtactctaccattatacgttactctcgcagacataatttcacttgatcctcaaaaagccctgtgagaagagaaggcaagaatgatcattcccattttctagaccaggggacagacttacaaaggagaaggaaatagtctaagataatatctctggttggtggtggagtccaaactggagcttctcctcccggctcactgatctccttggggccctacctctagcccagactaggccactcacagatgctctgtgacagctgacaaggttgactacctcggagccacctaggctgtcctaggacagggttttggctgtgagtgtcagatacccaagctttaggttaatggtgcctctgggggatgggggatggctatggtgagctggggtgctctgcaggggacccagagagtctcaaagaagaggttctcgagccaggttggaggctgtgtgagagatttagtagatgatagggccctggtcctgactactgacataaggcaggaggaagggacaaggcccagagacgtttggaggaaggcagcagggagctggctatggctagtggagggacagtgcttgagctctactctggagtggctgagcctgggggagaagagacagccaggcactcaagctcttatctctggcagagagagatgggcagaggcacagccacgcgcacctgtttctttgtccccaggt

SEQ ID NO: 4514 - DNA, 1118 bp, Homo sapiens
tcccagctctaccacctcttagctgtgtgaccctggcaagttacttaccctctctccctcagtttcctcactggtccctcagtcttttcatctgaaaatggggataacgatagcacctaccttatagagttgttatgaggattaagttaggtaatatctcaagtgtttataaattgtgcctgggaggtaggtaagaacatgttagaagttaccatgctatttatatcattatcgtcactatccagagagtgagagctgcttcttagcttccccaagggaagagtgaaataagatttagctgggcgcagtggctcatgcctgtgattccagccactcagaaggctgaggtgggaggattgcatgacagggtctcactctgtcacccaggctagagggcagtgtactggctgaaatgagctataatgacaccactgcactccagcatgggcaacagagcgagaccctgtctctaaaaatgtgtgtgtgtctgtgtgtgtgtgtgtgtgtgtgtgtgtgtgtgtgtgtctgtgtgtctgtgtctgtgtgtctgtgtgtttagtaagacatcaaggctaggacactaggagggctcgaagaagtggtggtggttaaacagaaaaggggtggaatatcctttaggaagagaatagccttctacctttcctctcctaccagcccttcccatttttattcttccaacccgtggatggtccagtgtggcctctgagactgacccataagtaattgagacatgaggctggtagggaagatagccagagacactgtgcaagcaagccaggaatgatggcaattgagcagataccttcccaggcagatgtgatctggagggcctcgtggaggtgctggcaatgtaagatgctttcacaaacttctttgaatgccaagagcatgccacttggcactaagcaagggtgggagatgggtgcaaggcccacgggtgagtaatcacttctctcccctcacagaaattggagtacacttgatgtcagacattgtgataggagggacatgaagacaacaccagaggacaccaagggagacagatgtgcagatcaggactggcaaatggcccttgattatgactgagggtgttgggg

SEQ ID NO: 4515 - DNA, 1029 bp, Homo sapiens
attggcctgagaaggtgtgcaatgaggcataggggagtggggcgtgggggcaggtagttggagcctccagcgtaggctatccctggacatggctgaggcataagagcagggaattgagctgttgagaaggtggtggatgctgagggtttgaggagctatgcagagcctctgtggttctggaggtgctgtggccaagccgagtagacctgaaagcccaataggataagagagccttctgagcctggccgcgtcccagggaaccacatgccacacatgcccacacacagggcagagagctgagtggagatcactgtccctgtggctcccaatgcctgcctgcagtttggttcccttgggcatcttggcctgggaacctagagagactagcttggggtcacatcttttttttctccctcaatctgccaggtgacaggggatcctggagctgtgctgtggcttgaggagatccgccagggagtggtcagagccaaccaggacactaatacagctcagagaagtaaatggactggttgggggaccctgggaggggagggatggtgatgtgggctcagcagcagcccagataatcaggcagcctccctggtcaccaccctctcccttcaacctctgtggggaggcaggccagagtcagagcaggagggctgctgttcagactgcaggatggatttcctggcagtcagcagggcaggacattctcaggaggtgagaatccatagttcacctgctgcctccctctatgccttcctgtgaacactttccctgtaatgtgggcatgtgagatcatgcggtagtcagaaatcccatttctgctggtagcttgagtttgggttccaacagtcaatcagctctggctagaaaatgtttagacttggaatgagagaagaggaattggcaggagtttgaggaaaacaggcagactcagtgcaaatagacaggggtgtgctgatgtttggtgctggtggtgttagttctcagtggctggggtctccctgtccatctgtctgtctg

SEQ ID NO: 4516 - DNA, 1044 bp, Homo sapiens
cctggctaattttttaattttttgtagagataggatctctgtacgttgcccaggctggtcttgaactcctgggctcaaactgtcctcccatcttggcctcccaaagtgttggaattacaggcatgagccaccgtgcccagcgatctgatctacttaatgggatctttctggctgctgtgctgagaactgactgcaggagtacaaggggaaagcagggagacctgttagacagctattggagtaatccaggcaagagatgatgggggcttggccttgggcggtagcggagatgggaaaaaggagtcagattttggatacattttgaaagcaaactgacaggatttggtcatataatagatatggggtagaagagagaacagaattaggtatgactccaagatttggggcaagatgggagagacggtgggacatgcaggttaagcaggggaaccagttcagatgtgagctgttgggtttgaggtgcttgttagacattcacttggaaatcacaaggagctggctgggataaatgaatgggctggaggtgtgctttcgggagcatatggtgttaaagtcatgagattgggtgagatcatctacaatgtaagtatggagagagaagaggtctgaagactgaagattgggatgctcccatgtttagatgtcagggaggaaccagcagaggtgtctcagaaagaatagcctgtgaggcaagaagagaactaaaagagtgtggtgtcctggaggtcaagtgaagaaaatcgttcaactgtttcccctgacttctggctgatgattcacatgctactcacctctctgcccttcaccccactgccagttacttcgatgccctgctgaaattgcgacaggagcgtgggatgggtgaggacttcctgagctggaatgacctgcaggccaccgtgagccaggtcaatgcacagacccaggaagagactgaccgtaagtatagtctggagctgggtggagatggcccaacttaggcagtcctgtcccttagccattaagtctaggggccccctgccc

SEQ ID NO: 4517 - DNA, 1083 bp, Homo sapiens
ctttcaatggagtttttgcaggatgacagagaaagccaggacatctatgaccactacctaactcaggctgaaatccagggcaatatcaaccatgtcaacggtaagagacctcgagcaggagtggtttgggggtgacctcagggtaagcccctgcactgggaggtttggggatagcttttctcaagccagaaagccctatggtctcatttgggccaactcttgcctcggagaaagatcagagtccaaggagtatgtgcactgctttctggccatcggtgtctagagaagtagtccatgtccgggaagcttctgtctgactggagaaccatagagaggagcagctcttgatgccgggggggcagttggactggggtccttcgagaggggcaatgtggagaatacatgaggatggggggatctgggtaggagccgtgtgaaggctcaggatgggtgggcatttgcctatttgggtgaggatatccttggggtctggggcggcgaagtgagaaggctgtgaagaccaagctgaagaatttgggctgaaccaaatgggcccaggaaccaagggggaaagggtgggggtaattccgggcaggcaagaagagggtagattcctagggctggactaggggattatgagaggtggctttctcacactgtccattatggagtcattttttttcagtccatggggctctagaagttgttgatgatgccctggaaagacagagccctgaagccttgctcaaggcccttcaagaccctgccctggccctgcgaggggtgaggagagactttgctgactggtacctggagcagctgaactcagacagagagcagaaggcacaggttagcctctgtctattacctgccaccccctgtatgtgactataggataggagagggcctcttactcaaagatcaccactgttggtcctttgtattctgtaagtgctgactacgtgtttaaatggttaaatcaccccaaggcctagtagaccagattgatcagcttctgtccctgagagtcccccaggctgaccaagaggaacccaaggacagtcccataggcagtaatgtgct

SEQ ID NO: 4518 - DNA, 1065 bp, Homo sapiens
ctgttttagagagagagactggagctggaaggatgggtggggcagaaaggttctatctgattttctgaatgaaaggaaaacctgctccttccaccactcccttcctttctattaggattcaaagagcaaagtccatgtccagtcttctgttaaaggaaaactagttccagacctgagaaggacaggaaaactgtttttcggttttttatttttttgagacagcatgtgtatgtacaaaatccctcccatcgcccacagtcctcagttcataactctgagatgatgtcattcacttactggtttattttccatgcttaacaaccaacacttgttccttgtacacccccttggaggaactgatggctttcctgtggttggccagtgttttcaaatctgtatttggaggggtgtgtgtgtgtgtgcacgcatgtgttttaatttacttaactgctcattcatataagctctgcccttccctgaatcattgcagaatatgcaatataaggaaataggataacaaccgggaatgacattaagtgctgagtcaaagacagattggctaagctctgccttttttcaagctctctgagtttattttcttactgtgtgtgtagctttctcttactctttctgtttgattttgtattgtgtttctaaggagaatagagagaggggagagaagggagaaggattaagggagactgtaactaaggcaaattatgattgctgtctcacttgagggattctctattcttgagttttggaatcagtactctgtattttatttagcttgaagattcttttcctcctcgggtgacctataccaaaaaggatagtgaagatacctttgtgatcttttaaaattttctttgtccttccacttaatcccaagtgagtggcatgtttccctctgttggactgcctttccctgtgttccgcctatttattccttaagatctagttcatagctagaatcctttgcttcctctgctgctcccatagattttatgcatgggctataatcatacttatcatgttagattaatttattcagatgtttttctc

SEQ ID NO: 4519 - DNA, 1044 bp, Homo sapiens
ggttggaggataaactggaagtggggaaggagagaagtgggtgtggactgctctttcttggttctggagggagcaggtgacggtcgctataggagcagaggcctgaagatactgagggatagagccagtggatcataatgtggctgggcaaggggcaggtgaatgaatgctacagtagatcgtgaaagtgcagacaggagggatcccaagcttagccttggccagcagtaaggacaccttatcttctgggaaagaaaggaaagaggaaagggtaagggcagataaatatgtttctgagtggtggtggaataaagtgattatcacctagagaccttgacctcattcagttggaggcagagtggtctgctgagtgaggggaaagccaatgggtcatgaacttgaaaagaataaagacagcttggagagggcttcaagaagaacaggagagtgagctgaccaagaacttaaggaagggctgccgaacaatgttgagttcctgatttgtcagaaactgaatttgcaggggcactgcaagctggttgtgattttttttttcttttaaaaaaaggatcacttagcagcccaaatgtagaaagggagagtttacatggttgggctgtgtaggctacaatggaaggacgggatgtgggtccagaggccagtgtcaaacaggatggagacaaagtagttggcatccatgttgagtaagcattgaaggtgcattggtggctgcaggattagaagcagagaaagattgggagctgagctagacatgcagtgacctgagctgcgcagatgcagcaaaggaggagaagacacaatgagcacatggcatgagccttaaagaatttgggggaggccgggcgtggtggctcacacctgtaatcccagcactttgggaggctgaggcgggcggatcatgaggtcaggagttcgagaccagcctgaccaacatggtgaaacccccgtctctactaaaaatacaaaaattagccaggtgtggtggcgtgcgcctgtaatcccagccactcgggaggctgaggc

SEQ ID NO: 4520 - DNA, 1048 bp, Homo sapiens
aactccgcctcccaggttcacgccactgtcctgcctcagcctcccgagtagctgggactacaggtgcccaccaccacgcccggctaattttttgtatttttagtagagacggggttccaccgtattagccaggatggtcttgatcttctgacctcgtgatccgcctgcctcggcctcccaaagcgctgggattacaggcatgagccaccacgcccagcctagaaaccccatctctactgaaaatacaaaattagtcgggcatgatggcacacgcctgtaatctcagctacccaggaggctgaggcaggataatcgcttgaatccgggaggcggaggatgcagtgagttgagatcacatcattgcactccagcctgggcaacaagagcacaactccgtttcaaaaaaaaaaaaaaaaaaaaaaaaaaaaaggttgacttgatatttctgaatgaggttgagtagacagtagtggtgccactcaccaacatagagaatatgctggagagaactgcaggttttgaagatgtgttggatattctattgggttgactttgagctgtctgaagatatccagttagcagccggataactagactggagcttagcatagcaaagagatctggggctagaaactaaggctcaaagacaacagggtagcagggggatggaagacttggattgggaggaggccttccaggaaaggtatataaagaagaccagcaggttggcctggtgcagtagcttacacctgtaatcccagcactttgggaggatgaggcgggcagatcacttgaagtcaagagttgaagaccagcctggctaacatggtgaagctctgtctccactaaaaacacaaataagctgggcatggtggtgcacacctgtaatcccagctattcaggaggctgaggcagaaggatcatttgaacccggggggcagaggttgcagtgagctgagatggcaccactgaactccagcctgggtgacagaatgagactccatccatctcaaaaaagaagaagaagaaggagaaggagaagagaaga

SEQ ID NO: 4521 - DNA, 1076 bp, Homo sapiens
ttataaagtgttttaataatttggttgtcttttttaccttgctaaaccaagcctctaaaaactcaaattattcccttgataaatttttataatggaaaagcaattatgtacagtttcttctttatgttaaatagctctatcacaaagtattgtggagctgtagttttcttaggggatttccaggttcactggatgacactaactggggcccttcctggaagtcatagaactgaccaagcctttgtgcgtaacccacgtgacacatatggttccttgtcctcatccctaccacacatcagagctgagcatggcagctcacgcctgtaatcccagctacccgggaggctaaggcatgatgattccttgagcccaggaatttaaatccagcccaggcaaaatagaccccatctcaattttaaaaaaaaggaatgagcacacctaaaatgacaccccaagccatgcaactccccctgacacacacagggtatgtgaccaggagagtgagatagagagagtgggcatgaaggaggggcagagcaggggagaaagggtgcttggtgatgacagcctggtcctgctgccagcttttggtggtacacaccccatcttgggaaagagtcaccagtctgaccttgtgtccaggatcattatctgcactttcttgagagaatgcagactccatgtctacacaaggacttttgcattcttgagtggctggtctggttccaggggccagagtcacggtcacagctgcctatagaagtgaatttcgtgcagccagaccagacccagacatggtcttgttgaggcctgcactgtggggtctgttgcacaggcagccattgtgctctgagcaaattggttcctgtggggcccaacatatttaatgtccatgacttcacaaaggggtgccaggtatccttgcacagcaagaactaagaatagtgcaaggaggccgcaacagaaactggtaagaatacacacatgcaagcgattcttaactacattgtaatcagtaaatgaagataacgacaatattctcattagggtacttactggctgaaacaaaactaact

SEQ ID NO: 4522 - DNA, 1100 bp, Homo sapiens
tgtcaggagaaagggcttgatttggaaaaaccttgcgagttggagcctaagcttgagagaggaaaggtggagagctcgtcccaagcaaaaagtagcctggggcaagtgcggaaagtggtggtggtaagagagggcagaaagttgacaggaggagctggggtatatattgtccaactggaacaggtaaccagtgaacggcataaacggcacagggccggcacttcgggttgtcatctcactcctagccctgtgctggccatggagcgcaaggcatgaacggaaaggagagtgagctgggaggggtgaaagaggaagtgaagggagagcaagagacctgctggtctcaggaggccgccagagggcgcccttggtccacgtctttgcagtttcaggtccacactctgccctctctggacacgctgttcccataatgccttatatgcggtcagttggaggaggttcgttagaggtgaggtgactgactattttagaaaagacggaaagaagagttaaacatcttgtgcacaaaggggcgcagccaagcaaaggcataggagaggcagaagatgggacgggtctgagacagcaaatctgcccagctttgatgagggctatatgtcgaggttaataagaagtgaaggtggtggtggacagtaagtaggtgaagtcaggagtaacgaaatatctagttcacgggactacgtctggttttcatcataaagcacttccccagtgccaagctggggttatgagactaaggtatgtccagatgagcctagccccttcagagggggtccctttgggaggctatgcaggactgtcacttttgttgaaaacctgtttggaacctcatttgggaatggccttcagagcctgtggtgtgttcttcggttgtcctcattggtagcatgtcctcctacttcaagagcctgaaatggctaggtgtggtgacatgtgtctgtaatcccagctactcaggagtttgaggtgagagcattgcttgagcccaggagtttgaggccagccaacctgggaaaaatagcaagacctcatctcttttaaaaaataagttacctgaaggccaggtgtggtggctcaca

SEQ ID NO: 4523 - DNA, 1070 bp, Homo sapiens
tttacaaatgagactcaaacctagagcgcggtaatgaccttactaagaccaaatggctggtgaattgggcttcactagaatccaggcttgctggctaacaccaatgctccctccatcatttcatgttatgttttcatttcccctctgtctgagagattgctctgatgtctttccttccataagtcctacggagatcgagcttacctcatttttctcccaggcctaggagctcaattaccaggatcactttcttccccagggtgtactacagacctccacatgttggacagtaggattcagcagagaatgagtcccacatcctcttttcatccataagccactcttcccaactactcttccgccttccattgtccctatgtctactttactgctcaatctggattttggggaacctcctcccaaaaaggcattagaaggaaatgccaagcaccgaaattttgtcaagaagcggaggctcttagaacggagaggctttctgagtaaaaagaaccaaccccctagcaaggcgcctaagttgcactctgaaccttcaaagaaaggggaaactcctacggtcgatggcacttggaagaccccttccttcccaaaaaagaagacagctgcttccagcaatgggtcaggacagcccctggacaagaaagctgcagtgtcttggttgacccctgccccttcaaaaaaggctgattctgttgctgctaaagtagatttgctgggggagttccagagtgcccttccaaagatcaatagccacccaacccgctctcagaagaagagctcccagaagaaatcctctaaaaagaaccatcctcagaagaatgccccacagaactccacccaagctcattcagagaataaatgctccggagcatcccagaagttgccacggaagatggtggcaattgactgtgagatggtgggcacaggaccaaaggggcatgttagttccttggctcgatgtagcattgtcaactacaacggagatgtgctttatgacgagtacattcttcccccctgccacattgtggactaccgaaccaggtggagtggta

SEQ ID NO: 4524 - DNA, 1065 bp, Homo sapiens
ggaagatgctgaggccccaggcatcagagatcatgagaggtgagtgagccccctgaccccttggcagctggactaggggggaccggccactctcggagaagaggatgaaaagggcctgcagtggtcagcctctcgggaggcagggtgggctctcctaggagaccggcactggctggggcaaggccaggccaaggccacaccattaacccttctcccctccaaccctccctcacagcctgtagccaccaatgtttcaagaggagcccccaccctgttcctgctgctgtctgggtgctactggggaaactggccatggcctgcaaactgggaacccctttcccaccccaacctgctctcctcttctactcacttttcccactccaagcccagcccatggagattgacctggatggggcaggccacctggctctcacctctaggtccccatactcctatgatctgagtcagagccatgtcttctccctggaatgagttgaggccactgtgttccttccgcttggagctattttccaggcttctgctggggcctgggacaactgctcccacctcctgacacccttctcccactctcctaggcattctggacctctgggttgggatcaggggtaggaatggaaaggatggagcatcaacagcagggtgggcttgtggggcctgggaggggcaatcctcaaatgcggggtgggggcagcacaggagggcggcctccttctgagctcctgtcccctgctacacctattatcccagctgcctagattcagggaaagtgggacagcttgtaggggaggggctcctttccataaatccttgatgattgacaacacccatttttccttttgccgaccccaagagttttgggagttgtagttaatcatcaagagaatttggggcttccaagttgttcgggccaaggacctgagacctgaagggttgactttacccatttgggtgggagtgttgagcatctgtccccctttagatctctgaagccacaaataggatgcttgggaagactcctagctgtcctttttcctctccacacag

SEQ ID NO: 4525 - DNA, 1030 bp, Homo sapiens
taatggcggagctgaggctataaggatgatcaggagtgagtgagtattagagactgcaagaaccatggtcagagcagaaaagacagtgtactgggagaggctgatgaaagcaaagacgtgtaggatgtaccacatgccaagttatggtcatttcatcctcacagccctatagctttagtactatgactgtctcccttttacagatgaggaaactgaggcagagagatgttcagtaagttgcacaaagtcatacaagtgggggcagagttgggattcagatcttgccattgtgcagaaggggtgaacaggtgggttctagagtccttaaaaggtattgaagggttttgaagcaaggggacgaaatccttggaccaacattcccaaaggcccactctggctgcattgtggagaatagattgtggagaatggagaaggtgatggcaaagtcagggggctttgtggccagacatgttgggaggcagaatgggtgctgtctggctggtgacggagagggaaggattcctgggtttctgttgggctttcatgtctgacttcatttgaataaagtgtcactgctaaaaatggcccaaaagccatcttgctgactatcctgggtccctctcagtctgattttatataaatgtgccttggaggtcagcacccctgcctcaggctcaaaacctcaggactctagctaacctcaccccctcatctcaccccagattgacgagatgcctgaggctgccgtgaaatcaacagccaacaaataccaagtcttttttttcgggacccacgagacgtgagtggaggccaaaggggtataggtcgggagggccccgggaggactactctggggaaggtgaggtggtgttggtgcccctttcatgccgggctgtgcagctcaggggcagtgaggggcttgagagcacagtctcccatctctcaccagggcattcctgggccccaaagacctcttcccttacgaggaatccaaggagaagtttggcaagcccaacaagaggaaagggtt

SEQ ID NO: 4526 - DNA, 1060 bp, Homo sapiens
gtgtgtgcttagccttccctgctgccttcctaagtgctgggtctgtttttagtctgaggctgggggagaggtgttcagttctctttccccactctacctgaaaacttcggattactctttggacctcagagggtgtctgtggcttgggaggctggtgtttcatgtgctcaggcctgtctgatggaatcgggcaaatgcaaggcctaagaataagtaacttgcctggatctggaatggttaagaggtagccgagttcccctattgctggctagtggagggggtaccgtggggtccccagcactatttggccccaccctgacccagttagccttgactcacttgttttgagtcacagcctggatacaaaggcaccacctggaagacagatgtctgtattggggtacagggctgccctgagacctcataacctctacatctaggaagaactgccctccacttccaaatgtaagaaaggacattttctttgtagcttgagggatagaggtgtcactgtagaagggatttctcctcttttgggtgaagggttagaaattccatcaagtgagaagagcacacctcccctggcccttccccacaagtgcctatactctaggtgagggagccaggtgggatgatgctttggggggagatgcctatctgctcaggcccctgtcttcctctctcttccctctagacccatcctttatgtagctagaagtcagcagggctggcatatctggtgtgcctcatgctatttttaatcccattcgttcttttgtttctcccccactgctggggctgggcagctggtggcctcctgggtcccctgccacaccattcagctatctgcctctgagtgtgctttccatgggaagctggggtggcacgagacggtggccaggtagccactttgcagtctgtgcttctgcaaagaacctcatttctccttatttctgaactttcacccacacacaccctcttatgaagcctcagtttctcctcttccatcacgcatttactgtgggcatcttaatgccctggctcaggtgtgggcactgaa

SEQ ID NO: 4527 - DNA, 1029 bp, Homo sapiens
tagccccggcagaaactcatggctacggctgatttccaccgaacaaggcgtacctcttcacttaagctcctagtcccgggcaactacacacagctaatggccgccgagtcactccgcctcctccttgcctcaccaatacaggaactacaacttccagagaacactttggacacagcccggttctttgccgcagggatctcagcgcaaggcacggcgggagttggagtccgaggaaggatttaggggcgagcaaagggagacaggagagaaacccgcctctgacgcagggacacctggggtgagtagtttttttcgtcgcctaacaattccgaggtgactacaagccccaccggtcaccacggcagtcactgagacggacaggagagcatttcggtacttgaagttccctagggtagccccttggccactaagatttctgggagatatgatgctcttagaaactgcaagtgatgtcgggaacgaaagggagtctgggaagctggcggattgaggaaaattgcttaaaggcaaagtgatctgtaaatgaactggtgaagcttcccagtcggctgggactgggaattagaataaaacatcccaaaaagagcaagggcccaagggacccgtacgaaattgggctgcaagccagaaagaagcgaggctgcaggtctaataataagcatctaagagttgaaataaatgtgacgtaaaagggaggaggtgatctccctcaccaggatcggggtgcacatccaggaacacaccttaccctggagcctggggcctggcctccctctgcagcaaccagtgagacaaagatgggcaaggctctgacaatccgggccaggtacttgaggttaatcccttctcagctcagtggggtaaagggcgaccgttctgaggaatcacttgagtccgtcctacctggctgtgcctcccacctatccatttgcagatgtcctttacattcctttacgtctgtgagtgctgcttcttatggctttgtatgtgactttcttacatctgtct

SEQ ID NO: 4528 - DNA, 1052 bp, Homo sapiens
aggcaagctcagagcactgtgggagcacggaaaaggccaggccaggaagggcctcctgtgaacgcacatgatattgtcagatgaagacgggaaaggtgttctaggcaaagaaagcaggtgcaaaggctctggaagcgtgaaacagtatgtcgcattcagattttactaagtgtttcccaacacctagagcaatgaggagaatggattggagggaagtaacaatgacggcatgatgaaaagaaattgcagtagtcctagtacaatcagcagcctgatcaagacagaggcagagatgaaaaatggaaactgaaaggcaaccccaatctcttcctccctctgaacgtcctcttttgtaagattttgtcttgagtgccagagaagactcctgaaaggagaggggcccttccctgcctagggtgtgcagggagtcttccaatggaagagaaaaataaagagaggcggatgctcaggcagctgacagaacggagggatgagggaccataagagcactgaaggcagcccaggaagatttccaatgcaagcagcaagttggtccaggttgtaagggggcagagaagatccaggggcaaaagagagagggtctgaagaaggacccatgcacagggtagcgtggggcagtgccatgaccataaaaatgccctgccttcctcagggagctgctgagaggggcaaaaaagaagacgcattgttcctatgcaacagtccaagcaagtgatggaggtggtgatgaggaactgagggcctctgtgcctctgggcctctggggaagtagcctggctgagttgagacagcagatccaaagtgtgggctactaatagacaaggaaaaatagaaggggtctgctcttgttattcccacagaagcccaaggtgagatgggagggggtttcaggtgaggttgggacaggagtggaggacaaatttgaaggcaaatggctgctgccacagcatggggctggagaccacattccaggaggggctggggtgagacgtctcaggcaagcctggaatcccaggggtgtgccccctgcc

SEQ ID NO: 4529 - DNA, 1047 bp, Homo sapiens
tctgtgtctcctgctgtctaggaggctgagagccaccctcagtgtcggcggctgcagctgagagacctcatcatctctgagatgcagcggctcaccaagtacccgctgctgctggagagcatcatcaagcacacagagggtagcacctggggaggggctggcatcacaggcagtgggcctcgtgccagaccctcattctgacactgctttgtgaccttagcaagtcactgtgccttgtggtctttggtgtcttcgtcctttttctgttgtggggtgtttcagagaagaaaatgattgtaaatgtcctttggaaaatataaggtgtttaatagtgggaggagtaggggccaccatcgaaggccacctgtgtgggcctttgtgcaaatccaaggaaagcatccggtgcccaacacaggctggcactcaagggcacctgggtccctctggttgcatggggctggattttatccccattcatgccccctgcagtgcacaaaagacacagcctatgtggttacactagaggggcaggggaccagactgaacaagagggtctagcctcaggttatcactctccctgggatcctgggcatctttcactacccccaaatttcagacattggagtcaggacagagaggtgttaggaaccccaatctgatttgaacaggctttctagaggcataattgtggccatttaccacagtctctgtcccttgcatctgtagagctggttgtagtagaggcagggattcccaggagctatcagcgtcttcaaagcagtgatctgtctgagacctgaagatgctcagtaaaagttacccttaccacttggggtcctcatgtgaggcaagggtggctcccctccacccacgcctgctggtttgaagcaagccagctgccatggatgaataggcagataacagctggcgccatgttggacttctcaggcaggagccccaaccatctcttctgtccattttggtaggtggcacctctgagcatgagaagctgtgccgggcccgggaccagtgccgggagattctcaa

SEQ ID NO: 4530 - DNA, 1053 bp, Homo sapiens
tgaaaagaaactaactttcttacaatatgagccagtattatttaatgccatgtccagatagcacctaaaatcattttgaccctcaacaaaaatcatctcacttaaaatccttatagttccacttcccatgctggaaaacactggtgtcaggagttaaacaggtggtattttcaaactgtgggttgtcatcttttggggagtcatagtttcagtattgaaggtcatgagcagcatctgttttaatgaagtagaatctaatagcatggaaaagaaaataacagaattcatcacatgtaataaaagtattttgtgaaacttctgttttaattacatatgtgtgtgctgagttgcagtgaaagcatatttattagaagtcatggtcaacagaaagtttgaaagctactttctggagttcttttgactctgggagcctgttaatcactgagtccaggaggaggtcttcagaagatggggtctctaaagtaatttggataatgagggagaaatggtacaaggaagaaaacagagcaaacgataatcctactcactgagctctctttggtggtgttgtgattttagtaaacttgtcctctcaccttggagttcagggttccaagcagcatcttttttctcttagagcatttatccctctgctgttacttccctatgtggcttacctcaactttatatgctttatctctgtaggcacctggcacatagtagccaccttcataatgtgtagtgaatgaatgactgaatgggagtaatcaaaattgtcttctgagtggcatcttaggggaggacttatccaggacacagagctcttaagtttcttgaagctgaagtttcacagtgtgatctgtagaagagaggatcatggcctaagtgaacatacttttttataaatctagagttatgcaggcatcaaaagaaaattctaatcaagagctactgtgcaaaagaagaatacatgtgaccaagcctctctgaacctattctggttgggctgccaaattcacaaaaaatagaatttaaaaaagatgacaacatatg

SEQ ID NO: 4531 - DNA, 1049 bp, Homo sapiens
gagataccagtgtgaactcaaaaatttataataaatttttctaactctgtccattaaaagggcctggaacgagggacagctcagcagcaatgagtacctagcagtcagatcttgtttgtaaatgcatttcctgctaaaaggaacagggctccttggagaaatgtttaattccaggtctggcataggggaagtacaaggtgagcatggagtatctttttgtgccagaaagcaaggacatgatcaaagacagatggtgacatgttaaaaggacacaggagctggctttcagaagctcccactggtcaaattggaacattttaaactttttttttaaagggtaatagactataatatattattactttgcgggggaaacaggatctgtgagttcatagcactactccagaaaagggatgagatgacattctttataaaagcttactggctaatatatgttgaaggaatgatagaattagcaaattgccattttgcaggcaccagtgcaataagcgctttaggcaagaatcatctatggatagtaaaactattggatgagagattgttggaaaacagagtatctatgcagtctcaaaatatcatcccacagatttctcattaattcaaatgagaaaatagatttttaccattgaaaaaatctcaggaataccactttacctgagtaatcaaacctaccgtcaccaaaatggggcaagctatccaacatcacttatataatagtctcttaaaaatgtttaacatgaatctaactgtgaggaggcatcagatgaatccagattgtaggacattcaacaagattactggcctagactctgcaaaatgtcagtgttatgagagacaagaccaagaaaagtagggagagttctagatcaaattaatctgagagacaggacgtaagtataattcgagatctttgattggctcctgaactgaggcaattggggaatagctacaaagaacttaataagacagttggggaaatttgaatgtgtactgtatattagataatattgtatcagactcattgggtg

SEQ ID NO: 4532 - DNA, 1045 bp, Homo sapiens
agttacctcagctgaagaacaggttgcctacagcctgcccaaggaaggggattgcaaagacaagcagacctcataccatcaactcccattacttccacaagttacccatttgatggtttaacctcagtggttttaaagtagaacactaactttcctctgccacccagtactttcctatcgatgttggtatgaactcagggaaagggagctaatttaaaatccaccttaagaaagtaaattagaaaggtgaatcttctgggccaaatgacacacttttaaaaagcaaaatgaagacttcttggattggccattatcctgggtacctgtttcatggttggtcctttatttgtgccaataatcaaaagtcgactcaagtaacaactccgtttatacaaggtataaagtatgccttctttgaagaaaatccagtcttttgagaatttatatttaaggtattatcactttcatgatgatttacttcagaacatatttacttatcttttcaggaaaacattaggtaaaacaagatatgcctgtagggccgggcacggtggatcatacctataatccaagcactttgggaggccgaggcaggtggctcacttgaggtcaggagtttgagaccagcctggcccacatggcaaaacgccatctttactaaaactacaaaaattagcctggcatgttgacacacgctctaattccagctgctcaggagactgaggtacaagaatcacttgaacctgggaggcgaaggttgcagtgagctgagatcgcaccactgcactccagcctgtgtgatagagtgtgactgtctcaaaaaaattttaaaaagatactcttgtagagtggttttaggatgacaagtaatttaattatcacagtgccctgcaaaaagtacaaggcttggtcttcccatcttactgttaagaaagctgagactgagaagtggtgtggcttgcccagtgccacacagtggctacgatgtggtgaggaggaaacctcattccacagatggaggcctttcccttcggccctggcaagt

SEQ ID NO: 4533 - DNA, 1032 bp, Homo sapiens
ttccaatctgtatgttttatgagttttggagaatatcaggattttagaacttcttggtagacctttggagcagatgttagattctctcttaccagaaattctttaaaaatcaaaacaaaagaaattattaaatcctcttctccgtttctttttttttttttttttttttttttgagacggagtctcactctgttgcccaggctggagcacagtggcgcggtcttggctcactgcaacctccacctcctgggttcaagtgattctcctgcctgagcctcccaagtagctgggattacaggtgcgtgccaccacgtccggctaattttttgtatttttagtagagacaaggtttcaccatgttagccaggatgatctcgatctcctgacctcgtgatccacctgcctcgacctcccaaagggctgggtttgcaggcatgagccactgcgcccggccttctccatttctttattaattcagtgaacatttagtacccactgtatcagacactagtgattcatggaagagacggacatacaaacaaataattataatttaacaagtaagtgtaataagtgccatggtagttatgatacagagtgtgctgggaatttagaggcaggaccattcagaatctgggcagtgagatgatctctgcagaccctgctgttctggaagggtatgactgcctgaggaatacttggaggtcattgataagaaagtatttaaactgagctatctggggaagttccacctcttcgccatcctgattgtccatatttgctttattattatggggagcctgaaaggaatacatctttatcaatagttcttctccttcctattttcttttttaaatcttaatggtatggcagcagccttagcttctagccttaaatctcactagtctggatgtcgtggggtgtgcctgtagtcccagctacttgggggctgaggtgggaggatcgcttgagcccaggaggtggagactgcagtgagctgagattgtgctactgcactccagcctggatgac

SEQ ID NO: 4534 - DNA, 1067 bp, Homo sapiens
tttatccattttcagtgtcttttaaaacttgtttaaatttgcatacagtaaaatgctttgtcttttgaggaacaaaagttcttaattttgatgaaatccaatatataaggtttttcttttatagtttgtactctttgtatttaatgaataaatctttgccaatttcatagccactaagattttcctcctctgttttcttctagacattttatggttttagctcttacatttaaatctgtgatttattcttcgttactttttgtgtagtgtgtgagagaagagttgaggttaatttattactgttttttgcatatgaggtccagttgttctggcaccattacttgaaaatcatattctttcctcattgaattgtgttggcatctttgctgaaaatccattgatcgtatatgtgtggtccagactctactgtgttccactgatctatatcaaaaacacactgatttgattattgtagctttacaatatgttttaaaatcagttaatcaagtcttccaatgttgttcttctgtttccagaattgttttagtattctaggtctttttcatttcttttttttttttttctttttgagacagagtcttgctctgtcagcaggctggagtgcagtggcacgatctcggctcactgcaacctccgcctcccaggttcacgccattctcctgcctcagcctcccaagtaactgggactacaggcgcccgacaccacgcccagctaattttttttgtatttttagtagagacggggtttcaccatgttagccaggatggtctcaatctcctgaccgcatgatccgcccaccttgacctcccaaagtgctgggattacaggcatgagccaccgcgcccggctggtctttttcatttctatatagattttggaatcaatttgtcagtttctgtaaaagtgccttctgagattatgattgggattgtgcagaaaccatagatcagttcagagagaattggcattttaacaacattcagtttgtcagtctataaataccatgtatttcttcttttatttaggtcattaagttctctcagca

SEQ ID NO: 4535 - DNA, 1044 bp, Homo sapiens
gctggacagtgggcataaagtagtatctcatggttttgatttgcatttccttaatgactaatgatgttgagcatctttttatgtgcttattggtcatttgtatatcttggttagagaaatatctgttcacgtcctttgcccattttttatttaagttattcgtccctttattgttgagttttaagagttctttatagattctgtatactagacccttgtcagagacatatgattggcaaataatttctcccatctcatggattgtctttccacttttattgatagtgtcttttgacacacaagacgttttaattttaattatgtctaatttcttttgttgctatgcttttggtgtcatgtctgataaaccattgcctacctcaaaagtcacgaagatttactctcatgtttcttctaagagtttcatagtttaactcatatagtctatggtccattttgagttaatttttatgtatggtatgaggtaggggtccaacttcgtacttttgcttatggatttctgattgtcccagccccatttgttgaaaaaactattctttctccatttaattgtcttggcacctttgttaaaaatcagtggacccataaatgtgatggcctatttctggtttctcagttccattccattgatctctgtcattatgccagtactacactgaagcttggtaataggttttgaaatcagaaagtgtgagttctccaactttgagtttttttcaagactattatggccgttctgggtcacttatatttccatatgaattttaggatcagcttgtcaatttctattaaaaaatcaacagagattttgatagggattgcatcaaatctgtagataactttgtggagtagtatcatcttaacaattttaaaccttccaacccataaacatggatgtctttctatttatttaggtctttacttttttaaatgatggtttttagttttcagtgtacaagtcttgcacttcttttctcaaatttattcctaggtattgtattctctttaatgctattgtgaatg

SEQ ID NO: 4536 - DNA, 1007 bp, Homo sapiens
tactgcatagtactattcaataaaaaaaaaggaactctggaggaagaacataagatggttgagggagagaggaggagaggagtcagcatccctttggacatgttgtgtttgaagtgcctgtgggagatccaaggaaagatgttcagcagacaactggagcttgggctggaggtcaggaggggatagagaatcacattagcaggtcatcaacacctagacggagcagcagaagcataagactgtccaggggcagggtgtagagagagcaaagggctgtgcacagaaccctgagaggcatacatttaaaagggaggtgaaggaagatgagaggcatacatttaaaagggaggtgcagaagagactggcagggagtgacagaagcaaccagggcagtgaggaacctccaaagtaaagagagggagtgattaacaatgtcaagttctcctaagaggtcatggacgaaaaggacagagaaatgcctggacttagtaactgggaggatgttcatggcctccgtgcgtggtttctgggcagtagcaagggaaggagccagtttctagtgggtccaagtgagaataggaggtgaagaaatggtgatggacatagtctagtcaattctttcatgaagtttcatcagaaaggaaaaaaaaaatgtcgctcctggtcctgtcaggtaggactttaattttttcaaggtagggatgtattgccctaggtcagaggttctcaatctttagaatcctttagaatcagctggagagcttgttaaaatacaggtctgtgggccccacccaaaacgttctgactcagtgtgtttgagctgagtttggggcctgaggatctgcattgttacaacttcccagatgatgccaatactggcattctgtgcttccagagccactgccttatgacatctgtgctcttaacgaactctttttatgttctcagaacagaacttttgttcactgtctatttcaaaacttgtcagtggctctactctgctggga

SEQ ID NO: 4537 - DNA, 1047 bp, Homo sapiens
tattaatgtatttgtttagcttttttaatagacaagaaataagaaaaattaaatgacaatacgagttcatcaaaaataaaaagattttgtgaacagcacatagctaatctcctagttagtataaaggtaaaggagttctggaagctcacagcctctgtggaatggagtttagaaactctagtttgtatagtgtttcttgctgctttaatgttctgataatctgatgtttgtgaaaaggctttgttaactgttgagttctataaacgtaagaggagttattttaatctatattgactgaatctgtttcacctcttcatagtagcattgcctttaaaaattcatttttattggtttattattttttaagcttaactcaaagatatatcacgtggcttggaaactctttttgctgtggattgtggtgttccttcttttgtcaatcactatattgataaaagacccaagcatacacctgctagtggcatgcaagatcactcctttgccccatggggtaaaccgtactgaagaagttgctgatcctggtctcaaaaagaaaaaagtataacttcataaaaagtcatgttagatcttttgtgaaaggaggtttggagttctgaggaaagaacacaacatctgagttagtagacgtggatgatggagccagctttgttagcagctgggtgaatgaccttgcaaaggtgcttacctgccctcgacctcagtttgcttatttggaaaaatgagggaattaggctagccagcctctaagatttgattccttttagctattacgttctttcagcctctgaaaccagaatgctttgtgtcctttcagtgggccaaatggtttttcagaaatcattgtctggctttcctgaaaatcagtgaaaatgaaagcttgaaaagaacagagaacaaagctgcctgatcaaatgggagagaagatggaagtacagggacatggaaacatggggaggaactgagaaatccatggcccctaatagaattggaataggatttggaaggtggttttgttttttgtttttt

SEQ ID NO: 4538 - DNA, 1024 bp, Homo sapiens
ggacagcattgagagttttgtggctgacattaacagtggccattgggatactgtgttgcaggctatacagtctctgaaattgccagacaaaaccctcattgacctctatgaacagattgttctggaattgatagagctccgtgaattgggtgctgccaagtcactattgagacagactgatcccatgatcatgttaaaacaaacatagccagagcaatatattcatctggagaaccttttggccaggtcttactttgatcctcgtgaggcatacccagatggaagtagcaaagaaaagagaagagcagcaattgcccaggccttagctggtgaagtcagcgtggtgcctccatctcgtctcatggcactgctgggacaggcactgaagtggcagcagcatcagggattgcttcctcctggtatgaccatagatttgttttgaggcaaagcagctgtcaaagatgtggaagaagaaaagtttcctacacaactgagcaggcatattaagtttggtcagaaatcacaagtggagtgtgctcgattttctccagatggtcactatttggtcactgggtctgttgatggactcactgaagtatggaactttactactggaaaaatcagaaaggatcttaagtaccaggcccaggataactttatgatgatggatgatgctgtcctctgcatgtgtttcagcagagatacagaaatgttagcaactggggcccaagatggaaaaatcaaggtatggaagattcagagtagacaatatttaaggagatatgagagggcacacagtaagggtgtcacgtgtctaagcttttctaaggatagcagtcagatccttagtgcttcttttgaccagacaattagaattcatggtttaaaatctgggaaaaccctgaaggaattttgtagccattcctcctttgttaacaaagcaacatttacacaagatggacattatattattagtgcatcctctgatggcactgtaaagatctggaatatgaagaccacagaa

SEQ ID NO: 4539 - DNA, 1048 bp, Homo sapiens
aacatttgaaggttgtcttttaatggtggggggtgttttttcctttttaaactacagtgcttgcacaagagagggagggactcagaaaaggttagggcaggtgagggagacagtagatggcctgggatgacttgagtccatcatactattgcttggcaggtgtcctcccccatgtttgattcaaattccatgagtgacctacctttccccaggaatgggactgagagggtagtctccagcaactcagtctgcacagggctccccgttcaggctgcctttggtggttgtgcttttgtaagtttctttctctgcacttcgacttacctctgaatcagaaagcaagcccagcaggtgaatgagggatgtctgcttggcattgcccaatctaaccagggaggctggctggccacccactgtccgctagaggggagagctagcaggtgttggtatgaactcaggaatagaaacacgaggcctttttaaatacgagggagaagaatccatgatgcatacctgtaaccccctagaacccaagtgccagaattcctagatgctgcttctgtttgaacaaaatgtcactgcttttacacttgaaaaaaacacactcgaaaaatgttcaactccatgaaaaatattttttggctttaagaaattgtttggtgtttaactgtttcctttgattgccattccaccagtaaattgttggttgatttgcactgcactctggggttggggttgggaggggagggtccttatacagagccgaacctggggttgctcaggaagtgggccagggaatgtggaagtcgttgacattgcctgggccaaaagagtgggagatagtttttctcccctcagcccactcctggtagcacctgtcgccagcctggtacaaagccaggcctttttcttctgtgagcatctcatcactgtccagcagcaggtggaaaaagggggacaacaaccagacctattttttctcccccattttttccaaattttgctgtgccaaatgtttaaaattttataaatatgaatctattgaaat

SEQ ID NO: 4540 - DNA, 1065 bp, Homo sapiens
aacacgcccacagtgtttagctaactttctaggcagaaagtttcctactggggcacaagtctacgggctctcggtggaggctgaggtactcacgggtggagaccactgcagccgcctttgtagattcagactccccgaacctttaacccttgctctggtctactgtccctctgtctcaagcagtcctccctccttctgcgctgcggcgcctttaaaccttcttggcccttgccccgccccgggtccgccccgtctgaggcgggaccctcctgaaaatccccggctgggcagggcgcaccacttgcagctgcagcccttgccttgagtcagtgcgccgctctccagcccgcttgaacggtgagcaggtcgggggtacgggggtcggggacatgtgcgtgctgtgtagaaagcaagaagccagcgctttgaacttgctccagcgagctcggggatcaagggctggtaccaggcaagggtccggtgactactttaccccgccccgtgctgtcaggtcctgtccccaagccctgacccgacattgttggacgatgaggtcaggcgaggttagcccatgcatagacagggcgtccgtctggagcagggactcagggactgagccccacccgcgggctccatcgctgagtcctcactggggcgaggggaaaaaagggcgtcggactttagctggctggccccgagtgaccccgggtcgtggcgccggccctgggccagctcgtgctcctgggctttcccgcgcgacccttcacttcctggttccaggagcacgtgtgagcactgcgtgccctctgagtccccgaggccgcccttttcattcctgttcctgctagcttgctattctggggacttgaggtcacgggctggggctagggggctctgcatgggtcgcacggtgaccttctgtgaagctccagtcatctctatgacggtcccctgacctcgggggtctgggtgctgcagccctgactgcgccccggggtgccctgtgtgaggttgtgggggtggtggtggctgcttttaccctgcccgagcgccgctgcccccacc

SEQ ID NO: 4541 - DNA, 1076 bp, Homo sapiens
ccactgcgctccagcctgggcgacagagcaagactccatatcaaaaaaaaaaaaaaaaaaagataatccaaagaatttaaattgtaatcatgtttcatgtatttgttttattacttacttttatagcacttagtcccagtggtattagactgctatttggtttcatacaaaaaggattaaatttaaattcattcatgtttagacttgagttattacatttttaaaactatcatcttgcctttaatgtttgtggtcctacacaaactattagtacatttcagtatcctcttacccctttgtttttaagtttttgattgctaaagcaagacttttttcttctagaatttaagtcaaccaagtgttatctatgttgtaaaaatggataatagtagattttaggtgataaaacaacttgttagtaagacatttcctagcttaaaaaaaaaaatcaaaaattccatgatagaaatgcagacctgtgagggaaactcctgaaaagcataagaagcatcccagagagccatgggttttctagaccagagaatttagagggagattgtggaactgaggcttaggtggtcagatcgtttcccttatcactgtaatatttctgggggaaaaatgctttctgagttgtttaaacaagcatccttacatttttttttttaattaaacagcctgtctaggcttgggattccctaatactacagtagcagtatatgaatatgattttgtgattgtgttttttaaaagataagtaatttgatgaactgttcttttgcagtcagaaaacactcacaaaaagacaaaaaaagttccacagtattatatttcatgtcagttcaggcctaaaatcctttgcaaataagatgtttataggctggtcacaattaacaatgttattattggcagcacttcttggatggataccttttgggacctttcattagaaagagggaaagaatggggtggttttgtatgggctcctgtttggggtaaaaatagcagagtcagttgctgaggacaatgaccttccttataacatttagtttcatacccatattaggtcttgtctt

SEQ ID NO: 4542 - DNA, 1292 bp, Homo sapiens
atatcatgcaaattgtaaatgtagagtagaatgtaattgtaacgtagaatgttagaaccaaagatcttagaagttattttctgccttgcccagatctcctgactgatttgaggatcttttctttgttcccattcagcttcacagggacaagggttgggggtggtatcagaggacagccccttagtctcccaagagcactttgatgcttgatcccattctctacattcccccagcccagtcatctaaggccagagctcttttctctgctcaggcattattgacaggataagtcctggcattcagacaggtctggtgaagtgaccaggtactctggcccagaagttctctgtcggctccccccgcaggctccaattcaggtactgtatgttattctcttgttcctcttgccactggctttttccttagtcttaagttccaaggaattgttcccctgtgtttttttattttcctgacttattcaagcagagctagctcagagtacaggtctgtaacaagggcttattaggagatagatgaaaaagtgcaggtttgtatatgtaagttgtccattactatagatagatactattccaggcattggactttaactgcactgcctaaaagagcccaaagataaacttcacaataggctgatatgtggaatgggaggaggagataaagaacggggtttctgttttattcataagctcagtcttagcttcagtcttttctgagcatttgtttatttgtaagatggaagtcaaagtaagtgggaagtctgtaggtcagctctattttccatgcctgcccttgacttctcctcagctgttctctgcctgtgcaggtgaggcagcggaggtggttggtccagagagaactaaaagaagttgttttcttggactataggtccagctgcaaggcagggtgcctttcctatgtgttcctcttttcactaaaagactcaaaatgctttagcagctagatctggaactaactcttctggatggggtaggaacttccctgcccttcccttagggaagctcatgtttccaagtcagacagcagggggcattgggtgcctttcggacagaaggaagctgcctaagctagaaggcctgcctgctggagtttatttcttttgccttgttcagtgaatttacccagagggtggctgagattgaggctttgggagccccaagaagctgcttggttttaatgtgctgccttatagctgagcctgttgtgctcagggcaagtagtaggatgttccccctgggatgtgcaaggttctc

SEQ ID NO: 4543 - DNA, 1043 bp, Homo sapiens
caggctggtctcaaattcctggcctcaagtgacccacccgcctcagtctcccaaagtgtagggattacaggcatgagccaccatacctggccataagttacattttaatggaatctgagcaatagtctctgaccttaaggtcttttttagcctactgtttctgggattcttcttccacgtctctccttgttcccaggtgatagggaagatatatttataaataaagggtaggaaggtatctgtagtattgtctgattaataactggctgttactgtgttggactgcagctaaactgaggcttcctaaagaatggtacattcatatacctttagtttatacttcttaaggaacactagaaagtgacttcactacatatttttttccccaatccccaaagtcccatataataaatgtatgtgcttttttcctgttgttacgtacaaaacaaacagagaaaacacaacaattctttctttccaaatgagaatctctttggtttcttattagccatgtgactctcttggctctcctttgccatgaccatttggatcttttggagtatataactttctgtgcttttctactcttaaaggaaactggtggtgacaaaagagaaagagaagaaagtggggctgtatacgatctatgtgaatcctgccaatacccaccagtttgcagtgggtggacgagatcagtttgtaaggtgagtttgtggctcttttgtgtctttgacagtttgtaagactgatgcattgtatactaccaggtgctcctttatggagagttacgaattttataggaatccattaactattatcttgaattttttaccgttttccaaaaatcttacacgcctttggagatgttctgttctctaatgtaacagtctctgaggggtgactttacatattttagagattatcaagttttaaagaagttagatgatggtcaggtgtagtggctcacacctgtaatctcgacactttgggaggtgaggcgggtggatcacctaaggacaggagtttgggaccagcctggccaa

SEQ ID NO: 4544 - DNA, 1046 bp, Homo sapiens
gaggctttagtgagccatgatcatgccactgcacttcagcctgggtggtaaagtgagaccctgactggaaaaaaaagaaaatgaactctaatggctgatgtttttctttgctatctgttcatatctcttgaggacttagttgaaatagcaaatcaactgtcctttgactagttatagaataaacaaaactataaataattcgcatagaacaagagtaagtgggcttagattatgtcctttcctgggattttatgacaaaaaggtagacatttctctttttggaacattttaagtgcagcccttcccaaagttataggaatgaactagatgacctctaattctaatatttagaaacctcatgtttttcctttttcttcttcagttggcactggaaccagactctccctgtacgttcttatctgcaggtgaagatgcagttgttttcaccattgacctgagacaagaccgcccagcgtcgtaagtgtagcagtaatatcattacagaactgtatctcttagccttgaacatattccatatgtcttggtaatgcctaactctggttcatccgaatagtacctttgtgcctatggttaagaggtagtttaaggttaaggggaattccttacttcctctctttctcagtagtgaaatactattcagtctaccttcatttctcaaacagtttacttgttatatgtggcctttaataatttgatgatcttttgctctttattcacttggatatcattcatcttacccacagaaagcacattcttccacagactcatgtagaggtacagtcctgtaaattttaaatttaaatacatttttaatttagttatttatagaaacatacaaacataaaatttgaacaaaaatactggtagctgtagttgagttctgttttatcacagttcatttgtatgtgaatctgagactcataggtaaattttattcctttttaactgtgtggtatcatagaaaaaacacaacatcttgtttggatccaggcagacctaggtcaaatctcaaatcaggcactact

SEQ ID NO: 4545 - DNA, 1034 bp, Homo sapiens
aaaaaaaaaaaggtgattacataagggatgaagttacaacccaactaggagtgggacatctttcccctccttatttcctttccttacttcccctcccttctttccatttatttccttccttccttcctttccctcctccttcttttcaggaccagtgctgccaagtgtcaaatcactggctttagggcagatttgaaggcagaatataaaaattctaatagagtataactaccacctgggttatttaaccagctcttcacctctgagccaacttttaaattagagaagccgcctttaaatggatatagttgggcagcacagagtccagcattccttagcaccttgaaggtcaggataacaggctaaattctagttgatgtgattggaggaaggataagtgagattttcaacatgcttttttattgctccatatgttcttatcactgccattcattcatcttttgtaaaggaaagtggttcatatttttcactgggtttagttgaaaggcacagggttctagaggagttaaagtatactattgatttggagcttgaccattagctaggtcaaggattggcaaactataaattgcaggccaaatccagcctgccacttgtttttgtaaagttttattggaatacagtcatgcctgttcgtttatgtagtgtctatgagttgcttttgttctacatactggagttgagtagttgtggtggagctccgtatggtctgcaaagcctaaggtttttactatctggccctttacagaaaaaatttgcaaacccctactctagatcttggtgatttactgttggggacttcttgatgagcttgtgataccctctggcccttatgttaatgtggtaaggcctccaaaattgtctatatttgttactcataattttaacaataaacactagatgttttggtgttttattttttcttttctacagacctgttaggttggtgtttcagtccctgctcaccactcccaagctcaagcccagctgcatttcaaaaaactgtaactgct

SEQ ID NO: 4546 - DNA, 1038 bp, Homo sapiens
cttggctcactgcaacctccacctcctgggttccagcgattctcttgtctcagcttccccagtagcagggactacgggcatgtgccaccacgcccggctaatttttgtatttttagtagagacgggggtttcaccatgttggccaggctgatctcgaactcctgacctcaggtgatccacccgccttggcctcccaaagtgctgggattacaggcctgaaccaccgctcagatttatcagaatttattaattttgataaatccaactgattaatttttttgtatgtgctttttgtgtcctatcctaagaaattgttgcctaacccaaggtcacaaaggttattttctttgttttcttctggaacttgtgttgttttaagttatatttaggtctgtgattcattttgacttagcttttgtatattgtacaatgtatggattgaggttctttagtttttttcttttggcagttgaatgttcagttattctggtacaagttgagcatcccaaattaaaaaatctgaaatctaaaatgctttgaaatctgaaacttttcgaatgccaacttgatgctcaaaggaaatactcgttggagcattttggattttgaattttctgatttgagatgctccactggtatattgcaaatatttaaaaatttgaaacacttctggccccaagcattttgggtaagaggatacaccggacaagggatacgtagtctcttatgcagatctttcatcatattagaggaaaagagcagccccagtagttttaaacaagagacacttggtatctcttttacagagtactcttatccagcgtagtaaagtctttctgcctggtttttagttaatattttgtcatgtaattggttaaaaatttaaggctttattcttattaagacaagaaaaatctaggtcactggaatttcttagtgaaattaaaatggcacctgggtcttttttcctcaccctccagtgggttactctttaaccttcagtttggcaggagttatggttatttttagagtaggaac

SEQ ID NO: 4547 - DNA, 1080 bp, Homo sapiens
ttttgagacagtttcgctcttgttgcccaggctggagtgcaatggtgcgatcttggctcaccgcaacctccgccttccaggttcaggcaattctcctgcctcagcctcccgagtagctgggattacaggcatgcactaccacgcccggctaatatttttgtacttttaatagggatggggtttctccatgttggtcaggctggtctcgaactcctgacctcaggtgatctgcccgccttggcctcccaaagtgttgggattacaggcatgagccactgcgccggcctgcattcgctctttttaggccacgtttattaaggtataatttatatacagtaaaatttatccttttttgagttggcctattcttttaattctgacaaaggcatagttatgtaacaccactgtgattggcgcatggaacatttccatcattccaaaaggttttctcatgccctttcgtagtcagtttcattcccctacctccaagccctggcaatccctgatccctctattcctatagttttatcttttccagaaagtactataagtggaatcatatattgtatagctgtttgagtctgaattattgcacttaccataacatacttgagatctatccatgttgttgcttgtatcagtagttcattcctttttattactcagtagtatcccattgtgtggacctaccacaatttgtttatctatgacccagctgaagaaaatttgtttccagttttttgatgaatttaagtaaaactattaaaacattcacctacagggtatttttaattttgtggacatacattttccttcttgtttatcttatttatttatttttaaagatggagtattgctgtgttactcaggctggtctttaattcctgggctcaagcagtcctcctgcctcagcctcccaaattgctgggataacaggtctgagcctcttttttcttgtataaattcctgaagctgaagtgggattcctgagttgtatgataagtgtatatttaacttcataagaaactgccaaattgcttttttcaaagtaactgtactgttttgcatttctagtaacag

SEQ ID NO: 4548 - DNA, 1042 bp, Homo sapiens
cccccctcccttgacctacccggtctgtgtctcgttccggctcggcctgcgccccccctcgcttcccagccggtttcccctaaggatgggcctgacccgtatcccaagctcttagcgctcaggtcttttccttccgccgacccgaagtcatcgctgggagtactggttgccctttcctcaggtcagccctggtgttgcccccaagagccagccgcacagttcacagggacgccttgcttcgttgggtgacccatgtgtgcgctcctatttctccccttagattgagggacacggctcgccctgcgtctccccgtcacctcagggccaccgcgcaatgtgtccccctcccccatcccaagttcccaggcccagcaccttgtacggaaggcggaggtccaagaattccggagtcggttgttgtcttgtggtcttgtaccctttgtaatataattatcttagtttacctcctctaactcccaaatcttttaggatatcttagaacggtcccatttggtccctgttagttggaaagcatctggtggcttgaatttctgactcatgattgttactggagtctctgtaaacaaaccggcactagcgctatcacattctctccgggatttccccccctgctctgtggcttcttgttgagaggttgtttggttatggtttagcgttgaaaagattcaggttatccttttaaatgactttacgttttagtggagctgggagattacttgcctggcttctaatcttcatgttggttcattttatttccatatgtgtgtgggttatttgttcagtaattagaattagataaagtattctgcttttaagtagttttgagaaggcctaaaaatactaaagtgtattcataaatatttttattatgttcagtagaagacacacctttgccatgtaaattttaacttttctcagtccttcagtgaatctacagacctattttctcaggagctcagcctggccttacttcagtgataaaaggaggaaaggtgagtgggagttggaggcattaaaattc

SEQ ID NO: 4549 - DNA, 1029 bp, Homo sapiens
tctatatcctccttctaacagcaccttccccctgcagctactcttcagatctggctctctgtaccctaaaacctagtatctttttctcttctatggaaaatccgaaggtctaaacttgacttttttgaggtcttctcaacttgactacagttgtgctcataattgtccttgcctttccagcttaattattttaaggaacaaatgaaaactctgggctgggtggagtggctcatacctgtaatcccagcactttgggaggctacggtgggcagatcatctgaggccaggagttcgagacctgcctggccaacatggcaacaccccgtctctaataaaaatataaaaattagcctggcatggtagcatgcgcctatagtcccagctgctcaggaggctgaggcatgagaatcgcttgaacctaggaggtggaggttgcattcaactgagatcataccacttcattccagcctgggtgacagagcaagactctgtctcaaaaaaaaaaaaaaggaaaactctgtgatggacatttgtttagtaaatcccttcagtatttatccctcctttccccacagcagctttctttcctgtcaactagaaaggagcaggatgtaataaatacattttggtgtgactaggccacaccaactcttaatcatctcccattttccttagacatttaaatttcaaggcaggtaccctctgtgtactcagaaatttgaagaagttatttggttttccaaaatgcacactgcgggttattgatttgttctttacaactattgttctcatatttctcacactaaataaatctctatgagagcttcttgacttggccatttatttcttggacactctcatgttcttgttcacccatgcaggcaccccaccaaagtacatatcttccttccagtaataatttttaattacaaaataaacatccactattggaaaaaaaaaaaaaaagctagccgggcatggtggtgggtgcctgtaatcccagctactctggaggctgaggcagaggat

SEQ ID NO: 4550 - DNA, 1998 bp, Homo sapiens
gtcactctcccacctggttaccaggagaggcagagaaacaaatgagatcaaaggaggctccataactttccttacgtgacttccaagtgctatttgtttttagcctcttttcttctactattcagatcccagacattgaccctaatgccaagctgctccagccacctgcacctatcatgccattggataccaattggcctttattgactgtatccaaaggattttttgaaggcaccattgccagcaaaggtaagtacctatttctcccatagcacttttgttgtttgttttgtgaagaactgtcctagagaataccattagcatttagtttaacttgtcctttttttctgcatggagcctaatggaatattgaaatgccagtcatttatggtgcagtcttaaaaacttaagatagcattttcaggtcattaaagaaaatttggaaaatagggagaaaaaaagggatccctctactaccatcaataacttcggttaatattttggtgtattttcttaggttttactatatatgtagtcatgttctttgttcagtattttatcattcatgacatacaatcttaaaggtactaattcaactacctgtaattccggtatgtgggtataggcagatgtgtgctatcaccctccaccacttccacccttaacctcctcctgttttctgggtctcctagttcatttcccgtgagtaagagcctaaacagactcttgagcattttgtgccaaaccccactcttttctccacctcctctatctaccctatgcctgatgccctgtacacattgtagtggtggtagcttagcaaagcgctcaggaagaaattcaagagttggtagccaaaggctggtaagtacaaattatttaagagccagtttttggtagcaggaaggccagttccttccatctgtcttctattccctccctctgtgaaagctactgcaagttagcataacatatataccacaaaaataaataatacacaaaaataaatagtaagtaggcagaagcttggcacctgtttttgaaaggatttaacctgcctacagaaaaggccgtatctcagacttgctggactataaccagttccgttctgttccttccctctgtagggaagggaggagcactggctgctgacattgacattgacactgttggtacagagggctggggagaggatgcagagctgcagttggatgaaggtaaaagtgctgttttaagactgttctggggtgatggacaccttggattgggactgggttgtgggtagctctgcagacttccaggccatgaaacgaactaggattgattttacttcctttggctaagattatgccactgcccaaatctgttttgagcttgaattttccttacagatgggtttgtggaggctacagaaggtttgggggatgatgctcttggcaagggacaggaagaaggaggtggctgggatgtagaagaagatctggagctccctcctgagctggtatgtggaatttgtacccttagaaggttctctccgtatctccctgtggaagccagaggccttattgtcccctaccactatcctcaggtctcctatcctatcccctaccactatcctaaggtcagcccttctgggaaggggactagaccctcctagtctgatgcttatctcccatttgaaagaaggaagatggctgggcacggtgactcatgcctgtaatcccagcactttgggaggctaaggcaggacaattgcttgagcccaggagttcaagaccagcctgggcaccatagcaagaccctgtctctattttaaaaagtaaaagaagcaggaagaacgagagagtcaaagttagtggccttgtcacttccatctatcctgatatgctccaagaggagaggatgtaggacttatctctaatctgatgcttaactcccatttgaaagaaagaagaatgaggtaatcagcgttctgccagcagcagcttatgagaaggt

SEQ ID NO: 4551 - DNA, 1438 bp, Homo sapiens
cttagcatgtcaccatcacatgctaaggaacaccaaagaggccagttggagcacagtgagtaagggactgagtaacaggtgaggtctggccagatcgtgtattgccttctatgccatggttagaacttaagattttattctgaatacatggaaagccattggaaggttttgggcaggaaagtgacatgatctggtttatatttggagagcagacagtaggagaacaagagtggaagggttttctaagggatgatggtgctagtagggaaagagcaaaacattttaaaaaacagaatcacaaagggtttttaacatccattttttcagtaaatacttcttatactctttttatatgctagagactggggaaggatggaaattataatttctgccttcagggaattcatgttacaatgtgggtgatagacctaaatgattacagtgcaggatgataagtactgtaatggaggtttgtacaaagcattaggggaacacagaaaagggcagtgtggatagtgacactaagtgtggcagtgtgaatagtattaggaaaggattcacagagaattatttaaataaagattccaagaattgtgagaatttaggcaaataagggatgcattcaggtgtcttgtcttacagatataatcttcatccttacgtatctccaatttccaggtttttttcttgcctacagcttaattttttctcctcctctccctgtcccccaggccatgatggtggtatgattgtgtttaagctggaacgggaacggccagcctatgctgttcatggcaatatgctacactatgtcaaggaccgattcttacgacagctggatttcaacagctccaaagatgtagctgtgatgcagttgcggaggtaaatcggacttgtttctttcctccaaaccctctcatctgtcaccctgatacaactcccacaaacaagactcttcttttctttctttcatttatttattttatttatttaatttttttttgagacggagtctcgctttgtcgcccaggctggagtgcagtggcgcgatctcggctcactgcaagctccgcctcccgggttcacaccattctcctgcctcagcctcccaagtactgggactacaggcgcccgccaccacgcctggctaattttttgtattttttagtagagacggtttcaccatgttagccaggatggtctcaatctcctgacctcatgatctgcctggcttggcctcccaaagtgctgggattacaggcgtgagccaccgcgcccagcctatttatttatttttaaattttttttttttgagatggagtctcactctgtcacccaggctggagcgcagtgatgcaacctcagctcactgcaacctccacctcctgggttcaagcaattctcctgcctcagtctcccaagtagctgggattacagg

SEQ ID NO: 4552 - DNA, 1049 bp, Homo sapiens
gccactctgatttggcatctcctttggccaagtaacagagcagagtttctggggctgggtgtgatagtcttgcctccccgctttctctctgcctgtcctcagggatatttcccctttcaggcagtcgtgatgcttcccatgggttaagtcaaggttagatctcctgccagggcacccaggaagatggggaaggtagttgacctcctcagtctcactttttccagtgtagaaaccatgagttgggggagggccattgcagatgtggaaatcagatgctcttaccatctgctcagagttttttcatctctctgtggccccaggaactgtctcattgtcatatttgagttctgggttgttgctgatgaaaatctcagcactgtatatttgttttgggttttctgtggaggggagtgaagccagcttgcttctataccactgttttgaaactgaaagtattccttctttcccttttttcctgtggtggtacccttattttgaggagtatgaacatagaattcatccattcatttgacaaatatttattgagtacctcctttgtactagactttgtttaaggctctggagatacagcggtgactaaaacagataaggcccctgtctgaaggagctcatatttgttctaaaatggcaactcctaaagtggcaggtccctgaaaaaaagaaaaaataacaaaaattgaaaggccaactaggacagttgttatcaggacagataaaacaggataaagggatggagaatgatgaaaaagaggtgtttgtttttttgagacagggtcttgctctgttgcccagcctggagtttggtggtgcattcacggctcactgccgtcttgaccttttgggcttgggcgatcctccccctcagcctcctgagtagctgggactacaaacgtgcgccacaacacccagttaatttttgtattttttgtagagatggggttttttaccatgttgcccaggctgatctcgaactcctaggctcaagtgatccccctaccttagcctcccaaagttctgggattacaggt

SEQ ID NO: 4553 - DNA, 1050 bp, Homo sapiens
ggtgggtgcctgtaatcccagctacttgggaggctgaggcagagaattacttgaacccgggaggcagaggttgcagtgagctgagatcgtgccactgcactccagcctgggtgacagagcgagactccgtctaaaaacaataaaaaataaaaaataaaatttgtctggagatattaataattatttgtagaaataagataaaaataggcaagtaaaaaacaaagcagaatatcctaaatgcaaatgaggctgagtttaggggttagaaatatgtatttggaaattcacatgagaatttggggtaatattggaggacagacatggtaattctgatgctcaaaattttagagcagcgtagtctcttgaatctgttcacatgaagaataaatcagagacattttttacaacgagtagcttgattcattggtttgctttgagtaatgactataaagatgttttagaagaaccactcttttctacagggtcacgatcgtggagtaaactgggctgccttccaccccactatgccccttattgtatctggggcagatgatcgtcaagtgaagatctggcgcatgaatggtgagtgaaccggttacattatcgccatatctaagaaactgccagccagcaaggtaaagtagccaggtcttctggactctgacctatttttctaccttaggtgattaattaatgctaatcccaggagcatagaaattattttacaaataaaatatatcatctttacaatttttatgtgtacagttaagtggtaataaatatatttatattctgttttcctccatttcctccttcaccctccttcccattctactctcgatcttaataatatccactttttagcttccacatgtgagtgagaacatgccatatttgtctctttgttcttcccttaacataatggcctccagttccatccattttgctgcaaataacaggatttcattcttttttatagctgaataatattccattgtgtgtgtgtgtgtgtgtgtgtgtgtgcacgtgcgcgtatgtaattttctttat

SEQ ID NO: 4554 - DNA, 1045 bp, Homo sapiens
cccacagtggagcgtcgccgccgagacaagatcaacaactggatcgtgcagctctccaagataatcccagactgctctatggagagcaccaagtctggccaggtcatggaaagaccctggtagtgggcaggatgcctgaattctgcctcctggtattgtttccagaaatggtagagagaggggcacacatgacagtagtcttatctctccctgaggttcctgtatccctgggagatattataccaccttccttagatgaaaatgaggtccaaagtgtgaacctacttttggaaagcaagctgggtatctgaaatcctagttctcattttgttgaccttatcttgcagagtaaaggtgggattctatccaaagcttgtgattatatccaggagcttcggcagagtaaccaccgcttgtctgaagaactgcagggacttgaccaactgcagctggacaatgacgtgcttcgacaacaggtcagactcctacccccagtgcagcccttctcagttctgctagccactgacccagtttgacaccctctactttgttctccatggagaaggcttcatcttttccccctcaccagtggatgtctgaatacattcaggggcttggaagtgccagctttactacccattccctttactgcctccttcccatgtcaggtggaagatcttaaaaacaagaatctgctgcttcgagctcagttgcggcaccacggattagaggtcgtcatcaagaatgacagcaactaactatggggattcaggggctttgggcccaagaactgcagatagcccaggagcaacagcctaatcccgtgcccctttccttcactgccccacttctggcatgggacagggggaagttcagaaggtgtgtccttgaactgaggccctgtgatatggcggcctgcagtggtgtgaaacacacaatgtggacgtgcactgacagccttgcccacccccaccatgcagcccctgggcccttgtgctcctctcgcacaatgcatgtgctgtctccatgctggatactggacaca

SEQ ID NO: 4555 - DNA, 1050 bp, Homo sapiens
ctggtgtgtcctgagagctggagttgaggctgtgatttgggatggggcagagctggccatggtgggtggaggggcagtgtggagcaggggttaggatctcaggagtttgggagaagctgaatcctggttctcccacccacagtgtggctgttgtggtgactcagccaggctcagactctggctccggggggtttaggggacttatctgtgctgggagctgtgtctgggccagagtggggctgcctcaaggcctgtcctccccattgttctcatctccctttgtgattgtgtggcccccctccccagacactaatctgtgggtgggcgttttgcccaggctgggaagctctcactaagctggggggcttagtacaatggggggtaagtgagggaggtggatgaaggcggagagggaatcttctggtttttaaagttccttagcactccaaggccaaggttatggggcaaagagtggatggaaaggggtttgctgggttgtttgtgtcacctgtcctggatggtgagcttcggtgcgtccctcctaggtcctttctcaccccagactcacccacatactccagctctcggtggagattgttgctgtcaggtaaggggaggcaggagttaacaaaggagcatgagaccctagacagcctggacccctccccctagccccaggcaggattcccctcacccccccaaacccacaccagacaacccttacccaggcctggagccagagctggtttttctggtggtggcagcagcagagccctgacagagattcccagggagaggcctccttggggggccagagctgctgaggggcccaggggagtggctgggggtagtggtgagaaggttggcagtccttttagtaggaacctgaggagcaaggggagagggaacatttgttttgttctgctggggagtccttaatggcaagttcccatcacctggagggacagtgacctcatctctgggtacttccaccttgagcctgagattaatatgtcttcaagtcttggggtaaggtggggaaggatgctg

SEQ ID NO: 4556 - DNA, 1050 bp, Homo sapiens
tcagtgggccctcaaatatctcaaaaatagtaagccctccgtgtttggtgaatggaattccagaaaaattttaggtagaaatcgcaaacttgtggttctactccttttccaaggtaggtgcccactactgcacctttgtaaagcctgccaccctatgtgctatctggaccctctgccatttccactatcccctctttcatctcttctctcaccttgttaggtgattgctggcttcaaccgccttcggcaggaacagcgaggcctggcatccaaagcagctgagttggagatggagttgaatgagcacaggtgagaaagtcagggagaggcaaacagtaggacagttgtgtgggctactccgtgagggggatttgtagtagagtggggctgaatcctcaggtcctgccttgttctcctatcccagcctagtgatcgatacactgaaggaggtagatgaaactcgtaagtgctaccgcatggttggaggagtgctggtggagcgaactgtcaaagaggtgctgcccgctttggagaacaacaaggagcaggtgagcaagaatcattgaataggatcgggtacagtggctgtaaacccagcactttgggaggccaaggcaggtggactctttgagtccgggagttcgagaccagcctgggcaacatggtgaaaccatatcactacaaaaaatacaaaagattagctgggtatggtggtatgtgcctgtagtcccagctactcacctgagcctaaaatgtcgaggcttcagtgagctgtgatcacctcactgcactccagcctgggtgacagagtgagaccctgtctcagataaaaggagggcagcataaaatagcctatgctcattatgctatgctaagtgcaactcttagacaagaggaattgctgactgctgtgggctctgtgacttggctgaattggggtgggaggattggggttagagtaatgtttctcatagtgtgtgtttcacgaatacatgaatcaaaatcacctgaaggactaatttataaatgcagcttcccagacccactgga

SEQ ID NO: 4557 - DNA, 1051 bp, Homo sapiens
cccaggctagagtgcaatggcgtgatctcggctcactgcaacctccacctcccaggttcaagtgattctcctgcctcagcctgccaagtagctgggattacaggtatgcaccaccatgcccagctaattttttgtatttttagtatagagacggggttttccatgttgcccaggctggtcttgaactcccgggctcaagtgatctgcctgcctcggcctcccaaagtgctgggattacaggtgtgagccagggtgcctggccaacacattctgttgataatatagatgcaaataagtagtagggagcggaaaatgtaagaattttcacctgaaaatggatctgaagagtaaaagatattaattgacctaatcgtgcattgagaattgactgtttatcccatttatttgttcaataaataagccaatgggttgtaaacattgtaaacattccacagcatgtggaaaggacatggatttttggagtcaaattgaatctaagccttgctacttacttacctgtaatgatgcaaccttaattacttgatctctgtaaacctcagtttccttacctacaaaacgtttgtactattacctgccttatagagaggtccagacttaagaatatgatgatgtaaatgtttggcactgtgtctggcttttagtaagtggtcaataaaggccagttctcctttccttatatctcttcctttgtctgctccctgacttctaacccctgcattcacgtgagaaaacagttatatcaaggaactgtctaggtcagatctaagggccattttgtaaatttgtgcaaaaagttctggcttacattgaagggatgataaaaggaaagacatggtcctaatcctcagagttcacaatctggtggctgagacagtcaagtaggacaaaaatttcagacttctgtgataggtgccatgatcaaggaggggcacctagcacagaatatgaggccacagaagtgtttctggaggaggtgcctgtctctccttctagaagtgagcagtaaggctgggcacagtgacccatacct

SEQ ID NO: 4558 - DNA, 1067 bp, Homo sapiens
aaggttcgggcagatcggggcatgagccgcgaggctgggcggctacgccaggccagcccgcctctgactcaggctgctgaaagaaatgcggggaaggttctagctcctccgggctggctctgaggacgcgcggttgtggcagaggctgcaaaagcagcaactttagaggcaaggtctccccggggctgtgggaggtcggatccctgaggcacacaggggcctgcgggctgccttggagggccgctgagagcccagcggctcaggaaggccgaagatatgttaccatgcgaatacagatatataagatatatacacgtatatcttaaaacagttttatcttgaacaaaatattttccaaaccgcgatttaagacggtgcctggttccttagtgaatggccagagatagtgagctttaagagacaatactgcaggtctttagctgacagtagcattggtggttcagtggtagaattctcgcctgccacgcgggaggcccgggttcgattcccggccaatgcactttcatttttttccgatccatttcaattctttttctcatctaggattaatcactcttgaataaattaaaccaggtggctgaagactttacattcctccagttttgttctctctcctttaccagtcactttccacaaaggagatgtgacattgcactgtggccctgggactcgggagagacctcgccactcagcccaagagagaacgcaacacctgggaaaggaggacgcagagtacggtcgggatgtccctcatgttctccccactgtttgtatccccgaggagcctcgtctccagaggcccggtggagaggcacagtgtgcgtttttctttatggcctaagtgggttcccagctggagaccaggactcaggtggagagtaaactactgcaggctccagtccaacctacctcctaaaggctggaggacgagatgggttcactgggcagtaaagtcacactggtttttatcaggttgtgactttgtgaattgaggccatttcccactttcttcaatccagaacattccattcagatctgctggcgtt

SEQ ID NO: 4559 - DNA, 1034 bp, Homo sapiens
aattaaagtcaaaatttcagaaaacaatactttttacatccgatgcacttggatatttgtctattctatttattacattaaaaacatcaggtcataatgcactgcattgactttacaagccagtaacaggggttgatcaaccattgcctaaaaagggtatataaagagggagtcatttaaaacaactaatttcagataacagagaaaattatgagagtactgttcaattccaaattcagagcttttcttacggattattcagtgccactttttttaaagcttggactcatgcctaccttttaggcatttatttacagattaacttatcagcaccttgggccccgacaagataagacacaattcaggtaaattttggtaaatattccttgagtgataggaagcaggaaaagtttgaaggagaaggaaagacaagcctaggcaaggatggctatggtggggaggtacaaagaattacaaagcattagtcatccaagcaaagtataatcagaagaccactgacagaattaacagagttcagagataatatcattatactcaatccctactaagattttggtgtttggtctcctagatcacttttttagtaccttcacagacatatggattcataaagaatatatagtaattattcatatttgttttgatttatataaacagtaatcttgtctctcagctccagaaaaccttgcctggtgcttcctgaaggctcacaacatcccagcccggcctccatcacttacttataatgtgttttggggtcttgagggcagggagctttctctttcttctctgaattcctagcatccagctgagtgcctggcacttggtaagtattcacatacacattccttgaattccctagatttcagtttccttcactgtgaaacaaagtgggctaaacgatctccaggagcccttacagtcctaagaatctatgactttgaccgatctgaagtggtccaagacactttgcttcacaggaagctcacatcttccttgtgattggcctgaga

SEQ ID NO: 4560 - DNA, 1023 bp, Homo sapiens
taaaggaaggagagatataggggtttagttagagaaggttgcaaagttcaaaaagaagatttattagtattattactactattattatttatagcctacttgaaaggagtttaaaaagaaaagaatagtaaatgcaggttagaagaggatgataaaggtacaagttgccttacaagactaggagagcagatgtaggaagtatggaaataaattagcattgaagtaaaaagagaaacctcttcctttgatatagaaatgaaaatagtggggatgaatatatatttaagtaaatgttaagattgtaggctcaaagttaagatggtaaggaagttcttgtctactggccttttttccccctatgaacttaagggatatgatcgtcattgaagttgcagcagagatggaataggtatccatctttacactgaagagtttacaaagtgtaaggaaactatggactaacctttgtgagacacagaaaagacactgaagcagtgatggtgaaaggattgtcaaacagtacaggacatactactgagttggagtccacaaatttctaggggcagtaatatacacaagtatgtaatatgcttttgcaatgctcagcattccaagtgcacaagtggagaaggcatgtggctgggtttactatggaggtaaattcacaaggtggattcagaggggtaagggtctatggattttgaagtgctagtgagagtaggagattcatcatggatcaagattggctagaaaaagaagtcatcaggagagtgatgaactgggagaaaataggaggatttaaagaactaagtctcaatgaggttaaagagcaggttgacatagggaaatataatgactctaaggataggagatcataatcagatattgaaatattggaatttaccatttcagagatgagggtactccaaggtccagattcagcaatgtgtttaaattattaaagtggaagaaggactttgaggtcaaaaagtttaagataagtttgttggatagtcatgcatg

SEQ ID NO: 4561 - DNA, 1132 bp, Homo sapiens
ataaagaaaaataattggtgatttatactaccaaattccaaaacttatcataaagctgtagtaataaaaatagtgtggtactagcataaagataggtatatagatcaatgaaaaagagttgagatcagtggaacagaagtgagagcccagaaataaacccatatatctatggttagttaattttcagcaacagtgccaagacaattcaaaggggaaaggataacttcttttttaacaaatgatgaaggaataattaaatataaaccacaacaaaaaaaacttaggcccctaccttatgttctattcaaaaattaactaaaatgagtcatagagctaaatataaaagttaaatctataaaattcaagagtaaatcataggaggacatctttgtgactttgggttagccaaaaagttcgtacataagatgaccaaagcagaagccatacaagaaaaaaattagtgaattttatttcattaaaattgagaacttttgtgcctcaaaggataccatgaagaaaaggaaaagataaacttcacactagcagaagatatttgcaaagtacaaaactgaaaaggacttgtatccagcatacatatctttataactcaatataaagaaggtaaacaatctaaaacataggcaaaaggtaggcatagacattttaccaaaaaagatatatgaaagaaaatgtaatcctcattattagtcattagggaaaataaaattaaaaccacaccaagataccaccatacacccacaagaatgtctataataataaacacagacacctcagcctgggtgacagagtgagacttcacctaagaaaaaaagaaaaagagagagagagggagacagagagagaggaaggaaggaacaaagggaaggaagggaaggaaggtaggaaaataaaaaaataaataagacaatacaaagcattgttgaggaaatggagcagatggaactctcattcattgctgatgaaaatataaaatgctgcagtcactttggaaaacagttgggcagtgtcttaaaaacattaaacataaatttaccatatgacccagcaattctactcccaggaatctaagcaagagaaacgaaaacatatgcccacaaagggacttaaatgc

SEQ ID NO: 4562 - DNA, 1024 bp, Homo sapiens
ctttggctaaacattaagctatgcaggcacaatggtgaccttagtaagccaggcttaactataaaaacaagaaaaaacccaaagacattatcaaccatacattccagagaatcagatttcccaaatttagtccaggcaagttactaaacaagcaaaacattaactacaaatctcagaggagaaaataaagatcccaagatactgatatacaatatattatctgaaatgtcttatattcaataaacaagacagatagaaagaaacaagaaagtgtgatacatactctgggaaaaataacagttcatataaactgtctctgagtggtcctatatgttagatttagaagaaaaagtcttcaaagaaactattcacagaactaatgaaaatgatgtttaaataattaaaggaaagtatgatagcaatgaccccaatgatcgaatgaatagaaaatttcagcagagataaaaatcatataaaagaaccaactggaagttctgaagttaaaatatactagaatatttcataaaaataaaagatcaaataatcaggaagatataataattttaagtgtatttcacctaaaaacagtgtcccagaatatgtgaagcaaaaaaactaagaattgaaagtatagacaacaataatagctggagatttcaatacccactcttaataattgatagaatgcctagaccgtaaattggctagggtaaagaaaatttgagcaatgctatcaaccaacttaatataactgacatttatagaacgctccacccaaagagttcagaatacacattcttttcaagtttatttggaaaattctgcagatagatgatgtactgggccactaaatacgtctcaatgcattttttttgaagaaaattaatcatatgaagtatgttctctgaccacaacaaaattaaattggagatcataatagaaacaaatctgggaaaatgtcaagtatatggaaatcaaatgacatacttatgaaaaaaacccctcatgattcaaaaaagaaatc

SEQ ID NO: 4563 - DNA, 2224 bp, Homo sapiens
ttctctaaagctctattcattatgagaacatagtagcagtccataaagggtctgagagaaagaaaccaagacttaagaattttatatgcattcatgaattttatatgctggtaatctcagtggaaaagatatgctcaaagtaagaaaaaaaagatatttaaatagtgtctgcactgtgaaactgaaacaacaaacatttaaaatgcacatctaaataagtgagcagtatcttaagacttagagtaggtgactctgtagccatgagcatgaatagatagctatgaaaaagaatcaaatagggactttatgaatgaggcctatagttgctgaatgataacaagagatgggctaacaaatctaatgggcacagttggtgaataaaccggtaagtgaaatgttgggccaaggatttcacttattatgtaacaacaaaagagttataggtcagattctcttaaaacaggaattcaagctactatttaatcataaagaaaaagatccaaaatacatcgtgacattttttaagcccattgcggaatgctgtgttaattttttattgctacataacaagtgaccataaacagcaacttaaataacacgtttatgatctcatagtttgtgttggtcaggagtctggatatggcttagctgaattttctgtttagggtctcaaagactgcgctcaagatgttggccaggctgctttctcatctgaaagcttgcctggaaaaagaatacctccaaatacactcattattgacagagtttcatctccttgcagttatggaaaatagggctttggcttcttattagctcttagctggaggctgccctcagctcctaaaggctgtcttcagttccttgcaatgttgagctttcacaacatggcagcttaattcatcaagcctctagatgaattaggagagtctctagagtgagcctgctggaagatcaagtcttaaataatgtaattatgagagtgacatcccatcaccattgccatatcttattgtttagaagcaagtcactggattctacatacactcacggagtggaaatttcatggaggtatgaaatcaggatacaggaatgataggggagataccttagagcctgcacatcacagaatctgtactattatcataatcataagtaaagagataattattattccattttaggtgacacataattgtacatagtcatgggctgcagagtgatattttgatacacgtttacaatgtgtaatgatcaaatcaggataattagtatatttatcaccttgaacatttatcatttctttgtgttgtgaacattcaaacattcaaatcctgtcttctaggattttgaacacatacactaaagtatagttaatcatattctccctgcagtgttacagaacactaaaacttattcctcccatttagctataacttgttagccattaaccaacctccccctttcctttctccccattttccttcccaggatctaataaccacatttctattctctagttctatgagctcatttttttaattgccacaaatgagtgacaatatgtggcatttgtctttctgtgcctggcttatttcacttaacataatgtactccagtctcatccatgttgccatgaatgacaggaggtcatttttttatggctggatagtattccattatgtatatataccgcattttcttattcaattcatctgtagatggtcatttaggttggttccatatcttgtctattgtgaatagtgctgcaataaacatgggggtgcaggtatctctttgatatactaatttcctttcctttggatatgtacccagtcatctagtagtaggattcttggaaaatataatatttcaatttttatttatttatctgtttatttagagacaggagggtcacattctctcccccaggctagagtgcagtggcaccatcataactcactgcagctttgaactcctgggctcaagtgattttcccacctcggactcctaagtagctgagactgcaggcaagtgcaaacatgcctggctaatttttaaaaaatgttttcatagagacaggatctcacttagcctatgcttgttttgaacttctggcttcaagcaatcctcctgcctcagcctcccaaagtgctgggattacagtcatgaaccaccacatctggcatatttttgttttttgatgatagttatcctaactgggggg

SEQ ID NO: 4564 - DNA, 1031 bp, Homo sapiens
tatcttattttattgtagcaggtgaagatgctcccaagagatttaaaaaaatgtttttcaaaatatttttctttatatgaaaaaaactttttcttaaaataaaaaacagcatatctatctgaactaaaaaaaaaaaaacaggaaaaattaagaagccaatatttggaaaatttggtccaaatactcactttaaattgatttcttcaatactagagaaagttagattttcttcctaattgaaatatcacatggttaaaccaggaaccctgggaaaagctggggtatcttttgataattatgaagtgaaagcaagaatttctatttaattatttacaccctgaccaaatagtatagaatttagctcagcaggtgaaccagggagtctcacggatcctgtgtacttaaaggaataacaaagcacgggggcttatggcctgtgaaagccagagtgaaggggagaattgagcagtaataggctcattttttttctttataaagactcattctgggcctggcgtggtgtctcacgcctttaataccagcacttttggaggccaaggcgggaggatcggttgagctcaggaatttgagaccagcctggacaacatggtaaaaccctatcactgcaaaaaatacaaaacttaactgggtgtggtggcacacacccgtagttccagatactcaggaagctgaagtgggatgaccacttgaacccaagaggcctgggctgcagtgagctaagatggtgccactgcactccagcctcagtgactgagtgagaccctgtctcaaaaaaaaaagactcattctggataattgcccgtttctgatttttttcctctagaattctgattttttcctctatctcagtttgtgtctttgtccattaaaataggccacaatgattgatgataaatttgttctctgagatagcacctagaggaacagttatccaaagtgtcctgtgccctgtcaaaggctgaaataaccaccattgctgaaattatgtgtttatagataatgcctcccta

SEQ ID NO: 4565 - DNA, 1067 bp, Homo sapiens
gagtgcagtggcactaccatagttcactgtaacctctatctccccagctcaagtgatcctcctgcctcagcctcccaaagtgctgggattacaggcatgaaccactacacccagcctatcagtcatcaccctgatcagtcagtagtcatcaataccaaggcaagaccctctataagcaaaaagatgatgactcactaaagactcatatgagcattagcattttttagcaataaagtatttttaacttaggatttgtgtatttttagacataatatttttgtacatttaacagactatagtgtaaacataactctttatatgcactgagaaaccaaaaaatttgtgtcattccctttattgtgatactcactttattgcagtggtgtggaactgaacctgcaatatctctgaggtatgcctgtacataattatgtactattttatattggttttgagtcatttcatgcaggtaaatttgattatctcaattaaattgcaatacctttaaagtcaaagactgagtcttatttggactttttattctcatgacagtgaactattggcatggctcaatccattgacctgttttggttcctgatgaagttttgttaatttaaatgagaaaaataaggacagtgaagtaagttttttataaaactaaatttatttggcttataaaacagtttaatattatgcctttcctatattttttgtgttatctctttttctagatgattataatagatgataatttttaaatgtttctatttgtcaaagtacaacattgtccatcctgtgtcagtgtctaacttttccttgtacttattcaaataatctcatagttggaacttattacttattgtgtcacacaatatgctggtaaacactgaaatggggaggggttattttcattctattttagaatggcacagtttctatggtatagtgactaatctgaactaatatgtaaaagattaagattcacttgagaatcattttcaaagaataacttttttaaatgtagcacactgctgacttgtgtaaaaattaaatgtgatactgaactt

SEQ ID NO: 4566 - DNA, 1045 bp, Homo sapiens
tgggcctcgtgctttctatttttgaagtttattaattatttgttcaatttgtttactggtatgcacctattcagattctctatttcttcacatgtcagtttcagcaaaggatgatgtttagatgatggattttacatctttcctaatacatgcattcaattctataaatttttctctgaacattgctttgattacatcccactcattttcgtaagttatgtttttattttcacttaattcaaaatattttaaatttctcttaagacttcttctttgaccaatgtattacttaaaagtgtgttacttaatctccatgtattttagaatttttcacctatttttccgttattagtttttagtttaattccattgtggtctgaaagcagatattgtatgatttctgttcatttaaatttgttaaagtatgttttatgagccagaatgtggtctctcttagtgaatgtttgatatgagtttgagaagaatgtatattctgctcttgttggatgaagtagtctataggtgtccgttacacctaattgattgatggtgttgttgagttcaactatgtacttactcattttctgcctgctgcgtttttctatttctgatagaatagcagtgaagtctccaattataatagtggttcatctatttctacttgcatttctatcagtttttgcctcatgcattttgatgcctattaggtgcatacattttaaggattgttatgtcttcttggataattcaccactttttcattgtgtgatgcccttcttgatttctgataactttccttgatctgaagcttgttctgtctgaaattaatattggtactactactttcttttgattagtgttaatatagtatattttgcccaccaattcacttttaatctatatgtatatttatatttaaagtgggtttcttgtagagaacatgcagttgagttttgtttcttgatccattctcacaatctccatcttttaataggtgcatttagaccattgacattcaaagtgattattgatatagtttgattaa

SEQ ID NO: 4567 - DNA, 1028 bp, Homo sapiens
attctcctgcttcagcctcccaaggtgctggaactacaggcgtgagccaccacacctggcctttttgaaccatttttaagtgtagagttcagtgacatttaatacattcacgttgtgtacaactatcatcattattcatctctagaactttttcatcaccccacattgaaaactgtgtaccccattaaataataactctgtttctctctcccctcagcctctggtaaccactagtctaattcccgtctctatgaatttgactattctacgtaccttttataaatgcaatcatacaatatttattattttatgtctggctcgtttcacttagtataatatcttcaggttcatccatgttgtagcatgtgtcaaaatttctttcctttttaaggctaaataatattccattgtatgtatgtatacacacacagcacacatacacacacacacagcacacacataccacattttgtttatccatttttttatttgtgaacacttaggtggtttccacttttggctgttgtgaataatgttgctatgaacattgatgtacagatatctatagtagaagtatctgctttcagttcttttgggtatatatccagaagtggaataagtggatcatatgataattcagtgtttaattttttgaggaaccactgtactgtgccctacaatggcagcaccattttacatttctacaagcaatgcacaaagtttccaatttctctacatccttgccaacacatgttattttcttattttcttgctttctctgtttttgataatagtcatcctattgggtatgaagtggtatctcattgtggttttgatttgcatttccctgattattagtgatattgactgcatatgtaattttataagatattgccaaatccctctctaaaaggaaatgttgcattcttttttttttgtttgttagttaagcaattattttattgctcaagtacatagacaaatttatgcaaccagggcagaggctgtatatgattcatatttccagt

SEQ ID NO: 4568 - DNA, 1043 bp, Homo sapiens
ggagaggaattctaaaagaacggggcggggttgtggggaagataatcatttgtgctgggaatgaaggaacgctcacagatagtttctaatgactacgaatgaggactttgtctccacattctaatattaaaatatttctgcacattaatcagaattgggaaaggaaaaaaccccacctttattcagtactttcttccccagctttattgaagtataattaacaaataaaaattgtatatacttaaggtgtaaaacgtgttgtaatgtatgtataccttgcaaaatggttaccacggtcaatctaattatccattgcttctgcatagttaatggctttttttggatagtgaaatatttaagatctattcttttagcaaatttcaagtatatgatgcagtattggtaaccatagtcaccatggtctacgtgagctctccacaatttattcatcttgctgaaataaaactttttaatccagtgcttaatgtgtgctaagcactgtgctaggcactggatttactctgggaactctgaaggtcacagagataaggaagaaggggctttttgttttggttttgtgttgtgtttattttgctgggttttatggaatatatgtggggagaaaaatgtaaatattttgtgtaaaatgtagccagagcaataaaactgatttgcaggggactggagaatttagtatttgaccatccacactaaaccacagagcagtgacttggcagagccagaaggcattatcacatctcttctttatataggaggaaacagcttctctaccccgacttaatcctgatacaaaagaaagaaaaattgctctttgctttaattgcctacagtgtgtgtgatcctcagccaccgcctttaccagctggctattcaagtttgtaacagaaattgcagatttgtgaaatctccctggaaagagtcccaggagttcttgtgaagaggatttgctgagttggcaaacttaaagaattcttgttggtagaggcagtacagtccttgggctatgggcctagaaaaactga

SEQ ID NO: 4569 - DNA, 1053 bp, Homo sapiens
gcctgctttttagggagatgaagtgttttgtatccactgtttaggggaagggagacaggtagagtagattacacactgaggaaactttagaatgggtcccctgggctaagtgcggtagctcacacctataatcctagaactttgggaggctgaggtgggcagattgcttgagcccaggagtttgagaccagcctgggcaatatggtgaaaccccgtctctataaaaaaatacaacaattagccgggtatggtggtaggtgcctatagttccacctactcaggaggctgaggtgggaggatcacctgagcccagggaggtcgaggctgcagtgagccaagaccacgccactacactccagcctggtagacagaatgagaacctgtctcaaaaataaataaataagaatgggtcctctaatggggccaacgagaggctccctgtggttgaacatgaagacatagacctggtaaatgcacagcaagtattattacatttttttattcctggactctcctgccactcctcaagcttctcaataaacttccatgtaaaaacaaaacaacaaaaaacaataaaaggctttgtttccccctcgacaaggtgagaaatcttaaaaataggagagaaagagagcaggtagatctgggagggtctctctggcatgccttttgacccccttgtccctcttctcctgggaccattgtctttcttatcgcatgtctccagtctgccgaggccttcctccatcctggctcacctttgctctgtatttaattttcaatgtgtcctctgcagcccctgttctttgctgagactttgctagattctcaattttatcatagaatactcctaccacttgaactaaaaacctaactttcttatgagggaaatgtcaatgtaattacacaaatatatctgataatccatgataattcacaacccttttgagcagacgctgctgtttctcttctcttgtctgaggaccaagaggcagggtcgatgtgctcctagctacccactgcctcatcctctttttcaaaaagccttttttt

SEQ ID NO: 4570 - DNA, 1040 bp, Homo sapiens
cgccactgcactccagcctgggcaacagagcaagactctgtctcaaaaaaataaataaataagtaaaacataaaaacacacgatgtatatatttcactttaagcaacaaagagcaattctgagtttgttgttgttgttgttgttattattttgagacagaatctcactccatcacccaggctggagtgcaatagctcgatctcggctcactgcaacctccgcctccctggttcaagtgattctcctgcctcagcctcccaagaagctgggattataggcacccaccaccatgcctggctaaccctttatatttttagtagagacagggtttcgccatgttggccaggctggtctcgaattcctgacctcaggtgatccacccacctgggcctcccaaatttctgggattacaggcgtgagccactgtgcccggccccattctgttttaatttcaggcagattttgttactttacttgtgatggatcaatagtaatcttagatgcaccaaaaagtcaccatctaaaactgtagagttttcaaaatgaaataaatgttgttaagaattatcatttagagccaggcacagtggctcacacctgtaatcccagcactttgggaggccaaggcgagcaggtagcttgagcccaggagttcaagaccagcctgggaaacatggtgagaccccatctctacaaaaaatgcaaaaatttaactgggtatagtggtgcatgcctctactcccagctacttgggagtctgaggtgggaagattgcttgagcccgggaggtggaggttgcagtgagccgagattgcatcactgcactccagcctgggcaacagagccagaccctgtctcaaaaaaaaattatttaggaagttcaactcaagctggtctttacactccttttaattatttctaaaaatgtgatgagttgtgtgtcagttattttatcaggaatgcaaagctcattttcagtgcggatcggcaaactgtttctgtaaaggtctagatagcaaatattttaggctttgtggaga

SEQ ID NO: 4571 - DNA, 1105 bp, Homo sapiens
tgttcaacttcatataattaaataacttatatataaagatataaaagattttatatcgcttgaacccgggaggcgaaggttgcaatgagccgagattgtgccactgcactccagcctgaccgacacggcaagactccgtctcaaaaaaaataaatattaaacatttctcatttttaatttctaatacagtaaatattaataactataagctacagaaacacaaagtttttagggtcctaaataatttgtcagtatataaaggggtcttgataccaaaagaattgagaatgactaatttaggaaaagattgatgagaataatctaggctcttctttacatcaccgtacatcaggttcatgtgtatttttagcatgtcaccctctctttgtttttcagagatcagagacttaaagctctatttctgtcccagattcttctttggaagtaagaaagttgtcagtcttccaaagataacaattctttttttttttttttcttttagatttgatggtagagtggtggcaaagcttccttttacccctctttcttacatccaaggactgtctcatcgaaatctgctgggagatgacaccacagactgttccttcattttcctgtatattctctgtactatgtcgattcgacaggtgagtgatcacatctaccatttaatatgtatatttttccttgctgtcataccaattagcttttacttttataatactagaaatgtttacccattgttcctgagttctttcagttgctcattttagaatttcagtgtatcttccaaaagccattttaaatggctgtaggtctagatgactgatccttagggatgagaagtagtgataaaaccaaacatggattccacatcccattcttagagctctcaggctccttctttattacaactgcctaaagctgcaaaagtagagagtgggtttggtcttcccagtaccatttcttcattatataccagcaccatttagcggctcaggagcacaagtaagtttaacaatgtggtaattttaggttattcacagttgagataaagtttaggttatagaatttacatttggccaacttggtgatttgacattcg

SEQ ID NO: 4572 - DNA, 1050 bp, Homo sapiens
cacctacacccagtcgttcagtacctttgcggaagtcagtcttcttacttcacggcaaacccaagctaaactaatattacgaccacagaagttgggctgaggtagaagtcaagactatcccaataactggattctggccgagaaaaaggcgcgcgccagcaccccagtcagtaaaatctaccgggcaaagttcgccgccgccactatcctcctctggctctgaaatagttccaattctcgcgagattcggcctgactaccagcccttcagctccagtgagttgcgggttggtttcctctagactctcgtggccacaccgttctccgatacgagcctttccggtgctatgccccggaagcggaagtgcgatcttcgggctgtcagagttggtctgttactcggtggtggcggagtctacggaagccgttttcgcttcacttttcctggctgtagagcgctttccccctggcgggtgagagtgcagagacgaaggtgcgagatgagcactatgttcgcggacactctcctcatcgtttttatctctgtgtgcacggctctgctcgcagagggtgagagcgggtatttctcagacgtttgatcagtccccgggaggaagggccccggggtcccctgtgccaccaggggaaagatcgcgagccttacttgcttgagaggctcatctactccacttcagggaatctctgggcaactcgtgaacaggagcaggaggggagtatggagtcgattgccgagttttctttggtctcaggtagatttcacttgggtatttgtggagacaccttcacatcatgttactgttgttttggctgaagagtcagttgtattagcctttgaaaaaagttaactatgggtaaatacaaagcgaaaagttggaattcctccttctccaacagtaaccactttgtttgttgtgatcattccagtcatttctctattaacatgttgcttttaatgttttaggcataacctgggtcctggtttacaggacagacaagtacaagagactgaaggcagaagtggaaaaacaga

SEQ ID NO: 4573 - DNA, 1024 bp, Homo sapiens
agagagatctaagagggcagaagccctgccctgccagtattttttgcctccagccacctgctctgttctgagacatgcctgagaccagctgcctacagggggaccagggtctgtttctgctgttaaccttggttccctcctgcattcctgcatgtggggatgtagacaggaagcctgcaggtatggagcaattgaagcagagtctagatagagcccagactccttacttcccatagtactattctgcattttgtagtgctgcttatgcttttcagtgtttccacatctatttactaataacatcatagtacaacagcaagaacatggcctcagaactcaaagttctggaattctaatattttatttgattgtcagtatttctgtgagatagataaaataggaattatttcctctgatctgcaggtgaggaaactcagtcacagggagcacatttatccatacttgtggagctatagtataactagtattaggacaaggatagccaacatagttaaaaaaaaaaaaagtactggacttacagtcaagaatcctgggttcacatatcagctactgtcctgctatgtaacttagaatacatctgttttctgatgcttaattttattatctataaaataaataggttggactagaaaaagaaaatatggcggatggtggacatctttagtcctttcagtcctttgcatgcctgtggcagacatggctaattgatcatagctcactgtcctgctgagccagatgcagcccagagtcctcagtacagggctcctgggagccagcaaccactgctgaaaatcagggttagcacataaaaggaaattgcttgccattcctcaactagctctccaagtttttttccagtctagcattctgggcatagaaaactggtctcctcccttccaacctcatgctctctacatcacgtcatcctggaacactccttttctatagatctgtaggaaaagtaaaggactaaaataagatctaggttcaggccccttctctt

SEQ ID NO: 4574 - DNA, 1113 bp, Homo sapiens
gtaactgcagttatccccaggtacctgggagctactccatgcagccagtcaccgcacctccatcctaccctcctaccagctattcctctacacagccaactagttatgatcagagcagttactctcagcagaacacctatgggaaaccgagcagctatggacagcagagtagctatggtcaacaaagcagctatgggcagctgcctcccactagttacccaccccaaacttgatcctacagccaagctccaagtcagtatagctaacagagcagcagctacgggcagcagagttcattctgacaggaccaccccagtagcatgggtgtttatgggcaggagtctggaggattttccggactaggagagaaccggagcatgagtggccctgataactggggcaggggaagagggggatttgatcgtggaggcatgagcagaggtgggcggggaggaggatgcggtggaatgggcagcgctggagagcaagttggcttcaataagcctggtggacccatggatgaaggaccagatcttgatctaggcccacctgtagatccagatgaagactctgacaacagtgcaatttatgtacaaggattaaatgacaatgtgactctagatgatctggtagacttctttaagcagtgtggggttgttaagatgaacaagagaactgagcaacccatgatccacacctacctggacaaggaaacaagaaagcccaaaggtgatgccacagtgtcctgtgaagactcacctactgccaaagctgccgtggaatggtttgatgggaaagattttcaagggagcaaacttaaagtctctcttgctcggaagaggcctccagtgaacagtatgcagggtggtatgccaccccatgagggcagagggatgccaccaccactctgcggaggtccaggaggcccaggaagtcctgggggacccatgggtcacatgggaggccgtggaggagatagaggaggcctccctccaagaggaccccagggttcccgagggaacacctctggaggaggaaacgtccagcaccaagctggagacaggcagtgtcccaatccgggttgtggaaaccagaacttcgcctggagaacag

SEQ ID NO: 4575 - DNA, 1036 bp, Homo sapiens
cgccccgactttcttaggtgcagtggagtagtgcataggtggtgcatcctgagggctcccgaggggcatcacctgcccagtggggaagtgagcctgctttcagttagaggcagggcctgtgattgttgggtcacagctgggtgtcttggtggtgggaggaggaggaggagtggtagatgtttctccaggccctcatctggctcttgtaggcatagctcaagatagtggtctgtgcctggtgtcatcacttgcttttggcctcctgctgtgcagacatggtctctcagctcacctctgggattcctgtgtcgtcttcccattgagggcttcaggatgtctctatgtcctgagtcacccctttatgaaacaacctagattactttcatccctgtgttgtctttcttatccttccatctccttttgtcctccacttcccccaaagggaatttagtctgaattttaagcctttgggaaaggaaaaaaaaagtagtaatgtaattttctttatggttactgaagtgacttgaatttcttgtgatttgctggactttgcgtatctggttagtttgggagaagagaggtaaagagataactgggacttgcaagttcagagaaaaaagtatgtatgactgggaagggtggcagggtgattggtgaagtaacaggaagggaaggcaggaggtgtaggtgggaaagctaagagagttggatagagggagtgttgatagcacatgtgggagtttgtgccagtgcccatttcatgactctgaagacctttacaggggtcatgggcctattttaacccatcttaaattgggtttactgtttagattgccatatgtggtgatttattgtctgaatcccattcaggcgtatctgtttgggatcattcttctctagaaaaaaacaaatccccaaaagtggctccttgtagcgggtgatgttgggagcagcttctggccctggcgggactcccaagccctctctgccctgctggccagtctctgagggcttttgcctctctattggccacttg

SEQ ID NO: 4576 - DNA, 1027 bp, Homo sapiens
tactacgcaaactaccattattccccttaatccatgtcttcattattaccttgtattggatgtgaatctgtgattatttgtgcatgaattaactcttttttcccttaacccctgtggtatagttttggtggcattaatttggaggatctcaacttcagtacaggagtttactttgtgtcttgtttgctactgtaatgagtaattttaaaaagtttttcttactcatagcatagattccagcctcaaaatcctctctcaggagcccagcaatttgtggcaaaggatccccaagatgatgacgacttgaaactttgttcccacacaatgatgcttcccactcgaggccagcttgaagggagaatgatagtgactgcttatgagcatgggctggacaatgtcaccgaggaggctgtttcagctgttgtctatgctgtggaggttggtttgctgttggcagaaataatcttacaggttgaatgtgataggcttgtgtgttgtttaaagtcggtattgcaagaaaagaatccaaatgtcactctgatttcacagaattgtcattgttgaagttgttttctgttttttttgagacagcatcactttgtctcccaggctggagtgcagtggcacgatcatggctcactgcaacctggaaatcctgggctcaagcgatcctcctgcctcagcctctcaagagctgggagtatagacgtgcgccaccatactcagctaatttaaaaaaaaaaaattttttagggatgggggtctctctctcttgcctaactggtctcgaattcatgggctcaagtgatcttcccgccttggcctcccaaggtgctgggatttacatgtgtgagccatagcacctggctaaaagttgttttcttttaagaggagaaactcattataatccaaatagttgtcttcagttaatagactaagcttttcagaaaggttatttatggcataactcttctggttgatctgatgttttgtcaacaggggaatggtttttaaggaaagaaatgaa

SEQ ID NO: 4577 - DNA, 1036 bp, Homo sapiens
tctgtcacatgctggtttgtttgcttgcttgtttacttgcttgtttaccaatagagttgacctgttattggatttcctggaagatgtggtagctacttttttcctattttgaagccattttcgtagagaaatatccttcactataatcaaataagttttgtcccatcaattccaaagatgtttccagtggtgctcttgaagaggaatgagtaccagttttaaattgcccattggcatttgaaggtagttgagtatgtgttctttattcctagaagccactgtgcttggtagagtgcatcactcaccacagctgcctcctgagctgcctgagcctggtgcaaaaggattggcccccattatggtgcttctgaataaatcttgccaagatagacaaacaatgatgaaactcagatggagcttcctactcacgttgatttatgtctcacaatcctgggtattgttaattcaacatagggtgaaactatttctgataaagaacttttgaaaaactttttatactctaaagtgatactcagaacaaaagaaagtcataaaactcctgaatttaatttccccacctaagtcgaaacagtattatcaaaacacatgtgcacacagattattttttggctccaaaactggattgcaaaagaaagaggagaagaatattttgtgtgttcctggtattcttttataagtaaagtttacccaggcatggaccagcttcagccagggacaaaatcccctcccaaaccactctccacagctttttaaaaatacttctactcttaacaattacctaaggcttcctcaactgccccaaatctcttaatagcttctagtgctgctacaatctaagtcaggtcaccagagggaagagaacatggcattaaaagaatcacatcttcagaagagaagacactaatattattacccatatacatgatttcagaagatgacataagattcctcttaaagaggaaatgtcaggaatcaagccactgaatccttaaagagaaaagttgaatatgagtca

SEQ ID NO: 4578 - DNA, 1040 bp, Homo sapiens
gtgataagaacagtaacaataacagctagtgtccattgtttattactggctgggtgctatactggctacttttcatgtattaactcattcagttctcaccacatccctttcttgcgcaaccttccaccgcaacaggtaggtgctgtttttccacatgtgtgaaatggaaagctgatgcacagagaacaaactggcctaaactgtttgttcttgcagccaggaagtggtggtgctgggactcaaacccaggcattcttgctccagagccatcacctgacttctatccatgatgctgtacttctcctctggctgcctcactggtagctggccaggctcctagctcagtgtaatttataatgcactttctgcttgtaatgattgactgctgtttcaggagattacggtgatgataactaaggtagacttgtaggttgtaggtcatttgagggcttaaattcttagcatttatttaatctctgtctttttcaattgtagaacaattccgtgttgaactattgactccctaccatgattggaaatctcagttttgttttgtttctaattttttttaattccaagcagggcctaggacagtgtgtgtcatagagcaggtgtttaggaatgattgtctggctcattacttgagacaaacactctcacactctgttggaataaagaatcccacagtcctggcgcttgttttgctgctgtgcatgcaggagaggcacgggccactggtcgtcttctgggctggcaaagccatctgacttcataggaatatagaggtagcaattacaactttattccctggcaacaaattatcaggatgactgttaagaagggcctgctcttcgaagttaaagtttactttcacaggacataatctctaaagcgcagttatctttatataaataacatgcccaaaggcagtgcctggtttaataacaaaataaaactgttttcccataagtctccacactgaataagtgagtaaaacagatacttttgaggttcccactttattatgctgacaaaggagc

SEQ ID NO: 4579 - DNA, 1044 bp, Homo sapiens
gtgaatcacctgagggcaggagttcgagaccagcctggccaacatggtaaaaccccgtctctactaataatacaaaaattagctgggtgtggtggcgcacgcctgtaatcccagctactccagaggctgaggcaggagaatcacttcaacccaggaggcggaggttgcagtgagctgagatcgcgcctttgcactccagcctgggcgacaagagcaaaactcccatctcaaaaagtaacaatatgtatcctgtcaaaaactctcattgccacttggaacacatagcctagttatcagtttcacaactattctcaaagacttagtaagaatatattagaagtccttactatcaatgcagttactgaactccgtaaaaataatttccacagtggtgcaaatcgattagtatagttgagttgaattctttatcacagctttttgacaggtctttattgatagcttcactatgtaagttttctttctcaatgccaagtctgacagccctgggtttcaactcaactctgccacacattaactgtgagactttgttaacctctgtctctgacctttaatattttcaagagcaaaatgaggataatcatagtactgacttcataggattgttctaaagattgagataaggttttaacacagtgcctggtccacagtaaatattgaagatatggaaagttcaggaaacgggccaggcgcggtggtgcatgcctgaaatcccagcactttgagaggccgaggcaggtggatcacctgaggtcaggagttcgcgacaagactgactaacatggtgaaaccgcatctctactaaatacaaaaaaattagctgggtatggtggcacatgcctgtaatccgagctacttgggaggctgagacaggagaatcacttgaaccagggaggtggaggttgcagtgagctgagatcacgccattgcactccagcctgggcaacaagaagaaagttcagaaaatggtaatcttattaattgaaggtagacccagaaagtacttttctttaagtactttaaagg

SEQ ID NO: 4580 - DNA, 1060 bp, Homo sapiens
ccgggaggcagagcttgcagcgagccgagatcacaccactacactccagcctgggcgacagagtgagactccatctcaaaaaaaaaaaaaaaaagtttttggcagttgtgctcttattatctgaaacaaaatccagatgcaaatgaactctttgaatcctttcctttctgcctgtttctacctgtaagccctccgggaagattctgtttacaactgtatagctacttgaccaccaagaaagaagaaatggagtatgcttcccattctctccttaccataaatttgtctattattattgatgattatttttctttctgttttctttatagatataaccaagaactaaaagctaaagcacacaaataaaagagttcctgatcacctgaacaatctagatgtggacaaaaccattgggacctagtttattatttggttattgataaagcaaagctaactgtgtgtttagaaggcactgtaactggtagctagttcttgattcaatagaaaaatgcagcaaacttttaataacagtctctctacatgacttaaggaacttatctatggatattagtaacatttttctaccatttgtccgtaataaaccatacttgctcgtatataccccctgcctccttctgttccagtcagccaacatatgtacataaaagaacacacaaattcaagaagttggaagattaaattatctgcttatttagtgtaggatggtcaggtagctagctataagtgaaaggaaattttgctgaagagactgagaaatgggtagtggaatgactatcaagatgacctcaaactatttaaaaacattttaacttgccatgaagaatcttgatgatttttgtataaatgttgtataaaattcttttacagctacagatttttaaataggatcattgtaaagattaatgagataatgttttaacatagtgcctggtccatgataagtgttaaatttttcaattaccctcagtaactgataatgtagcagaaaatactctatattcagacagacctgaatttgaatcccagctctatgacttat

SEQ ID NO: 4581 - DNA, 1072 bp, Homo sapiens
ggatgagaaaagcaaggagctagtcttataggtcaaggaagatgaggtatagttaagagtcatcagtatcacagaacaggccagcagggctttattaggtatgtagaactattataaaccaaggatcttgggagatattaatatctgctggccagacctaaaaaaaactgaaggcccaaggaaagtgactggactcactggaaagtatctaacaaatactttggattccaaagtatttccaataccttgaagattcctttgaaaacatcaaagcacaaactcaaatctgcacaagattacaaaagcacaattttggtgttatttttagaatgcaatacacaaagctatgttcatttctctcagcaagcattttcctgggtagtagtaatagcttaggaatcaaatgccacttttgtttttccttttttcactagtttgaaataccacaaatcacaggtgagtcagtcctcccagaggaaaagacagtcctagggagaatcacaggcctggcagacaagaccacactgagagcagtagaaggaacctgcatgcttaagggacagaggactgtgttgtgttctcataatagaccgctggatgaagaagtggttaaaaaccaaccctcgaaaaacaaaaatccctggctaatcctgaaatatatttaacttgaagtctttggatgatttttttaaggttaaaaaaaagtttaggattattataaatcaatatttataaataagcaacaatgtatttggaatttttgtttacctgattaaatatgtttttggtatgtgtatactgtggaaatggtgaatttgtacttggacttgtggtctgtggactttgttgggtgcctctgcctttctcccattttctgcagccatatccctattgtcaacctcccttcccatgggctaaagcgagggagactgagcagaaaggggtggattactgcagaattggtgggggagtgcccataccagagtcacctgcaaatactcatccatgcattttcataaattcctccaaggcaattaaattcagataactgtttaaatgacctacttctcac

SEQ ID NO: 4582 - DNA, 1011 bp, Homo sapiens
tggggcatgggaggaccagagacgaagggcttggaaggagacccccacatgcatcatttcctcctcttcacagtgtgctgggagtccagccgtgcactgtgccagatgcctcaggaggagaaccctccccagtgtactgtgaaggatgacacagcacttcttcctaatgacacgcgaccgtcctggtgcctctacatggttgatgcgggcagtgtgggaccctcagttctaggactggtccgcagagaaagcacccaggagcagagcgcttcggagcggtcctcagtggcgccacctgctggtgctaatagggacagccacaggcctcttgcagactggcccaccctgcctacttccctactgacaagttctttggtatttcaaaagggagaaaccactataaaagacaagaggaagggcaggtactaggtgtttcatttccagaattaaaaaaaaaatccatttaagacgtaccactgttttaccggactgaatgggactgtagtgccaagcacagccaggaaatagagaaactgttattatggaagggaatttgttcacatgggaaagcctcattaaatagattctatgtgtgatgtttgagtgaccaatgaaaatagctggcctcagttctgcatggcacactcccaagagcaacagttactattatcacaagcctggtataaataagatagaagcagccctggacccacagccagcaacctgggttattggcccagctctgtctttgtgtgcacatgtcatttggacatcttgtcacctttctaggtcctctgtaaagtgggaaaacagagtggagttggattgaatggtctccaagatcatttccagctctgacctttggtgttctcaggatttgtaaagcagagataggtaaaacacaaaagcagacccacggaccgacctttgtataactttggagtgtggttgctcatgcacatgtgaagtgcaggcagatcaaggttctgtggctttgtctgccctgtccat

SEQ ID NO: 4583 - DNA, 1035 bp, Homo sapiens
aaaataagaaaatctttgtgtaaaaattgagcaaggtctatacatgtgatttttaacagctttattgaggtgtaattcacataccaatatgattcacttgtttaaaaacatatagctcagtggtttccatcaccacaattttagaatattttcatcacttcaaaaacaagccctataccttttggctatcatttgcctacttcccacctcaccctcagccctaggcaatcactaatctactttctatctctatagattttcctgttctggacatttcatatgaatgagatcatataatatgtggtctttcatgactggcctttttcatgtagcataatatttttaaggttcatccacattgtatcatgcattcagtactttattcctttttatggctaaatcataatccattgtatggatataccagattttgtttattctttcatcaaatgatagacgtttgggttgtttctatcttttggctattatgactgatgctgctgtaaacactgtgtacaagtttttgtgggaatatatgttttcagttatcttgagtatattcttaatagtagtattgctgagttatatggtaactgtgtttaatcatttgaaaaactagtagagttttttccaaaatggctgcaccatttaccattttacattaccactagcagtatttgagggttctcacttctccatattctcaccagtatatgttagtatgactttttaattctagccatctcagtgggtgtgaagtgatgtctgattgtggttttaatttgcatttccctattgactagtgatatcgagtatctttttatgtgcttattggccatttgtatatcttccatggagaaatacctattcagttctttgcctatttttaaattaagtcatttttattattgacttgtaagagttatatgttatcaataaaagtcccttatcagagatataatttgcaaatattttctcccattctgtgggctgtctgttacttttcttgttggtgtcctttgaagcaggaagttt

SEQ ID NO: 4584 - DNA, 1029 bp, Homo sapiens
tggaagcacaaggaaatacattttcttagatagaggaaatatggtagagaattctggtagagatgggtgtgattttagccttagaagccaggataaaaattgtaattctatttaatttgaatcccatatcataggaaattggaattccttgtatgcagcttaattttgactatactgaattgttactttgatgcaactaggtcaaactaaattggaagagattaaagtcagaggctctagaaatagaaagagacagacctgatgacatcaatagagaaagtcggcaggacctcctttatatcttttcagggagaaagaatagatacttaaataacacatgtggttgtgatagagtaatgattacaaggtgactctgttgcaaaggccattgagagaaattggtaatgatgctgtttattgaaaattaattataataaattaggaagggattgctttttggctagatgagtaaaggtaacagtttttgccatttttaacattttaaatttctgatttctgtttgatgggcaagaggggtttttgtactttttttttttttttttttttttgagacggagtctcgctctgtcgcccaggccggactgcggactgcagtggcgcaatctcggctcactgcaagctccgcttcccgggttcacgccattctcctgcctcagcctcccgagtagctgggactacaggcgcccgccactgcgcccggctaattttttgtatttttagtagagacggggtttcaccttgttagccaggatggtctcgatctcctgacctcatgatccacccgcctcggcctcccaaagtgctgggattacaggcgtgagccaccgtgcccggcctgtacttttttttaaggtaagtaaaactgtgagtgatcagcttgacctaacaaacagaagtaaattaaagagataaaaactaaaacaaaaaaggaaagaaataagatgattcattcttttgttctctcatttattcaataaatatttattgagcccatgtcagtatttgtga

SEQ ID NO: 4585 - DNA, 1073 bp, Homo sapiens
gaattatcttgtacaacagcctggtcgcttctttaaatttcagttttgtaagttgttttgctcaccaaagtgtccttttcatgggctctcatgctcgtgagtagggttttgttgtcatctgtatcttgctgttacatccagtaagtttaacattcatggtaacgatatttttcaagtgtttctacagtgtaaggggctcattggctgcaagattgctgtgaggtatattatagatgatagatactatgattttctgtttatttgttttatttttgttgttgttgttctgagacagaatcttgttctgtcacccaggctggaggacagtggcataatcttggctcactgtaagctctgcctcctgggttcaagcgattcttgtgcctcagcctcccaggtagctgggattacaggcatgtggcactatgtctggctaatttttgtatttttagtagagatagggtttctccatgttggccaggctgggcttgaactcaggacctcaagtgatccacccaccttgtcctcccaaagtgctaggattacaggcatgagccaccgcacccaggtggtagatattgtgatatcaagggaaaatattgatgccaggaaagaccttaacatcagaataagttattttcacaagaaatatttttgatatagatacatgtggcaaaataaaactattagattattaactatgaaaaccaattttgttagaattttgaagaatactatgcatctactttttaacaacttaattttttttttttttttttttgagatggagtctcagtctgtggtccaggctggagtgcagtggtgcaatctcggctcactgaaagctccgcctcccaggttcacgccatcctccttcctcagcctcccgagtagctgggactactggcacccaccaccatgcccagctaattttttgtattttgtttagtagagatgaggtttcaccgtgttagccaggatggtctcgatctcctgatctcatcatcctcccacctttggcctcccaaagtgctgggattacaggcgtgagccaccgcacctggccaacaact

SEQ ID NO: 4586 - DNA, 1191 bp, Homo sapiens
atatatttaaccaaggaggtaaaagatctctacaaggagaactacaaaacactgctgatagaaatcatagatgacacaaacaaatggaaacacatcccatgctcatggattggaataatcaatatcatgaaaatgaccatactacccaaagcaatccactgattcagtgcaattcctatcaaaataccaacatcatttttcacagaattagaaaaaacaattctaaaattcatatgaaaccagaaaaagaacctgaatagccaaagcaatcctatgcaaaaaaacaaacaaacaagaaaacagacgtagaggcatcacattatcagatgtttgccacaaggctgtagttacaaaaatagtgctggtataaaagtaggcacatagagcagtggaacagaatagagaacccagaaataaagccaaatacttacaaccaactgatcttcaacaaagcatagagaaacacaggctgaggaaaggacaccttatttaataaataatgctgggaaaactggataaccacatgtagaagaatgaaactggatgcttatcccttaccttatacaaaaatcatctcaagatggttcaaagatgtaaatctaagacatgaaactataaaaattatagaagataacctaggaaaaactattctggacattggcttaggcaaataattcgtgagtaggaccccaaaagcaaatgcaactaaaataaaaataaataaataggacctaattaaataaaagaaacttcagtacattaaaagaaataactatcagaataaatagacaacccacagagtgggagaaaatatctgcaaactatacatctagcaaaggactaatatctagaatctacaatgaactcaagtacatcaacaagaaaaaaaaatcccatcaaaatgtgggcaaataacatgaatagacatttctcaaaagaggatataagaatggtaaagaacatatgaaaaatgctaaacatcactgatcatcaggaatatgcaaattaaaaatacaatgagatactgccttactcctgcaaaaatagccattattaaaaagtcaaaaaataatagatgttggcatagatgtggtgaaaagggaacacctatacactgctggtaggaatgtaaattagtacaaactgtataaaaaacaatatggagatttcttaaagaactaaaagtagatc

SEQ ID NO: 4587 - DNA, 1062 bp, Homo sapiens
tctgtaggaatgatcctagctcttctttgtacatctggtagaatatggctatgaatccgtctggtcctgggccttttgtttgattggtaggcttttactgattcagtttcagaggtcactattggtctgcttgaggattcaatttcttcttggttcagtgttgggaggatgtacatgtccaggaattactcatttattttagattttctagcttatgtgcataacggtgttcatagtagtctctgatggttctttgtatttctgtggggtcagtggtaatgtctcctttgtcatttctgattgtgtttatttgtatcttttttctttatttgtctagctgtcaatttatcttactttaaaaaaaaaaacaactcctggattcattaaccttttgtatgattttttgtctctatctcctccattttagctcttgattttggttatttcttgtcttctgctagctttggggttggtttgttcttggttctcaagttctactagttgtgatgtttgattgttaacttgagatctttccaactttttgatgtgggtgtttagtgctataatttccctcttaacactgccttagctgtgtcccagaaatactgatttgttgtgtctttgttctcattcatttcaaagaacttcttgatttctgccttaatttcattatttacctaagagtcattcaggagcaggttgtttaatttccatgcaattgtatggctttgagcaattttcatggccttgatttctgttttaattgcacagaagagtatggttggttatgatttcagttttcttgagtttgctgagggttgtcttatgtctgattccgtggttgattttagagtatgtatcatgtggtgatatggtttggcgtgtccccaaccaaatctcatcttgaattgtggttcctataattctgacatgtcatgggagggacctggtaggagatatttgaatcttggtagcagttacccccacactgctgttctcatgataattagtgagttctcacgagatctgatggttttataaggggcttttccctcttttact

SEQ ID NO: 4588 - DNA, 1033 bp, Homo sapiens
gatgctcctcgagaagagcaaccccaagacacataatcattagattcaccaaggttgaaatgaacaaaaaaatgttaagggcagccagagagaaaggttgggttacccacaaagagaagcccattcagactaacagcagatatctttgcagaaaccctacaagccagaagagagtgggggccaatattcaacattcttaaagaaaagaattttcaacccagaatttcatatccagccaaactaagcttcataagtgaaggagaaataaaatcctttacagacaagcaaatgctgagggaatttgtcaccaccagacctgccttacgagagctcttgaaagaagcactaaatatgaaaaggaacaaccagtaccagccactgcaaaaacataccaaattgtaaagaacatcgacactatgaagaaactgcattaactaatgggcaaaacaaccagctaacatcataatgacaggatcaaattcacaactaacagtattaaccttaaatgtaaacaagctaaatgccccagttaaaagacatagactggcaaattgggtaaagagtcaagacccatcagtgtgctgtattcaggagacccatctcacttgcaaagacacatataggctcaaagtaaagggatggaggaatatttaccaagcaaatggaaagcaaaaaaagcaggagttgtaatccgaatctctgataaaacagactttaaaccaacaaagataaaaagagacaaagaagggcattacattaatggtaaagggaacaatgcacaagaagtactgactatcctaaatatgtatgcacccaatacaagcgcacccagattcataaagtacatgcttagaggcctacaaagtgacttagactcccacacaataaaagtgggagaatttaacaccccagtgtcaatattagacagatcaacgagatagaaaaataacaaggatattcaggacttgaactcagctctaaaccaagcagacctaatagacctccacagaactctccacctcaaatcaacaga

SEQ ID NO: 4589 - DNA, 1069 bp, Homo sapiens
atctccaaatttctcttaattctgaatcttcagagggggagagtggagaatgcattgttctgatgtatcctcctggagaaaaacatgattttaaaagttagcatgttgttacgtattcatatacattgttgtataagaagacatttgattcttcatgcagtcacccatgttatgaataaagagtcaatagaagaatttataattatttccaaatcaatgttgaactgactatatagcatacatatgttgaagtctaagagaccaaaaaccaagctcataatatatttaatgcaatgttttagagattagtcctttgtataaaatgtattctaagaaatggagattctaaatgcctgtgttttctcatttggatatattaaaaataattaaattttagtgctttttttcctaagcttctccctcccccaagtttagtatctaattttgatgttcatgggaaaaatactaagcttactttgtgtaagtttttaagggatgtctttaatacacttttctatacaattaatttcaaattttgatgatctaggatgattgttgagaatactgctgcttgggaattataaataaaaactgttgaactatttttatttgcaaacttattttttgtttccttatagaacgctagccctaattaaaccagatgcaatatcaaaggctggagaaataattgaaataataaacaaagctggatttactataaccaaactcaaaatgatgatgctttcaaggtaatttttttatcattttcagttatgtaatgtctgattcctttttaaaaaatcattttctgtctttcttgtcattgtttaaaattaaaaaacctcgtattgaatgacaaagaatagaatagtaacttaaccaaaatgggaactgacaggagttcatctagaatgttactgacaaagccggccccctaaaagatttgatcttttcctattcagtgtcatgaagcccatatacaaaaccgaaagtgagtatcaagcagtgcaggctttattcagtgtctgtggaattgagaaacaggagtgtggctcacaaatcaacttct

SEQ ID NO: 4590 - DNA, 1052 bp, Homo sapiens
ccttcactggcaaccaaggtatccaggttctctcatcaaacttgactagaaggctggcgtgacccatggacagaaggaagagcagtgtagtgcgtggcccacctgagagctacatgggaaaggagaaccccctacccccagcaaagggaggcagtgaatgagcacgctacccagaaggggaaactgtgctttttccacagaactgtgcaacccatggatcagaagatcccactagaaaatctaggccactggggcctagcgtcccaaccctagaacacgattcttacagcttctcagctggaatctacttaagcctactgaaaactcctcgtgggaggggtgaccaatttaagttgttgagtttcaggtatgcacaaaatatccagatgaagatattgaagattagttggagaaatttatccggttttcaggagaaaagttgggactggagataggaaattagcgatttcagaggtggagtagtttgtgtgatgaggatatggccatagaaatacgtggcaagtgtaatggagaaagacgtagaagatgagagaatcaaaggtctttgggggtggatgttcaatggctcttctatgtagttaaaaatataccttgggactggcatggagaggaatattgagtcaggagtgatcagaggtggttacataactatttttaatagagccaaatgatacaaatgtcaaaggaggatgggttttctcaggaaaacagaaatacaattcagaagacgtatgggggaatgaagagaatattaatttatttgtctgaccaccgaagtacttgaagtatggtagaaaatgcagcctctgtttcagagaagatgtggcttgggggagaatcagaatttgcataagataggaaatttagggccagatccctttcagtgacttgggaggatggatgttgtttgggagtttttatatcattgagtaggaattacagagaactaacaagggttatgaaggacaggaggaatttgggattgggtgaagaagcagcacagcatattgctgtagtgattacaggtatag

SEQ ID NO: 4591 - DNA, 1036 bp, Homo sapiens
tggggtattaacttttttagaatgacacagctgaacagtgttaataatagtgtgtcaagattgcaaagtcgacatactcatttggtttaagcaggaatcctagaagcaaatggatggggataagaataggtcattttctattcaccatcctttactattaagggaaaggaaaagaacactagctaaggaagggaaagggaagtgatatcataaaagtagcaaccttcattttacattctgtctgtttttctttttttgctttgttttgtttgtgctaatttgggaattgtgtactccgaaacaagtagaaaagtgctgtttgagggattttattaaatctttttttaatggaatgtggtacaaattgttcatgttaccaaagcaatatttccctggaatttaattcaaagtttgtggcatacaacctgagccttttcttatataagacaagaatatgttcacatcttggtatgtggccatatttatagaatgctgaactcaatgtgcaagttgtactgtatgcagttttgtaaataagtgaaaataatttgttgtactttttattcaattctgtatagattataaaattatttttattaaataaatattttacagtatattttctctttttaatcaaaattgttttaaatttatcttctatttcagtaggagctttagattatatctttaaatattttaataatttatcctaggacaaatttcatattaagtcttcccctggtctaacttgcctagttaaccttttgttatctttttaattattccattgctttgtgatttttacctttgactcttcccccttatttcagatgttttcccccttttttttggcaccccgttgcactgtttttttttttttttttggttttcatgttggcactgctcttatctctttttaaagcattcttccttaaaaaaaaaaaaagacactctctttgatgttaactgaatttttacaataaaggaaattaaagcaagagcagaaaataccaccttgttctgaaacttcatagcc

SEQ ID NO: 4592 - DNA, 1039 bp, Homo sapiens
agtaccaccgtgctgtgatgctgctttgtgtcttcagggtctggcacgtggtgtaagtatgcaatattttttgaggctttatggacaaattctgaatatactttattatagagtaatcctcttgtcattgataattcaataaactgcttttcccccttctagtttttgatctatgccagttattttgcactcatcgctgtggttttcctggccagtggtgcagtcagtgttatgaagaaatgtagaaagctggaagatccacaatcaagttctcaagtaaccacttcataatatactgctgaagggcttcttcttatagcaagaactctgcacagcaactgcctggatgtgtttgattttttaaagcgtagacatatatttatgaatgtgcatttcttgacttcacagcagccacttgactaataccttgtgttccgggaataacatgatactattcagaggagccagaagtaaagtttatttcatggattatttatgagagctaatttaaggatgactttttttctgattcaaaagtgaacttgattttaaaaaccagtcaagagcaatcaaagcagcacatggtgttgtatacttcattagcaagtgagtttggtgttttataggtcacatatgtctgtatctacttagccagatgcttggcctggtgggaccagggctccacagaggccacaaaatgttgcaagtcatgatggatggaaatatgttctaacagcatctgcctctattcaatttaattcttatttctgtgttactcatgtacattggtctttctacatagttattctatcactggcaatatttgttctggtttagtgttctgtattttaaggtgtacgtatcatttctaattttaagttattttaaaaaaattcatcatatgaatgttcttggttcccattgtgacgattatttatttctgtaaaatttgtttagaagtacgtttttgcattattcatatgcttcccagagaagctcatttagttagaaaataaggcaagttttgaagcctgctaaa

SEQ ID NO: 4593 - DNA, 1028 bp, Homo sapiens
tggctctcattttgcctttccatgttagccacaaaagtaaaattttctgtgggttttttttttttttggtagagataggatctcactttcttgcccaggctggtcttgaactcctgggctcaagcaatccttctgtcttggcctcccaaagtgctgagattatagacatgagtcactacacccggccttcccatgttctgagcaaggcccagggattacagtaacctttggtagattagtcctttcatacagttgaaatcagagatatctcacagagtgtctgacatctcatattgacttcttgggatagtgcgtagctcagtaatgtcttgcttcactcaattataagcccagtagctttatttattactttattataatactatttctcattgtttaaatattaagtaatataaaaagtttaaggaagaaaatttaaatcactaagaacccaccacctagagagaactgctaatattttggtctacttctttccaatatttctatcttaactgttggatcagtctgtcaattataacgataggaggccttaactgaatagtgatttattagggttgctagtctgttgcttattattattcttgttatgttgtttgccagtttatgggagatgtagattacagactcccattggctgaagcctgcggtctcttttcatcatcttcattttgtaaacagtacatcttttgctgggttgattacatacagctgtgttaatgctatagtgcatttaaagcaaaaatcctatgagaacatatttttcgccagaggggataaatgtatttgttaataagtttatgaagtaagcagttagttttcacaaggaaaaaagtctgttaggtaagtaattgggcctgtaaattgctttctatataattgccttcatcagagtttgagcattgttcccttttgctatgtaggaacccaagccagaccgtctccttgtattgaaagtactatggaatgatttcctgatgtgctactcctctcgccctcttctctgctgg

SEQ ID NO: 4594 - DNA, 1528 bp, Homo sapiens
ataattttacatacttgagcctgttattcatcccacatgaaactcttaaagctccatggaacacagtgaaggccacttattaaattagagcatgcatgattaactatgagcagctcagagttttgatgtaatagaaataaacctttgtttgtagatgtaatttaacaagaaacataaaaggtaatatgtcaaatgctactttataaagtgtgattcatataagcttaacatttgaagcctagaaaacagcatagaaggaagcctgcagattatagcacgaggtgctgattttataaacaggacctgccatcttttctttttggcatggccagataatagattgagtagttattaacctctgtgtgtggaattcattattatgtaatagatctaaagttctcaaatgcattatactgggcattattttatgtatgccatgactttttaagctatgcaataaaaataacactaattgagcccctctataataaatatatacattatctagtgtaactctgtataatcttttgtggataggttttattgttatcattttcattttctagatgagaaaagtaaggctttcttatcagtttatggtaggatttctaatagaaacttgtgaatccttttaatagttccattcttccaggaatatactttcttttcttataatccttccagcatccttgaaagttttagatatcccagttgttttccaagttatattggttaagcaactgaagctaaatagtaaaattctgatgtagttcaataaaactggtggaccttgaataaagacttatgaaaatgtgcttggtaccattcactcactcttagcaaattcacattatatatgattaacaattgtcttgtgatttgtttaaattcacaaggtttgctctcatacacagtgccaagaaatcaatcttgtaacagcagtatgttgtacttctaggtggttatcttatgcaaattcatcaagtagaattttcaagtgtcggtacttctttctctgagttattttgattaacctcagtactcctccctgaattttggaaaggggctgtagtaatggtacttgaaggatatccccctctgggctaaacagcacaaagaaggaagcaccacactggggttgctttgggatggtatgagaaggtaaaacaacgatgaaactcggattctcagtccagtgaggttttctagcctctgagggagaaaatggcctttatttaactaatgttgatggtcactgttactgtatataagaggagaaaatatctattaattttataaaaatgatatatatggtgtgtgtgtatatatacacacacacacacacacacacacgtttgttttttgagacagagtctgtctctgtcgcccaggctggagtgcagtggcgtgatcacggatcactgcagccttgatcttctaggttcaagtgatcctcccacctcagtctcctgagtagcagggactacatgtgtacaccaccacacccagctaattaaattgtgtgtgt

SEQ ID NO: 4595 - DNA, 1026 bp, Homo sapiens
tttagcacaggttctgacatgtaattaatacctagtaaatgattctcttaatatagccatgcttttatttgtagtttgatatcttttactactagtaagtgttctttctgtgtctgcatgtctaaggtctctaaacaatgacaacagtgaaattaatgcttccactttggtattaaataatgtcatttctagcagcagggtgtagtgagttaccacctacctccctcaccaaaacccataaaaataaaaaactacaataaaccctgagaaccaaaatgaacgaaaatctattcgcttcattcattgtgagtttttaagaaagtgaagtccaaaccctagttctaatacttgggcaagttacttaattctgtgagatttagtttccttatgtacatatctaccttatacagttattttgagtatttaaagctttcaaatgagtttacatagtaggtttccaataaatggtaattgctattattactattatcattatcattacacgtgaataatccggaacagctctgtacttttatggtagatagtcatgtatttgtgaggttgtaaatagagcaatctttccttttctctttgaattaatcacccctggtcatcttcatcatcatcatcatcacacctcctgtttattttgacctgggtatcagatactgtgctaagaactttagagtcagtatgttatttgattcttattaaaactcaataatgtagatatttgctcattttacagaagaggaaactaaatttagttaactgacttgcgcaaaggcacataggaagtggcactttaaaactttccaactcaggctgggcatggtgactcacacctgtaatcccagcactttgggtgggcaaggcaggcagatcacttgaggtcaggagttcgagacgagccttgccaacatagtgaaacacgatgtctgctaaaaaaaaaaaaaaaatacaaaaactagctgggcgtggtggtgcatgcctgtaatcccagctacttgggaggctgaggcagga

SEQ ID NO: 4596 - DNA, 1027 bp, Homo sapiens
tgggttcttattacatatgggtcactgagtagagcctcaggtataagatgattctcctaagcctaaattttatgaacagcagagtttttttttttttatccttttttttttcttttttttttttttttgagacgtctcactcagctgcccaggctggagtggagtggtacgatctcggctcactgcaaccaccatctcccagattcaagtgattctcacatctcagcttcctgagtagctgggattataggcacctgccatcatgcctggcaaatttttatgttttagtagagacagggtttcatcatggtggccaggctggtcttgaactcctgacctcaggtaatccacatgcctcagcctcccaaagtgctaagattacaggcatgaacctctgtgtccggccaaacagcagagctttataggaaaatgactaggtagaaaggtaagtggctcggccataggctcagagtatacctctgaactgtgtctagcttatctcagaaatctcggctgcctctccaacttactttacttctaactacagttcaagtcttgaggataaaaaacacaaagcatcatatatattaggaacacatgatagtactgttgtattagtaaaacagaaaaaatgttattgtcaacataataataagaaatgatatttattgaattgatttattgtatgtcaaacttagtgctaattgctttaccaggattctctcatctcatcctcacacaacaaccttttcaggtaggtacagttattatcccatttttacagatgatgaaactgaaacacagaatttaaataacattcacaagactgtatagctaatgagtggaagagccacagattgaacccgagcattctgcctccagagcctgagctgtcagccaatgttagagtattgcttttatcagtctacctatgttttaagcttctagcaccttgtttttctcataaaatcacagatcgatgcagttattgtccaatttagtgagaatgagtttcagaacttaggct

SEQ ID NO: 4597 - DNA, 1064 bp, Homo sapiens
gattgtttgatatgcttgaggatggttttagcacaagagcaagcataaaatacgcaattgaaatgtgttctttggaagggccttcattcttggataaaagttaaacatcacatagtgacagatggcagtgttttacagagtgcatacataataataataataataaaagtggcatttcactggtgaactcttttggacaattctgaatttttgagtttattcacacttttttttctgttgtgtgtgatattattgtacattttaaattaagtaatgttccaaatttttatgtcagcttttaaaatattaactaaagtttttttaattatagtgtaagttctgggatacatatgcagaatgtgcaggtttgttacataggtatacatgtgccatggtggtttgctgcacccatcaacccatcatctacattaggtatttctcctaatgctattcctgccccttccccccaccacccgacaggtcctggtgtgtgatgtccatgtgttctcagtgttcacctcccacttatgagtgagaacatgcggtgtttgattttctgttcctgtgttagtttgctgagaatgatggtttccagcttcatccatgtccctgcaaaggacatgatctcatccttttttatggctgcatagtattccatgttgtatatgcaccacattttctttatccagtctatcattgatgggcatttgggttggttccatgtctttgctattgtgaatggtgctgcagtaaacatatgtgtgcatgtgtctttatactagcatgatttataatcctttgggtatacccagtaatgggattgctggttcaaatgctatttctggttctggatctttgaggaatcgccacactgtcttccacaatggttgaactaatttacacttccaccaacagtgtaaaagcgttcctatttctccacatcctctccagcatctgttgtttcctgactttttaatgatcatcattctaactggcataagatgatatctcattgtggttttgatttgcatttctctaatgaccagtgatgatgagcttttttt

SEQ ID NO: 4598 - DNA, 1051 bp, Homo sapiens
atttattgaataaatacttggattaatgtattgtctagaaaacatatgtaaaacctgattactagtactttacgaattctctgatgtcagttttatacaataaataaaatgtatgtctagtattgctacattattagttttgttagacaataatctaaaaatctattctgaatatctgagtagttaatatggtggttagttacaaaaaatgtctactttctaacttcttaaaaataactattttaggtaagagtagtgtgatatatttaaagtaattttataatcgcaagtcttcctagtgtattgtggatatattcatttattaaaatatgtatatcaaatttattttctacatggttcgtaccagtgatcaccaaaaacaaatttcctgtacccataaaatgtattcttttaaatatatattaaaatgtcttctttaaagcttttctcaatttcatggacttattactcactataaaattggagctctgtgtatgaatattattgatcatgagttaaaaagacatgagctttggcaagaagaactctcaaagaagaagaaagctgatatccttttagagtggcatttgaaccgtctgttgtcttttgctttaagttttggatgggtgggatggttttgttcttttttcttttttaaaaattgttaattacattacttggaaacaatgcaggagtgtgttattgaaggttaagaagtagattgaaactatcaaaatgaatacagtttgatattcactttttgtctcttcacaacctttattagttaatgaggtagaaggagcaggtaatagttgtgtcgggtaacttagtaggtgagcctctaagtggttacatcattacatccactaagatcctttggttagttgaagcctggcccaccactgctgcttatatacttctgtgtgagtactaaggtgactttgattagaatgggtgtaaatttggtgatgaacctagttaaaggttctatttttctaggaaagtgcaaaaatactgttgttaataaataaaaatttgaaaggcctataga

SEQ ID NO: 4599 - DNA, 1028 bp, Homo sapiens
agcagtctgctaatgcattgggtggatcggccctaggccgcttttggctaaaaacacccaggggcgcccaggccggaactaaggaagcagggtgaagaccaggcgtcttgagcacaccagaggctctctctgcggcttgctgtagcgtggcccgcggggccaccactgtgcccggaccctgtttccaattgtttctatgtgcagtttgatttgtatgtctattctttgagagtctgaaataggcaacgttttgtgaaaatcatagaatgctggagggccccccggttccacgatttccaaatttgaagacaaaaatggtaaccagcaactactgacatagaaagcaaccagcctcatttgagaacttacagctaagttcagactcttgcaacctcgaggagaagagggagtatctgtacatatctggccacatgtcacctgggatgaacagggtgaccggtctgttacagacttgggggcatggggatacaattgcagtctctttttaaggcactagcgaagcgagattttcatgggtcgcgaggttggtcggtgaggatggggaagggaaactggacttttctgggcgtttaagagccaatagggagagctcctctaaggtgacactggcctccgcactgaagctcgcgcctcccggatgcagctcgcctgtgcgggatcatgcggggctggatttcaggtttcacccttaaaggacattccctttgcttggcccgagttttcccaagccagccgggcttttgactctgccagtctcaaacccatttgcggtagaggcaacagcagggggcagagagcagctccagcgtctggggccgggcgttctctcggggcctcccggtcgcgcccggccttacggtgcccgcgtggagagtgcagcctgagcagcgccaagtcctgctccctgtgcctggtgccctccctcaagccgtcatacgctgcccgagagaagcccttccaacccgactcagcatctttaacctgctgctttcccaaacagcgctggc

SEQ ID NO: 4600 - DNA, 1035 bp, Homo sapiens
gtcacagaaggactggggaaaaatgctgtgactagcctaagtggaataaattgaaggttgggttggaagtgaatcaagatgctggtgttaacatgcctgaatatttaggaaaagttccaggatcacttcatgatgaaaagcaataaggctgtcaaaatttgtctggcatatatataggattaggccaagtcctaaaatttcccaagacacctcagggtcaagggctttctgcagaaggtaagccttttgatgatataaaaattctagaagtctcagttgcagaaaaatgtgagagatgcatgtgcgtgtgcacgtgtgtctgtgtgtgtgtgtgtgtgtgtgagagagagagagagagagagagagagaggatttgttagttcgttaaggggtttcttccacttatttccatgaagattctctatttgacccattttaatccccaatacttgttgtagatgattacttcctatcttgaaaaaaaaaaaaaagattcaactagaacagacctggttcttaaaaaatagtagaactctagtggcctgaatttaaaaaaaaaaaacagctttaacttttcatcaaatacacacaacaatttaagaataatgtaaggtgatcccttaactacattctagaaagttagctacattgtaaaatatgtcaagagtgaattaaggaaagatatcccgacaggctcaccaattctatttattggaattttgtaggctgttattttgagttaaacccttcaaattaagaatttaatcaaaagtattgaaacaatggaaaataaattgggttcttaccccataaggatttatgtcagttattagaaagggcttcctgatcctggacaattgttattaataatacaaatgtatatttttcctggaaatgtaaacctgaatagatccaacttcaattttggtctgccaggataaaaacaactttattatggaattggctcctctctcatggcatgactttccatttgatattatatttatgtgtatatctagagtctagattctagac

SEQ ID NO: 4601 - DNA, 1030 bp, Homo sapiens
aaaaaaaaaaaaaaaaatttaccatagtgctcagctaacccttaacaaatatcctagcaggcatatccacaaagagaagactcctggcctctagttatttctagggatccctgctcccacatccaaatggattcattgcttccttcattttattggtcactgatttaatgtctaggaaagtgccacttgaagtgggcctgtgagccaatccatgactggtcgttaccagtgtgtgatgagataatcctggaaatgaagagtaaacattgagacatgtgtacagcaatttgcttgacattgcatgatatccaagcaggtggtcaatggactagtctcattgaacagaggataagccaatttgagtatgactaactcagaaagtgagttgcatgtaccttgagttatatttttcatgtcagcaaggactggttacataatttcctgagcccaacacaaaatggggggaactgtgtgaatatacaggttgcatgcccatggagtgagacctgaatgcattgtagaataatgttatgacatgacatgattattttaaagttggctaatcatctggaaactaaaagcatgcaaaaatttgagaaaatataagcatatatttttataacttatcatttttatactcagcttaaatttaaatcaagcctggttttcagtttagctgaatagtatcaagtataataggatagaaaatatttgtcttgtttatttttaattctcatgttcagtttgtactataagtgtcactggattttttttgtcaagaaaagacacatctcttatgaatgtggcagttgtagaaaagcaaatgttgaaaacagaagttatttaaaaaattgaagatccaaagagtttgtattgatttgacatacaagtgtgatcccccatatattgattttgtaaccatagttgaggttgaagtgtgttatcgcagagatgtagtagctaataaagcaataagaccatcagagcaaaagtactattaacatatgaaacttgaagaactacatgaaaa

SEQ ID NO: 4602 - DNA, 1026 bp, Homo sapiens
gcctggcttctttcacttagtataatgttttcaaggtttatgcatgttgtagcatgtatacaacttgattcctttttttgagtggataatatgccatatgtgtgtgttagattttatttgttcatttatctgttgatggacatttagattgcacttttcagctactgtgaattttgctgcaatgaacactttgtacaagtttttgtttgagaaactgttaaattcttttaggtatatacctaagatttctgtgtcaaatagcaattctatgtgtaacttgttggagaaccactaaactattctctgcactttaatttttgcacttttgagctcatagcatttacattgtattcagtaacttatttaagttttcctgtgctgggtttatagattaattctaaaagttgaaaatcaataatatggtctcaccatgactagataaaattattcaatgtataggccatgctcactttagttatatttccttttagtatgtacctatgtctttcgcatctgtaccctgcattatctctttattttatttttaaaattatttttatttttactttttttggagatggggtctcactctgtcacccaggctggactgcagtggtgtgatcatagctcactgcagcctagaactcctgggctcaagaggtcctcccacctcaggctctcaaagcactgggattataggcatgagccacaaagcccagctgtctctctatctttaatagtaattttttctttatttacccttgttggtctcttttatttggagagtttccccaaatttcacaaagtgtggttgctgcttaaaatttaaggatgtaatgcctcttgatggggttttgtgtgtgagcaaggcttgccacctgttgtactttgttttagagcaactgggagggaggctggggtcatgctgtagtatagctagacagaatgcaagactcttttctcagggagcttaacaatggtttttgcaaaagaaaaattctcaacttctgtctgccaatgtgtgtc

SEQ ID NO: 4603 - DNA, 1039 bp, Homo sapiens
gcataagtgtcttctcctactgtacacacaattaatttcaaaccagtcagtaacttttctggcttattcaaggcatatgtggctttaatttatcaaaagctcctggaatttcatcagctggaaggaatgtcaatgcaaacaaatgacatattttaccactaaagtttgcatcattgccatattgcctagctaatcccctcatctgaattttcctagaaatgctttggactgaatggaaaaaacaaactttattagtgacaacttgaaattcacttttagaagccttgattgcacctaattccaaacctgtcattacagtttggggattcaattagatgatagaaattttagacttttgggattttgatattttggaatttcgatattcaggattatggtgttcaggattttgcctttagggattgtaattggcatcgtagaaatacatattccaacatttcacatttgtgaagcaatgccaactttatactactctgtctctgcaagaccttaatttactcccaggagtggtgattttggttttcaggagaataaaatgatggacacaaatgagattaggtctttccatgactacaaacgcctacatgatctagccagtggttacttctctcatatcatctcctatactttcatctcccttgcccaattcactcagattctttggcttccttgtattcgctgacatacaaggtaagtgtccatcaatacgagacttttcccttctctcagtctagaactctctaactcagatatatgtaaggatcaaatcctcacctgattcaggtctctgattagatgccagctcagcagagaggcctgccctgaccaacttacctaaaccttgccagtcactttctttcctccacaccactatatatctcttttaagctttataccatctgacttacaacacatttatttgttcattgtctgtgtttcttaccaaaatgtaagctccataatagggcatagcaaataatagacactcaataaatatgtgttgcatgaatggatgcat

SEQ ID NO: 4604 - DNA, 1123 bp, Homo sapiens
ctcttctcattctctcattttgagaaccactaaggactcatgaagtaaaaaaaattcaatgttactaaaagtcctagaagagaacctaggcaacaccattcaggatgtaggcatgggcaaaacttcatgtctaaaacaccaaaagcaatggtaacaaaagccacaattgacaaatgggatctaattaaactaaagagcttctgcacagcaaaataaactatcatcagagtgaacaggcaacctacagaatgggagaaattttttgcaatctacccatctgacaaagggctaacatccagaatctacaaagaacttgaacaaatttacaaaaaaaaccaaaacaaaaaaacaaccccatgaaaaagtgggcaaagaatatgaacagaaacttctcaaaagaagacatttatgcagccaacagacatatgaaaaaatgctcatcatcactggtcattagagaaatgcaaatcaaaaccacagtgagataacatctcacaccagttagaatggcgatcattaaaaagtcaggaaacaacagattctggagaggatgtagagaaataggaacccttttacactgttggtgggagtataaattagttcaaccattgtggaagactgtggtgattccccaaggatctgaaactagaattaccatttgacccagcaatcccattactaggtatatacccaaaggattataagtcattctactctaaagacacatgcacatgtatgtttattctagcactattcacaatagcaaaggcttggaaccaacccaaatgtccatcaacaatagactggataaagaaaatgtggcacatatacaccatggaataccataaaaagggatgagttcatgtcctttgcagggacatggatgaagctggaaaccatcattttcagcaaactatcacaagaacagaaaaacaaacaccacatgttctcataagtgggagttgaacaatgagaacacatggacataaggaggggaacatcacacactggggcctttcagggagttgggggctaggggaaggataacattaggagaaatacctaatgtaggtgatgggttgatgggtgtagcaaaccaccatgtcatgtgtatacctatgta

SEQ ID NO: 4605 - DNA, 1051 bp, Homo sapiens
ctcacgaaaatctcttgtcaaattttcaaaaatgttgactttttgctaagaaaattaattattgaaaattaaattatataaatttaacattaagtagaaactgataatactaaaaaattatcactccctaattctttcgctacattttaccattatctatgctcttgaggttattcatgggcattgtgtctgattggcgggaatattaaataatgatgggctattgtgcatcttttcccagttccatggttagtgatgtccctttgaaagcttgaaattagccatcataaggatctttacaccagggaattggccttattttcagacacctggctgtcaaacatttactaacacactactagcagaatgacctctaaattagatgatagtgacccatttggacatgagagctactgagacactcaggcaggtcatgggagtcaatgcagatcagaaccaaacagaatagaaggcaaggaaaaacacgaaaaggagacaccagagagaaagaaaggcaaggagaaaaagactaaaggaaatgaatgaatattattttgccaaaataatagctttaaggagaaaaaaatagagctaaggactatgtcaatgccagaggccatttgtgtctttaccaacagtatatgaaatctcaacccagatcactttccactacttttctttcactctcctaggaagtcttgacagaattttcctttcagtttttgataacattgggaagagctctgggtaaagcaataaataatttgctgcttactaagataatgtacaccactggtaaatccatcaacttgtattatttatttaaagtaaacagaccatggcttatgtcattctaaatgcacaacgggtgtccactgataggcttcagttctcagagactatgctcattagataaacaacgatttattattggatgtattataaaagtaatgatttatagaacatttgcactgtcagcattttgcaagatactttggagtgtagaattacagaaaatggaacgtgcttaaattcagtcgacctggaaggt

SEQ ID NO: 4606 - DNA, 1086 bp, Homo sapiens
aaactaaaaattaataacaagaggaattttggaaactatacaaataagtggaaatttaacaatatacttccaaatgaccagtgggtcaatcaataaattaggaagaaattaaaaaatttcttgaaacaaaataatggaaacacaacataccaaaacctatgggatacagcaaaagcggtactaagagagaagtctgtagctgtgaagtgcctatatcaaaaaagaggaaaaaccaaatgagcattctaatgatgtatcttaaagaactagagaagcaagagcaaaccaaacccaaaattagtaaaagaaaagaaataataaagatcagggcaggccgagcacggtggcgcatgcctgtaatcccagcactttgggaggccgaggcgggcggatcacgaggtcaggagatcgagaccatcctggctaacacaatgaaaccccgtctctactaaaaatagaaaaaattaaccgggcgtggtggcgggcgcctgtagtcccagctactcggaggctgaggcgggagaatggcgtgaatccaggaggtggagcttgcagtgagcccagatagcaccactgcagtccagcctgtgtgaaagagcgagactccatctcaaaaaaaaaaaaaaaaaaaaaaaaaaaaaaaaaaaaaaaaaaaaaaagatcagagcagaaataaatggaattgaactgaaaacaacaatacaaatgataagtgaaacaaaaagttggctttttttaaaagttaaacaaaagtgacatacctttagccagactaagaaaaaaagggagaggatccaaataaaataaaaaatgaaaaaggagacattaaaactgctactgaagaatttcaaaggatcattagtggctagtatgagcaactataggccaataaattggaaaatatagaagaaatggacaaattcctagatacatgcaacctaccaagattgaaccaggaagaaatacaaaatctgaaaagaccaataacaagtaatgagatcaaagctataatacaaagtctcccagtgaagaaaagcccagaacctgatggctttactgttgaattctaccaaacatttaaagaag

SEQ ID NO: 4607 - DNA, 1068 bp, Homo sapiens
attatgaaaatacattttctgatgttatctggctaccttctttgcttttttcaaagcaaagcatctctatattatccttgagtcatcttttagtacttttaattattgtctcataaaattgtttattgaaagatatatgagagtataaatgtgcatgaatcatattggacagctcagtgaatgaccacaaaaggaacacaccagggctaccatttaggttattaaatagagttttagcagcatcctagaagcttccttcaaggctctcccagtctcctcctccacctttcagaatatattcttttgtgtctgctttcctttgcttcatattaccttttaagattcaaccatgttctttcatgtagcaatagtttgttcatttccattgctacatggcagaggctagcaaataaagttttcttgagatacagccattcacattggctcatttgtttacatatctatggttgttttcatcataccacagcagagttgcaacagagactatatggtactcaaagtctaaaatatttactattgggcctttaacagaaagagtttgctgaacctgctatatacaagtacatcttacgaatgcatcattttttaaatccattctgctgttgatgggcgtttgtgttgtttccagtttggagctattatgaatgatgaagttatgggaattcttgtacatgaattttggcaggtatttgtataactgctgtttggtatataactagtggatttaccgggtatgcttatgttccacttcagcggttactgctaaacagttatccaaagtggctgtaccaattttcactcccacaaacagtacgctaacattttcattgctctatgtcctccgaacaattgatactgttaaaatgtttcctttcagtcatcctcatgggtttggtgataatatcacattgtaattttaattttcattttttgttgttaattaataagatcatgtgtgtatttactggccatttggatgtcttcttttgtgaaatgcttattcagataagtctcttgccggtgtatatattgagttatctttttctt

SEQ ID NO: 4608 - DNA, 1024 bp, Homo sapiens
tttccaacttagaaagctttctattttcagggctttcttcatacttaaatctggtaaccaagcctatgaaaagaagttttaaatacagcaggtataaatgtctgtaggaaaaggcttgagcagtgtaggtaccatctcagaattataagagggtggacagaacttcttttgttaaatactattatcttaacccaagagaactgtcaatagagagctgagtttctggattatgggtgcttccctcctatgtcttaagattagccagcagcatgcaaggaattggaagcatgtcctcacatgacacagcaagaagggtgacaagatcctatttgcgtttgaaaaagtttactcttgctgctgcatacaaaatggaatgttaagatgcaagaatggaatcaagaaggaggctcttagaataatgggtaagagttaatggtggctttgacctgagtggaggctgtggaggtagacagaagtgagaacatttgctgatgctgtaggtaggggaatggtgaggtgttatggatggacttgtgtcactctcaaatttatatattgaagttctaacccctagtacttcagaatgttactatatttgaagacagcattcttaaaaaggctattaagttaaaatgaggtcatagggttgtccctaatccaatataataggtttcttcatgagaagaggagattcggtcacaggcatgtacagaagaagactgtgtgaagacacagaagaagttatctacaaaccaacgagagaggcttcagaagaaaccaacattgttgacaccctgatcttggatttctagactcaggaattatgagaaaataaatttttattgtttaagccacccagtctgtggtactttcttatggcatccctggctaatgaatacaggaggcagctaaaggaattgaggattatgcctagttttgtggcttgagaaatggggtatttagaggtctcattaccaggacgagtaagattgaggaaagaacatgtttggaatctatatgggaa

SEQ ID NO: 4609 - DNA, 1095 bp, Homo sapiens
gaagcttatgtctacgggagctatcctggcattggggcagttcttaggcccaagtccacaggggctggcctggtaccggggtgggcctaaaacctgggttctcagtggtcagtctggtgtctggggccatgaggctgctgcccttaaatctcaggcaggcctggaaaactgggttcgcaggagttatcctgcagcctgggaccattagatatggcctgacacctggttaagcctggagcctgggactgtgaggactcacctggcactggggtttagtagtgcaggcctggtaatagggtccagagcaaagttgcctactcattttcttctccttacttaaatggagggcatctgtctccatactgtgttgcctaggcttgggggagaggtgatacaggtagtgtgaaactgtccctcctatcctcttctatgtgttttttcttatttctgtgccccattcaggtgctgtaatctctcacctggattccttaggtcttgtgcaggtatttttgttgtggatggttattaaaattgatattactgtgagagaatgagcactgaaaattccgattccaccagctgacattctgtagtgttttcttattaacaacacggaaaagtgattaaattcatctgccagggaattttaggctctctggtaccttgggatttggaacagactttatttcttaccacaggcatgctaagagccattcttcctttgttctgaatataatatgctatgtttatcttttcaagcaagtctatgtaaatacattttttggtcattactactggttgcaaaacacattctctacatttgttgtgttatgggaacagcttcaggtttggatccacttaaatctttcttttgacatggtcaaggggaggagtgaaggaagacaatgaattagatgctgagaagttttccaagtttgagattaggttaatcaccgtaaaaagaagatattttattttgtttcctcaaatggcattactgtttaatcaaagcattcccatatgcagaatcccctattgtcattcaagtctgacttcctggactgacattcaattcagttaaatttattcactaac

SEQ ID NO: 4610 - DNA, 1070 bp, Homo sapiens
atttacatgtatttgtaaattttccaaagttctttctgtcatcgatttctgatttaataccatgtggtcagtaaagatacttgatatgatttcagtattcttaaatttgtgaagacttgttttgtggcctaacatattatctatcctggagaatagtttatgtgcacttgagacaaatgtgggctcataggtgaaagggattcatttccagataagacattggacttgagactcggaacttgggacttttaagttaatactagaatgagttaagactttggggactattggaagggataattatattttgcaatgtgagaaggacatgagatttgggggctaggggtggaatgatgtagtttgggtgtttgtgccctccaaatcttatgttgaaatgtaatccccaatattggaagtggggcctggtgggagatgtttggatcatggggccatattgctcatgaatggcttattgccattcccttggtgatgagtaagttcttgctctgatagttcactcaagatctgagtggcacctcctctctttctctcttgctcgccctctggccgtgtaacatgcttgctttccttcagtttctgccgtaattgcaagtttcccaaggtccttaccaaagacagatgctggcactatgcttcctatacaacctgaagaactgtgagtgaaaaataaaacctcttttctttataaatcacccagcatcaggtattcctttataggaatgcaagaacagactaacacatcacatatagtattcttgattggcattttatttttctttcagcatgttgagtatatcattccatttttgcctacaaagtttctactgagaaatctactgattgttttatgagtgttctcttgtatgtgatgaatcacttttttcttggtgcctttaaaattctgtcttttgacttttatgaatttgattatgtgtcacagtgaagatctctttatgtttaatctaactgaattctttgggatttatggatttggatgtttagctccctttctagatttggaaagtctgctatcattatttctttatata

SEQ ID NO: 4611 - DNA, 1057 bp, Homo sapiens
aaatgtttgacagaattaaccagtgaagacctggttcttggcctgttctttgtggaagagtttttaaactacaaattcaagtactttaatagatttaggtctattcaggttatatgcttcttcttgggagagctttggcagtatgtatctttcaagcaatgtgttcattttatcttcgttgttgtattggtataaacttatctctctatgttgatttaatgtcaataacttcagttaatatgaaaaatacattggttaatatactataatggacaaaataaaatgcctttacattttgttaaactttgttcagcctgaaaatctgtgctcatgcttattcaacttcctgtcttatcttaagcatccccaaatttgccaattcagcatgtgaaaagccttttagagaacagattcccaacagagagagagaggctgagtattttccattttacttatactttaattcaaatgggccaagactgattttcatatcttcaggaaaggagagaggaactatgttgtgattgtgtgtgtgtatgtgtgtgtgtgtgtgtgttgtattgtgtgattacacttctatgctgaattttgagacctcaaagactttctcattaataaaatgtaagtgtaacagccagaaggagtaatgggaatgaaagcattttaagcaaattgtaaaagggatggggtcgctgaacttcactgacaactcttgtcctggttggcttcactgtccggttccactgggtcaggatggcatttctggccccatcccacttccctggtcccatcagtcgaaactggtatgggctgcaagggccaaagtacacctccagggccaggcggggatctgtcaggaagagccatggtatgttaggcttggcccctatgaaagagcccagctcatccacatatgtgatgtaatctgtctgcaaagtctggctctggccaaacatgaagaaagaagagaacatactggaataagtgttacagttgcaaataggagcattaatttcttattttttctttcagaaaaataacattttagatagcacct

SEQ ID NO: 4612 - DNA, 1029 bp, Homo sapiens
acactactgagaagcaaaaagcaattctcgttgttttaagaagtaagtagacattttcctcagttcttacagcttttcctcagtgaatggtattatagcgagagcagtggggcagactttctggtgtaggcccttgagcatgatactacttaagggtagatttacttaagggaacaatttcattcactcttaaaattggctttgagaataatgctaatataaacttaaaaaaatacacatggtacagaatgtatcttacataaatacccattcctgagtggaataatttcattgcagactctctggactgcgaaatgcctttaaaagtctttctcatctcctattctcataagaggtctcattctagatgagatatatactaatcttttgagataaatgaaatactgcaaatgaatgttatatatttaaatatacagacgaacagtaaatttagataatgttacctcatgaaaatctgaaactaaatactggtaatatttacatgatggaagcaagtggtatatttgattgtaaaataagaccattcccaagtcatatttaaagcagcataatgccttctcatgctgtcttattttctcttagtttcaaaattaccatagaagctgagggattctcctgtggtggtgtatttagttgtggctatccagacttttagcttattctctctcttagttagtccattagcccttctaccaaagaagcagggaaggaatggggcttatttctaaatttcatatcaacttgcacatttaagaagagtgcttataccttttcctgttttctaatgtttaaattaattcccaataggagaaaaagttgattttatgaacatttggaattttacatgtctctaagcaactgaagttaggaagaccctaccttgctatggattatgagtgactgcgaattttgctacttgccattttgacttaacatattttcaggtccttgggtagaatttattctttctatgattcacatgagctgataacttcgaccagaaaacag

SEQ ID NO: 4613 - DNA, 1040 bp, Homo sapiens
acatatagttctgctgtgaaattctaatacatgtgctttaatgaacatatgtatgcatttttgttgaatgtacacccaggagtgcaatcgtttgttcttatggtatattaagctttatagttacttccaaatagttttccaaagtggttgtactaacttatactcccagcagcagtctatgagggttctggttgctccacttccttgcagacaatattttttcttttcattttagcaattctcatggcaccatattgtagcttagcagacttttgaaagatgcatggtattttattaggcaaatggggtgatagagcgagtcctggggaggatcaaaaaaataagaaagcagggagcctgtgggagtcctcagcagctctccttggaggcactaggggagaatctatttccttgtgtttttctagcttcaagaagctgcccaaattccttggttcctgaccctacatcattccaacttccttccatcatcacgtccccttctctgactctgactctcctacttttctctgtaaggaccattgtgattacattgggtccacctggctaatccaggatacccccccccatctcaaaatccttaacttaatcatgtttgcagattcctttatcatgcaacttacatagttacaggttctggggattaggacatgaacatcttttggagaccctttttcagtctaccatggtcatgttgtagcctcaccttatctatactatagtgtgtgttattcttatttatgtgggacaggtgctaagcagagtggtgtgatggaagaggccaggtgcagtggctcccgcctgtaatcccagtactttgggaggctgaggcgggcagatcacctgaggtcgggagtttgagaccagcctgacccaacatggagaaaccccccttctctactaaaaatacaaaaattagctaggtgtggtggtgcatgcctgtaatcccagctactcgggaggctgaggcaggagaatcgcttgaacccaggaagtggaggttgcagtgagccgacattgca

SEQ ID NO: 4614 - DNA, 1089 bp, Homo sapiens
agttagtgtacctaatacactaccattcgtaaaaagaaaaaatatgtaatgcacataattatatatgcacataacatacagggaactggtaacagtggttgcctctaaagagagaaactgtatgcctaggggatagttaggattgggagagagacttatttctcactgtatgtcagtagttctgaaactttttagtttctgggctcctttaactcttaagagtcactaaagaggcccaagaatttttgtttatgtgagtaaaattcctatcaatgtttactgtattagaaattgacacagaaatctgaaaaatatgtatttacagattcattaaaaatagcaataataaacccattatttgttaacattttacatgaaaaataattatgttttgtaaaacaaatactagtgaaaagagtggcattgtttgacatttttataaatctctttaatgtctggattaggagagacagctggatcctcatgtttgctgctgcatccagtccgttgtgatatcacacatcatggtgcctctgaagaacactattgtgcaattttgagacaattagagtgaaaaaggcaaatagcatcttagccttattatggacatactttcaccttgtggacccatggaaagggtcttgggaaccctgtgagggccctggactatactttcagaaatgctgctataaaatctgtttgaattctataccttgtgcatgggccactgtgtcaaaaatacatgcaaagtacatagacacaaacatacataacatgcatatgcatatataaatgtacacatttaaaggtgctctctttcaggctttctggaaggcaaaaagaaaagcaattgaaggttggtatggaacaagtgtaccacagttttgatgtcaataatactatctccagctttagaagggaaactaatatataactatttattatatttagcatttattgagtgcttactatatgccaggcagtgtgtcaagaattctagatgttttctcttatgtaatcttttcctgaaccaatgtgaaaggtgctattattttcttcactttacaaaagagaaaacagacttagaga

SEQ ID NO: 4615 - DNA, 1059 bp, Homo sapiens
attactgtatacttctatgtctggccattcctcttcccaagcaaagtggacagcgagttgcattgcttgaagttctgcccactgtttcccttcaccagtatccttcacagatgttccagaaaggggatgtagtgctgcagctgttcacttttggttggtgcctgtgtattatgcagaatcatctgtaaacagttctgggtcttcttatctgtcagctgttcttagagaactttgcatgagggtataggtgcaggttggcagagggcagtagagcaggggtgaggaccatggatatttggccatttcttcatattacttacttgtgcctcagggcctgttcagacccagtcccatacacatcaccccgtctgatgatggagtgctgctgtgtacacccaactttatggcttggtgggtcagataacacttcatgatgtgcagctcaggctacatggtaatttggtcacccacagttaagtgttcagccttgactaaggctcagtaggaggccgagagctttctcaacaagacagaagttatctgtgcaggactgcgggctttacttcaaaatctcaagtgttaattggtctggagcaacacaccaaaatgagaatatgttgcctccagaatccaaagaggcccagtaggcatcgtgcctcttttttggttgtatgaggggccagatgcaagaatttatctttcactttgcaagggatgtttggatgtttcccataccactgtacccctagaaatatcactgacgtagggctgggcacggtggctcatgcctgtaatcccagcactttgggaggctgaggcgggtggatcacgaggtcaggagatcaagaccatcctggctaacaccgtgaaacctcgtctctactaaaaatacaaaaaaatttagctgggtgtggtggtgggtgcctgcagtcccagctacttgggaggctgaggcaggagaatggtgtgaacctgggaggcagagcttgcagtaagccgagatcacgccactgtactctagcctgggtgacagagcgagactctgtctcaaaaagagaa

SEQ ID NO: 4616 - DNA, 1101 bp, Homo sapiens
atacatctgtggaatcattactgagattgagatactgatcatttccatcagcccagcacctccccttgtagtccttctctgtaatactccactcaaagataatcactattccgacttctgttaccattaatggaaattttacccatttttaaattctatatgaatggaataatatgtaatctttggtggctggctgttgatctttctgttactgacttgcagcagttctttattttggatatgagtcctttgctaaatacatatattgcaaatatattttcttagctcatagttgcgttttgactctcctaacgatgtctttttaggaatattagttcaaatcgctagtctttcctatggttaatgcttttaatttgttctatttagaaaatcttttaatgcttttaatttgttctgtttagaaaatctttgcacactctgagatcatgcgcaagttaatgactttgaaggacgaagaagtaaaatgtttttgttgcatttgagattgtgaggcagtgaggctgagccagaaacgaagacagaaagcagatagacttgtagggctggccttgagatggggcactgtcacagggtgagtctgagctttgcaggcactgtctatttactatagttgtggctgaaatcagaggcaggccaagtggatgagacatggggcagttgacctcagaagagattcctttaactatttcctttttttttttttttttcttgagatggaatcttgctctgttgccaggctggagtgcaatggcgcaatctcagctcactgcaacctccgcctcccaggttcaagcaattctgccttagcctcctgagtagctgggattacaagcgcccaccaccatacccagctaattctttgtatctttagtagagacggggtttcaccgtattggccaggctagtctcgaactcctgacctcgtggtctgcccgcctcgtcctcccaaagtgctgggattacaggcatgagccactgcacccggccaactatttcctttttaaaatttttttatttttattttttgagagagtctcactctttggccaggctggagtgcagtggtgtgatcttggctca

SEQ ID NO: 4617 - DNA, 1143 bp, Homo sapiens
agataatatagttttctatagtgtggaagaacagcatcatcttcaagcaaggtggaattaagcatggacagaactgtgtttctcacccaggaggagggtaggtttttttttcttttttacttcttaaaacttattttaatattattcttccctcccccaccccattgggaaaaggctaaaacaatctggatgggtttaattagaaattaatacatactgtcattgtataaagtaaatcaacattgtggcaacaagggactattcttggaaaaagtgaaacccatattaacaaaatatgtcatggaagatccccacatagtgatttcactggctgcctgaaagacagacagtgtaaaggtcgatgttctgcatgttctctggggcttgtccatgcaacggaagaaggtctttcccagactcagccaagcctagttagctccaaccaggccctagaccaaaagcaagggaagagcacatcctttcaatagaataagggtagaaagggattctctgaatgtagtaactatgaagctatgccaaaggtaggcagaaaatgggcttgggagccagacactccagggttcagtagttcctacccacagtctttgtgtgcttgctaaatggtgtacatttcttgttaaccacgttattaaaacttgatcagcatgtaagctttcttctgttagatcttttggcagcaaacaaccttccccccaagcctctgaattttggaggagggtaggcttgatgaattgtttagaaattttgtgtttggtggtggcaggaggggagggatcatgcggccttctggtcacaagcaagcctgcagaagattcagtggcctttccagttgacttagacagcctgtgtccctggtgtcactgactggcacctatagcaatacttggtgttatttagcttcttgtcacatacaactttcttctcttctttccttcaattgtccctttcctcctgacttctgtgagggatagcaggattgaggccacaggctgccactcagggcattcactctctgataagagtcagtaaggcagagccactggtgccccctgaacccctgctgcaggtgggcagaggctgggctgctagtgtggtatccaaaggacagtagctgtgctcact

SEQ ID NO: 4618 - DNA, 1048 bp, Homo sapiens
atttagcctctgattcattcttctcttctcccacccctttctcttctaccagccagcctaccaatacttattctctctgaaaggatcttatcctttaccagaagttcagttattacctctaagaaccagtcccttcccttttaaattttcttttccctgaaagagtcagttttatgtattagaaaaatgaaggtatatgttttcctttaaagggattataatcattacagaaaatttgaaagttttcaaaaaattaaaaaaaaaacccagaatttcccaaaacctgactatccaaagagaagcacttaatgttatgtgtgtgatcttgagtgaaaatttaaaatttatattagaacattttataaattatccaaactttttgtacgaaaaaaacagaaaatgtaaataataagaaaaaaaagcactcatcatcctaccatctagaagtaaatactggttttagttcagagtatgtgtacagatacgtgtgtgtgtgtttgtgtgtgtgtttgcaggctgcttggttggtttgggtggggaatagttgagcctgatctgggatcacagccttgctgtgttggagaaaggggtcgggtggagtgggtgttggtatgcaaaggttgatttaaataaatggtttcgattttggtatttggacaaggcttgaagtggaatctcctggtgaacaaaattggggaatggaaagaatttggtagtgttgtgttttgtgtcttcctgtcccttttcttctgatttcccaaagagctcaccctgttctgtagactaaatcttaggcctctgtggcaacaaagactataggctaatggcttagatgacaaagaaaacaagagttggaaaggggctttctctacatttcaatcagaacatagcaggactgcagcacagtcagcactgaagtgaactccactgcatcagttttgtagcatcagggagttctagaaaacagtgccttgtgttgggaactagcattctaccagtaactatgatattggtggagcaagggtgaagagaggaccaaagtggagga

SEQ ID NO: 4619 - DNA, 1024 bp, Homo sapiens
tggctcatcctggctcaaaaagctcccccactgagcaccttgtgacccccactcccatccgctagagaacaaacctcctttgactgtaattttcctttacctacccaaatcttataaaatggccccacccctatctcccttctctgactctcttttcggactcagcccacctgcacccaggtggttaaaagctttattgctcacacaaagcctatttggtggtctcttcacatggacgcgcatgaaaaagattctttgtatgacttcagttattccaaatttgtgaaagtttgttttatggtccagaatatggtttagcatggtgaatattccatgtgtgtttgaaaaaaaaagttttctacctttgttgggtagagtgttttataaaggtaaattatgtcaactggacataacgttgtttgggtctcatctgttggtactgattttctgtctacttctatcaattactgtgagaggaaagtcaaagtctccaactatggttgtggatttatctagttctcatttctgtttctgttttaagtttttggaacttctcttaataggtgtgtacatttaagattgttatgttttcttgattaattgaaccttatcccattatgcaatatctctgtttatctttagtagtatttcttgctttgaaatctactttgatattaatatagccactacattttttctttcgattagtgtttgtatggtatctcttctttcatcttattacttctattcccatctatgtctttatttttaaagtaggtttcttgtagatagttaggtcttatttatttttaatcaaatttgacaaactcgatgttttaattggtgtgcttagataatttatatttaatgtaattattgatatgtttgaatttattttattattgattttctagttgtctcctctgtctttaattcctctgttttccctttctattgatgtctcactatgtttgctgactctttttttcttttttctgtattttgctgtcgaacccatcaattg

SEQ ID NO: 4620 - DNA, 1024 bp, Homo sapiens
aaattattatttcttccacaatgtttggtaaacttcatcagtgaaaccactggggcctagagaattctttttggaaggtttaaactacaaattcaatttaaaagttatacatacatatatatgaaataaatcattgctttaacataaacttttttcttcctgaatgaatttggtaattttttttaattttaaaaattagtgcattttgtcaaatttacaaacagcttttcatagtactgttcccttgttatcctcttaaggtctgtggggttaatagtgatgtttcttctctcatttctgatgtttctaatttgcatcttatttttcttggtcatccaggctagaggtttatcaattgtgctgaacttttaaaataatcaacttttagtttcattaattttctctattgtttttctgtttccaatttatttgagttctggtcttctaataatactttccttccttctacttactttgggtttattctgttctttttctagttttgtcacttgcaagcttagatccttgatttgagatgttgttcttttccaatataagcatttataaatttctctaaatcaccgttttaaatgccttctgcaaattttgatatgttgcattttctctttcatttacttttctaaattcctttgtggctttccttttggcccatgggtaatccagaagtatgttggtgtattagtccgtgcttgcattgttataaagaaatgcctgaggccaggcacggtggctcatgtctgtaatcctagcactttgagagactgaagtaggcagatgcttgagactagcctcagcaacatggcaaaaccccgtctctacaaaaaattaaaaaattagctgggtgtggtggtgcatgcttgtagtcccagatactctggagactaaggtgggaggattctttgagccaggaagatggaggttgcaatgagctgagattgtgccactgcactccagcctgggtaatagagcaagactgtctgtcacacacaagaaaaaaaaaaaa

SEQ ID NO: 4621 - DNA, 1042 bp, Homo sapiens
tgatgctggtaaagatatacctgaaactgggtgatttatacaggaaagaggtttaatggacttatagttccacatggctggggaggcctcacaatcatggcagaaggcaaggaggagcaagtcacatcttatgttgatggtggcaggcaaaaagagagcttgtgcaggaaactctcatttttaaaaccatcagatctcgtgagactcattcagtatcatgagaacagtgcaggaaagacctgcttccatgattcagtcacctcccattgggttccttccatcacgtgtggaattgtgggagttacaattcaagatgagatttgggtggggatacagccaacccatatcattctgcccctggcccctcccaaatctcatgtcctcacatttcaaaccaatcatgccttcctaacagttccccaaagtcttaactaatttcagcattaactcagaagtccccagtttaaattctcatccaaaacaaggcaagtcccttctgcctatgagcctgtaaagtcaaaagcaagttacttcctagatacaatggggttacaggcattgggtaaataccgccattccaaatgggagaaattggccaaaacaaaggggttataggccccatgcaagtccaaaatccagcagggcagtcaaacttaaagctccaaaattatctcctttgactccatgtcttgcatctgggtcatgctgatgcaagaggtgggttcccatggtcttgggcagctccacccttgtggctctgcatggtacagcttcccacttggctcctttcacaggctggtgttgagtgtctgtggcttttccaggcacacggtacaagctgttggtggatctaccactctggggtctggaggatggtggccctcttctcacagctccactaggcagtgccccagtagggactctatgtgggggatctgaccccacatttcctttctgcactaccctagcagaggttctccatgacagccctggccctgcagcaaacttctgcctggatatccaggcatttccatacatcctc

SEQ ID NO: 4622 - DNA, 1034 bp, Homo sapiens
ggcctccccaaatgctaggattatggacgtgagccaccacacttggcctttatatttttattttagagatgggatcttgctgtgttgcttaggctgggctcaaactcttgggctaaagtggtcttcttgccccagcttcctgagtagctggactacaggtgtgtaacaccatgtctggccttttttcttttttttgataatttttttttttttagagttggggtcttgctgtgttgcccaggctagtcttgaactcctgggctcaagtgatcctcccctcttggcctcccaaagtgctgggattgcaggcaggagccactgcacccagcctggagtatcattaaatttgtgtatctttaaatttttagtatctttaaatttgtggtattttggttgtatattctagcaggctccatcctagaaaaagaagagcagcaaataaattttaaatcacattcagttgtcttaataatgtagctattattatttcggcctatttataatatggtaacgtgtgtaagaattcagattttcagtgtaggctgggcatggtggctcatgcctgtaattccagcactttgggaggccgaggtgggtggatcatctgaggttggaagttcgagaccagcctgggcaacatggtgaaaccctgtctctataaaaatacaaaaaattagccaggcatggtggcacatgcctgtagtgccatctactcaggaggctggggtgggaggatcacttgagcctgggaggtggagattgcagtgaaccaagattgtgccactgcattccagcctgggtgacattaaaaaaaaaaagagagatcatcagtgtaaaagatacacaattataaaatcaagtaagtaaaaactctaatattacatttaattgggaatatcagaattaactcttatttttaaagtgcaaaagttttaaattttcattaagtctgaccaatttttgttcttttattgcttgtacttttggtgttgaatctaataaatcattgattaacctcaggtcctaaaggttta

SEQ ID NO: 4623 - DNA, 1044 bp, Homo sapiens
ttgcaccactgcactccagcctgggagacagagtgagactctgtcttcaaaaaagaaatatgtgagaatttgatgataaagttaacaaagttaactttttagatgtaaaggtgatgttgaaggaagagtaaaagatgatgaaagtttttttagtggggaaagaaaatgaaaaggaagaatggaattattactgagcaaaacagagtacagtagttggcaaagaaagattgaataagatgtgaagcgatgattagttttgaacttaatgagtttgacggaggttggaaatgcaggactgggttgcagctgtaatggtctgaagacagagatttaggagtcatatagaatgattattttcctatgtagaatgaatgattttcagaatctggggccacctactattggaacatgaggaaaaaaaaagaatcagtaaataaattggaactataaaaagtaaggaggagaaaagcccctaaaaaatggaatgtcagaggaaacaaggtcccagaaagtttagaggagtaaggatgaacaaacttgatgaacaaagtatttggccatggttttggcaaaaacaatgatcttcgaaagtacagtttctttgtagtgatagatggaagaaagagattgctgaagatttctagtaaaatatttattagtaactggaggcaataggtgtagacgacgtttccaggagattggtctcagaaggaatgagacgaattggatttaaacacaaatttttaatgttagaaatactagaatatgcttggcagtgaaagaaaaggatcctgtataggagtgattaaagatgatagagatgtgaagtacagcctggttgtggtggtgcacgcttgtagtcctagctactcgagaggctgaggtgggaggatcgcctgagcccagcaggtggaggctgcagtgatatcaggccactgcactccagcctggacaacagagtgagaccctgtctcaaaaaaaaaaaaaaaaaaaaaaaaggctgaagtacacaaaggagatggtgtccaggggagatacaagtaa

SEQ ID NO: 4624 - DNA, 1092 bp, Homo sapiens
ctataattacattgctctttctaattagataattaagtattgagaacttaaatgtaagaccaattggccatgaacttaaacgtaagtattgagaacttaaatgtaagactaattggccatgaacttaaatgtaagactaattaattaagactaattaaaaatctgttaatagatcagtttaaaaattaggaatatataagtctataaactgtgacaaagctgaaaatcatatgagtgtacagctccatcaagcccttaaactttggcaaagaacattctaaattatggtaatcctatttatatttatatgcttgggaggtcaagcgttgctctaagcacacattttatcacttaatagatacaggatcccctgtcccatctggccatttctaagctagacataaatttcctttcaaatgttaaacaatagcaacgaaaaacttgaataatataacacctcaagttttaaagagagaatcacattttaatctgtctgaaaaaacagtctaggtatttagggactgcaacagtttactgaactgtcattatttcaggacagtgtgccaagaagttgtagaactaagagaacacttcatgatgtgtctacaataaaatgcttaattttgtagaagttaaacttttctttaaaaaactctgaaaatacttgactagtcatcaacattttctagatactctattttattaataacagaggttggtaccttcacgaagttcttaatttcaaagggcagcttcttgcaggcattcagaagctcagctgttttaactttgatttcaatctcacctgttggcattttcttggagagtgagaaggaagggttttaaaaattactcatcaggatatacacaaaatacacatttgtagaatctatgcatttatttacatatgtaaaatgtgcaaagtccttatagtgtatagtataaaacatacatgtctgtgcatgattttgacattcttatgcatatgtggctgatgtgttcagatatcaacaaatgtcatggcatatccttgcagtctgatacttgggaggctgagacaggaggatcacttaagcccaggagttcaagacc

SEQ ID NO: 4625 - DNA, 1047 bp, Homo sapiens
gcttgaacctaggaagtggaggttgcagtgaactgagatcatgccaccgcactccagcctgggcaacggcgagacttggtctcaaaaaaaaacacacacacaaaactaccaccacctaccccaatcggttaccctttacttttcatgtgaccaccatgacctattatgtgttttgttcttacttcccccacaagaatgtaagcgcttcaagtttattccttaatgttggaaaaatgaatgaaactgcaaatgtagtagatcagtttttggggaggtaccaaagacaagttggtaaaataccttgattttgaagtgaaaaacgatgttacatttcaaagtatcttttcgccaggttatggctcaggcttcgagaccagcctggccaacatggcaaaacccggtctctactgaaaaaaagcgaaaattagccgggtgtggtagtgtgggcctgtagtcccagctactctgaaccctggaggtggaggttgcagtgaaccaagatcgtgccacctcactccagcctgggcctcctaggctcaagtgattgttgtgcctcaactacctgagtagctgggatgacaggtgtgtgccaccactcccagctaatttttttttctgtatttttagtagagatggagtttcaccatgtcagccaggctagtcttgaactcctggcctcaagtgatccaactgccctgccctcccaaagtgctgggattacaggtgtgagccactgcatccagccaagttctattctttttttttttttttttgagacggagtttcgctcgtgttgcccaggctggaatgtagcggcgcaatcttggctcactgcaacctccacctcccaggttcaagcgattctcctgcctcagccttccaagtagctgggattacaggcgtgggccaccatgcctggctatttttgtatttttagtagagagggggtttcaccacgttggccaggctggtctcgaactcctgacctcgtgatctgcccacctagcctcccaaagtgctgggattacaggcgtgagccaccgcatc

SEQ ID NO: 4626 - DNA, 4596 bp, Homo sapiens
tcccctctctgctcttcctcctcagtcgggaggagggcgggagcacggcatcacgtggacggtcatgtctctgcccacaatggcgaggaagggcggggaaaaggggcggacttaaggggtgggaagaaggtgatactggatgagaggaagattgagggaggttagggggaggagccgaagcggacgctgccgggagcgtgcgtcgtgacgtcatcaaaagaactcttatatacaggagcccaggcaccatactgtcttttcgaggtaggagtcgactcctgtgaggtatgttttatctttgcgaatgttgcgggttttggggcgctccagcctttgtctgctaaggtcaccctgaattgactgggacttctaagccagtcgcgcgcctttgcagggcctacaagttgaggatggtgggggattgcacatatggtgcatgcgtgacctaagctgcgactatgttagagtagaactgcggagaagcctcggctctcgtgccctgcctctgatgaagcctgtgttggtagggacatctgagagtaatgatgaatgccaaccgctctgatggtggcacatgccgagtcacccgagtaagctattgttaagggccgtgacccgagcctccatcagccgtccgctctcatgaaaggctgtcggtggtagtccacgtgcttaagtgcctgcattccgcagtgtcaccaatatttccattagtgtttcttttttcttttttgagaccgagcctcgttctgtcacccaggctggaatgcagtggctcgacatcggttaatggcaacctccgcgtcccgagttaagcagttctgcctcagcctcccaagtaactgggactacaggcgcgcgccaccatgctaggcttttatatttttagtagagacggggtttcaccatgttggcgagactggtcttgaactcctgacctcaggtgatccaccagccgtggtcccccaacatactgggattacaagccgtgagccaccgcgcccggccgccatcggtggttcttaactgcgggtgcagtgcttctttgtaacattaagtgtatcctttacctgtcgctagataatgaatggtatgttacctgcatcattggtttaaaaagacgaaccgtttttttaaagaacactctttaaaaaaaagaaccgtggaacaatgaattaaaatctgtacctgatctctttaggtatggtgctgggtgcagatgcagtgtggctctggatagcaccttatggacaggtaagaattggggaaagtatggtgggaagaatgaaatctaagaggtggtctcagcctgtgatgctttaagagtagtggacagaagggatttctgaaattctattctgaggctttaatgttaacagcatttatatttaacgtgactgctgtgaggttcattctcactgttttgcttgcatctttttgttttctagttgtgtccccaaggaaggatgagaatagctactgaagtaagttgaaaattccctctcaaaaaggtttaaagccattggatgtgccacaatgatgacagtttatttgctactcttgagtgctagaatgatgaggatcttaaccaccattatcttaactgaggcacccaaaatggtgagttggggaacatagagagtacacctaagttcacatgaagttgtttcttcccaggtcctaaagagcaagcctaactcaagccattggcacacaggtgagacacctctattttgtacttctcacttttaagggattagaaaatagccaaagcaatgatgattatctatgttagtgcttctctcccctcttttcaaatgagaattttgctctcatattgatactaagtttaatactgaagaaaatgtgaaaacagatactatgatggttgcatagttcagcagatttaatcatgaagagatgtactatctgtctgatgtatctggggtagttgtggtttgctgttaatggttaagcagtgtaccaccaatctaccattaaaatattttttgctgacaattttgtattaaaattacaggcattagacagaaagctggaagttgaaatggtaagtgaaactgtatccaagtaagcaggtaactgggcaaacttcctacggcacaaatggctttttagttacctcctagtgctgaatgcattaaataaatggcggattcttgtcttgttatgattaataagaaagtttgtaaatgcagcctggatgatgataagcaaatgctgactgaacatgaaggtcttaattagctctaactgactaaaggcatttgttagttttggcagggggtgaacactcatctgtggctattctaagaccactcttatttcttaggtggagtccaacttgcctggaccagcttaatggttctggtaagtattaatgaaaacagtagatagacttaatgaaaatgctgatggtgatatgcttactgctgagctaatggcttaaggcttggctgatgaatactgactgtattttccttgagcatgtctggaacagtgtttatgtgttttccttgagcatgtttggaacggggtttgtgtaatgatgttgatcaaatgtctgacctgaaatgagcatgtagacaaaggtaacactgaagaaccctgtgacagacaactttgaaaagagtttaatgatgtttagcattttaatggaagtcctcatttgtattccagctcctggtaacgtttttatccatggatgacttgcttgggtaaggacatgaagacagttcctgtcataccttttaaaggtacatgttttattgatgttaacgttaattgattgagctactgttagtgatgattttaaaattaaagcagatgggaatctctctgagaaagaaaatggagattaatcttaaactgaaacagtagttgggaaatcttttagaaatccacctattactacctattggtaaaggagattaaatttctacaggtatggagagtcggcttgactacactgtgtggagcaagttttaaagaagcaaaggtatagcagttccaagtattttttttttttttttagacaagagtctagctcttgcccagaatggagtgcagcggcactatcagttcactgcaacctctgcctcccaggttcaaggaattctcctgcctcagcctcttgagtagctgggattacaggcatgtgacaccatgcctggctaattttgtacagctatgttgtccaggctggtctcgaactcttgacctcaagtgatactgcccgcactgacctcccaaagtgctgggattacaggcgtgagccaccatgccccgcctcaagtctggtttttaagtgttgtaaagccgatacaatgatgataacatagttcagcagactaacgctgatgagcaatattaagtctttcgctcctatctgatgtatctggcggtaacattctagtttatgccccgaaaaggggaatatagccattctataatgtttggagattttggattactcctaattgtatgcaagttgtcttactgtgtattgtcccttaatttcaggactcagaattcatgattgaagaaatgcaggttagtttaaactttgaaggaaatttttaaggtggcaaaaggttttggtggcatatacaccttaatctgtagatgggagtgattagctgtttaaaagttaaaatgtgactgagaaggaaattgagtagggcaaattttaaatgggtattatttttcatcttcaaacaggcagacctgttatcctaaactaggtgagtcagcttttggtacatgtgatgattttcagtgtaaccaatgatgtaatgattctgccaaatgaaatataatgatatcactgtaaaaccgttccattttgattctgaggttactctactaacaagcatcacacatttgtattttgccctgattaatatgttggcttcgctttcagggtttttaatgaccacaacaagcaagcatgcagcttactgcttgaaaggtgaggattggaaatgttgggactattataattgcagaatacatgatgatctcaatccaacttgaactctctcactgattacttgatgacaataaaatatctgatattctgcattcccatgtagcattttaattgaagtctgtaaatgtggctaaaagtcttgtcttattttttgagacagggtcttgcctcacccaagctagagtgcagtggcctttgaagcttactacagcctcaaacttctgggctcaagtgatcctcagcctcccagtggtctttgtagactgcctgatggagtctcatggcacaagaagattaaaacagtgtctccaattttaataaatttttgcaatccatctggagtgtgtagtgtttacttaaaaaaggacagtgcttttcatctgttcattagctgtaagcataaatcacattcaaaagctattataactccatggtatttgcttcattaacactgcagccagttaaaattttatgggtattttacaaggtgtcttatgcattaaagtgcaatatttcctaattctccatatgagcaaattgtcaggtttcataggcccctgtgctaattggttttgagcttaaagtat

SEQ ID NO: 4627 - DNA, 1078 bp, Homo sapiens
gccatttatatattttcaatcatgctaaattatatcccctgttgattttattgtagtaatcatttttctctctctcctttttcaaaattttaaaatgtcagcagtgatgtaccaaatggatcagccttgacacaagagaatatcagcctcctatcaaacaagaccagctctctgaacctgtcagaggaccctgagggaggaggggataataatgactcccagagatcaggagttactcccagttctgctccttaaaatatgaggagtcctacttttatcttctgctcctaatcagtttgtcgggcataggggtaggagaacgcataacttctaaactttttctcttaagagcggtcagagaaatccaggaaattcaccagaggcaatgtgcacaaacaccactactaaaaacaaaccctgcacatagttcacattaatgcatttttttaatttaaagaaaaagaaaattagcagtatctgcaagcaattcagattaaatttgtttttgttctgtgaatgaactttattttaataactttggacgccttggatccagggctttaaaaaaaaaagatattatatatacactctgtttgattaattgtatgatcttaatgaagtaggttttcttgtattttggtattacatacccagtgtataatttgtataattcctcacccccaatccttatcaattctcaccaccccataaacttaaaacagaccaaaaatgtcagctttcagagaattctgtggtgcttgagaaacagacagtactagactgagttattagaaaatgtgcagcaaaccaacttttcccagagctgttatttggaattctttatccctttctagatcactagcttcattggatacgtatatttttcttgacattgaagctttttgtttgtttgggagggttttatttcttgtttttattttcaacttttcaaatagaattaccaattttgaagtcctcattttcatattaaggatcatttgcattctcttaatataatcagaaagctgattcagtgtttaattagatttaaatgttgatcaagaattaactgtaactt

SEQ ID NO: 4628 - DNA, 1031 bp, Homo sapiens
tcaatctatcctagatactttccattttattttgactttcaagatcctaagtagaaaattttaaatgtttctgttttcttaaaaaagagacagggtcttgctgtgttgcccaggctggtggtctcaaactcgtgggctcaagcaatccacccaccatgccccgtccaaattttttatgtcatttgtaaataagtaaataaacctggatggaattggtctatagaaataatggataaaattgtatataaagatcagtttatgatgttaaaagttttcttcaaaaaaacataattttttcaaatcaggaaaaacaatcctctcttctagtttttagaaaatatatagtaaattattaactgtactcaccctgcagtgctatagaatgctagaagtaattcctcctgtgtagctataattttgtatctgttaaccaagctctctccccttccctccccccattccctttctagtctctcataaccacagttccactctctacttctgtgactcaactttttagctcccacattgagtgagaacatgaaatatttgtctttctgtgcctgaccaatttcacttaatgtgatgtcctctaggctcatctatgttgctgcaaatgacaggatttatttttttatgtctgaatagtatttcattgtatatataccacattttctttatcaattcatctgttgctggatacctaggttgattccatatcttggctattgggaataaaacatgagagtgcagatatcccttcatatactgatttcttttcctttgaatgaatgcccagtagtgggattgttggatctctgtattattattattattattatttgagatggagtctcactctgttgcccaggctggagtgcagtggcatgaacttggctccctgcaacctccgcctcccaggttcaagcaattttcctgcctcaacctctcgagtagctgggactacagtcatgcaccaacacgcccagctaatttttgtatttttagtagagatagggtttcaccacctt

SEQ ID NO: 4629 - DNA, 1050 bp, Homo sapiens
aaaaaagtggaaatgagatcatagtgtccccatgagctttttctttttccatataatacaagtataagaatgcccatgagatttattcaagaatttatattatgctacttgtttgagaattaatatcaacatatcagaaaaattaggactaccttctttgtttttgctttatttatatttggactttgaaacttcagacagaatgactttccagcacttttgctcttggtaatctaaataaatatgtgaattacttatctagattatcaagatcctaaaatgacaacacaaaatttatgtttttttgtggggggttattacacatctaatgttttgattttggttttagcctccacagcatagcaaatacaaaacatacatgtgtcgagatatgaagcagagaggaggatgccctcgtggggccagctgtacatttgcacactcacaggaggaactggaaaagtaagtgtgaaagtcaggagactttggaataaggtgtaagtggaataattcgctgacatacagaaatacagaaagagtagctgctttatcttaaatgaataggacatttttagaatgtaacacagcttgaacattcctattctgaaaatctgaaatgcttcaaaatccaaaaatgcttgaaagccaacttgacaccacaagttgaaaattccacacttgaccttgtgatggatagcagtcaaaacttcatgcacaaaattatttaaaataatgtataaaattactttcagactatgtgtaaaagatgtatatgaaatataaatgaatttcatgttatatatttgggtcttatccccaagacatctccttatgtatatgcaaatattccaaaatccaagacaaatccaaatcttgaaacacttctggtctcaagcatttcgggtaagagatattcaacctgtacataatttttaaaaatgaaaagcagtttcttcagcttttattgcatcatgcctatagataggaaactattttatgattagctaaatctaaaagtgggtcattttcactacaaaaaaaattaaaatt

SEQ ID NO: 4630 - DNA, 1064 bp, Homo sapiens
acctcttctttctctcataatgtatatctgatccattagcaaattctgtaggccctacctttaaaatccatccagaatccatttaccttcactgctaccatccccatctctcaggggattatggaatagcctcctgttgtctgtctgattttaacaaaagagccggagcgaccctgtcaccctctgctcataaattctcctgtggctttctatcaactcagagtaaaacccagtatccttcccatgatctatagggcctcatgtgatctggtcttctactacctctctcaaacctcatttcctaccctttttttccacttaattccctcctctctgattccacctccatgcaacatgccaggcacacttcttacatcaaggactttgcacttattcttccctctaacttggatgtttttcccttggtatattattctgcatgtcaagaagaattagttacagaatattctttgattatagggccttttgtagtttttgtggtgtgttgtatggaaacatacatatagctgtattgaacattgtacaaaacaaatattagaagataatttatatatttgaaagtctccagtaggcacacttaaacccttctttcaggtctttaatcaaatgtaaccttctcaaggaggacttttctggcctctgtctaaatttttttttttttttttttttttttttttgagacagtctccctctattgaccaggctggagtgcagtggtgcaatctcagctcactgcaacctccgcctcccaggttgaagtgattctcctaccttggcttccggagtagctgggactacaggcgtgtgccaccatgcccagctaatttttttgtatttttagtagagcgcagtggctcatgcctgtaatcccagcactttggaaggccaagatgggtggattgcctctgtctaaaattttacacattggccccacttctcttcttagctctattttttgaattcaacattatctaaatactactgtatattttgcttatttgtcttggttattatctggctcttctccttgaatataatgggga

SEQ ID NO: 4631 - DNA, 1086 bp, Homo sapiens
ttgactatacaaaaatccaaaatccaaaactttttgaacaccaacatgatgctcacatgctcattggggcatttcagattttcagagtaaggatgctcaagtggtttaatgcagatattctaaaatttgaaaaaatctgaaatctgataacacttctggcccaagcattttgggtaagagattctcagcctgtatttattctttctgaaagacctatccagaaaatgttggcctaaatccaacttgactcagaatgggatgatagcaatatacctacctcaacaagttaaggagaaaatattttgcaggcaaatggtatattcatttaatcttgctgttgatgctaaatttgttacattaaaaattatatgttcatataaagcataaactcatttttttgacttcattatgagattatttgtgtcttattaggtcaccaaacgtgatgaagactcttctttgatgcagctgaaagaagaatttagaacctatgaagctctgcggcgagaacatgactcccagatagtgcagattgctatggaagcaggcttacgaattgcaccggaccagtggtcctctttgctttatggagaccagtctcacaaatctcatatgcagtccattattgacaaggtaggaccttttttgttccttacttcttagactaatcttggcattttggtaattcatttaacaaatgtatattaaagtgaatactgtatagcttttgtaaattgtatttatagccagtgtcatgtcataaccaatcacgttataataccactttgttcatttaaagatttgattagtttatattttttattttacttattttatattttattgtatttttactagaatcacagagatgaaggccaactctagagaccactctacatttaatttagagaaatagagtcaaatagtaagagtaacctaaaaaaaaaataatgaacatttactaaaatcttaatatgtatctagtggttttaaataattcatttaatcctctcaacagccctgtattatccattttagacaaagacaaagggaagttaatatgtttttccagcatcacatagataa

SEQ ID NO: 4632 - DNA, 1033 bp, Homo sapiens
actcttttaaaggagtgggtctgaacagcactactcagagtgttctgagtcgcccaatgcagaggaagcttgtgactctagtccactgtcaactagtagaagaagaaggcaggattcgtgccatgagggcagctcgatctttaggtgaacgaacagttacagagctcattctccagcaccagaatcctcagcaactctcttccaatctttgggcagcagtaagggctaggggatgccagttccttggaccaggtacataattaactttaggtatttattctgctggtaattctaaaagtatgatgtaggaattataagtgatgtacaaagcctagttctttgcagtattttattgttaccaactaatatcttgtttgatgttcatggcttgggcaattccatgtaacttagtggacttactaggtgaacttagtgaacttaaaacttttctcttaatgccaaaagttgtttctttttttaattttttgatttttcctttttttcacacctgtagcaggaagttcattcattttgatagaagtttttcttaaatttattaatcactttatctgttttctttataaaatatatagaatgtaatacaaaattgctcacaaaaatggtgtaaaagtgtgttgctggttaatcttaactgtattgccagttaattgaatagctgcagaaatgattaaatattccccttctaataaatggatttatcttatctatgtacttgataaattttggttttgcccaactttccctagcaatgcaggaggaagctttaaagttggttctgctggccttagaagatggttctgctttgtcaagaaaagtattggttctgtttgtggtgcaaagattggagccacggtttcctcaagcctctaaaactagcattgggcatgttgttcagctcctttatagagcctcctgtttcaaggtatgaacctacattaaagctcagcttgaaaggaaatattgttctttccccaaagttaagtagtaaaactttgagtttaataaagttgcc

SEQ ID NO: 4633 - DNA, 1031 bp, Homo sapiens
ataccagtgtaagatgttaataataggggaaattgttagtcgagtgtggtggcttgctcctgtagtcccagctacttgggaggctgaggcagaagaatcgctggaacccaggaggcggaggttgcagtgagccgagatggtgccactgcactccagcctgggtgacagagggagactccgtctcaaaaataataataataataataggggaaactgaatacaggataatgagaattctgtgtactatctttgccatttttctgtaaatctaaaactgttctacaaaataaagtttactaggcaaaatgggcaaaggatctgaatagatattcttccagagaagatatacaaatggataataagcatatgaaaggatggtcaacatcattagctatcagggaaatacaaatcaaaaccacagggaagtgggaggaaggtagatgggaagaagagataattatcaaagaatacaaagcttcagttagactggaggaatgcctttagtgatctattgcacagaacagtgactataaatagtaatacattgtatgtttcaaaattgctaaaagagtagattttatttaaaatctacaaaaaaaaagtgaggtgatggatttgttaattaacctgatttagtcatctcacatcgtcacattgtaccccataagtatatgcaattattattaatttaaaataaaatttagacaaaccacaatgaattactacttttcacccaacaggatagctataataaaaaaagataatgagtagaagaattatctttctacataaaatgtagaagaattggaacccttatacactcctggtagatatataaaatgctactctgcttttggaaaatagtttggcagtttttcaaaaggttaaatacagactcctaggtatataccaaagagaaacaaaaacttttgtctacacaaaaacttgtacacagatgttcatagcagcattattcgtagtagtcaaaaatagaaacaacctatatgtctgtcaatgatgattgtgtaaat

SEQ ID NO: 4634 - DNA, 1075 bp, Homo sapiens
aaaaaaaaaataaataataataataatacttttcttacacacgtaagaaagactgtctggtacataggcccttaataaagactgttaaataagtaatatatatgttgtatttctatacgctggcaatggacaatctgaaaatagatcaatttcatctacaagagcataaaaaaaattaagaatatatttaacaaaagaaatgtaaaattagaccgggtgcagtggctcatgcctataatcccaatagtttgggaggccgaggctagcagatctcttgaggccaggagttccaagaccagcctggccaacatggtgaaaccccgtctctaccaaaaaaatagaaaaattagccaggtgtgaaggtgcccacctgtaatcccagctactcggggctgaggcatgagactcgcttgaacccaggagagggaggttgcagtgagctaaaatcacaccactgcactccaacctgggtgacagagcgactctgtcaaaaaaaaaaaaaatgtaaaactatattttgaagactacaaatcgttgtttaaaagtagcttaaaacttgaataggccgggcgcggtggctcacgcctgtaatcccagcactttgggaggccgaggcgggtggatcacgaggtcaggagatcgagaccatcctggctaacaaggtgaaaccccgtctctactaaaaatacaaaaaattagccgggcgcggtggcgggcgcctgtagtcccagctactcgggaggctgaggcaggagaatggcgtgaacccgggaagcggagcttgcagtgagccgagattgcgccactgcagtccgcaatccggcctgggcgacagagcgagactccgtctcaaaaaaaaaaaaaaaaaaaaaaaaaaacttgaataaacatttactctattaactcaaaatggatcaaaggctaaatataagaactaaaactacaaaactcttagaagaaaatatagacataagtctttctgaccatggagtaggcagtgggtttttttcaagatgtgacaccaaaaagcacaaggaacaaaagaaaaagataagttgaacatcaaaattaaaaa

SEQ ID NO: 4635 - DNA, 1106 bp, Homo sapiens
aaggaccttttttaacattgagaaaactattgttcataaaaccactgcactttactcagtagagaaggtgcagctgcttcaggcagttttactcagtagacattaactgaaatgaaagatgagaaaggtgacaaaaactatagcacaacatttgggaaccattagaacacacttaatgctttataaacctaaaaatggttgggatggtaaattttgtgttatgtatatattatcacaataaaaaaaataaaattttcccaaattttcctttcatctaaaaggaaaaagaaaaaataaattagactttaaaatatataatcaccaatttctcctaggaatgtaagtttgacttaacatctgcaaatcaattaatgtaattcactatatcagtaaaagttgcaaaattgcacacatatgatcatctcaatagacacagaaaaagcatttggcaaaatccaataccttttcataataaaagcactgaaacaactaggagaaaaacttcttcaacccaaaggacatggatgaaaaacccacagctaacatactgaatggtgaaagactagatgctttttctgtaagatcaggaacaagtcaaggatctccactcttaactatttctgttcaacatcatacaggaccttctagctagggcaattaggcaagtaaatgaaaccggtgacattcagataagaagtaaaaaataaaaacaatctcattcacagatgacatggtcttatatatagaaaatgttaaggaatctgcaaaggaaaagctattagaaacaaaaaactaggcagagttgcaggatataagatgagtatataagtatcagttgtctgaaaaagcaaaagtctttctaaggtgtaaaaatgtgtttacagtgtttcataatttctttctttctttttttcttgctctgtcacccaggctggagtacagtggtgtgatcttggctcactgcaatctctgcctctcaagttcaagtgattctcatgccttagcctcccaagtagctgggattacaggtgtgcactaccatacccagctaatttttgtatttttagtcgagacagggtttcgccatgttggctatgctggtctca

SEQ ID NO: 4636 - DNA, 1062 bp, Homo sapiens
tatgcttgtatctccctgtactttacctacatatcacttaccataacttgcaattatatatttagttatgtgattgctgtttatatgtttagtgaaagaaacagtgcaagctccatgtggacttagaatgacttatcttttttttatcgttagtactgaacacatagtaaagaccaataaaacatttttttgtcatttaactaaattaaatttttcctgggaatggaataaggtttcttttttcttttttttttttttttttgagatggggtcttgctctgtcacccaggctggagtgcagtcacatgttcgtagctcactgcagcctcaaactcctgggctcaagcgatcctcctaccttagcccttagcttcctgggttgctgggaccacaggtgcatgccaccacgcctggctaatttttgtagagacagggtctccctatgttacctaggctggtctcaaactcctgggctcaagcagtcttcccatctcagcctctgaaagtgctggaattataggcatgagccatcacacccagcctgaaaaatttgtatgagtctgtcaagattgtggtataaatacagaggaaacatatgtttatataaattgtttctacttttaaaatattcttatgttgtcaaaagttttgtttgtttgtttgttttgagatggagtctcactgtgtcgcccaggcaggagtacagtggcggatctcggctcaccgcaacctccacctcctgggttcaagcaattctccttactcagcttcccgagttcctgggattacagccatgcaccaccacacctggctaattttttatatttttggtagagacggggtttcaccatgttggccagtctggtcttgaactcccaacctcaagtgacccacccgcctcagcctcccaaagcgctgggattacaaacctgagacaccgcgcctggctgtcaaaagttatttatgtcttgttcagtaattcttccctccctctacccccttccccaacaaagcttttttttttttttttttttttctgagatggagtttcactcttgttcc

SEQ ID NO: 4637 - DNA, 1040 bp, Homo sapiens
gcaaacatgactcactacagctccgacctcctgggctcaggcaatcctcttgcctcagcctcccatatagctgggactacaggtgcccatgtccagctaaattttttatatttctgtagagacggggtctcacttgattgctcaggctggtctcaaactcctgggctcaagagatccacctgtctccacctcccagagtgctggggttacaggcgtgaaccaccatgcctggcagtgccgttaagttttgttacccaaaaaaaaaacagaattcctttgcctttcaagtaaaaaatgactccacaagaacacagattttgatcaatggaagttttattacttgtcacaagtaaggagagcactgggagtattctccaaagcagtgggtctctgagggaaagtgagaggagggttttatggggcgatggagagggaagagagggtatgtcactgcatgtagaggaggggtcccagtggtgcacatatagtgagtctttatgcccggacgtaggtcacatgctatggtagtgaagctatagcttctcccaggatggagactttagcatggtaacgaggaaagttcactcaggtttatctgtgagtggccagggtctgtgaggaactggttccagctgtctaggtgactgcattctacacagggtttaggcaaaaataggctgcaaggcaggaggctataaaacaggctgattgttcaagttgattaattcctatagtccatgaagaccttgctgtctgcttacagcttgttgagtgtcttttcagacctttttcttccattcatttacatatattaatacgtagactaatatgtaagggttcttttccctcagcacaaatgatgtcatatatattggtcttcaaggcttttttttttacttaatgtattttgagtctctttccatacattttcatagcactggtatgtctctgtttatctagagtgcaacggcgtgatttcggctcactgcaacctccccctcccgggttcaagcagtccaactgcctcagcctcccgagta

SEQ ID NO: 4638 - DNA, 1109 bp, Homo sapiens
agagacaaggtcttgcctttttggccaggttgatctcaaactcctggtctcaagtgatcctcccacctcagccacccaaaagtgctgagattgcaggcgtgaaccacagcacctagctgaaataatttttttattttgataataagatctttatttctttgttaagaaaaaaaacctgagtaaagtcaaatggtaatattagtgataaaagtttagagatttaagaaagtggtggttcttaaccagaatttagacattgggataaattaatagtgaaatgtcagatgtgatattctgtactgtagcttcagtcaatgccatgaacaaggcatataactgaataaagcagtcttttcagtgttttctgtgagcactctttagtggtgtaaaaatgtgtatatataattggggaaattatatggtatttttgaacttgggtcttaggtcagacccttgaactgattgctatttaattatcatgtatattctgtattagcaattatcaacagtaaaatctcgtcatttttgtaggagaggtgtccttatttaaactggtggggaaactaatcattgctttcatacttgagcagcagtgtcactcttttgaatctttttggaaataaagagggctcatcatttgtcttctgtttcaattggaaggttccaatagaaatactcctaatgaactagatttggcctgacccccaacagtttatctgcaggccttgaatgcatgtgctttgattagtagaattatttacagctgtttttgttttgtggcccttttttagtttgctgacatacctttttctgaggaagttcaaaaaatctggatgttggtatattaataattttatttcatatgtttacttttgactgaaagaatgcttattgtatttagtaaatcatgtcttttgtggtttagatacatgttgtggttgaagagtatataaactgtctttgagaagcttggagaatgtttggaagaatgcgtttagagaaagatacttaaagaatgaggaaatggaaattcttcttagatctatgatctacaattaactgacactttgagtctcaaaaaaatctttgccttgtgattttttaagtcc

SEQ ID NO: 4639 - DNA, 1049 bp, Homo sapiens
tataatttacataccatagaattcacttattttaaatacacaaatgatttttagtaaatttacagagttgtgcaaccattactaccatacaattttaaggcatttctgtcactcccaagagctcccttgccataattactataaacttttattcgtgtggtggcacaaattatagagtttcaaagtaccagcctgggagtttggctgtcctgagtttgagtcttagtcgtgccactttctagctttgtgacttgggtactttggtttccttatctttaaaatgggcataataactacattacagtgttactgtgaacattaattagatactgtatatagagcactgaaagtataatatcctagtttttgcttcacaaatgttggttattggtggtagtccacattgtggatatttaaataagagaaacatctgaaaacacctagcacagtgactgacacatgattgattttcagaaaacaaagctgttctacgtctttccagatgcatcatgtcatcacaattttgtctgtagttgctcattgacaatgttttaatcatacttaaacatcgatgctcacaatatgtagttatttgttattttgcagaggcatacatttgaatttaacagctaagggagctgtaagacttggagtttggtatctacaaactagttacttagctggtggacccaagcaagtagccttgttgtttataattcatatctttctttctctctctctcttttttttttttttggtggagttttgctctcattgcccaggctggagtgcaatggcacgatctcggctcaccgcaacctctgcctcccaggttcaagtgattctcctgccttggcctcgcgagtagctgggattacaggcatgtgcctgctaatttttgtatttttagtagagacagggtttctctatgttggtcaagctggtctcaaactcctgacctcaggtgatctgccaacctcagcctcccaaagtcctgggattacaggtgtgagccaccacgcccaacagtttttttttttagagatggg

SEQ ID NO: 4640 - DNA, 1052 bp, Homo sapiens
tatgggcaaggagtggcttgccaatcattggacagtatgttgtatagaacctagaaaagggcagcttttgtaggagtaactttaatattattaaatgctatatagaaagaagtaaaataagaattgagatatgactcttgaatttcataaggttcttaatgtgcttgttaagaattattccacaatagtggtggatggaaacagggacaaggattgaatgacttttttagatgagacaagttggagacaaatttctttcagctcctgaacaaagatttaagcatgccagtggggaaagaactaataatgaaggacaagttgaagaaacagaatattagtgccaccctctaaaatgtcttaatttcatcatattcctgaggattctataggatagtatttaacaacctgaaacataaatttatcaggcacaggttagattttctttccattgtgattatttgtccctgcatcccacatgattatttgccagtcagatttgtgtgtctcaaaataactggacaagaggagtaaacttcctttataaaaatgaaccattattgcagcaagaggactgatttcaaaagatgacctggaaaactgtttagtcttgttaaaatatttggcctcatcttcaaaatgtatacatgaatctttcattttgggattgaaatatctttctgatttagaaaagaagcttgattaagaaggagatgtcaacttttacctcccccgcccccaacaaaaaaacagtttcagaaatttatgattaatttaaaagcagttaagataataaagcaaacaattttgtaaaattttttgagggtaatgagtaaactggaatgctcaatgtatactaaaaatactcctgatcttagtaaccagtttttattacatccttagtgtttgtactaacactaaattggtgattataaatttatttacttgatagtatagtatatgtaatattcaacagagtgttaatgcaaaaactgaaaaaattaaaacattttgcttttttgcttaatcggtaaattttcctttctactaccttt

SEQ ID NO: 4641 - DNA, 1051 bp, Homo sapiens
tattagtgtgtgacacatatgctgtgtgatgcatacactgttttcttgagtaaagaggagatttttgtctactttttttattgacactcatttttgttccttccagttcaacatgagaaatctgctgcattcaaaatctacaagtcatcattgctccaaaaataagttcacaaagggtagcttcctaactgtgatcattttaactggagtgctttgtaacagtttaaaatgtagtaaatgctgggaaaaaaaatctaacaaaaataatgttgtgtgggccggacgcggtggctcacacctgacatcctactgatctgggaggctgaggtaggaggatcacttgaggtcaggagtttaagaccagcctgggcaatatagcccatgtctacaaaaattgtaaaaagttgcccggcatggtggcccatgctcatagtcccagctcctcaggaggctgaggtgggagggtcgtttgaacccaggggtttgaggctgcagtgagccatgatcatgccactgcactccagcctcggtgataaagcaagaccctgactcaaataacaacaacaacaaaacattgcatgaaagaagccaagtacaaaagaatacatactgatgattccgttatatagattttttttttttttgagatggagtctcgctctgtcgcccaggctggagtgcagtggagtgatctcggctcactgcaagctccgcctcccgggttcacgccattctcctgcctcagcctcccgagtagctgggactacaggcgcccgccaccacgcccggctaatttttttgtatttttagtagagatggtgtttccccgtgttagccaggatggtctcaatttcctgacctcgtgatctgcctgccttggcctcccaaagtgctgggattacaggcgtgagccactgcgcctggcctgttatatagaattttaaaccgggcaaaactaacctattgtgttaggagttgggatagtagtgatatttggggaagaataaaggagtaatcattgggagggatagtgagggggggccttttgaga

SEQ ID NO: 4642 - DNA, 1052 bp, Homo sapiens
gcacctgtaatcccagcaactcaggaggctgaggcagagaattgcttgaacccaggaggcggaggaggttgcagtgagctgaaatcatgccactgcactccagcctgggcgacagagcgagacttgtctcaaaaaaaaaaaaagtgtagtggaaaacttttgaatgaaacagaatcactaaattcttagctttattatagaacagtatttaatttgtccaggtctcagtttagattaagaagtaggccaaaaaaaaaaaaaaggcctataattatcagaaaaattaatgaactaaatcatctgcactaacatattggtttagaagttctcttgctttgtacataattcaaggaatttgattatctattttctcgtcccacagcagattaaaaggtgcaaattagatgttggagtagagccatataggtaggatggagggccagctgggtggcaggaaaaaagtcacattagcctgaggctgtttaaaatagggacagcagttacctatacaacacctcattagactctgagtatatcattaactgttatattgtgctatatataaagtattgctcctgatggaaaattcattgtgggaaaattatgtttgtaattttgggaatcataaacatatatacagtagagtggtgtatattagaatatagacctcgctaaaaaaaatagaacatacactttggagtccagtatatctaggttctcatcttctatgacttaagcattataattcctcatctctaaaaacagaaatggtaatacttttatctaaaggttgtttggaaatgtaaataataatatctttagtatagtacctgacacctttaatgaatgttattttcctccttaaattctgtttaacaaaaattagaaagatattcatccagaatatttttgatcaagttctactgtaaaatgttaatatagaagctacatataaaaccttatatagtttagggttaactgtatgtgtacttttgggagtggtagtcagaaatgaagtaattcttcatatgccattctcattttcttcccac

SEQ ID NO: 4643 - DNA, 1032 bp, Homo sapiens
cattctgctttctgtctctaatttgagccaacatcgaggaagagtactctgtacaattgaaattgcagaaaaaactttgggatgtgattgttaggaataaaaaaccacctaattctttgcatgcttctctaagtacagtagacatgctgccagggactctttatggaagaaaagttgagactcatagaagtttgcagttttgttttgatcaccccagagggttttgctcaaactcttagactcatttgtatttcttcattgggttataagaactaaaatttaatgttctatacaaatgtgaacaactaatacttggtctcctatctagaacttgtttgccttttaggttttcttaatgtatagaagaaactaggaatattcacaaaggatttatttgaagttacactgggaaacgatttttagaatttgaagctctttgatccctgtgaatctaactttatgactattttattcagctaatctttgagaatatttagagttttgatttgcgtggcactctgcttttaatcccttgttgaataagtgttagaaaccttgatcttggccctatacctgatcacctctaaaaacatgaacagtgttacaaaggcagttgtttagtaagcttttttggattgttttaattggctgactgagggagacaaaattagtttttttttttctttctagaataaagggtaataaacttggactttagagttactgctaagattgacatttccatttggggctttagaaatatattgttatcttaaattcaaaatggtactttatctaattgaattgaaatcttaaaatttatgagaaacaaaagtcactttatgttcttagtaaatatttctaatggggttataggagatctaagtacaaaaaaaatttaaaattttgttattaatctcccctccttaaggaaaattttattaatatacataattataatttagttataagaacaacttaagttgagtacagtggctcaagcctgtaatcctagcactttaggaggccaag

SEQ ID NO: 4644 - DNA, 1006 bp, Homo sapiens
gttgtttcaacagcatttgtaaaaattactctattttttttttaacttgccaagttgttttgaaattcagttgattatggatggatctgtttctggaatttcttttctgtgcctttgatttatatgtctatcctaataatactacactgtattgattcctaatgcttttattaacagtagaacttcaaatcatgttgtgtaagtccctagttttattttttctttttcaaaattattttaactattataatgtctttgctttttcatttaaatttttgaatcactttgccagtttctactagaaaagtttgtatgattttaattggaattgcattgagcctatagataatgtaagaagaattggcattgtgacactattgagtctctggtctatgaacatggtataactgtcaatttatttaggtattctttaacatctctaagcattgtttggtaatttttagtatgtaggccgtgtgtgtgtgtgtgtgtgtgtgtgtgtgtgtgtggtttgtctctaaatgattcatgctttttatggtactataaatggtattttttaaattctatttgcttatcatttattgttagtttatggaagtgaactgattttggtataattgactttgtgtctgacaatcttgctgaagacaatttatttattctagtggcttatttttaaggtacattaggattttccacataggccatcatctcttttgcaaatgaagacagttttcttttttcagatccatatgctttttccttttcttgactgtcgcactgggttgtacctctaatacagtgttgaatacaaatggtgagagaaagcatgttcaccttgttcctagtctgagagagaaagggttcagtatttcaccactaagtatgatgttagttgtaagtttttcataggtattccttatcaccttgaagaagttcctttctattcttagtttgctgaagggatgatgaatgctctcaagtgcattttctgtgttgtgat

SEQ ID NO: 4645 - DNA, 1083 bp, Homo sapiens
gctggagtcaaagatctgcctcctgaaaggtactgtgttctgatgtttacagccaaattccattaaacattgactgatttattacaatggatacaactcagaaatagctcatgggaagagatgcatagggcaaggtattggagagtggcgggtggagtacacagaataggtctgtgctggtgactcttggaaacactttggcattttcttcccagatgggtaccctcctagtacctcaatgttttcaccaacctggaggccctggaacctccattttcaacaaactccctttgggatttatatataataaaatgctataaaatatcagtttttgagctcttttctgtttgtatatttgcttaataagaatttgctaaatgaataaattttatctgattaagttttcaaggacccaaatgaccaaaataagaacttactgtaagactcaaaatataacaaatgaggttaatttaaatcaggcagtgagtttttggagaatatgttctgtacaacaaaaaaaaagttactacaaaatacccttccaactttgacatattaacatccttatttccttctggctttatcagtctttctaagtcatttaagtctaaaaccccagaatcattattgttgcatctctttattttccatctaattattcatcaaatagcagtaatgctttctttgaaatgtcttctatatatctttgttttcgtttctgcttttcatctcctcatttctgttccttccccttccccttctctcgatttacttctaacagctttatgtccctttcagtcggcctttatgcactaccaaatattcatctttatacagagataatcaatcaaacattgcttgttacctttagttgacccaggtctttcagaaaagtttttttcaaattcagcatttgcatgtacctctatctggtatattttggccaacactaaaaataaggggaaattttgataaatatattacctgaacttgttagttatttaatctatttcacttcagatatctgtatctaattttaaaattatatttacccttactattaaatatgatccttaagaaaat

SEQ ID NO: 4646 - DNA, 1153 bp, Homo sapiens
tcagcagcaccccacttctggtaccaattttctgtattagtccattttcacactgctgataaagatatactcaagactgggtaatttacaaaagaaagaggtttattggactcgcagttccacatggctagggaggcttcacaatcatggcggaaggtgaaaggcatgtctcacatgacagcagaaaagagaagaaaacttgtacagggaatctcccctttttaaaaccatcagatatcatgagacttattcactgtcacgagaacagttcgggaaagacttgcccccatgagtcatttacctcccactgggtcccttccacaacatatgggaattcaagttgagatttggatggggacacacccaaaccatatcagaggagtctttttcattcctttaagccatcagtttcttttcttttcgacaaataataattgtaagtatttatggggtacaatgtggtattttcatatacatgtacattatggaatgattaaatcaaactaatgagcatatcggtcatctcacatgctttttttgtagtgggaacatttaaaatcttattctcttaacaatattgaaatatccactacattattattaactacagtcactctgctatgcaatacatctcaaaaacttactctttttgtctaattagctgaaactttgtagccttggaccaacatcttggcatcctcccactcccatcccccacctctggtaactaccattctattctctatttctctgagttcaattttttaagattacacgtataaatgagatcatgcagtatttctttctgtgtgtgatttattttacttagcataatgtcctccaagttcatgtaaagctgaatggtattccattatatacagtttaaccttgacaacgtgggggcaagaggcactgaccctccactcagttgaaaattcgggtataatttgattccctgactcaaaagcttaactactaatagcctactgttgactgaaaatcttaccaataacataaacaattaacccacataagctagacaaaagaaaatattattaagaaaatcataaaagaaaatatatttactgtttattaaatgaagtgaatcataaaggtcttcatcctcatcttcacatggagtaggctgagaagg

SEQ ID NO: 4647 - DNA, 1041 bp, Homo sapiens
actttctccacatatgtatgagactgccaaagcaaatatctggaacaattattctatctttaatagatggctcaaaaataaaaatacagttcatagaccattaatagaataattcctatactgagaaatggaaataaattatgtaggctatgaaaatctgcctgtgtaagtgttgccactttcttttacctctctaaatggaaatcttcctaaatgtaatttaagattcttataatatatttctggttctactatagacttattaggctggtgcaaaagtaattaaaagtaatgacaaaacccacaattacttttgtaccaacctctataaatgattttatagggtaattttagccttagaattatcagtattgttgtatcatttaacactgattgtttctttagattagtaaagtatagcttttgtccaagaatccttttcttacatgatttctaattagtcctgtgatctagcctttcaaatttgcccataaaagatctttgaactataactttggctgataattactattagactgtgatgtcctaattccgagtttttctattctaaaatactattattattatttgttttcaggaagtgaaaataactctctctacctgtactataaaggactttctaagactttgctaacttttaagtttgatacagtcaaaagtgttctcgacaaagaccgaaaagaagatgatacaaatgaatttgttagtgctgtgtgctggagggcactaccagatggggtaagttttcatatcagttttttcaccttgggatctcatattatgcattatgtatacacagggtttgattaaattttaaaatataaattggtatgtggtatgtactttttaaaaaactttgtaatgtgtcaccaaagacaataggcattttaggtagtgattgaaatgcatagtaatagagcaatgtcatggtgtcataatgtccctctgtgacccatagcatttagtgcatatctcagttataaccattatcatattgtctgttcatatctcttctataag

SEQ ID NO: 4648 - DNA, 1416 bp, Homo sapiens
ggacaccatatttaagactaaaaataagtcaataaatttaaaatgcttgaagacatacaaaacagttttctgtcaataaatttaaaatgattgaagacatacaaaacagttttctgaccaaaatggaattaaattaaaaatcaacaatagttactttgagacatctgcaagtatttggaaattacatgacacattactaaataaccattagtcaaagaagaaataacaaaggaaatgtaaaaggattttaaactgaatgaaaatggaaacacatcatatcacaatttgtggtatcagccaaagcagtgttgatagagaattgtgtatccttaagtgtctgtctttaaaaagaataacaaagctaactgaagacaagcagaaggaaggaaataataaaggttagagtagaaattagtgatagagacagacaggaatagagactgcctgtgatggtggatgccaaatgagtgatcttatcggagtgcagaaatactctaaaactgatttatggtaatagttgaactgctggttaaatttagtaaagatcgttgaattgcatacaatatttttagtgtgtgtattttattatatgcaaaatatatctaaataatggttttttaaaacaaatatgggaaataagattatatagcattatgtttatccagatgtcccataatgtttatattaacatttttttcatgacatcattaaaacaaagattgatttttaagtttccagttattttgaccccttaatactctctttctagagccaatcttatatttgaaaaggattccttttcctttgttttctggctgttagagattagacatcatatgtgaaacttttaatgaaaaaaccaaaaaccagttaaaattaactttgctttccatttctgcatttactacatttatctaattttgttttgttttagatcactgtgtccactactatgatcttcgtaacactaaacagccaatcatggtattcaaaggacaccgtaaagcagtctcttatgcaaagtttgtgagtggtgaggaaattgtctctgcgtgagtattactctcctcagaggttgagcttaatacagagctctgtacttacctaccagcttgtaatgtcactgagggtgtatgtaaactataatattggagtatatgtactttttcttaaatagtagattttttttttaatcttgtccaattaaagtagtgtggtttctggtctgtattgtgcacttttatatgtgaattgtgggtaaaatcctgaagatactagttttttatataccctccccccttatctcatcctcctatgtttaattgcatttgaacttcagattagattttagctattgcttctaaagaagagataaacaacatagttgatgcaatagaatgagaagtattttattta

SEQ ID NO: 4649 - DNA, 1071 bp, Homo sapiens
cttttgtacagtacacaaggacataatttaacctttacttatatgcctttcacatattacaccccttttgtattaacatgagaatacgttagtatattattatatggtactatgttatttttataataccaaattattctcatcttatgaaataacttgagaaattatgtattaaaatgtttttgaattgtgaaatattagaatattgttactatttgacccaactcaaaatctccatgggaaaatacctgtcgatacccacagtattgttgaaaataatcagatgcagtatcacagctgtgtcagactctagtaccagttgggcaatcaaggcacagctaaaaattgaaaacaaagatctggacaacaaaacagccaaaggtgggggtcaagaagctctgacgtgtacctagctgtagaatgctatgcacatgtgccaggtgtagtgtgcatatccaggaaaaactgcagagagccccagtcttcacctctggttgaccatgagctctgtgtaagcaggaagtgaaggctaaggcagatttaagctctgaaagcattccacaacatacacacaaatcgtgcaaagcattaaggaaatcttgttactgctaagtgttgctgacccaggaacaactcctactcagctggacttaaaaataaaaacaaaaataaataaaaaactcattaaagatgtcagtggctccatgcagtaggaattacaggctgaacagatttagtcccagggaagtcattaaaccacaaacagcaacaccgccaatagcaaaaagctgagctggaagaaaaccaggaggaagaaccgagtccacagttgccacatagtattttccaaagtgtctgcttttcagtaaaaaaaggtatacacaaacaagaaaaattcttagtagaaattatcctagctatagggcttatatatttgtaattagttattacaaatatattcaaaaaaggtaattaaaccacaaagagttaaaggaaaatatgacaaatatactttatcaaatagagaatattaacaaaaagaaataaaaacaaataattctgttgttgaaa

SEQ ID NO: 4650 - DNA, 1037 bp, Homo sapiens
gtgtttgttttcttcttaatggctgtggagatagcatcatttggcttaacaactgaaataagagagacagattccctttatactgaaaaggccagaaggtcatttaagtaatcaaatttggcatcaccattggaacaaacatgtgcctcttcttttgatgtgatagaaaggaccatcacctttatagtatttgtgccaaaaacatttaatttgaacataataagaaaacatttagacaaattcagatgtgtggaacaatgtgcaaaacagctgtcctgaatgcttcaaatataacaatattatgaattgttttatataataggccagagacatggcaactaaatacaatgagtgacccactagtaaaaacttaataaatattcaggcccttttttaaacagttgggagatatctgaatataggatgcattgtatattatatcaatattaattttcttgagtgtgatataatgatattgtgtacataggaaaggttttgtttgtagaaggtagaggctgaagtttttaaaagtcaaatatcctgatgtttgaaacttaaagtggttcagcggtacagggggcagagagagagagagacaagaggcggtgtgtgtttggggtgtgggtaaagcaaatatggtgaaacatttacagttggtgagtctagaacaagtggtacaaggttattcattgtgctgttctttcagcttctttgcagactggatatttttttcaaagctaaaagggaaaaaggaaaaacagtaattgactgtaccctaattcctcattattaagcatactttttcagttatggcaatgcttcagaaatataaagacataccctcctttataaaggaaagaaaattattgcggaccccccccccccaagtaacctaaacttataacttaacatcataatgttattacaatatatataaaaatgtaaaggtgtagaccatcttcatatgcccctgtctcctaagtaactataactcagaacaaattctaattattaataaatgcaatatataaaatcaa

SEQ ID NO: 4651 - DNA, 1046 bp, Homo sapiens
ttcatttccttcagggaatcgatacattttatttgttacaagatttatgggcatcaaagtccataaaatgctcctccacttacaatgggattacagtcccaataagtccatcataaattgaaaatgcatttaatacttctaatcgtagcttagcctaacctaccttaaatgtgctcagaatatttacattggcctacaattaagcaaaataacacaaagacttttacaatacaatgttgaataatacaggtaagaatatcataccacatatcactagcctggtgaaatatcaaaattcaaaattggaagtatggttcctactgaatgcacattgcattctcaccattgtaaagtcaaaaaatcataagttgagctatttaaattggggactgtctatatttgtaatatactcatatctctagggtttgtagccatgctttttttttttttttttttgtttttttgtttttttcattacctctgagaagctgtgatgaagtcatcttctgtcttttattcctgataattggtattttgtgtcctctcgtttatttattgtttattaatttaggtcagcttggcattaggttcttaatcttttcaaatgctcaacttttggttttgttgatttttctgtaattttctatttttaatttcatagatttctgcccatttttcttcttgctttgggtttaatttcctcccctttctagttttttgaagattgaagtttatgtcatttgatacttctgtctttttaatctgaacattttttgttatatacatttcccattaagcactactttagcaaattttgaaacaaatttgaaaccaagttttcatgactatttactattatatttgctattatattattttcatgactagtatatttgcttttccattctgtttaaaattctgtttgatttctcttgttattctcttgttcatctatggattgtttaaagtatatttaaatttccttaaaattttcagaaatcattctgttgctgatttataacttaatcctcttatggttaaaggat

SEQ ID NO: 4652 - DNA, 1870 bp, Homo sapiens
tcactcgcggttaggagctggagaccagcccggccaacacagcgaaaccccgtctccaccaaaaaaatacgaaaaccaatcaggcgtggcggcgcgcgcctgcaatcgcaggcactcggcaggctgaggcaggagaatcaggcaggggggttgcagtgagccgagatggcagcagtacagttcagcttccgctcggcatcagagggagatcgtggaaagagagggagagggaatccgtggggagagggagagggagagggagaggtcacattcttgaagtggggagggaatacactcttaagttcttattatagcaaagcatatcactcatgtagcaaactatataaatgtttagaatcatttcggagctacatagcaggtatacctgcattagacaatataatggataataagattcttacacctacttataattagtaagtttggaatgttcagcaaatattggaaacgcaggggtagtttgtctttctatgtaaaatggatttcatttctatgctcagttaattataggattttcatttgcataaggatgagaagtataaatatttttggaggtataacgtagattgtgagacagtgaatatgatgagtaggattggaagagtaagggcaaaaataactttatcctttgctcagagtagaaacttagtagatacattgaatcctttatttctttctgtagtaattaataaagtgtttgtagtcactagacagaaatactacaattcccatttaggagaataacacagaaaacaaaagaaagaaatcagatggtcaaatactttaattaaaaatgtgattgaaacaatatatatcacaaaataagatgacagatacaaaagtaaacgtgattgataaatttaaataggctaaacttcctggcaataagaaaatatttttatagtagattataacataaaccacaaatcagtgcttgtatagacgagttctgaaaacttcaaactgtgaaagttgaaagtaaggtttaattcaggctagaaagcattagatcaatctctctttgtcttacacacacacacacacgccccattataatgatcaaagttcagtctgcactgaagtttaagtctaattgtaagtatctttatatattaaaaaatccctgtgttaactgtaagacaaaataaacacatttagtggtatgagactttaaattaaatcagatcttagtccatgacagattaagtgcacaaaaaataaatgttaataaaactgtagaagccctaaataacataattaacaaactagaacacatatacaaacatttataaagaatataccttcttttaaattgtccatggaacatcagaaaatgtaaagaatctagatcatataccaaatctcaaattacagaaaataaaaattaacattttctgatcacaacacagtaagatcaaacatttattacaaacttagaaaacaggaaaaatataccacacggaaatttaatagcttttttggcaacgctgggatcaaaatggaaatcaaaccagtatgatgaaatttctgtgtatcagaacttatgggacatagctaaaagtgcccagaataaaactccttactctaaaggaattaacctactcaaaaaggaattaactgaaaaagtaatgataaataagatgatataaaacaatttaattaaacaaccaagcaaagaaattagagaaagaacaaagtaaacctaaataaaatagaaggaaattaaataaatataaaaataagaatacattatgaaaaaacaattactaaatcaattcatgagcttttaaaaacaaaagatgaaaattgttagtcaacctaatcaggtaaacctggaagaaattactag

SEQ ID NO: 4653 - DNA, 1032 bp, Homo sapiens
tctttaagtgctttaaggagaaagacattttatcacaaaataaacacttgatattcacaaaagtttttcagaatatagtctatcaggtagtgtatttatttgttttagctattcaatgatagccagagggaataagaaagtaaatttttttaaagtagttgttttaaagcaagatcttgaggttttatggaattcaaacaaaatgagccacctaataaaaataatagaataaaaatatgcatagactttaaaatgtggcttcaatttagtgcctatggaataaagtctgtccattaattcagaataaggtcagcaattatctagcaggttgctattaaaaaaacagtttaaggtcagcaaactaatacctgcgagtcaaatttcaactcattgcttgactttgtaacaactaagaatattttttacatttgcaaaggttgaaaaaaaatacaaaggataatactttgtgacatgtgaaaattcagattctagtgttcataaatgaagttttgttggaaccactgacgctgttctgacataaaattaatagatatcaatggctcacacctgtaatcctagcactttgggaggctgaggcaggtggatcacgaggtcaggagttcgagaccggcctgactaacatggtgaaaccccgtctctactaaaaatacaaaaataagccaggtgtggtggtgtgcacctataatctcagctactcaggaggctgaggcaggagaatcacttgaacccaggaggcagaggttgcagtgagctgagatcacaccatcacagtccagcctgggcaacagagtgagactctgtctcaaaaaaaaaagaaagaaaaaagattttgcaaactccctaactacaaatttttaaaaaattatagtgtcttaattctaatataaaggagaaataaaaggaaaataagatgattttaatttgtaaatacttacctattctgtatggttaaaataaggagatggtcaaataataatttaatgactcacttgttttattgccatacaaaga

SEQ ID NO: 4654 - DNA, 1098 bp, Homo sapiens
aacgtgtcaaatattgctaaaacttaacatgcttttcatttacaggactaagatttgaatttattatgtatatgaagatcttaaaatttaagccattagctaaagaaactattggaggagatcttttattgtattctgtcagctgtttaactcagtaatgagtaagacaaaaatcatacattcctttatttttctgtatgttggcacttgactgagtaaaatttgaaaatgcagcagattatggggtgcattttattacataatttaattaacaaaaaatcattgataacgtagtgcaggctaggccagactaggcatatagtcatgaacaggccagacgtgttacttggattcaggagagctcacaatcttattttagggcccttatagataagaaataaaagaatagtttatgaaacagtttactttggagcaacatattagcattcttacttaaattcttaactatgttaagaatgtatactatgcttttaaggacttcagaaatgtagattgaatgtgaaatggcaaaaataagtatcaaagtttatttataatattgacctgatatgtatgcacttacctgtagttatgtgactatacaaagagtaataatctttttttttttttttcattcctgaaagccattttagcttgattttggggaagagatggtttcattattgcttttttaaagcttgatttaatgtagtgttgaattttttacaattgctaataaaccctaatcatactgacatttatgtgaaaacattgtgcattctgaggcagaaatacattcttaggaagacctaaacaagatcttagtttggaaatacttacaaattgtggttagattaaaacatttagactaatataagaaatttttaagatacctctggttgggccgtcttgcatgctacattcgttttttttctattaattacaccaaattaatgttttttaaagaaaaaattccaattttaaagtttcttaggcatgagagatgaagactagcaagaaaggatgatatggccaaagaaatgaaggtgtgaaaaactctcacagctctgttgattttttgcttttcttactttctta

SEQ ID NO: 4655 - DNA, 1094 bp, Homo sapiens
tacatatgtgtatatgtgtgtatatatagtatatatacgtacatatgtgtatatgtgtgtatatatagtatatatacgtacatatgtgtatatgtgtgtatatatagtatatatacgtacatatgtgtatatgtgtgtatatatagtatatatacgtacatatgtgtatatgtgtgtatatatagtatatatacgtacatatgtgtatatgtgtgtatatattcatatatgtgtgtgtgtatatacacacacacatacatacccccatcttggtttgtgtaagtatactctatgatcacataatgacaaaattgcctaatgacacatttctcagactgtatccctgtcattgagtgatgcatgactgcactaccttaggaagaatagttaggcatggtagggctttgcaagaggattctgttttagttttcatagccaggcttctccaaggaggtgacatttaagttgacacattaatcaagtaaagactaattatgatggaaagttatgggatagtgttgagcaggatctgatttagattttaaaatgtttacttggatccctgtgtggaggacagagaagatgtgtccctctcaaccccttgacattggaagctggggagaaaagttaggaagcattgtagcagttcagaagagaggagatgttggtttgcattaggattttattgatagaagaggtaagagtggttgtattgtaaaataaagtagcagatctcgtaaaacatactagatttcatgaagtttatgaaaatattgttggagaattgctaaaattgcttgcaaagctgtcattaaattagattctagcagagttaaatgggttagcagttcaagaagggaaaataggcaaacagtattttcttcaagagtgttttgatattttctctgaacaagtgatgtgaatatcactcaaggattgagagaggcacttgggaaaaatgatgtagcccttaaatactcttgagtgaaaatgatccttaagattacgatttgaaatcagacattctgagacaaatattatcttttataatactattcatatttgatttttctttaagcaatagtatgtagttg

SEQ ID NO: 4656 - DNA, 1063 bp, Homo sapiens
ctttaggaaagctattatggatctagttcagtacatcatgtacagaaagggtgcagggatgttctagttaaggagaattcagaggtttgacatttttcccattaattatagtatggagaatccttgtgagttcgttaattctggtgttattttagctgtgtaattcagccgattttcttctatattttactttctttgaaacatttgagaatgacttggtctgtgtatattgttatctttaagccttgaattcagttctgatatgcacaggatctttgtcaatggaatacttattatgtaagtacatacagggaagaaaaagttgtcacatcacaaaaagttcactaataatgattcattcccattgtctttttcctctctgtttaacagtagcaaattttttttgtatatattgtttccagatctttgttactcagtctctcactgattgttggattttatgaaattgtgacagtacggtgcatttacttaattgctctatttattgaatgcctctgatgtgctagggactattctaggtgttggatctagctgacaaagtcctcgtccctttggagcttacattttgggatgtgtgtatggaggttgggggagacactaaaagggccaatgtatagcatagtagtagtatataacatacaatacagtcatgcactgcataatgacgtttcagtcagtgatggactgcatatatgatggtgatctcataagaaaataatagagcacataaagagacctaatatatgacacttgatattggcattgcagatcaagtaggggaaatgactgatattcagtaatggtgctgggacattggtttttcacatatatatgtgtacatacgtatatatatacgtacgtatatacgtatgtgtgtacctacgtacatatacgtacgtatatacgtatgtgtgtacatacgtacatatacgtacgtatatacgtatgtgtgtacatacgtatatatatgtacgtatatacgtatgtgtatgggtatatatagtatatatacgtacatatgtgtatatgtgtgtatatatag

SEQ ID NO: 4657 - DNA, 1035 bp, Homo sapiens
aaagttatcagtaagattgactgcaataacttacctaaaaactataaagaattgaaaatagatgtattaaataacagcttacccttcaccatgaggagaaaacttaggaaaatttagataataaagccttaggtaggatatagtttttttcttatggtaaaaacatatgtaggcaaaaacaagtaaaaacatagctacctatttagaacttgggaggtctaactcatggaggatagttaaaaggcaattttgtatcaacagttttatagcgagcatgttctaatttaacatttataaaatttctcagtcatttcacactatacaaaatatgggaaaattaaatagtcaaaatcctgtgctctggatagcatgctaaaataactttgaaaactttttttttttttttaaatttctaactggctggaacctggtatgtttatgttaagaattgtctaattaggatactttttactcatttaaaaatgtgtaaattgtctgttatgtgctatgttctgggctatctttattctttttgacaataaatagataagagatgttttactggatgatgaagtgttgaatagctaaatattttttatgtggtttgtgactagatttttcttattctcaactgttgctaatttagttgtgattttaatattcctactaacaaacatctgttataaatttaagatttacttgtgtctcaggttttttttttgtggtaggaaagaagaagatgtccagtcattcatttgtttaaatgtctggtggtgcaatataaatggcaatgtgcatgaaagttgcctgttacggagcttgtggtgagccgagatcgcgccactgcactccagcctgggcaacagggcgagaatctgtcccaaaaaaagaaagttgcctgatgatcttgctaaaatgcatgttcagattaagggaggctctgttggagcctggcaatctgcatttctggagagataatggagaattcctttccaacattaattcttccgtgtgatcttcatttggcctttgatg

SEQ ID NO: 4658 - DNA, 1030 bp, Homo sapiens
tgtcttatacacacacacacacacacacacacacacgtatatttatatgtgtatatatatgtgtatatagtgtgtatatatgtgtatatatatgtgtgtatatatgtgtatatgtgtgtgtatatatgtgtgtatgtatatatatatgagctacatgtggtgatatgcacctgtagtcccagctacttgagaggctgaggcaggagagatgtcccgagcccaagaggtcgaagttgcagtgagtcatgatcatgccagtgcactccagcctgggtgacagagtgagacactgtctcaaaaaaagaatggagaccttctttgattctcttgttattcagaatacatttcttaaaagctattggctttaactgatttgatagtaatttttaggtactgtaacttttagtataagtagaacacattatgtgacatgacacgtactgtacccctgctttttcttttttctttttaaataaactaacggatgatggagctgtgtgcgaggtaaacctgtagtcatttcttccagttttcaggccagaaaccttcactgatttttgtctcatacccaacatctatcagcaaaccatagtcctaccttcagaatatatctagaatctcaccacttctcatcaacccaactactaccaccctagtccgtttcaacactgtttctcactggattatgatagcttccgtaaccatttctacacttggcttccctttagtcttcttttcagcatagcaggtagaatgatctggttcattactgtgtcaaatcccatcactcctcttttccaaatccaccagtgaattaccgttttactcaacttaaaagccgaagtctttaacacattccttagttctttgaggtgcccttttttttctcttttctttttgagatagggtcttgctctgtcacctgggctggagtgcagtggcacagtctctgttcactgcagcttcgcctgctgtgctcaagtgatcattcttcctcagcttcttgaggagctgggactagctagagtag

SEQ ID NO: 4659 - DNA, 1035 bp, Homo sapiens
atgtataaattgggatgtagtaatattctataagattatgaggtttagagtatataatgcatgtaaaaaggcattataaattataaaatcacaaagaatcaggtggttatttgctagtgtttggcatttggtatcaaaacacgaaagtgtttctgcagtcctgtttatgtgaggtgtaactactgcttgtttttctaaatgactctagattgtgcctggctctgattatctcagtaatattattatttttaagtatttaacctttgaaagattgattttttttttagttggaaccagtactactataagacagttgacacattttatgaaagcataatggagttagcatttgtactaaaatatgcatgtattgaactatgtacatattagtttgttggacagttctaagatagtactttgtaagtacttattaaattcacttaataagtttggatgctgcttttgaaggaaataatgcatataaaagggaatgacaaatagagcactgattaacgatgttacttgggccggattgcaatatgacccttgattaactgagatgatatgtcttataaatgcatattagatatgtgaaataattttctgtatctggatctgttctgtactgttttttttttttttaaatgtcccaagtgacatacattatcttttggcaagcttaaggttgtgcagtatgatatctgtccttctggcaattggtataaaaatgtcttcttcacagcattttattgcttgaagaacacgattttaataaacagtgacaagaggtaaaagttcaaaataatctctactaatacaggttgagtgtccctaatccaaaaatctgaaatttgaaatgctccaaaatctgaacctttttgagtgccaccatgacacgcaaagaaaatacttattggggcattttggattttaaatttttagatgagggatgctgaaccagtaagaatataaatgcaaatatttcaaaatgcagacagatccgaatctgaaacacttctggtctcaaccattttg

SEQ ID NO: 4660 - DNA, 1044 bp, Homo sapiens
ggtggtgtctgcagagggaatcgagcgtttgcaggcattcgagctcctggttggtggggtgaaggaatgttggagtagcgaggcagggtggggataataaagaggtaggtaagtgttgctgaggaggaagtgaagggagtttaacgaatgacgagggaagaggtggaaggtcaaataaatggttttggataacaaagttggcagagaggttgagtcttaaaatttttgcctctctgatgaattgaacactcagtcaatcaggagtccttgttgagatgaatgaaatttgcaaatggagaggactaagcttcctcggatgcagaggggtggagttggtcaaaatttatttgaagtatggtagatgatgctgtaaacataagcatggatgtcttataaagacatgctttttataataatgtaagtacctatcgtatgtatgtgtaaatatcttcttccatttcaaaggatgggccacttaggaatcggctgttgagacgactgtagtcaaagtctgttaacagatttttcacttctccaccaagtgtcttgaaaagagagaaccacgtttgttaaataacatccctgtgtcagatgtaactgtactatactggataacagagtatactggaacttctgacttgagaaatgctaggtatagacattttgtcgtcatagttggcatcttgaatgatacagagtaacatttagtcatgacatttgggatagagaggttagtcatatgaagtgaaaggtggtgttgattgtcttgcttgagagtgttttggaatttttattggattttagatattggtaggattatgagaagtaattgctgttagctagctgcttaagaagtggtagtgtttcgtactttcctttttgaggaaattgttgatcaaatattaggcatgtaggaagttggctgcttgcacagtcattatgagggaagttgattcagatcagggttgaagatggtctgagttggtgttattaaataagatagagctagaagttggaactgttaggaaagttattgattagact

SEQ ID NO: 4661 - DNA, 1031 bp, Homo sapiens
tgatgtataaagaaccatttgattggaagctactacttgacagtcttctgtatttttcttgtttatatttgcctggctttccaaactactccacgttgtctgggattctgaagtactttttccaagtcctggggtgctctggaataataggataagtattctgatttctgaatgtcaagcacatgaactgtggttaacgtaatcctctatttctacattggattttgtttattaacactttatttttagattttatttcctgagtttgcatatcatgtaacaactgctggtactacaggcataattaaaaaaaaaaacaacagcaatttgaccactgagccacatgctgaccaccttgcctagaatttgtaaatttgctgacaatgtgtaattattatttttattgcctcaaataacaataagttcagaaaaatatgaccagagggagccatcttcagagcatgtctacataatcattagagctgggattcatggtatagtgatacatgtagttccctgtagtttttctaatactgctagagactgataccaccccctggatgcatgaagggcatccagtaaattgggccatttattcattctaacttggcagatgggagctactatacttcatgtggactgtaatgtcttgctaaccactgacaccaatactaacaaaactgttgggctatttcatccagtcaagtaagaaagtatagcacataactatgctttggttttgctccaaggtgacgtttccaaaatacttattgttggagttgagtagacccaatgaatgtcacctcttttctccacctagcttcaggaccagctaagagacagagataagagccaggcagttggaaatgaaaatatcccttttattactgatcaaactatgctggaagttgtggcttaggtatggtcaagatgcttgcttaacattcttttaaactaaacttatgtctccaaatatcaggtttccatggaaatagagctggccctacaagtccccacagagtttagacagc

SEQ ID NO: 4662 - DNA, 1042 bp, Homo sapiens
acaagttcatgttactttgccaaattcccctcacttctccatgtgtagatggagctctcaccttgctgtgcatgcctaccatgcaatccatttctttagtgatgttgccaattattcttattttgcccaggagaaattcaaagaaaaccacacttcagtctctagatccaagtagagaaaaaaagaaaatgtctaggaggctgttccatttacttgataccctaccaactacagttccatttgcagaaacatggtttcctgatggccacatgtaggctagagccacatgtggaattctaacacatccctcttgctcttccttcataggagatgtcttcacactgaaaacactaggaagtgagtgaataaacccctactccccaacccttagggaaaagcaatttcaaaaattgcctggccctttgaaaagttgctttatagttcccggagtgcagctcagttgaacccattaaacccaacctatgctcttgataggattatttatttttgctttcaaaaataccaataacataataaaaactggggactagctggaaatgggagcattgtggatatgccgctcatcaaaatgtacaattactgggttatttggaggatggaaagttcacgttgaagtcatgctgatatgcaaagtacaatctgttcatcatagtatataaaagtgagtagagggaattatgtgtttctaaagaggctgttttgcactctgcttgtagtgtttactgtgcatgaagaggtacaagcatggtgcttaaaaaaagggagggctagcaggtattcaacatttcatttcttttttgcagaatcccaaaaccagggcctaatgctgtgatgtgcctactaggaaccaatgtgcacagtgaaagcccagatgttataagaacgggttttctgcacctctgtgcaaagctgcccactgcagtgtcctgttggggttgctatggtaatctggtgcaacttggcatttacacacaggcacacagacacactctctcacttcagggccagatgcactatttaa

SEQ ID NO: 4663 - DNA, 1047 bp, Homo sapiens
acaggaagtagttaatcctctgggaaatagacttgcagccctgggaagaaaagagttgttcctccttggggacatacaccatcatctgggctatttcatccagtgtctcttctttatacaggagctcctggctcaggaaggcatcccgtgcacacagcctcacgtgacggtactccaaaggcaggaaggggatgaagtagtcaatcaggttttccttcacaagacggctgtggccaaagccattgtctgaaagcaagaccaaagttacatggagtctgacctaggactgaacctagctggaatttagcgggggtgggggttgctgttggtttctttgaaacaggggcttgctctgtcaaccaggctggagtgcagtggtgagatctgggctccttgcagcctccacctcctaggttcaagggatcctcccatctcagcctgtgagtaactgggaccacaggcgtacagcaccacacctggctaatttttgttttttttctagagacggggtttcactatgttggccagactggtctagatctcctggactcaagtgatccgcccgcctcagcctcccaaagtgttgggattacaggtgtgagccaccacacctggccccgactgaaggggctgggtgaggttggatctcatctctcaactccaggagtgctgtctgcagcgtatgtcaagaactctacagctgtgtctcctttaggtaaagtcttgcagtgagactcagagtctcaggcttcagagaccactgcgcctgttcttggggccagtgcaaactactatttccaagcattcccagaaaaggagctcaggctttcttaccacttttcttgtgcccacccagggttgacaatgtgagatgattatagtctgccctctgtgttcccaagtaccctgtctgcttcataaacacacattccaacaaacacattaattatcaccagctgtggctctcaccagaggcatattgagtcagttactcacctatggtctccacaatctccgcctggaggtggggctccaggtgttccatcg

SEQ ID NO: 4664 - DNA, 1078 bp, Homo sapiens
tgcattgctgtcgtgcccattaagaaagggggagtaagtaaaagaggaatcgctcagatctttccttggatgaacagcagtggcgtggttggtgtgttgactgtgaacaggctgacttagctgttgatgtatactcagaacctccatctcctcccagaccctgcacttttccttctctgcagtctgattctctaatgactgtcactggacaaaccccagttttatgctcgcttagtaaaaataagtttaaacatttcatggtggttgacagaactttgtccccaaacatgcggattcaattctttaaaactcgttgaacgtttataccaaaggtcccgccccgcaggtgtgtatgtggtgcacagagggtgaggtttggagcatcgggcactgtgtgcattgctaaggggacatagtgagacaatgtgggatttaactaaaaacacatcaattgtgtgtcacattaccagtgttgtcaggtatttgttcttaattgttattgtaatatattttcagttgtttttctaatttaattctctccgtctgttgtctgactgtgaactgctaacagtgttaaacttgatgtaaataaatgaggcccttgaaagggactgctttctctgtcttctcacaaggtttgccaagttgtgttctgttttaaataaaggttgcaatattttattggcaaagtaggctggagattggagtgtttctcccatgattttagttgacagggagtctaagcagcatttctttctctctctgtaatgcagatgtctataaggtaaagaagctgattttagcaagcatccctctggcacattctttttttttttgagactgagtctcgctctgtcgcccaggctggagtgcagtggtgtgatctcggctcactgcaagctccgccccctgggttcacaccattctcctgcctcagcctcccgagtagctgggactacaggcgcccgccaccacgcccggcttagtttttgtatttttagtagagacggggtttcaccatgttagccaggatggtctcgatctcctgacctcatgatccacccacctctgcctccca

SEQ ID NO: 4665 - DNA, 1696 bp, Homo sapiens
gaaaactatgttttgaatagagtttggcatttttgaccaagaacaaaattgagttttcattggaaagaaaggaaaccttgattcttaccattgctgctccaaaggaggcccaggttaagaggattagaggagacacgcggtgctgggcattcctggcaggtgttgggtgatccccgcagtatgtcacctgcagttgcagcacaggcagctagtgattgggttcatctcctcctagtggttggaagagaactcagatgtaaaaaccagcggtccttctcccaccttctttcctgccattcttgctcatcatacatgtccgtaaacttgaagaactcgttttagcagctagccttttaaggtcgaggatgggaaagctaaaactgtagaatattattatgctgctttttaggtttatccctgttgttgtgggatgcaagttaagggattgtaattgtttttcagggtttttttgttttttgttttttaagcaagggctctattttcccttgagagttctggaactaagccttggagaaacactactgagtgtatttaggctccctggttttcttgcccaacaacaatctgaagggtagggggtgggggctgtgtcttactcaggggcagcacctagctgtcttgcctacagtgggtgcacgatatataaatggaattgatttttgtcaacactgtcaagagtggcattgactattggagcataccccgtccacatgatgcttgaactatgtaacttcaggggttgagggctcaaggttcaggttaaagaggcactgtcaacttactatacaagcataatttaggtttttcctttttctacttgaaaaggaccagcttaaacacaaacccttatgtaaattaaaaggtttgaatccaaagcagagagaactgcttctggaaaagtgtagtttaattttaactattctaaaagcaatgagcaaaggcccttgtccaaggcgttgacagttttctaaagtggttatgctgtatatctggatgcatgcctttgggctgccactgcttgattcctttcatgtacagataatattacttcagtttagatttcccactttaaaatgcagtgatttgtgttgaatacatcttgattgtgctttacctaaagtattttcttaaaaggctttgtgtaaaatttaaatgtatatattttcctgtagacttccatcatgattttcagagattagccttaaaaaatttggccctaagaaattcattcagtgtttttctagatgacctctgtacatagaggtcattatagtggagaccctttaccagcagcattttaagatttaaattagatagaaagtttcttaggattcaactgaaaattggctagtaaaatatgtcccaggtaataaagcatgctgactttgctaaggcactgcccatttttatttaactaaagtcatggagattttgagtttaaaggatgcagtatagatagtggtttagtgtttaggctctaatgccagtctaaaaggcaagtcatttaaccttgggagcctcagtttcctcactgtaaaacagggataataatagtaactacctcagggttgttgtaaggattaaatgagatgatatttgtaagatacttagctcaagtgcctggcacacaatgagcacactctataaatgttctactactactattattaacacc

SEQ ID NO: 4666 - DNA, 1032 bp, Homo sapiens
ccaaagtgctgggattacaggcttgagccacagcacccggcctgtacttttagtagagacaaggtttcaccatgttggccaggctggtctcgaactcctggtctcaagtgatctgcccgactcagtctcccaaaatgctgggattacagatgtgggccaccaggcctggtcctaattgcagttgtgtttgaacataagtctgtgttgtttcctcattgaacattgacgttctctgttgcactttgtcaaaaatgaactctgagatcctcctttttgatatccttttatatttctgaatgtatacagttgattatatggttaggctgagtttgaagacaggttttacttcttttattttcaagtggaagaaaacttgccattttctaaaacatctccttgtttctcctcatccttttattagagggaataggagctgaggctaaatcgaagcaccagccttagaaagtgggttaatggccaggtgcagtggctcacacctgtaattctagcagtttgggaggccgaagtgagcagattgcttgagctcaggagttcaaaagcaacctgagcaatgtggcaaaatcccatctacataaaaaatacagtagcttgagatcgctgtgtgtgctcactttggctgggtgcagtggctcaagcctgtaatcccagcgctttgggaggctgaggcgggtggatcacctgaggtcaggggttcgagaccagcatggccaacatggcgaaacccctgtctactaaaaatacaaaaattagccggacgtggtggcgtgcgcctgtagccccagcaaatcgtgaggctgaggctggagaatcacttgaacccaggaggcagaggttgcagtgaaccgagatcgcgccactgcactccagcctgggtgacagagttagattccgtctcaaaaaaaaaaaaaaaattagctgggcgtggtgttgcacacccatagtcccagctacttggggagctgaggcaggaggattgtttgaacccaggaggtcaaggctgcagtgagttga

SEQ ID NO: 4667 - DNA, 1042 bp, Homo sapiens
tgttttgttttttgttttttttttgtagactgggtttcgccatgttgccccggctggtcctgaactcttgagctcaggagatacacccaccttggcctcccaaagtgctaggattacaggcgtgagccaccacacctggcctagtggctgaatttttaaaatagttttctgcattagtaaataacttagtcttgtagaaaagcatctattgctcacctatcccagtgtacttataaatagggacccattttataaagcctgctttattccgcatcttgatgagtgctctacagtgacatatcattagtggctttctaaggtgttagtgattatcagaagatactaccatatttgtcagcacttacttaactctgcctataacacaaaaccaagaatagagtgttcatgaccattttcctcaccatctgaatggaatcacattagggttctctttcccacagagatcttgcagctcgtaactgcctagtgggagaaaaccatgtggtaaaagtggctgactttggcttaagtagattgatgactggagacacttatactgctcatgctggagccaaatttcctattaagtggacagcaccagagagtcttgcctacaataccttctcaattaaatctgacgtctggggtaaggttgaaagggacttttttctgtgtcattttatttttttttttataaatgccttgattctttagagcttctcttacgatgttcagtatcctctacctttacctgccattcttcttcagttattcagcaagcatttgttaaatacctcctatctgccaggactgtgttaagaactttgcataaacagaagtataggcctggtgtggtggctcacgtttgtaattacagcactttgggccgagatgggtggatcacttgaggtcaagagttcgagaccagcctggccaacatggtgaactcccatctctactaactacaaaaattagccaggcgtggtggcatgcgccagtaatcccagctattcaagaggctgaaggctgaggcaggggagtt

SEQ ID NO: 4668 - DNA, 1059 bp, Homo sapiens
aaatataggatttgaatacacagagggggaggataagcatagttctgattaaaacgccatcttgattttttgtgaatgtgagtgtatgagaggtagggaactatcctctttaactatagtcataccttggagatattgcaagtttggtttcatgccactgcaatgaagtgagtatcaccataaaatgagtcaaacaattttttttttgtttcccagtgcatataaaagtcgtgttcatgctatactgtggtctactaagtgtgtaattagcattatgtctattaaaaaaggacatgccttaattaaaaaatacttcattgctaaaaaatgctgatgatcatctgagacttcagcaaatcatttttttggtggaaggcctggccccaacattgatggctgctgagatcagggtggtggttgctggaagttgggaagttgggaagttggggtggctgtggcaatttcttaaaataagacaacaatgaagtttaccaaatccgttgacactttctttcatgaaagatttctctgtagaatgcagtgctttttgacagcattttacctacagtagaacttctttgaaaattagagtcaatcctctcaaatcctgctgctgcaaactaagtttatgtaatagtccaaattctttgtcataattaaacagtattcccagcatctttaccaggaatagattccatctcatgagaccactttctttgcccactcataagaagccactcctcatccgttcaggttttgtcatgagattgcaacaattcagtcacatcttcagactccacttgtaattctagttctcttgctgtttccaccacatctgcaattactttctcccctggagtcttgaactcctcaaagttatgcatgaagattggaatcaacttattccaaactcttgttagtgttgctattttgacctcttcccatgaatgatgaatgctcttaatggcatctagaatggtagatcctttctaaaaggttgtcaattgattttaacagatccatcagagaactgactgtggcagctattactgtataaaa

SEQ ID NO: 4669 - DNA, 1017 bp, Homo sapiens
gggattatttatacttttgggcagttggtttttggccataatgtgataaatgaatgttgtagcagttcaggcaaggaaataatgaggagctgaattaagataatggtaccaaatgaagaggaacggatgggtttgagagatatttaagaggtatgattcataggatatactcatagagtgaattagggaagaaagaggactctagaatgatcatgatgtttctgggttggatgcctggatatgccattagcaacaacaaaacatacacatgtacatgtacatgaaacagaagagaaacaaaccaggagtaggaacaaaatggatttttgttgcctttaggatatccaaaggtatctacttatccataggctataggaatcaggcaatctgttaatcaggaaaatgttctgggctggtgacatttgggagctatggtaggttgaaaagtaccccctcaaaagatatccatgtcctaatccctggaacctatgaatgttacctctcatagcaaaaataaagttgcaggtggggggaatttttggtctttatacatgtgatggggagcttatcctggattattgagttggaccctaaatgccatcacgtgtaacagaggacgatttcacacacacataggagaaggcaatgtgaacctggaacagagacagatttgaagatcctggccttgacgatgggttggattacaagccaaagaatgttggcagccactagaagctggaaggggcaaggaatggattctccttggagtctcccgctgacacctttattttgtcccagtgttgctcatttcagacttccggcctcccaaactatgagagaatgcatttctgttgggttaagccatctagtatatggttatagcagctgcaggaaactaatacaggagccaatagcctagagtttataactgaaagaattgtatgtgaatgacttcacctagggaggatgtacgaaatgaacaggaaagagtaatgaggttagaaatttctgttatcc

SEQ ID NO: 4670 - DNA, 1046 bp, Homo sapiens
tattttttttggatggattctaagttctggcatgagctgtataattttttttttttttttttaattgagatggagtcttgctctgtctcccagactggagtgtagtggcccgatctcggctcattgcaacctctgccacctaggttcaagcgattcttgtgcctcagcctcctgagtagctgggactaaaggcatatgccaccacgcctggctaatttttttgtatttttaatagagacgggtttcaccatgttggccatgctggtctcaaactcttgatctcaggtagtccgcctgcctcggcctcccaaagtgctgggattacaggtgtgagccaccgcgcctggccgagctgtataaattttaaaaactgttctctgagtcattgtgcattcactttggaaaaatttgtgattaccctgttgctgggagtaaatggcagacatttccagtttcctttgatgaaatggattgtttggtaagcacatgcatatcgttccgattagtctgttaggtttaactcttaaatatcatcacgtgtataggcagatgaatcaagatcagccgactttggggcctggctgttttcaaagtcttcaccagaagataagaaaaggacttttccagttctttttgtaccactctctattgcattagagaggcagcctggtatagtgaaaagagcatgggctttggaattagaaaagacctagtgttttgaatcctggttacaccaactagctttgggacttgaacaagttaattgacatttccaagtatttgtaagttatgataataatgcctgtctttcagggctgtaggtaatgatgttataaattacagtatatcagaagtacttggggctgctatgtgcaaggtacagtgattaaatacagaggaaaatccgtgatcatactgtcaaatgctaacagctgtttaaagatgagtctttcccaaatgtgaataccgtaataattatctcagaacacctataccttcaataagaaggcaaataataatctaataaataatgagaagggatgcta

SEQ ID NO: 4671 - DNA, 1078 bp, Homo sapiens
gagtaagcagttgttgcatgcttccatagtctcaagggaaacagctgactgcttgggttacaaaggattgtattgtagatcttgaggaatgatctagttttatttgcaagtccctcctcaggaatgtcagctctgaacttgaggtcatagtaccaggtgctagcaacattgagtttgggaattctattagggaaagaggattggcacattcctttcatcccttagatatttcattatcttttgcctaaataacataggcaatggtgtttttctgaagatgcaaagatcttggaatgctgaattccacatattttatgtgtttaggaaggaccttactttcacctaaacttttgttacaattctgagcagaaggtaattatatctaaaataagtgtggaaatttaaaattcaagtgaagctgcaaaattctcatctgtagttattcaataataactatgtgtcctatgatatgacattcatggcatgactttttattatttacatataactggcatgaaaatgtgcttcaacacattttctgctttttttctcttaatttaaaaaatcgtcacacagtaaaatggattttgttggtttattgtacggttctgtgaattttaacacatgtaaattcgcataaccccacaaacagcggaacagtttcatcaccccaaaagactgtctcatgcaatccctctgtagtcacatattccccccctttaatccctggcagccactgatgtgttctccaccactagagttttgtctttcagcagtgtcatagagctagaatcatatagtatgagatcttttgagattggcttctgtgggagactcagcaaaatgcctttgagattcatccaacttgtgtctatcaatacttcattcctttgtattgttgagtggtattccatagtatggatgtgtaccacaccttgtttatcccttcattcactgaaggacatttaagttgctttcagtttgggacaattttcttttctttttttgtttttttgagacggagtctcactctgtcatccagactggagtgcggtggcgcgatcacagctcactgcaa

SEQ ID NO: 4672 - DNA, 1068 bp, Homo sapiens
agttgcttatcggatatttttggcattatttatattagtaaatgaactagaatttcattgaaaatttaaagccttagaaattggactacgaagtcatgctagttagtgtcatatagcagtgtccttattccttttttgttcacatacttccttaaaaaatttctgaaagctgtgtatgtgggaagaggatgtgactctaaagggatagcacgagggtcatgtatctactctgtgtcctgtacaagcaggtggtgagtccataaatctgtgcatgtattaaaattcatagaactgtacacaaaaagaaaatagctatctactctgttgcacatgctttgcaagagcatctaagagctttgggtgacatctaaaacctttttcactacaagttttaaaaagtgctaattctatcatttttgttgtgttataaatacagtcagtccttcacatctccaggttctgcatcttggttggattcagccaagcacagattgagaatatttgagggacaaaaaacaataaaaaatatacaacggaaaaaaaaaataacaaatacagtataacaactatttatgtagaatttacattgtattagatattatcagtaatctagagatgactaaaagtatatcagaagatgtgcataggttatgtgcaaataccatgctattttatataaaggacttaaagatctgtggattttggtatctgctaggggtccctgtggaaaccgtgggacaactgtaatgtcattttaaaatggaactgcatcagcattattttaaatgtatccaggaacctaatattgcaggaatttgttacttaccattatctatttaaaaatatacatgaacaagctcttctttaacagctgaatttgtaacttatctctgtttttatttggatttgtatttctcttttaatttgttgttgttgttgtttgtttgtttttgagatggagtcttgctgtgtcacccaggctggagtgcagtggcacgatctcggctcattgcaacctctgcctcccgggttaaagtttctcctgcctcagtctcctgagtagctggg

SEQ ID NO: 4673 - DNA, 1025 bp, Homo sapiens
tctgctttcagaatctcctcccttagttcattaagcctgtctatttcattttgtacttcatcaatatgttcagttgcttcctgctgttctttttctctcttcggcaagtctagagaggctgatgatgtctcttccagtctcagaacaggaggtggtcttggtttcttcttttgaggtgggcgtggagactagcatttaggggccatgctgctaggaaagtccaagaaccagaccacaagtctccttgctcatcaggaagaagctcagaaaactctgaaataattttagagtgatcttttcccctgctccttaattttacagatgaagaaatggaaacacagtaaaattcccgtatctagttatggcagagaaaagaccagaactttggtcttctggcttctggtttagtgctctacaacattttaacttacgtttgtattataatttttttttaatcatttcagttgtacatgaacaaaaacaggaattatctttttttgttagattgttgctttgtgattaattgacctgaattgagtgctttctgcatacatagaaagatgcactctttttgttgagaaggttaacagccttgtgattgtcttcctttaagtgaaaatcaacctgtactttctagggatacatatttatctaaactttctaatgtttttgttgttgttgttgttgttataaatttaagtggtacaagtacagttttgttatgtcgtggtgaagtctgagcttttagtggaaccatcacctgaataatgtaagttgtacgcattaagtaatttctcatccctcacctcccgccccacccactgagtctccagtgtcctattctacactctgtgtccatgtgtacacattatttagcttccacttgtgagaacatgcagttctctatttgggaggctgagtaggagatcatttgagcccaggagatcgaggctgcagtgagccgtgatcttgccactgcactctggcctgggtgacagagtgagacactgtctcaaaaacaaaaa

SEQ ID NO: 4674 - DNA, 1051 bp, Homo sapiens
ggtattctacttaagtacagacaaataatttaatcatcccatagtgtatccaccatatttgtggcttgtaaatgttttaaaacttgggcataagtagctgataagttacaaaaaagatacaaatttcaataaggtaattttagttaaagtgacaggaaatgggggtgcattttgaatagaaaaacacagaactccaaaaacaagacaaaaaaccatgttatttccaaagagaacatctcagttgtgcagaaagaattaacatagcaggcctgattgagactgatatgcttagcgaggtctgcttgcaaggttggcccttggctggcatctaggaacttggatttggggaggaactcctggcctcaagtgatccgtccacctcggcctgccaaagtgctaggattacaagcgtgagccattgctcttttcatactgttgtgtaaccatccatcactaccatataaccatacatgaccaccatccatctccagaactcttttcttcttccagactgaagctctgcatctgttaaattataattccccgttttataatttcctctagcccttggcaaccacattttactttctgcctttatgagtttgactactctaggttcctcatataaatggaatcatatagtatttgcccttttgtaactggctcatttcatttaacttaatcttcaaggtacatctgtgttgtaacgtgcaggagaatttctttttttttatttaagggctgaatgatatttaatggtgtgtatgtagcccattttctttatccactcatctctttatggactactttgattgcttccactttttggctattgtgactaatgctgcagtgaacatgggcatgcaagtatatctgagttcctgctttcaattcttttgaatatatatatacagaagtgaaattgttggatcatacagtaattctatgtttaatttttctgaggaaccaccatactgtcttccatagtggctttaccattttatattcccaccaataatgcacaagggttctagtttctccataccctcac

SEQ ID NO: 4675 - DNA, 1033 bp, Homo sapiens
ggctaattttcgtatttttagtagagaaggagtttcaccatgttagccagtctggtctcaaactcctgacctcaggcaatctgtctgccttggcctctccaagtgctgggattacaggcatgggctactgtgcccgacccacaatttttgtgtgtgtgtttatttatctggaaggtctttctattccagtatttgtagatttctcatcctttttgacagctttatagtgtcccatgctttagccatatatttaaccactttcttattgatgaatacttgtttataagaatatttaaatatcttctccatctttcctgtgttttttctttatgtttgtaatttgaatccatccgaagggtatatatatttgagcttggaacaaacaatgtttttccattgtattaatttgtgaatagtccatcaattctccactgatttgaaaagccatatttatcatatattctcatatatatatatatatatatatatatatatatgtcattttaaaactgttgttccattgatctttgtctcctcctgcacattgttaatatactattttaattattgtaagcttatatagtgtgtatgtgtatgtggttagctccccaatcattatgttgttcttaaaattttatttagatgttgcatcttatatcttccaaagatctttaggattatgttgttaagatttaggagattttgatggtcatatcaaattataggttaatttgggggtgaattgatgttgcattattgtgtttttatggccaagaacatgacatccctttgccagtccaggcagatctttttttgcccctcagtaaaatctttttcattttcttaatcttgtttttggacattacttggtaggtttattagtgggcattttatgatttttgttgttaagtataatctttcctaattgcttattgctaatgtataggaagccttgattttgtatgtccatcttgagtctaggtttggttgccttacttgtattgcatctaataactttgtactgatattttta

SEQ ID NO: 4676 - DNA, 1402 bp, Homo sapiens
aaatacttaagaaccttttccatgttaacagatgtcttctggacgaggtaaatatgtagctacttcaaatcatatagaacagttctgaaacttgagcgtggagagcttgttaaagcagattgctgggtcccacctccagggtttctgatttagggctgaggaggagctcaagaatttgcatttctggcaaattttcaggtgttacaggtgctgctggttggggaccatgctttgagaatctcctgctcatgtgagattaagaagagtacttggcctggtgtggtggctcacgcctgtaatcctagtgctttgggaagccaaggcaggtggatcacaaggtcaggagatcaagaccatcctcctggcctacatggtgaaaccccatctctactaaagatacaaaaattagctgggcgtggtggcgtacgcctgtagtcccagctactcgggaggctgaggcaggagaattgcttgaaccagggaggcagaggctgcagtgagccgagatcgtaccactgcactccagcctgggtgacagagcgagactgtctcaaaaaaagaaaagaaaagagtacttgatcagaggtgattgaatgactgtcagaaaacaggatgtaatgtactaactctcttcaaaactggttcagaaattcatttgttcctagcctattagtgtccacatgcaagtcaccacagtcttataccatttttttggtggtttatctctaaaagttcgtacattagaggtctcttgagagacacatttttgaaaaaaatctggagttatcagggaaaggggaagtagaaaacagttctgctgactcattcttgagcagattgggctacagttcctggaagaattgggtaatgaaataattgccatttattgagggctgtgtgccaggcatgttctaagtactcaatatctgttttttcttttaaaactcataaaaccctcgttgctcaaattaaaaaatattagagaccaaagaagatgggatgtctgtttgtgattctatagttttggtatatgctggtgcctagttaccttttagaatatgtgtgtatgtagttatacatatgtatgtatatatataatacaaagatttttaggtattttttaccccatctgtcttgaccagtgatgaggttttcagactggtagaccagggttagatttgtatagtatgtggctatggattgagtcttagatatatatgatggtctaatgaaggagaggtgggaactcaccataccatttggaatctcatggtaatgttgaactcctgtcttaatctttaggcttagtgttactaatatttcttttctttttttttttttttgaggtggagtcttgctctgttgcccaggctggagtgcaatggcacgatcgaggctcact

SEQ ID NO: 4677 - DNA, 1029 bp, Homo sapiens
atgccataataggttgtttttgttgtttgtttgagacggagtcttgctctgtcacccaggctggagtgcagtggtgcgatcttggctcactgcagcctccacctcctgggctcaagcaattcttgtgcctcagcctcccaagtagctgggattacaggcacacgtcaccatgcctggctaatttttgtattttcagtacagatgggttttcaccatattggcctggctggtctcaaactcctggcctcaagtaattcacctgccttgacctcccaacgtgctgggactacaaatgtgagccactgtgcctggccagttttcaaggtcaggtttttgtatgtgtctaaaaaatctcgttggattacatcactataaagaagatgttaatcgtccgaggacagtgctaacagtttgtcttctcttttagcccgttggcctactaagaaaaatgtgagaacctcatatcgccatcaagacttttttcaccccaagtaactctaatggcctgtctggctttcacatctgaggggtgggaggtcactaggataaccagaattggattttgatcagagcagtttgaatgctctcaaaatgtgaagtgaaagcctcatctgtaaattggctcatacttgtaaaagtacatccagtctacatattctgtcacattgtagtggggaaggctgagaggtaccacatcaggaggagagtcaggagtggcagcagcaggagaccccatgtgagagatctcagtgggaagggcagtctggagagccagggccatccacagcagctcagaagcttgcgaactgcaagttcttcttgattgatttcttctgagtgaaaagaccttcagtttcaccagttgaacattcagcagtatgtagctgtcagaaataatgctactgaaaaccagactttcagactggcttaaaatcctgccatatactgcttataaaacacatacctgtagaatttcagcagagattaaagcactagctgaagtttgttttctgtattccatgctttagt

SEQ ID NO: 4678 - DNA, 1050 bp, Homo sapiens
gtggaaatgggaggagtaatttcaagggtcctttcattcattcaacaaacaagggttttttttgagcacctgttatgtactggattgtgggaatgttgctgtgaacataacagagtccctgccctttggaacttaaaggactttatgatttgatagaggatgaaagaagagagatcactttggagtatttgttaagggcatgaactctggacccatttttcctggatttgaaaccttgcttggctgcttatgagctttgtgacctgggacaagttatttaactttttgtgtcttggactcttcatttgtaaagtggtgataataatagtacctagtattaaatgaatagtggctgggcacatagtatgagctaaatgtgtgtagctgctgccattactaatactactgttattattaaaaacaggagtaattcggccaggtgcggtggctcacgcctgtaatcccagcactgtgggaggccgaggtgggcagatcatgaggtcaggagttcgagaccagcctgagcaacatggtgaaacctcgtctgtactaaaaatagaaaaattagctgggcatggtggcacgcgcctgtagtcctagctactcaggaggctgagacaggagaatcgcttgaacccgggaggtggaggttgcagtgagccaagatcgcgccactccagcctgggtgacagagcgagactctgtctcaaaaaaaaaaaaaaaaaaaaagtagggataattcaaagatgacaccaggatttagaacctggctaactgggatgatgaagattctattgacaagtttggaagttagaagctgattgaaaaaatgggaataggtcgagtttattgccaaagactagtatgaaaagaaaggaattagcaaataatataggaaacaaaggtgcagtgagtactgttttttagacagatgggtttaaaaagtttttttctgtacatcatagtttctttttttttttttttttttttttttttgaggcggagtctcactctgtcgcccaggctggagtgcagtggcgcgatctcggc

SEQ ID NO: 4679 - DNA, 1032 bp, Homo sapiens
tgcctcggccttccaagtagctgggactacaggtgcccgccccgacacctggctaatttttaaaaaaatatttttagtagagacagggtttcaccgtgttagccaggatggtctcgatctcctgacctcgtgatccgcccgctttggcctcccaaagtgctgggattacaggcgtgagccaccgcacccggcctattgacattttttaaggtttcagattttcttttgtgtgtctagtaattcgtcttttattgtcaaagataatttgcttatttgacttagaaaaatgatttgtgggcatacaatattgtatgtggtacctaaacgttgccatttagttactcttacagaacaactttcattacactgtatattaatataaattacttcttgagtaatcccagaattgtagaaccaattggtagaatcagaaactgtctttggacttgaggtttttcttcccttagggtaaattttaggttttctggttagtttccaggagttggcggacaagttcatatcactaaaggtgttcatatcactaaaatagtaatgctaatttgtttcatatttctattttaaaaagcaatcaataaagacatttcaatacatttcatttggaagcccccaagtgtatggtggttaataaggctcagcatgctggtaacccaccattctcttagctagtgactccactaaatagtgctagccgctgagatggttttgaccctttaacagcctttttttttttttgagacagagtttcactcttgttatccaggctggggtgcaatggtgcgatatctcggctcactgcaaccactgcctcccaggttcaagcgattctcctgcctcagcctgccaagtagctggattacaggcacgtgccatcacgcccagctaatttttgtatttttggtagagacggggtttccccacgttgaccaggctggtctcgaactcctcacctcaagtgatccacccgcctcggcctcccaaagtgctgggattacaggcgtgagccaccgcgac

SEQ ID NO: 4680 - DNA, 1065 bp, Homo sapiens
ttaaaaaatgaatgtattaaatcttatgagtaggaagatgaaatacaggtttattgtatagatacattatttatgaaggataaagatctatacatgaacagcagaatgtataagctagcatttactagcatgtctctgatgcttttgttcatttctgttaatcgtcatttctgtcccctctgcatggaattttatacttgtctagggtaagagtttgtagactctttcagcagaacagattttaataaccaatttatttgttttattttaaaaatttatttttgaataaccaatttaatagtaaattttatatgaacatttggcataactttaccagtttatttctatgcagtgatggaacattatgtaatgcagctcatttcttgaccaactagttatagaagtaccattaggttaaaaattagagaaatctaagagatgttatacttagtgagaggaagcagaaatggtgggtagattctcagaggttttgatgttcagtactgacggaccatgttctgtgattgtaagaaagattgaaaacagtttgtatggagatagagttgattagcatttgagctctgaaagcagaactctagtaaaatgatctcgacctaacaaagggtctgttccattatatagactattaccataatcctggattatttcaactgggttttggcctctccattatatgagatcatatgtatatagctaagaagtctgattaaagtatggaaagattttaggaaacactaagaagatacagggatctttactgatacctaaaaagattacaattgagtaattgctcaattgagtgtaggggcatacctgaaggaagaatttgcatttgggacttcgaaggaagcttccaagagatttgggaagagacctgaacaaaaagttaaagcatggtgaatgtgatatcactgtcaatccagtataaaagcagaggaagttgaaggaaaatctgtatcccatatgcacattttttctgtctttttagatcttagatgctagcgttacatccacaaaaccagtgttgccttgtataactattat

SEQ ID NO: 4681 - DNA, 1063 bp, Homo sapiens
tttattttattactcatttaaaaaggcagtaactacatcaaacatacagaaaagtgcagagaataatatagtaagacctttgcccagatctaaaatatatgaacattttatcccatttacctcagatgtttttatttttttaaggaaactttatgtgtacagttgacaccctctcttattccttgcagaagcaagcactaaatggaagttgatatgtatcctttccatttatgtatttatgttttgttataaatttatatatgttaataatgctgtacattattctctgtacatgtacatgctgtaacatatcactctgtagtgacaaaaaatggaatactttcaaaccttcattagtatcaaatatatatacatacacaaacatatatatgtatgtacatatatttattttgtttgtttttttcccccgagacagggtcactcaggctggattgcagtggtgtgatcttagctccctgcagccttgaactcctgggctcaaaggatcgtcctccttagcctcctgagtagctgggattacaggcgtgtgacaccatacctggctaatttttaaattttttttgtagagacatcatctcattatgttgcccagactgatcttgaacttctggactcaagcaatcctcctgccttggcctctcgaagtgttgtgaaggttaaatgagttaatacataaagtgatctgaatgctgcctgacacaaagaaagcactcaataaatagtaacttttatagttgtgtatgctttatatgttactacttgttttcatagcagaattgtaacatcctggcttacatgcatgagccatcatacctggcccaaatttataaacatgtaatatgtattgaattgtagttagccttatagcacttaatattgtatgttggaatcttctaaacttggttatgtaaaaagtcatttggtataccacacaatgtcacctaccaggtagtcaaagcatttaccattttacggtgagatgaagtagaaaggatacatcttagaagacagagcacaaggcagccacatttacagaggaagc

SEQ ID NO: 4682 - DNA, 1049 bp, Homo sapiens
gctggttttaaccctgcattacagttaatcttgaccagaacagataaaaccttaaacaaaaaactgggccaaaacaaatagcttctataatagtcaaaattgtcaagtctagaggcttttgtgtaggtagcccaaggaagatggaaaaataattcatttctaagtctgacccagattgtcactactttgggaactgcttaaattgttggatctgcttccgtggcctatacatattttattcacatgaatttagttagtattccagccagcctgttcatctagactgaggctaatctgttcatctagactgaggctaatccgtatttcctataaactgttttggaactaacttaccactcctaaaaaaatttctgcaacctaatgagtgtcatatgacaaagtagtcctagaggggaagtcctatactgtgtgcttcatagtggtatttctaatgataacttttgtgggaaagcagcctcgttatagctggatcctagattagtccagtgaattttaataagaaattacactgttgtaaactcacctcttatgcattggtcagtgatgagatatatatataaatagatagatagataaaatttgctcttatatagccatttattcatcattggccctgtttggcccatcctcagtgtggctgtgagattattgataactggtcactgtcagataaatcacattctattaggaaacacctatataggttatgcagaaacatgcagaaatgccacctgtccatacttacgtggctttacataaacaaaagactgtcttgtctttgtggtgactgaatttacaacgtcctcccctggaaatggaaaagtacctatcaggagatgtatgacaaaagaaattatcaagcctgacttcatatatattatgaacagtctagaggaagcatctttcttagaactaaggaggtctgctgaacattggccacattctggactttcatgaaaatcatggacccagagttggggttaagccacttagaaaaagctgttgaaaacatctcaaaggccactgaa

SEQ ID NO: 4683 - DNA, 1027 bp, Homo sapiens
aatatttattggacactatagcagtaaatagaaaggtaaaatgtcctgctttcagggagtttatattttagtggagaaaaatagccaaaataaataatatagcaaaatggtacctgttttatgtgaaaaaaataaagcaagcctagtagtacttgttattgcattgctgatagagccatatggggggatttgaggctaaggggatgggatataaccaagaagtcctgtgtttcaggtggtgattgacatgaacagagatataggtatgagattggtcctgatgctttcaagcagataattgaagctgtattgaagctgtgagtgttggggtggggataggggttaggaatcttgccaggagcattttcccaggcccctctcttcactcctactcatccagtagctctaaggctaaagaatgagtgaggaagctggtaatgggtggtattattttgagcatttggagttctggggccccctggtggctcttgcctacagaggtttaaaggaccaggagaggagggaagacttgtctgaaacatatggaacggtggagttctcttgatgcaggaatacttggaattctagtgcttgtttgattcttgaagttgtaaaactgaaggttggggaatggatggaattattctgagcacttggagctttagggctttctcttgactcctaccaatagagtcctctgggaggagtggtttttgctatagtatgtggaaccccctttgtcagtttttgtagtgtggtagatgtgaaatagtatcttgctgacactacaatagtatcttgttgcatttacttgatttcactctaaaaatgtaaaatctgatcaattaaatgtcagacttttaattttttatcttttgtgtttatccaccattgtgggagttttattcgtcatctctctgtaccatgactagagacccaagatttaattcagtagctgaagctttcactggtagctcttgtcagcagaccctcagggaaatctattatgccctgtgctatcagcacc

SEQ ID NO: 4684 - DNA, 1051 bp, Homo sapiens
aaaatatctgtagaatttgatctgcgccaggcattcaattcctgtgtaaaaaacaattccctaaggaagtagagtgctttttgttccgaggctagtactttttcaaacttctttcaaaaatctagaataagtcaccagttagtgaaaatacagagaaacgaaaaattgtgaaaataataatgctgggatattatgacagtggatatggtacagaggagtgggcaagacttagaaatttagttttagacagacaataaatagctagcacaagttatagaaatacctaagcttggcaccagatctgactgttgaaagttgtgtattagccttaaaggtttggctgctggtgttttgaagtgaaattgtagacagaatttggaccatgggcttttggagcattagagcaacatagatagaaatgtaccagtaggtttccaaaccagttgttctcctttatggccatgcccctcaaaaagtatggtagcaatgcatacacacctgtttcgtttgtcagttcctggggcaagagagaggagaacattctgcagctattttctaaccttgggtaatattttttatttggcttctctgttctaaagagggaacagtgtgtgtactaaatagtactgaagattgtcatccatatgccttctctcagtgatctcaagattgccaaattaaaagtagtttctcacaaaacaagttgacttttttccaggagcattttattttcaacaaaaaattattttagattatatgaattcaaaaagaagaatgattccttttttcatactccttaatctctcattatctaaggtagttgtgaaataggaaactcttaagatttcactttgtgtatgaaacttattggagaaaccatctcatacaaaaaaagttatgattattgattagccttgactgtagtaccccctagaagaaaatatttaaaatgggaattcaagagagtttaaagcatttatactttttctatgtgcctatcttgattttatgtatcatatgaggaattggttgaggctgaagtctaagggat

SEQ ID NO: 4685 - DNA, 1043 bp, Homo sapiens
aaagtgtttgtcatatgggcggggaccctggacgacattcgggccgcggcggccgctgggtgcagccgagcggtgtggagcggagagaatactcgaagggctctcctgatactaacagttttacgatttaaaacttcgccagaatttgtaagtaaacaaaatgactatgcagcttttccatgttttagtattgaaactgatatcttgaatttttgaaaaggactttcagaaacggtccctccccacccccaccttcgtaccgcacaaatggtatttttatttttattgtttttgagacaggtacttgccctgtcaccgaggctagagtacagtggcgtgatcatagctcaccacagcctcatacttctgggctcaagggatcctcccgcctcagcctcccaagtagctggaactacaggcccgcaccaccatgccctactaattactttattttttatttttatagcgacagggtctcactgtattgcccaggttggtctcgaactcctggcttcaagcgattctcccacctcagcctcccaaagtgctgggattacaggcgtgagccaccacgcctggcctcactcaaacagtaaacgaggtaggttgggggtatatttttgttttgggataaaaagaaactgaatcttataaatattaaatgggttaagatgtgagtaaatttttgggtttagactttaaggtgagaagccgaattattttagggttcgaaatgtgagtgggaaatttgcctactagtgtaggcggcgattactccattcccaacatgcctaggttctcgacattcataatcttaatcctgaaaagataatacttaaaaaaaaaaaaaattggtgctaaaaagggcaaagttgaagttttagtaagacctcctaccattttgcttacatattatatatgtaccattctcccaattgtatttaatacctgatgaaaaagtttgtgccttttccttcttttaacaaatttcatagtactctctactttatgagtaatgcttaattatcagactttatactgtt

SEQ ID NO: 4686 - DNA, 1051 bp, Homo sapiens
cctctgtcccacaaacttccttttctatttccacctgggcctctgcaccaatccctaaataaggcctccccagactagacttcaacaccccatcccttctgaggcctgccccccattccccttatgaaaaaacatggtggggggagctcatgctctttaaagggagcaggaagatgaaggctccactccattgtcaaatggccatgagttagccttttccctatacctgtcatcccaaatgaccagggccctctgcgggagccacacgctccctgtgggaacgatcatgccttccaggtatacaaatgtgccaggctttccccaagcacatccacagttggttgtgttcattgatccccacaacgcagtgagatgggcaaagatatggtattcctcttgggaatactggggctcaagagaagtgaatcgatttgacagagctgcactggaaaccaggtctctgatcgccagttgagtactcttccctttccccctccgcagaagaccttccacatttgagaactcagtacctgagaacagttatgattctttgcaaacaacctgaggattcataacatgcagtaatttacaattttgctgatgcatgaatttgaatatagtgcatgctgcaaagcttgtgtgcaggggacagaatgaagtgagtggtggggaaagggatttcggaagtgaagccagttccccatctcacatgcactcacagtactgatttcccaggaaaaaacctgtggagcatgacctccccaccaccaggactggaggaaggggtggctctaggggactatgggagtaggccagtgtcccagcaaaggggacaaagatgggagaggggctaggggcacaaggctggaacccagtcatctgttcatagctgtgtgggctgatgagggaggccccagtcagcaggaggggaggggagaccttggggccacaggacggggcctggcccatcccagcttccagacctcagcaatcttgtttcctactcctgtcccatggtaaagggccactaccatttcccccacccttcact

SEQ ID NO: 4687 - DNA, 1053 bp, Homo sapiens
tctcagcctaataaagcacttaacgcgggagatgattttggcaaagggtcatgactctccttgatagcagagggggtctccactaaaagacctttaatccctccaagaatcccactgggcattctgcctgggaggtactaactttccggtttaagtgggtagactttaggggacaaagcagttgtaggacttaggttaagtcacaacaacccagtggcagcattagagaactcagaggtccagagcccaacctcctgctttgtacctaagtaaattgttctatgtagtgcatttttttttttaagttttctctatccaggaaaggagaaaaaacaaagggggagagggaaatgccacacacacaataaggtggcagagaagttggcactgctactgtctaaggagtctcagaatatttcaccaagtattccaggataactaatagctaaacatgtgatgaatgagatttccttgcccactctccctaacaagactctatgagcaccgtccagtagagccatctgcaatgatagaactgttttatatcagtgtcgtccaaatacagtagccactggtcacatgaagctgttgagcacctaaaatgtgtctagtgtaaggaactaaacttttagttttatttaatactaatttaaatttaaatagccatgtgtggctagtagctaccatattggacagtgccactgctttggatcttctcttcagccaaacaaaactaatgactagtggggaaaagaaacacgctgtagtttttccacagtggaatcccagctgtaaagaaatgctatgactttttttttttttaatgtaatgaaaaagtccctgttgctgtttccattccagctaaacttagggtctgcacactaataaagactcctgcagagaaaacaaacctaaatggagattctcctggaaaatgtttgtccaggagccctgatgactctgatgaggtgtttctgtccctctgtaaatatagacatttgcatatactttctctagaaagaaaaatgtatgagtgtgaaggacttttaaaat

SEQ ID NO: 4688 - DNA, 1089 bp, Homo sapiens
aaaaacatgaaattcttagggatacatcaaacaaaataagagtaagatttgtatgtgtataattcctaaatattatcgaaattaaggaaaatttaaatggaaagagataccattgttcatggatcaaaagactcagtattgttcagctgtccattctttccaaattgattcatagattcagcggggtcccaatcagaatcccagcaggatctttgtaaaaacttataagttgattctaaaatttatatggaaaagcaaaggacctagaataatcaaaacaactttgaaaaagaataaagttggaggccccacactggtttcaggacttactataaagtacagaaatcaagccaatgttgtattggtataagaataggtatatagatcaaaggaacatgatagataacctagaaatagatccaatcacaaatggtcagctgatttttgacaaaaatgccaacataaaattcagtggagggaagactagccttttcaacgtatagagctgtaacaattggacatcaaaatgcaaaacaaaacaaaaaggtgagcctgaagcctactcaaaaattaactgggaaggtaagatcttagatgtatatgtaagaggaataatgataaagaactagaagaatatctttgtgatcttggtgtaggcaaagttttttttagatggaacacaagcacaaactataaaagaaaaaataaattgcactttatcaaaatttaaaaattccactcttcaagatactcttaaaaaaaatgagaagtcatatactgggagaaaatatttataaaacatatatttggaaaaaaaaattttgtgtccacaacatataaagacctcttataagaaaatgacaaccttattaacaaatgaacaaaagatttgaacagataaatcaccaaagatagatagttggcagataagcacatgagaaatgttcattgttagacattagggaagtacagattagaaatcacaatgaaaagccaccatagacctaactagaatggctaaaaaatatttttaataatagtaaagtgctggtaagggtgcaaaggaactggaatttatacttattggtg

SEQ ID NO: 4689 - DNA, 1034 bp, Homo sapiens
cacacctggctttaaaaaaaaaaaaaaaattcttatagagtcaaggtctccctaatgttgcccaggctgatctcaaactcctaggctcaagcagttctcccacctcagcctctcaaagtactagaattagagtcatgagccaccatgcccagccttcaaatgaagttttgatccttaattattgcttacacctaataagaaagacgtccagagaatcaagtccttgtattttgctgtattttgtcagctttttggaatatatactgttactttctggtttttattcatagagaaaacttaagaaaactgaggagtgggctggtcagaaagttatcttgtaactattgattaacaagttagttccattattttgtggaggattagacaaatgtccggaaacagaaagacagccagtaaaaagagttacttctaacttgtccaaagacatgttacccatttgtggtgacactgatggcaactggtagagaggcaagaaggcgaagtgtgcacgggctacagatcaccacccagagcagtgccactttaatgttggctttatttacttgtcattccagattctatttgaatacaagcttccatagaatgttaaaaaaaattgaaaatcactgattaagaatatagtctatgcttagaaatgctccccaaaagtttaaaaaaagaatatagcctaaaaccaagataaaaccaacatgaacataaaatacacagatctataataaagctttctacaaatcatgttgtgagaccattcccagactatcagtcagagacagtttcccagttttagacacagcttgaggaacttgcttgtctgatttccaatccttagcagatgagaggtagaaaattttaaagagttcaggtacactgataataataaaggataaatgaatatcctatggctgaggaaaagctgcttaaaaaaggaaaagacaaaaatcaaactcaacaaaaagcaaaagtagtctgggtccatttggtgaaagaccaaatagccttatataccttagtgc

SEQ ID NO: 4690 - DNA, 1083 bp, Homo sapiens
tattaaaactacagaaaattagccaggcgttgtggcacacgcctatagtcccagctactcgggaggctgaggcaggagaatcacttgaacccaggaggcagaggttgcagtgagccaagatcgcgctactgtactccagccagggcgacagagcaagactccatctcaaaaaaaaaaaaaaagatagaaaggaatttaaagatcatctggttcaactcccacctaatgcaggactcctctccactaaatttccaaaagatggttaagccagctagcctgtctgaagatttctgtttacttcacaaaatagcctattctgtttcagaaagtgctaattattagaaatttctcctacctgttaaatctatgtctgcttacctataactcactctcgttttagttctgactcttaaaactatgaagaaaagttgtatctcctcccttccaggtgtcaaccgttctgttatttgaagacagtagacattttcttcctaagtcttctccagactagtttcaccaacctagtggctcattactgaatcaatgtccctttttaaacatgtaacactaaaaatgtacattatataagatgtcttatcactggtagggaacagagtagagctgtaacttaatagatgtgacatcaaaggcaaggtgtctgcctttactgttcctcttaaagtgtagcttatttgtaaaatgtgctaggccatcaataagtgaatggttttatagcaaatcactgtatagatgtagatattatattagcccaatattagccagacaagttatagagtttctttgtagacttagtgcccagtctttattgtagcattgttttaaatatttgccatccctttttttaaaaaggtaaagaaaaagcaggaaaaaaggcttagacacatcttgtattcttgttggtatcatggcatttgtcagtgtgttcatactttttaattttctagtacttgccgacttaatcccatgagcttacttctaatatcagtaaagggtatgagctgtctatgtggttcaagctgccacttgagggtttctccattttgtggagctttctaatggaat

SEQ ID NO: 4691 - DNA, 1027 bp, Homo sapiens
aactgttgagtactgggcttaatacctgatgaaataatttgtacaacaaacccctatgacacgagttaactgtgtaacaaaccttcacatgtacccccaaatctaaaataaaagtttttttaaaaaggaaagaaatgtatccccctcggatagaaggggactgctgtaccaatactttagtattatttaagtcctggaacttggagtcattttgtaagtatttgttgactaatgaaacaaatttattcattcccttatgcaaagaaatctctacatctgcaaaaacataggcagagtttctgggctaacaaaaagacaaatgccaatgcaaaggaagtctgaaaattgtgaacaaagattattaaaccagtatttacagatcgaacattttaatcacgtttctattctgcaaagtatgtttttctgtattagctcattttatccttacaggaatctgtgtagcattatcttcattttacagttgaggaaactaaagctcagagaggttatgtgaattgcttgaggacacaaagctagtaagtggtataaccagggttcacagccccctggtattttcactgcagattccaccctttttttcctgcattgtgttgccgtcatagtttatcatactgactcagtgcttctagaattcatagctatcggatgcattttatgaggatatagtaataagttcctcatatcttctatattatatataatgaaattcatatatgtagatgacattttattcatcaggcttttcctttcagtgtaacttttaacccatattcctattcacaattttgtttaatcagttatttctctgtcatttttatattgaatagtcacttcctttgctaagtttatatctgagaatgaacagctggctcacagtacagtgtgaatcaagttcaaattactctgagttcagagaacacccagtgtcatcttatttttacatctaactgaattataggacactgtcaaagtgttatgacctgctatagtaaattgctccttctta

SEQ ID NO: 4692 - DNA, 1049 bp, Homo sapiens
ttccactcaacatactgttttccaaagttacttatgtttgtttcttccccactcccttcagtatagttatgttattcaggtcaggttcatttgtgggtgtttgtatgcgattttagattcacttcaaatacatggttggctttaatgttttgtttatttggggggtatctgaaacattactatagatatgagcatcagaggcgtataaatagatgtacacagagattgttatttttcccccgttcctgctacctgagtgccatctctgtcttttcagtcctttttcacccactccctacaggtaaccagtctcctttgtttctgatttatcttttctatatttattttgcactagtgagagagtatgtgcacattttcatatcccattttttttacatgaaaggtaacatactaaagatactcttttgctcatcactttttcacctaacagtgtatcctagagttactccatatcacttcatgaagatttttatttacagctgcatagtactcccttatgtggatgtaccatagtttattgaaacactctcctattctgtgggcatttaggtaatgtctaacgctttgcaattacaaacagtgctgcaactaataaccttgtacatatgtattttcatgttgttggaggtgtaccttcaggatagattcctgtaagtggaattactgggtgaaaaggtaggtgcatatgtagtattttgttagatgttgccaaatttccctctagaagggtttactaatttatattcccactaccagttcataagagagcctgtttccttatagctttttcaatagattgtgctctctcacattttagaatttttgccctgatagagaaatggcatctcagtgttgttttagttttcatttctctaattatgagtgagttcttatttttatgtatttcagggctatttttatatcctggttttggtgaactatctgttcacatttttccccatttttctatcaggtttttggccttttgtgactcagttttttcagagttctttatataccatggatat

SEQ ID NO: 4693 - DNA, 1070 bp, Homo sapiens
aaccctactgattttttatatgttgattttgtattcaactcgactgaatttgtttattagatctaagagatttttggtggagcctataggtttttctagatataagatcatatcattgtcaaagaaggacagtttgacttcaagttttcctgtttggatggtttttctttctttctctttcctaattgctctcactaacacttccagtactgtgttgaataggagtggtgaaagtgggcattcttggcttgtgccagttcttgggggaaaggttttccgatttttccccatttggtacgatgttagctgtgcgtttgtcatatagcttttatatgttgaggtatgttccatctatgcctagtttgttgagtgttttttgaagagatgttgaattctatcaaatgctttttctgtgtctgttgagatggtcgtatggtttttgtccttcattttattgatgtgatgtatcacatttattaatttgtgtatgttggaccatccttacatccctgggataagtcccatttgatcatgatgtattctgtactgttggatttggtttgctagtattttgttgagaatttttacatttatgttcatcagggatattggcctgtagttttctttttttgttgagcccttatctgattttgataacaggtaatgctggccttgtagaatgaattagggggaatgccttcctctttaagttttttttaaagaatggtttgagaactggtgttagttcttctttgaaagtttggtagaattcagcagtgaagccatccagtcctggacttttctttgttgagagactttttatcactgattcaatctcattactcactgttggtctattcaggttttatttttcttccagattcaatcttggcagtttgtgttgtccaggaagttacccattttctctaggttttctagtttttttattgtgtaattgttcataattgtctctgttgatcctttgtatttctatggtatcagtttcaatgtctccttttcgtttctgattttgtttatttgggtcttctctctttttttcttggttagtc

SEQ ID NO: 4694 - DNA, 1044 bp, Homo sapiens
tttacatttaatgtaattactggtatggttgtgtttaagtctaccagcttgctatttgttttctgtttgtcccatctgctctgtttctctatttttttctttcctgacttcttttgtgtttataagtattttgttgcatgtatagaatgtgtaatgatcaagtcagggtatttggggtatccataacctggagaacatttcaggttctctcttctaactgccttgaaatatacaatgcgttgttgctaactgtagtaaaagccctactctgctatgaaacattataccttctatctaactgtatgtttatacctattgatcaaactcttttcatcactacctcccaccagcacactttttccagcctctggtatcagtccttctacccactaccttcatgagatcaacttttttagctcctacatatgaatgagaacatgtaaaattcgtctttctgtgtctggcttatttcacttgacataagggcctccagttctatccacattgctgcaaatgtcatgatttcattcttcttcatagctgactagtattccattgtgtatgcataccacattttctttatccattcatctgtagatggacacttcagttgattccatatctttggtattgtgaatagtgctacagtgaacatcaaagtgcaggtgtacctttgatacacttatttcttttcctttagataaatacccagtagtgcgattgctgaagtgtatgttagttctgtttttagttttttatgaaatcttcatactgttgccccatagtggctgtactaatttacattctcactaaccatgtataagagtttttctctgcatccttgccagcatctgttaatttttaatcttttaataataaccattctaactgggataagatggtatctcgtggtcttgatttacatttccctgatgattagtgatgttaagcatttctttcatgtagctgttagctatttgtttgtctacttttgagaaatgtctattcacatcctttactcattttttaataggattattattt

SEQ ID NO: 4695 - DNA, 1046 bp, Homo sapiens
attaggagatatacctaatgctaaatgacgagtcaatgggtgcagcacaccaacatggcacatgtatacatatgaaactaacctgcacgttgtgcacatgtaccctaaaacttaaagtataataataaaaaaaaattgcattgaatctatagatcagcttggggaatagtaccatcttaaaatattaagtccatgaatacatgatgccttcccatttatttaggtcttatttaatttctttcatttgatgttttatagttttcagtgtacaagtcttacacttcttttgttaaatttattactaagtattttatgtttttaatgttataaatgaaattgttttcttcatttccttttctgattgttcatttttaatgtatagagatacaattaatttttggccaggcatgatgggtcacacctgtaatcccagcactttggaaggccaaggcaggaggatcacttgaggccaggagtttgagactggcctgggcaacatagtgactctgtattgctacaaaaattaaaaaaaaaaaaattgatctgtgtttattgatctgtatcctgcattctttctgaatgcttctattagttctgacagtttgttagtggattccttataatttttatatacaagattatatcattggcaaatagagatagttgtattagctgcataaaaccagatgggaaatactcctttattctctgaaagagtgcatttaagattagtattaactattctttaatgcttagatgaggggtcttcagttcctgataagacttatttctgcctgttcttcctattcagttcagatttaaaaccctggacatacacagcaaataaacataagaagactaaagggttagaagaagagagctgactgactagggacctcaagaattgagaaatgaccctgtggtgatttctctgggttttctttttctttttttttttttttttgagacggagtctcgctctgtcacccaggctggagtgccgtggcgcgatcttggctcactgcaagctccgcctcctgggttca

SEQ ID NO: 4696 - DNA, 1021 bp, Homo sapiens
ttgttgtttgtggttttaagaaatcattgtctaatcaaagatcatgatgattaagcctttttcttctaagaattttatagtgttatctcttacattgaagtctttgattattttgagttaattgggtagagtgtgaagtaggggtctaacttcattcttttacatatggatatccagttgtttcaccaccattattgaaaagactgttctttcccccattaagtcattgtagcactcttgtcaaaaataaatttgtttataaatatgagggtttatttctagattcttaattttattccattgatcagtatgtctttccttatgttaataccacacagtcttgattactatggctttgtagttaagttttgaaattgagaagtgttattcttccgccttttttcaaagttgttttggctattctgggccccgtgaatttccatgtgaattttaggatcagtgtgttcatttttgctaaaaaggcagtgaagattttaataagaattgtgtgaactcccattcacaattgtttcaaagagaataaaatacctaggaatacaacttacaagggacgtgaaggacctcttcaagtagaactacaaaccactgctcgatgaaataaaagaggatacaaacaaatggaagaacattccatgctcatgggtaggaagaatcaatattgtgaaaatggccatactgcccaaggtaatttatagattcaatgccatccccatcaagctaccaatgactttcttcacagaattgggaaaacctactttaaagttcatatggaaccaaaaaagagcctgcatctccaagtcaatcctaagccaaaagaacaaagctggaggcatcacactacctgacttcaaactatactacaaggctacagtaaccaaaacagcatggcactggtaccaaaacagagatatagatcaatggaacagaacagagccctcagaaataatgccgcgtatctacaactatctgatctttgacaaacctgagaaaaacaagcaat

SEQ ID NO: 4697 - DNA, 1061 bp, Homo sapiens
tgcataatagaaaaaagtttcgtagttatgcttagatgttttagggtccaagtttgtaacaccatggtgtcatatgtacttttttaaaaaattaaattacaacttttattgtgttttcagtcatttgagaaatgcttgaaaattgaattcaaaatatgaagggaaaagttaaagagaagatcttaaagcctacttatttttttaaatggcggttcaatttttatccttgacccacattagtacagctcttcacacataccaaatatttatgattcttccaagaaaatattttttaaggggcagggatgatttcaataatttgtgaagtgtatttaaagtatggggagagtatttgctatcaaacatcaggctcaaattatgtttacataattcttgtcacacgttatttctcagattagtgtactatacaatcaacactaaatacatgcttattgatagtatttaaatagtattttaaatctttgaagtaatttaaatgttttagatcaaatgtaacagtgtaatattttagcaaaatagatgaccatccagtgcacctgtttatcatcagtccccccaaaagcattcatacatagttcattggttttccatagattcttatctaatgcactcccaaattccactttcactgggctgcttctttagttacattctttccttttctgtccttttgacagtataattgttgtcattagccattttccgtagtctattgattctttcagatactttgaagaaagtcacctttctcttgactaccattcgtttccttttctactttgttttaaatctgtggctcctaacaatacaatttgcatgcttttggcttgagaaactgctgcaaactctggtgaaactgtgacagtactaagtaacagaaaagcaaaagatttaagaggcagggtcggtatactgagactaaatttatgcagttatatgagatttgagaaaggaaggaagaaaaaatgcatcctcttaaatcactttctatatcagggtatatattattttggttatatagttgattaagatgttaattt

SEQ ID NO: 4698 - DNA, 1029 bp, Homo sapiens
cagagtactttcacttattactatattatctctacaacagttctctaaggcagatattgtccttgttttacagacaggaactgaagttcagagacctacatttacttgctcaaatccatataactgctaagtagaaaccaggtctgggagagtattcttcctaccactagattttagaaggataaataaaaagaagaaaaagaaggataagcagttgtcatttggccttccctgtgttatgctctggtttgcagcaatttcttttataaaatattactggaagtcaaatccacatgtgacctccacaaagatcactggatggacaacagtgataggggtggaataagtgcctagaacacagatagcttacactaaataacacatattttgtgtgtgtaaagacaaggaaaacttggcaaaatgtattgtttctgccattttgttactttgatgtagtgctgctttccagatcttccagtttgttaaccatgcagctacctttaccctcagcctgccagaacgttgtatttcatgaacagatgaagtgcttacacattcatagactgagacgccaagaattcagttgggttctctcattgctccaagcagatttctgccctctcagccatgacaattcaggctgagctttgaatactgatggcaaacccttttattattaatcagggatttgtatgaattaatttaagaacataagggaggtgggagcttaaaatcaaaatcaaacttaacatcccaaaataaaataaatagtattgcttcatcacatttaaagctctagcaaataaaacaatttggtaagctttgatgatggactaaaagtgtgtagcctcaaaattaaacttctagttaaatacttttaaccctttctgtccttttgacgttttcttattatgagttgggtaacaattatagttttgaaaggacattcagttcttttttgtatttatctgatatttgaaattgagatatttccctactgattccctaagattctctgggataatatac

SEQ ID NO: 4699 - DNA, 1100 bp, Homo sapiens
cccccttacctttctcaaccttcatagacttgaagagaactagggctttgccctggatcaggctttggcataagggaatgttgtggctggttgaatccagaccactcactttttccatatcagcaataaggcttttttacttttctatcatttgtatgctcactgaaatagcacttttaatttcctcaagaatttttctctgacattcacaaattggcagtttggcacaagaggcctagcttttggcctgtgttggttttcagtatgccttcctcactaagcttaatcatttctggcatttgattgaaggtgagagacggtgcagcccttttcctttcatttgatactaggttttacttgaaacttagagactattgtattactggctaataatttcaatatttttgtgtctgagtgaatagggaagcctgaagagagggggagagaccaggaacagccagtcagtggagcagtcagaacacacaaagtatctgttggttaaatttgccatctttctcagtgtggtttgtagcactccaaaacaattacaatagtaacatcagagatcactgatcattaccctaacagatataataataatgaaaaactttgaagtattgcaagaattacctcagtgtgacacagacatgaagtgagcacatcttgttggaaaaatggcaccaatagttggcttaactcagggttgctacaaatcttcaatttacaaaaaacacagtatttgcaaagtgcaatgaagcatagtgcaatagaacaaggtatgcctgtatagctttcttttttaaataaatttggcatgattgcttcccttgattttttaaattgtagttttttatctttgtgcttgtgagttaaaatttttataaagttaatacatttgtttttttaaaaaatcaaatgttactattagtcttataaacaaaaaaattctctcttacctgcatccttcttacattttattctagctcctttaaggcaaaaattttctcttttttttagacagattctcaggctggagtgcagtggcatgatcagggctcactgtagcctctgcctcctgggctcaagcgatcctcccacct

SEQ ID NO: 4700 - DNA, 1023 bp, Homo sapiens
gaaattcatgagttcaacactgaaggcatctactgcaatctactggctcccaaatacaacatctctaattcaccctctagatcggggggttataaggacctttaaggctcattacacatggtactctatggaaaggattgtcaacaccacgaaagagaaccctgatagaacattatgaaggtcgggaaggatccattggagatgctgtcattatagaaacggcggtgaaaaccgtcatgcctgaagcaataaatttctgctggagaaaactgtctacatgttatatgtgacttcacaggatttacgacagagccaatcaaggaaatcatgaaagattgtgagtatggcaaaaatgtgtggcagggcggggcagagagttggttttaagatatagatcttgaagaaattaaagagctaatagacaccacactagaggaattaacagaagacgacttgatggaaatgattgcttccaaaccagatagatatgatgaggaacaagatgtagaataaataatgccccaaagagattgacattagacagtcttgcagaagcgttctgattatttaagactgcttttgacttttactacatggacccttctatgatatgggcacccaaacttaagcaaatggtgaaaggattggtactgtataaaaacttttagagaaacaaactaaaaagggagaaattatggtgtattttcacaaagctacactgagtgtgcctgcctcacctgccacctcttctgcctctgccagtgctgagacagcaagaccagcccctcttcagcctgtgaagacaacagggtgaagacctttatgatgatccacttccacttaatgaatgtatattttccttatgattttcttagtaacattttcttttctctagcttactttattataagaatatactatataacacaaataaaaatttatcaactgtttatcgataagccttcaggtcaacagtagcctactagtagttaagtttttggggagtcgagttacatgcagatt

SEQ ID NO: 4701 - DNA, 1055 bp, Homo sapiens
tcattgtatgtagcactatactctaaaccttgaataacaccatgagacccatatgaagtaccactagtgatgctggaagtactcccaaaaagcagagaaatgtcatgacattataagaaaaagttgaattgcttaatacgtattgtagattgaggtctgcagctgtggttgtctgccatttcagggtaaattaattgagcattacggacttctgtaaaaaagaaaagggatgggccaggtgtggtggctcacagggtggccttgggagcaccttcgaaggccaagacgggtggatcacctgaggtcaggagttcgagaccagcgtggccaacatgttgaaaccccatctctgcaaaaaatacaaaaattagccgtgagtggtggtgtgcgcttgtaatcctagctgctcagaagtcagaggcaggagaattgcttgaacccgggaggtggaggttgcagtgagccgaaatcatgccactgcactgcagcctgggtgaaagagcgagactccatctcaaaaaaaaaaaagaaaaaagaaaagggaattcatgaaccatcaccacagctacactggcaagtacaagaaccttgcacattttgtgcaatatcttttaatctcatattgtaagttcagcttttatgtaggtgtagtattgctataggaaaggcatacttagagactctactatgatttgagaaaaaagtcattctgtgacaaagcaaaaggaaggtgaaggatctatacctggaaaatgtaatgccagcaaaggatgatttgataagtttagaaagaggtttgactttagaaaggtcaagataataggagaaacaacttcttctcaccaagaggcaacaaataagcaaatttacaagaaaaaaaaacattagaaagtgggcaaaagacatgaacagacacttttcaaaagaagatgtacatgcagccaacaaacatgtgaaaaaaagctcaacatcactgatcgttggagaaatgcaaatcaaaaccataatgagatgccttctcatgcctctcttttagtaacagtcagaatggctgt

SEQ ID NO: 4702 - DNA, 1015 bp, Homo sapiens
aaaaaaggacataaaataatgtattttgaaggtttgttttgatactttataactccagattttttttacatttgtaaagatcaggcaaatcactatctaataaatccatttggttaagtttgggttccattgttgtggcagcttttctgacgaatgtgtattgtataatagatgatgagttatgagtttgagccaagggccagtggggccaattctgagcttgcttcctgctttctactctgtcatagaaagtatcaatataatgtcagaggttcagatctctgtgttaatattgcagagctctgacatcaatttctcattctgaagcaagttaattgttctgtaatataattgagggggtgtagggggattctaattaagtacaaaaaattatggagccaaaccgctggcattcaaatgctagttccaccacttactagctgtgtgatcttgggcaagttacttacctgtaaaatggggataattatagtacttatctcacttgatacttagcagattatgtgaatacatagacatcctcgaacagtacctggtgcaaaataagttactgtgtaactgttagcttttataaatagtattgttattcggcagagggagtccctacagaggagccaggagctgatgttaggagctacaataacatggcattctggttatataattaaatgcaagttgtttgcttttgcaaaagaaaatggaaaacaaggaagggagagccaatatttttagaactatagaaacgagagtaacaaatcttataacagggagtaacctctggttttgcgatcagctgtttttcatttataccgcagatgggcagaaaaagtactggtcaataagcataggggtttgtagagtaagatgattctgcactacatatacaagaaattgcttctggttacttgcatgcttcaaaggtttgatctagaagtttgcacataaattgagaaattagggtaagaattaaaaatgtagtaaatgaagattgaacagt

SEQ ID NO: 4703 - DNA, 1047 bp, Homo sapiens
tggaacatgtatttggaatataattggattaagtaaaataagttctccctttgtacacgttcctcagcttataatgaggatacatactggtaaatctattataagtcaaaaatatcataaatcgaaccattgtaagttggggatcatctctacttttttttggtataaagaaatacattatctatcccagaaattcttcatagcatttattctctaaaaatggccctcagagcacagagaaatctgtcatttacctagtgcttcttgtttgctagcatcatactaatacactttatatactttgtcatttaatcatgttaatagttgtcgtctatgattttataactttgtttctattacaagttgataactgacttgattcatctcctcaaaaatttacaacattttttgaaaccttagttcccccagtagtgttaggaacagatagaatatgctatctccggggaagggggtctttttcctcagcccagtgatccacagactgaaacaaacaattaaaaaacaaaacaaaactcgtacttctcttaagtactgaaaaaatgtgtatggggattgactgtattttatttgaagtaaaactagtctttttgcagtcaaattaaataataatgtaattttgattctaagggaatatttatgtccggaatcagagttttgacttttgcagggtgtcctgtactaaacgctgtcaatacatggggttttgcagaggttgcactttgatccttgcagacagtattatccaggttcattgcttccacattacatgttttagaagaatcttattactaaattaattttactcttgtgtgttttgagaacatagaggggcaagacgtgttgaatccttgagtttggaaagtatttctgtgcagtttgcttcttttttcttttatttgagatataaacctcctttcctatccctcctctaccttttctccttccttttttttttttttaacccaaaaacattttctttataattaaatttgaacttttactgtaatgtagcttcttatttgggaa

SEQ ID NO: 4704 - DNA, 1050 bp, Homo sapiens
gcaactttgctgaataacagattgggtggaatctttaggatttttttacatataaaatcttgttgtctgtgaacagataactttacctcttcctttccaatttggatgccattttaggaaaaactttcaaactgtgtttttcctctgctctcataccactacaacaacagaagacttctgtgaccaaatacgtggggatttctccccaacattatgtgagcagttctgcagcagacaccaactgggtatcctcctaatcagttctgacactaggtgcctagagatagtgtcagattccacaggttgaggactcagtccccaggactgcctcccaccccttgaccagtcacaagccccggtctccagaatttcttaccaactggcttcaagttgtggttcccatgaccccctctttgggttcaactgagttctggagtggcttacagaactcagggaaacacatttgccagtttattataaaggatgttacaaaggatacagatgaagatgtcgagggaaaaaagccaaactgcaaagtatttgaagagatttattctgcaccaaatgtgaagaccatgacccatgacacagcctcagaaggtcttgagaacatgtacccaagctgatggggttatagcttgattttatatcctttaaggagatatgatagcattaacattggcctggataccatcttgaatagaagtgatgagaatagatatccttgccttgttcctgatcttagaaggaaagctttcagtttttcaccactgagtatgttgttaactgtggccttttcatatatggcctttattattttgaggtagttttgtttttgtttttgttttttgaggtttcaatattttattcaggtttttttaaagtgatgttaattacagcatttgaaggggaggatctaattccacacaaaatggaagactctaaaatgtacccattaaactgctaaaaaacaaattgagtggtgagaatacaacagaagtccaatttagattctgagtgttgtcaccatgtgattacaatcatacagac

SEQ ID NO: 4705 - DNA, 1024 bp, Homo sapiens
ggttgacaacaaaaggaaaagacgaccaacctgtaattctatactcagttaagttataatagctttcaaaaatgaaggtaaactttacttaacataatgggtatttatgaaaaacccagaggtagatcaggaataagacaaggatgcttgctttcaccactcctgttcaacattgtatacataaattctagccagagcaattagacaagaaaaataaagaaacagcatccaaattggaaaggaggaaataaaaatgttaatcggtgacatgatcctacacagtatatagaaaatccagagaatccacaaagacaccgctagagttagtatgttaattcagcaaagttacaagatataagatcataagatcagcatgcagaaatcattgtgttctttagaccatcagcggatactctgaaatggaaacaaacaaaaaaattccatttacaatagcctttaaaagaattaaaaacaaaaacctgggaattttaaccaaggatgtgaaagattttagactgaaaactatattgccgaaagaaattaaagaagacctaagttaatggaaattcatcttgtgttcatggattggaagatttaattttatttagatggcagcgctgtccaagtcaatctgatttatatggaattgcaaagggccccaaatagtcaaagtattgaaaaagagcaaaactagtggattcaaactttgcaatttcaaaatttactataaagctacagtaattaaaacagtatggtactggtataaggatagacatatggaaaagaattgagagtgcagaaatgaactctcaagtttatggtcagttgattttcaacagggccacttcatacccagtagggtgtccgcaataaaaaagataataacaagttttggcagggatgtagagacattggaactgtcttagattgctgctaagactgtacaatggtgcagctgccataaaagacagtttggtggttcctcaaaaagttaaaaatagaattaccaattcttttgggtata

SEQ ID NO: 4706 - DNA, 1030 bp, Homo sapiens
ttcagggtgttctttcacattgtagcatgtatcaatacttcattcctttttatggatgagtagtattctattgtatggatatgccacattttgtttatccattcatctttttttggacatttgggttctttccaccttttggctattttgaataatgttgctgtgaacatttgtgtgcaagtttttgtgtgtacatatatctttatttctaatggatatatatccaggagtggaattgctggatcgaatggtaattctgtgtttaactttgaagaaccattggactgtcttctaaaatggctacaacattttatagtcctgtcaacagtgtatgagggttctgatttattttctgcctttttgattgtagccatcctagtgggtctgaaatggtatcttgttgtgatttcaatttgcatttccctgatgactgatgatattgaccaccttttaatgtacacattggccatttgtatatcttttttaagttacatttccctttcttgttgtaagcttgtaatctcattattagaatgaatttattggttatttagactaattttctgtctccagattattctagcatacagtcttttagcttctattggaagactcttaatgaagggaaatttactatttgtgaagaaattggcccaatttttgaagaactccagttgttagaagcttctttttatattaagccaaaatttatttcactgttttggtatcgttattgttttctactctgttatatttttgctttttaggcccacatagacgatgttcagttttttatatgagtctttcagaagtttttttttgtttgtttgttttgtttttttgacagagtctcactgtcgcccaggctggagtgcagtggcgcaatctcggctcactgcaagttccacctcctggtttcacgccattcttctgcctcagcctcccgaatagctgggactacaggcgcctgccaccacgcctggctaatttttttgtattttttagtagagacggagtttcactgtgttag

SEQ ID NO: 4707 - DNA, 1030 bp, Homo sapiens
tacaggtgcacactgccttgcccagcttgcagaagacttttttaagacttcttatttgtgcattagagcagaataagctttttgcagatacaacagttacacattttagtagattaattgaattatgatgttaaagctatagctaaaagaaataatctagaaatagtttctttcctgattttaataaaacatttctgacttattttagtaaaaaagtaacctgtgtgtattagttgggaattaagaactagaactgcattttatctgttttttaaattataaggagattattttttctactgaaaaaaaaattcgttctaatgataaactctattatgacatgttttgttactaggaacagagattgattatattttgggccaaatttattaacctccatatagaggtaattttcagtacagaaaagcatggtgtgttattaaaaacatttaatggtctatcctactgactttataaagagttatgcaatatttaggaactgtaggattcttaatgcttgtgtgtatgctcttatatgtgtgtatgtgtttgttagtggtccctgtttgtggtttaaaaatgtatagcagtcctccctgatctatagttttgctttctgaggggtttcagtcacctgaggtcaacggtggtccaaaaatattaagtggaaaattccagaagtaaccaattgataagttttaaattgcatgccctgttgtgataaaatctctcctgtcccactccatacatccctttgtcaagatgtatccattacctgttcctgtataggaaaaaacatagtgtatatagggctctgtagtgtctacagtttcaggcatctactaggggtcttagaatacataccccatggataagggggtataatgttatacaaagcattatattgtgtaatgttttggttagcttcagaggggaactggttaatagatatataatctgatatattcattggatattttcacatttcttccatccatgtacttgtgttgtttttgagttttcttgtttt

SEQ ID NO: 4708 - DNA, 1044 bp, Homo sapiens
cttactgtatgtttataccctttaacccacttctcttcattttcccctcttccccctacttgcccctcccagtctctgttatgtgtctttccactctctacctccatgtgatcaaattttttagctcatatatataaatgagaacaagtgatatttgtctttttgtgtctggcttatttcacttaagataatgacctcaagttccatccatgttgctgcaaataacatttcattcttttttatagctgcgtaatatttcattgtgtatatataccacattttatttattcattcatccgtgatagacatttaggttgactttttatctttgccattgtgaatagtgctgcaataagcatgcaagtattgatttctttagagaagaggctttaaatgagattgatgaatattttgtttgtttttagagacaaggtcttgctgtgttgcccaggctggagtgcagtggtgcaatcctagctcattgcagcctcaaactcctgggctcaagtgatcttcccaccttggcgtcctgagtagctgggactacaggtgtgtgccatcacaccagcgaattttctttttctttttctttggtagagatggggtcttgcatgttgcctgggctggtcttgaacacctgggctcaagtgatcctcctgccttggcctctcaaagtgctggtgttacaggtgtgaaccactgtgcccagccaaatggatatctgaaataggcatttctctagtataaacttctttttaaaaaagggatttataggctgggtgtggtgactcatgcctgtaatcccagcactttgggaggccaaggtgggcagatcatctgaggtcaggagtttgagaccagcctgaccaacatggtgaaaccccgtctctactaaaaatacaaaaattagccagcaatggtggtactgtaatcccagctacttgggaggctgaggcaggagaattgcttgaacctgggaggcagaggttgcagtgagccgagattgtgccattgcactccagcctgggcgacacagcatgactc

SEQ ID NO: 4709 - DNA, 1018 bp, Homo sapiens
ttaaattgaggttctctaggtgccttatgctagagaatatttctttaagttatatatttctcatgtattaaaactctcatctcagaaagaaattcacctgactatcgaacttgatagtactccatccagcccatagactcttcaaggcaaggaccgtgtcagattcgcctttgtgttactatttaccacctacaaagttcagcacagggccataccatagaggatacctagattattctaatttccttataattctcttttccagggtaaataacatgaatccattatatttctctcttagagtgtatttccaaccttctggttcttcttttgtttcttcaagttccagggcataacttatgctcagtataaggggaatactttatttaatttaattagcatttttagagcatatagatatgtaggatgctattagcaattcctgaaaaaagctacctgggaataaatagaaaacttagcatttttggttaaagactaacagtgttgctgaagaaattaaaatatacacagggaaagtgaattttgaattaagatttgagtatggtaaaggccacttttaaggtaatagaaatattataaagcacaaagtctgcatgattaagtatttttttgccccaagtttcagcctgtgttgatgattttcaaaactgtgtctctccttatcattcttgcagttttaaccacagtctatattgattctaaatttattttttagccctgatcttttctgtgatcctgatcagggattagggtttttagaccagggtcacaaaaaaaaaaaatcaaaaacaagcgccttcatgggccaagccattaacataaatgaatgaagtcggttttgatttatatagagagaatcacaaggttgtggtttgcagtgaagtgcatgccctatttaaagaggggaattggatgttagctccagccagttattgccatgaatgctcagtagtgccagatctgatataaaatcttgttttttttttgtttttttttt

SEQ ID NO: 4710 - DNA, 1050 bp, Homo sapiens
ttggatttcgtttttatgatcactttctatgcaagggcaaaatgcttattagggataaaagatgaataagacatgatttctgccattatgtagtttaaagtgtaatagagaagataaaacatatcaaaatatatatctttaatagtataaaacaataataatgtaaatgctagggaatccagcaggaaaagggattgctttggactttggaagcattggatattgttcacttaaatataccctgtttttctcatatacttattggagaacatctagaaagaatttaataaaggtgaggttactatttaagaatattgttaaatgattaacaggtatttcagtgagatagaggttgcattgtaccatgtaaaaaatgcaaattgaatttttttcaataaaaatattaaggccaaacattttagcagttaatgaattaaacaattttcagtgtttttgtaataattacataatttcatgtgtacatagttgttactggtatgaaggaatttgttccattaatcatggaatcttaaaaatctcagacttgttaggaactttaaaagattatatattatgacatattaaaaatgtatcttaagagtacaaagtgggagtgataaccaactttggatatctttaatgatatgactgccttttagaagtcattgaaaaatgtcctttttttttttttttttttttatatgagacagagtctcactctatcactcagactggagcacagtagtaggatcttggctcaacgtaacctccacctcccaggttcaagtgattctcccacttcagcctctgggactataggtgcacaccactacacctggctaatttttaaattttttttctttttttttttttttgagacagagtctcactctgtcgcccaggctggagtgcagtggcgcaatctcggctcactgtaagctctgcctcctgggttcccgccattctcctgcctcagccgcctgagtagctgggactacaggcgtccaccaccacacccggttaatttttttatttttatttttatcttta

SEQ ID NO: 4711 - DNA, 1046 bp, Homo sapiens
gttataattgctatttttatgtcttaaagtttgtataatttatctcatttattatttctaacagtctggtagttcatgtgattttagagagtccagaattgaagcccagactctatttagcatttaagacagaatgatgtagtaaagggatattgagctttggagtcaaacactctttgatttaaatccggactactaattcaggatatactaatgtgtgaactgagacaaccctcctgagcttctctcttcatttataaaatgagtttgtgatggcatacctagcaggattttttttttggcccatttgagataaaatatgtgaagtgtttggtctatcgtgattgttcaagaaatgtggctccttctttttcaccctttcttctctctattccatcataacagggctgcttctatgtaagtatacattttaataacagcatagggccatgcaattaatcgctaagcaaatgatagaggtggtaattgttatgaattcagaggtagatgagatcattgtagactgaaagggttcttagaatctgaaatttgagtagaactggaaggtcgtgcagcatcttgaaaagctgaggaaagaagaaaaggcatttcaggtgagtggagtaacaagcaaaaccctgaactaggaatacctaaggcagtcagtagatcattctggttagatgaaggcatcagttagagtaatgggaaacagtgggaaaatccctgagaagtagataggttctgtggatgagttaagaacagttacaggctctattctaatagaaagatgagactttacacaaaactttctaaacacatggtagaaaaagtgaaaagtaccataaaagatatatagagtaaatgctctaagagttcataaggaaggaagatgacttctggcagtgggaatcagggcctgtatagtgaattctgcacttgtgtgaatttcatttatgcttattcttaatgaaaatttcactgtgcagtttaactacaaatgtcggttgaggattaaaattaagtattgacctcaaacaaaagat

SEQ ID NO: 4712 - DNA, 1013 bp, Homo sapiens
gagtatgtcttcctttctgtttgatacaatctaaaaattttagagctatgaacaccagaggaaataatgcccttcttttacagtaaaggaaactgaaggccatagagagtaggcacctttcctagggtcatacaaatacatcagtcagaactggattgtagctcctgactcagtctaaggctgtgaactttacctggaaatagggaggtgtatagacacgtttaatttataattcagggtgacattggttggtaccagaaggaaaataattgctttatcataagcaacatatatttgttcagcagcttttatgtgcaagacacttgggtataatgcctacagagaatgcagagaagcaaaaacatcatgacactttgcagagaagcaaaaacatcatgacactcactttttttttttttttttttttttacagagggtctgggtttcaccacatttcccaggctggtcttgaactcctgagctcagacgatccacctgcccaaagtgctgggattacaggcatgagccactgcacctggctgacacttttttttttttttttttgagatggagttttgctcctgttgcccaggctggagtgcagtggctggatcttagctcactgcaacctctacctccccggttcaagcgattgtcctgtcccagcctcccgagtagctgggattacaggtgcctgccgccatgcccaactaatttcttgtatttttagaagagacggggtttcatcatgttcgccaggctggtcttgaactcctgaccttaggtgatctgcctgccttggcctcccaaagtgctgggattacaggtgtgagccaccacgccccgccaacatttgctttaagagacttaaagtacttgaggagtctaggtttgaacatacctgaaaaattgctgacaagagttaaataacagttcaggaaaattacagctctttgaaacactagaggaaaggaaattctggataatagcctattttgttttattaaaaatgt

SEQ ID NO: 4713 - DNA, 1054 bp, Homo sapiens
aaccactcataatgttacagttaaaaaaatagttttgtgcattcctctagggccgaactgtgccgtacttctggtttcactgtacagtgtctacaaagcacagtgtcaaagacagagctcgggatgagaactgggctaaggcgcgccccgaactccccaaaccctattattcagggcccggagaggtgcgggctccgaaggtgtggagagcgaaacacgcagagcagtgattccactcatcagtcacacagtaagacgggacagccccatctcgcagtttttcattattcaacacagagcccaacgcgcacgcaacagatccgcgcgcagggctgtttggaggcgcttggggcgcacaatctggggcaggcggaaccttagtcctcagcctcgcgtttcccgcgactccgctctcaccgctacactaccacacaaacggcctccttcccccacccccgggggcccatcccggtggcgggctccggagctcgggactgctaatttcagcgaaacgattaaaagacgcccctacagctgacggcactttctctcctccggcagggaaggacgtccagcgtagcgtcgcccgcgcttccccgccggcgcagagcaggcctcacagaatcgcacgccgctggcacgcacgccgccccgcccccacggcccagcgccagccgcgccccgcgctcgcacgcatcccggcctcactgcccctcgactcctgttccgttggaggggcctgaggcgagcctgagcgcgctgttggccggagggaagccggaggagaccgggtcgactgggcagagcggcagagggtcgaggagcctgctctgcacgcccagggagtagaagtgggcagggagcagggtcacgtgagggagcgcgccgcgactgagcttgggtccgactggagctcaggctcgcgacccagactggtgggccaggcctccaagccggccttacacccaatccaaggaggacagaccggacacagagggacggagcgagcaaggagacatggcttcatcattcctgcccgcgggggccatcaccg

SEQ ID NO: 4714 - DNA, 1051 bp, Homo sapiens
tgtatctaggtcagctgtggggtccctgttcctgtggagctcatggtgagctcttcagaagcatgcttccctccccatagcccccaaaaagaagactccatccggagaaacagcctagcccactgcacagaaaggacgccctcccagcccagccgacccaatgcaggcaaaggcccacagggagattctgcacacagcttcacacaacgacccctccacaggccccaaaagctagtgccctgtccgctggcaggatgtgggctgtaatttctagggaggaaaagagcctagctttaaaggcagtgcggtcctaatctaacaagggagcccaggtcccatgagccacatcagtggtcttaactttcacacacagggtggtgaattgagcaatcctggaattcactgcagaggcagacatttttgttctaaaaagagaaattgaggagcgcttaatcacataaggtgctttcagcccaattattcaaacccagaaagccccactagcagtgtcagcaactgtgcataaaggcaggatgaagattttggagacaagtgcaggacgaatgaggcagctaagcgttgagcaaatcccacacctgccaagttctcaaggtgatgctccacagaagctccagtagtcactcctctaggggaggatcccgctgcagtcctggagacatatggcttcacagggacccctttccagagtcccactttccatagcattgctcccctaaccacacaatcaatgtgatgtacacaagctctgcagtctcaacacagccactctctctgacccaggacagtaccacttacagtgtcaccctcccagccctgcctcttgctgacatgtcctgtcctcctgccatcagtaacaccaatctaggcatgtctatccccaaaatggcaaaatcttgtgcttccaggagctgctccatttctgtattaatttgtttccagaaaaatgcagctgctgctacctcttcacctcctggagtccctgtctgttcaggcttgccccagctgcctctagccagacctaggataaaga

SEQ ID NO: 4715 - DNA, 1051 bp, Homo sapiens
tttagtcctcatttttggtcttgtctctgcggactgtgaagaatcacaatgctctatatgccctggactgtgtggcaaatgcaggttgcagcgtgtgtgttacatgaggatcttccacaatttcagaatgcacgccagagctgaagggggaaacttggtaacttgcccattattctctgcttttagccagagttaaacagactgatgggtctggtagccaacaacttggcaacttccactccttctcacctcgtgagattaagggctgtgaaaagaaatctagtctaactccaacagaaatctgtctctgttaagtgttttaccttctgtaagtagagatggtagagccaagatttttcttttggtaatttccctgtctataaagtgagaccaaagggatatctgttccctgttacctttttggagaattcataacatttgaagatcaaaaaattgaatgataaatatgaatggcttttcaattctgtggactttgtaccatttggcttcaccttgtactgcaagatgaatttgtaaacaaaacaaaattggactgtctggaaagctaaagttctgaaatatggaatgtactgcctctaatttttctttgtcttcctctcactggcatttttttctctcccaggtttcttaagaataatgttttttaaaggaggctttttgcccatcaagaataaaaagaaataaaaccaaagggttaccggacttaagcccccgcagtcactgtgcgccatccctgagcaaagtccgcccctgaggacagtgcccctgccccagtgacaggccttactcctcccagggcctttgcttctaatagggggtggtctttcttttctttctctcctttttttttttttgattaaaaaataaaaccaaaccagaatttgctgaaagcaggtacctttcagtagctccgatcagagtaactcagcttagagatactgttactcaggacaacagtatgtacaaaagtctccggaaaaggaaaataaaacaacctgaaaagaattcaacttgaaaaggactgaattac

SEQ ID NO: 4716 - DNA, 1062 bp, Homo sapiens
attgctgtagcatttcttatcccctgagagctgatgattattgaggacagaaggctcagaaacagtttgtgacagaaaatgcagtgtttcatttttcagggataaatgctaagataaaattgcttttccaggtcatttttttttgtggtaagaataactaatggaaaataatgaaacaccctggggtttgggggtgctaacaacttgtggctttaactgacaggagcaattaaaaagagcaagagggttctgcattggcatagcttagggaagggttaatgatgtcgccacaggtcagctcctgatccttgccgacttgatgttgctgtaccagggcttcctccccagaggtgcagcttgcgttttgagggtgattgctacatatgttgttgctaaacagctcagtaacacacttgaatgaatttggataccagattgtcctcattacagttcttttactcttagggcactctacactgggggttggggttgggagtggttagtacatttattacatttattaagaaacgtaatgacataaaaggttagctctgggccagacttctcttactctgtgggtaatggcaaggatgtgtaggtaaacttggttcttttttttccctaagatgacagcttgattttatcatctgcagtcaaataactgagccaatccaaatttaaatgatagatgctttaattgagtttaagtagctgaaactgctgagacactaaactttaaccttctgatgactttttaaaatgcctcaaatgtgcacatgtatataggatatttttataacttccctgatgaataatctgatattaaagtagtatttggacccagagccagaactcggtggtggaggctgctggtctctcctcaccaccttcttttgcacttggaaagaacagcaacatctggatagagttctagctttgacttctcatttccttgtctttttgggtgcattcctcagcacactttttttttaaacctttttgttttgttttgtttgtatttcatgtggttttatttgggggttttggttttttcaccctttt

SEQ ID NO: 4717 - DNA, 1051 bp, Homo sapiens
tcctttttttccctatcactgaagctttttagtgcattagtggggaggagggtggggagacataaccactgcttccatttaatggggtgcacctgtccaataggcgtagctatccggacagagcacgtttgcagaagggggtctcttcttccaggtagctgaaaggggaagacctgacgtactctggttaggttaggacttgccctcgtggtggaaacttttcttaaaaagttataaccaacttttctattaaaagtgggaattaggagagaaggtaggggttgggaatcagagagaatggctttggtctcttgcttgtgggactagcctggcttgggactaaatgccctgctctgaacacgaagcttagtataaactgatggatatccctaccttgaaagaagaaaaggttcttactgcttggtccttgatttatcacacaaagcagaatagtatttttatatttaaatgtaaagacaaaaaactatatgtatggttttgtggattatgtgtgttttgctaaaggaaaaaaccatccaggtcacggggcaccaaatttgagacaaatagtcggattagaaataaagcatctcattttgagtagagagcaagggaagtggttcttagatggtgatctgggattaggccctcaagacccttttgggtttctgccctgcccaccctctggagaaggtgggcactggattagttaacagacaacacgttactagcagtcacttgatctccgtggctttggtttaaaagacacacttgtccacataggtttagagataagagttggctggtcaacttgagcatgttactgacagagggggtattggggttattttctggtaggaatagcatgtcactaaagcaggccttttgatattaaattttttaaaaagcaaaattatagaagtttagattttaatcaaatttgtagggtttctaggtaatttttacagaattgcttgtttgcttcaactgtctcctacctctgctcttggaggagatggggacagggctggagtcaaaacacttgtaattt

SEQ ID NO: 4718 - DNA, 1004 bp, Homo sapiens
caagtataagttctagcttggaagcctgggttctgcagtagctgtggaacttaagcctgtgagctcagggatgcagaggcattgagttactaccaagggcctgatcttttctttagcaggcatctgtgttaattgtttcaaaaggtggtgatcagttttacagcctattataaaggagatttttgcctactataaaactaatccccctgaaagagtgagtaaacataactttttgtgtgttgacttccacaagggaaggagttggcacttacactctgacttttgattcagtcgtccttcttgagccatttttgcaggggatcagtttggagtgggcgttaacaatgttattctttttttcttctccagaacaccttccaccatgaccacctcagcaagttcccacttaaataaaggcatcaagcaggtgtacatgtccctgcctcagggtgagaaagtccaggccatgtatatctggatcgatggtactggagaaggactgcgctgcaagacccggaccctggacagtgagcccaagtgtgtggaaggtgagacagcaatgtggagtggagcacatgctgggtgggatctgcagaggggtgggcagcagcctttgactcagcctctggattaggcctctttcttctgtttgtaaaggttttctaaggcagggcttttcagactttattcagtcaacattaagctcctacactgcctcaaagcagagcgacgatggaaccctttatttcaatggaattgtgcacgtaggccagtgtattgaagaaaaactaagtctggtttatggagagttggcatggggcttagaggttgccgacctggacatccccacttagctggctctaaggcaccctcagaaaaccactgctctaacctgagaatgccatctagtttacaaactcttagaaaactgtgtttaatactcatatcactggcttctagatgtgaagcaaatgctctacaatggtttttaaataggactaatt

SEQ ID NO: 4719 - DNA, 1048 bp, Homo sapiens
tttacactttagaaccatgggttagaaccagatgttagctgggcatggtggcgcatgcctgtagtcccagctactcaggaggctgaggcgggaggactgcttgagcccaggaggattcaaggctgcagtgagctatgatcacatcgctgcactccagcctgggcaacagagcaagaccctatctctaaataaaagacaaccagttgttgagactgttccacccttcactgaggctcttctttccctgatggctaggctgtcctccatggaacattcacagcagccactatgtcctctggggtcttccgtgcaacatatcagcttctgctggtttttccttcctgtctcaaatcctgtatctactttggatcacccactaggctcttatttccttcctggtggatgttcctagttctcagcacatttccagggtggacaagactgacctgccctgactttgaatgaagccttccccattttaggttaccatcttcatagcttcctcatattctgtgataactctgatgtgatgtcctcaaggggacagcctgtggtcattttcccagaaatctatgaccattttattatagtcacaaaagtactttgaagatagagtaaaaataagatcctttctaggaggaagagaggagccatccctgtatgggtcctgtcctgattagacatgtcgggaacacagacaatggggacagctttggttttaaacaagaaaaagtacaaaacagaagaaaggtaaagaaagaagtggctgggcaattttaatgagggcaggcatggtagagagaagaaaaagaatcctcaagtggggaagaaaaaaggctgtgatttatgggaagagaagaaaacgtttacctgatagttcagggctaaagagaagtccttttgttcaaaagcctccaacatctggtttgtcttttttcccaggtagttataggtactggcaagacaataacaaatactgcaggttcaataactcaacaggaaaggtccagatcttcaaatccctctgctgtttaaaagggaaaaaata

SEQ ID NO: 4720 - DNA, 1025 bp, Homo sapiens
ttcaaaaaccttttatcacataaaacaggctaatataaccacatttctgtccaagtagatggaatggcctcttttcaatcaaacacagtacttgctgagaagctactcttaacattcttaccaaatttacccagagctttggtaacctgacgattaatacatagcaggcctcctccctttttataataatagacagcctgtgccatgacatcgtaacaagccctaatttattttaatatttatcctatatattctgaatgtttataaatcctgtgcacaattaggaacttggtaaatcattctcatcaaagcagaaacacatttattatcagttgcatactcagtacacaatatgtgtgaagctagccattcattcctcttcagtaccacacctcagaccatagagttaagtgattcaatcaaatgagtaattcattctcttcaaatagtgagtcagatacaaattgacatttaaattcaggtctcctgttgctcaagatttcttagatcaagggtcagtagcctttttcaaacagtttgccaagtgtatatttattcattcactccaaagagggagtcttttagcctgaagaatagtcgggaatcattgcagtccaagattgaagaaaagaaacttctgatttgggaggcactgaggtgacagttggggaataatattcagagctttctctcccccttcacttctccattctcctaatatttactaagggaaatcttactatcttcaaggtttcccccaactcccaataagcaaatacctctgagaaattaccacacctaaaattcttatctgctgatttaatggacacaatctggagaagacaagaagagatgctcataggaaagattgaaaagtattgaaaaacaaaaacaaaaaccgtagcctctcttattttattggcagaaggccttagtgttcatgcatctctttactacccgaagcacagtacttactgaaatcatcttgtgggtccctaatctaacagcaacatatttcatgtcaa

SEQ ID NO: 4721 - DNA, 1051 bp, Homo sapiens
catacaatggaatatgattcaaccattaaaaggaatgacattctgacacatgctataacattaataaaccttgaaaacataccaagtgaaatgagccaaacacaaaagaactaatattttataattttacttatatgaaataatctaggataggcaaacacaaagggacagaaagtccttagaggttactaggaagtagggaaagcaaggaatagggagttagtgcttaataggtacagagttcctccttggagtggtaaaaaagttttggaaacagatagtggtgatggctacagtacattgtgaatataattaatgccaatggattttacacttaaagatggttaaaatggcaaattttgtgttagatattttacaacttttttaaagaattaggagtttggaggatcaagaattcttaaatcatgtttttctattttcatgtgtatattttgcaatgtaagtagatgctggtacatcatctgtcaaaagagtataagtgattttgagctttgggtaaaaaactggataacatgtaaatagaaccagtcataaaaatattgagtgtttgaagtgtatctgagtgaaaacacaaacataagaaaaaagcacatagtaaaacaatagttcccccttttactctaaaatgcaccaatttgggtagtaatttatatggcaccctattcatggaacactttctgttgccaggtaccatactattaatgttttatttaacctttacaacaaccctgtgaagtatataaatatctttatcatcctcaatttacagatgaaaagctagctttaaaacccaagcagcgtagttctagcatagcctcaagattgcagtgaacattgattacttattatattccacatattcttcaaaggactttataaatattaactcatttaatcctcataaaaatggagggaaatgcttgctattattcctcttttgtcactgaggaaactgaggcatgtgtgaagtcttcatttcttccaaatgtcagtcaccagtttttaccaatcttcgaagtatttctgaaat

SEQ ID NO: 4722 - DNA, 1031 bp, Homo sapiens
taattcaaggtgaaactgcaaatctgcctccttgttttgttgggaattttttttttttttttttttttttgagacggagtctcactctatcacccaggttggagtgcagtggtgcaatctcaactcactgcaccctccgcctcccgggtttaagcaatcctcctgcttcagcctcccgagtagctgggatcacaggcacacaccaccatgcctggataatttctgtatttttagtagagacagggttttaccattttggccaggctggtctcgaactcctgacctcaggtgatctgcccatctcggcctcccaaagtgctgggattacagctgtgggccaccacacccggccgttttgttgggattttttttttttaagatcaagacataaatttaaatgttgttttaataaattgttaaattatcacattgatctgttagcaaatcctctcagctctgccttcaattatgttaatagtctgtctagtttcttaccacctccactgctactatgcttaccacatccagcctgtattattgcaattgcctcctaattgctctccctgcttctaccttatcccctactcccacagcttattttctgtaacatagatgccaaagcaatcctgttaaaatgtgagtcagattatggcactgctcttaaaaccttccaatgtcttctcatttctctcagtaaaagccaaactccttacaatgcctgtaggccttacacgatctgtcctcccataacctctgacttactcacgtgcttttctcccaccaatccactccaaccacattgggtttttttctgttcctggaacacactgaacacacactaatagcactgttctttcctctgtctgaaacactttcctcagttatcccaagccttctttcacgtccttcaggtccttactcaaatgtcacattcatagtgtagactttctgaaattctaaaccctcctcatacagatatgtctaaatgttctgttatttattgacccaccaggaccgggcaggcagcattg

SEQ ID NO: 4723 - DNA, 1138 bp, Homo sapiens
ctgttgttatactgtctctaaataaatcactgttaacatggacttctaagaataggaaatagcttcactggttagcatgggttgatataatgtacttaaacaaaaattctacttgtcacattaaaattcattgatagatctgttttgagctactctggcattactatagaaaagctaagtaggcatgcccatctgtacctagactgggcagccaataagtgtttttgaatgaacctttaatggcttgggagccattaatatcttgtgcctaaaacactagccaaagtgtaggttggttcctggttgaggctatgcccagtatggcagcaccaatttactgcttagtgccttatgcagagcccaacatacgaaagttagactaaatatattttgactgaatgaaagccacctagctgcaatgggtttcaataaggaggacatagatagctggttccatatgtcatgagcaagtttctgggatccttcagaagggctgggttattctcaaactcattactgaaaagtaccttttcacctaacattatccttttcttttcctagttcatagatgttgacaatttcctgactaatccacagaccctcaatctactgattgcagaaaacaaaactattgtggcccccatgctggagtctcggggcctgtattctaatttctggtgcggaatcacccctaaggcaagtcttttgcttaaatgaattaaggctactagttttaacaaggcaacacccggtcaacagtagtcccattcacctttctcttgtttactcccttgaaacatgcgtgtcattgtgttcccagagcaagcattttttaggaagggcagtaaatctgggtccaatgctacacccagttgggctcttctgtgttaatttattatgaaaaaaatagtctaaagagcttagccttagaaacgtcaaattagccaattcctgattcaggaattactatttttaattaattctttttgtccttacaaaactaacataagaacactatagaaaaacttagaaattaaaaaaagtttaaaagaaaaccaacaagacagatgttaaatccccatcaccgtaacaacatcatagatagaaacttgcacgtttttagtaactgtgttatcat

SEQ ID NO: 4724 - DNA, 1079 bp, Homo sapiens
gtagaaaaatatagcagaattcacatatgaaagtcaactgcatttctgttagataccaactgagtatctaacagatactcatttatttaaaaatattatttatagtagaaaccaaaaatgtaaggtacctaagaataaatctaacaaaaataatatctttatgaaaaaattctgaaactttattaaaaacattaaggaaggccaaaataaatgtggagacatagatgtacatggaaaggaaaaattgataaagataatgattctctccagacgattaatttaatgcaattctaataaaaatcccaagaggattgttcatgcactctgagatgctgattataagatttatttgaaagaacaaaggaccaagaatactcaagtcattcaaaaagcaaaacaataagatgaggggactttctatcaaaagacatcctaaaaatagtggacaaacaacccataaagtgggaaatcatttttgcaaccaacagaggaatagtattgagaatcaaccaaccgacagagaaataatgtagagaatcaacgaagaactcatgaataaaagagaaaaatcaaagaacctaacagaaaaatgggcaaaaatacaaacaggtttcacaaaagaggaagcacatgaatgaccataaatatatgaaacattccaccacctgataagtaataaggagatgcagataaataccacaataatgtatcgtttctcagcagccaggttggcaaaaattttaaaatctgacaacattctaagcattgctgggaatatatatgcaatagacacttgcatatactgctcctgggactatcaattggtgcaactactttgaagacaatttggcattccctagtaaagttgaacatattcagacctatgacagatccaggaatgccactcctaaatgcactattgttcatatacagcaggggatacgtgcaacaaaggtcatagcagcattgtttgtaattgcaaaaatctggaaatatgctaaatgtccactgacagtcaaatagatcactaaattatagtataataatacagtgaggtattacagcattggcagtgaatt

SEQ ID NO: 4725 - DNA, 1095 bp, Homo sapiens
aagattccaatcctaatgttagctggggtaaaaaggtccagcctatagactccatattagcagactggaatgaagatatagaagcatttgaaatgatggagaaggatgagctatgacttgctaaacaatctgttggtaggtatttaaaaagaaaaggtaaactgtgtgtggttaatagacatcctaatactaagcaggctttctaatgggaggctttaagtatggtgatgaacaaccacgttctgactggcgtagttatcgtaggaatctggagcatgctgtgttagaattgaccttgtttaaaactgtcccatcaaaaatggaaatccacagttcccccttcaaatgcagcactgcaccaccctgcaacacctcaggccagggaaagattactgagcattcctgcgaaccagatttctgttgtctctggatagacaagaaacaaaattcatttagtagtggagtggggaataggagtttggatagccttctaattaaaggaagctcgcctttcttggttttgggggttagaggctcttttgggaagatgcatccgagtattgtggcattctgattatgctgccttcacaaaacactctaagtgacctaagtggttatgaagcaaatgcatttatggtgaaaacagtctttgctcattgctttctcttgtttcatttagtgacaaatgatcaagatgacttgattttttttccttcttaacaatgtcttttttatttaaaccaaaggtgaagccagtgtactttctcagtgagttctctgcataaagactaatcagtgggaccaggtaaaaaggtcatataatacattgtggagattgcttacttaatacttctgaaaaatggagtaagggagaaactgtaatgttgcaatatgaacctcccattgggccttccatagggaaagctgtgactactctgaaatggaacctagcattatatccttgtagggtagattataaatcatttccagttcatttctcttagaggtgattacctctagccatcagccttactccatcccatgtttggtatgcaatttgagccacaaggctcgtatcgccaacagctatataca

SEQ ID NO: 4726 - DNA, 1043 bp, Homo sapiens
aggaagtatcatactggatgccatccgggaatatgaggaggtagaagtgctcctctctgataaagcaaaagatcgaggtaagagtaaaataccatttgtttttttatgcagcgtaatattaattttgctagtttgataacaagaatgagtcacaaaaaattgttttggggggttcactgtgaaaacaagtaaaacttttagaagatgatttcaaaatatatttttcttttggaaataagaataataaaacatttattttgctttgttttctgagttaggatgtttttagacatatgtttttatgtgtgatttgtaatttttgccctgagtctgttcaggtgataaaaatacaagagactgcttcaggaaagccattttaacatccggaaatgttcacaatttgatttcactgatactacatcttacatgtcttttataaggaatgagaagacatatatagaatgttgtatacaatatcatagtagttagtctcaacaggccacctataatcaaatgactgctgtcttggtgaaggcaatagaaatctagcagcttcttcccaatgagatctaagtttatcacatggatataagagttacaaatggctgtttctgaaaaacaagatagcatgtcttaatttatgagagtagatagtcctctgtaggccaaaatgtttgttagtaatttgaaatgtctttgaaacccaaattacaatataaatgcaaggccttactagtattcttacatagtttcacacccagggatagaggagaaatgagggaatgtgagccttcagatcttgcttgtggtagcagtctttcctgtctgctggagagacctgaagagagagctaaagttctcccatacccttaaatagatgaagttgcataatagtacagggttgttacatcccctggggtgtttgacagatatgtaggaaactgattcaattcaatgtgacttccaagtgggacatttaaaaaaaaatgttcggtgataatcatgctagcataatcatgctagcctaattttgtcttcttgta

SEQ ID NO: 4727 - DNA, 1033 bp, Homo sapiens
cttcatcacaccctcaagttttcatctcatccatattcttgccacatccttccttcttttaagagtattcttccttcttccttgtattttatttggcctcagtgggagtgacatctcttgtgacattgcttttacttacttaggctgccaatggcataattactgccaagtggcctcttgatccttatatgatttaacttttctgtaactattggctgaacccttcataaaacattttccctttttggcttcccaggatatttcagaaacaaagttctttttctacttcactgtttattgctttgtagctctccttggcacaaccactcaatgtaaacagtttccaagaatctggatgatattcttttctctatatactcttcttcaacagtgtcacctatttctacaagcttagctatcatttttatacatatgacttcttagctatgtatgtgaatcctgattcctaaatttactattaaattcaactttcatctacctctcatacatcttgcatctcaatctcaatctgtccaaacttgaattatctctttcttgtttactctctttctaccctcacctcaacctatgtttccttctttggctctccatgtcagtaaaacctatcatcattctttaagtcatcaaagctggaaatttcaggataggtttgaactcttcttctcttccagttcctcttatccttttccatcctctaacttctatcatgtcttgttggtttttcctgtaaagtatcaggaatcatcttatttttttctattatagtcattcttcaactttccctctgttaagactcaattcaagtgtcattctaaatctttcccaggtacacacaagcagaatcaattgttccctcatctgtgctccttttccactttcccacttgagaaattttatcatagctaactttacatgtctttctcctccagacacaaatttcttaaaggactgtctctccaatgcctaggcaagtgctgagatggaataagtgcttcacagatatgttttgaat

SEQ ID NO: 4728 - DNA, 1043 bp, Homo sapiens
tacaattttatattttataatcaacttcatttgagtccagatttttatagaaactccattacctgaatgacattgtaaaaataatttttaaaatgtgtagtggttttgtgtcagtatttcctgatgatgttgaacagggacagcgtaaaaagtgatatacattccaaaaaatcagttgataaagtagttttattttcaccttttatcagaaactttgcagatctgccaataagagatgtaatagatttgagttttacctaatcttgtttgtacaaggataagaattattgaaatatgttactagttagctttttcctttgtatttcaattctttttgaaatcttggaagtttggcttagtctttgattacaccaaggatacagggctttgaagacctggagaaactagtgagtattcatttcaaaagcaagtcttaagactggttcagaaccacaagcatgtttttttgggaaaagtgggaggattattgaacccaattgaatcacctttttaactgaagcaaactgaaatgaatatagcaaactcatcagttatatcactatattctttttaaactaatctaccatttccttgctcacctatcagttcatccatgttgtatgtatgagacagtatgacatggtgattaaaagtatggaggagaatggcgtgaacccgggaggcggagcttgcagtgagtcgagatcgcgccactgcactccagcctgggcgacagagcgaaactccgtctcaaaaaaaaaaaaaaaaaagtatgggagatgtactggtttaaattctgattgtaccacctacgggttttgtgactttgggcaagtaactaatattatttgcctctgtttctcatctacagaatgggagtactagtactatttatagggttattgggaggattgagtttatgcattcaaagtgattagagcagtgcctttaacctatggccaatattcaataatagtgattaaataataggtaaatttgcaaaaaaaaaattagtaaaagttaataagtcattaattgaatac

SEQ ID NO: 4729 - DNA, 1033 bp, Homo sapiens
atgcagtggtacaatgatgaacttctccaaatggcaaagcagttaggttacaaacttttaccggctttcaacactaccagtggccttccttatccaagagtaagtacttctgaaaaatatgagtctttatatactttctttgctgttttacaaaatgaagttttgtgatcagagccattgttcttcaccagcttgaggctgaaaaaaaaatgcttcaaagctatataacaaatttatattttcatttcaattaactgattatacttctaagtgatgtgataattagattagtttaagctttaaaaaagttttatttctgatttctgtgggtacatagtaggtatatattaatggggtatgtgagatattttgatacaatcatacaatgcataataatcacatcagggtaaatgaggtggccattacctcgagcatttatcatttctttgtgttacaaacattccaattatactcttttagttgttttaaaatgtatgatacatttctgttgactgtaatcgctctgttgtgctattaaatactgtatcttattcattctgtctaacctgtttctatacccgttaaccatcccctccctattccccatccccaccacctacccttcccagcctctgataaccattgttctactctctatctccatgagatcaattgttttaaattttagctcccacaaatgagtaagaacattcaaaatttgtctttctatgcctggcttatttcttttttttggtgggggggaatggagtctcccactgtcacctaggctgaagtgcagtggcgcgatctcggctcactgcaacctctgccttccaggttcacgccattctcctgcctcagcctcccgagtagctgggactacaggcacccactaccacgaccggctaattttttgtatttttagtagagatggggtttcacagtgttagccaggatggtcttgatctcctgaccttgtgatccacctgcctcggcctcccaaagtgctgggattacaggcatgagccaccac

SEQ ID NO: 4730 - DNA, 1027 bp, Homo sapiens
gacaaacataatgtatgagagtctcttgtggccaaaaaaagcaaccaatggaaagatgggcaaaagatcaacagacatttcaaaaaagaaataacaatggataatacaaaaagatgtttatccttattagtaatgaatctttagataccatcttttacctaggagtttggcaaaatgtgaactattgatcatttcctatgttagtgagaatgtaattgagtgtagattggtgtcctcaatttgtagcatttaccaaaaattagttacacatacctttgaccctaatgggtctatttttaggtatctgatacatagaaatactggcatatgttcaaaagatacatgcacataggtgtttattgcttcattgtttgtatagaaaaaaattgaaatcaacctccatgttcatcagtaaagggatactttgaggaatgggtactgctaaggggatagactctggagtcagggtacctggctttgaattctggatcatttactagatgtgtgatctaggcttacttaacttctctgggcctcagttttttcatccatgaattagagataattgaatctacttcagagcattgtgacaattaactaaaatatatagatagaatatcacttagaatataagtactcattaaatattagctaatgttatcagtttgtagttattagaatagagtacatctgtaacattctaaaaacgtgggaagaaaactccattatttaagtgacaaatgttagagcaatatgtgcatatggcatgaacacctgttcataaataaaattttagaataatatatgtgtatgtatttgaatgtatgtgggataaatctggaaggataaatgccagtcttatcagtagttagctctaggaagtgagattggggaggggaggggaagcagattatcagttttttaaagaaattttttggtattgtttgacttttttccaagcatgtattacatttgtaattaaagatttttgaaaagattccacagggtgtaaatttagtacaacttt

SEQ ID NO: 4731 - DNA, 1032 bp, Homo sapiens
acattcttaggcttcacccccagatattctgactcactgggtacaccgtggggcctggacttggcttttctagcacacggccgagtggcactgatgctgctggttcgcgaaccacccttggggtggtgttgcttcaggccactttgcctccaggcatggacttaagcaatgtgacatcaatagtaaaagagacttctcattccaatatgtgatgtttttgatatactgaggtgaatgctggtttttctggactccacaaagtcttcagttacagataactgcgctctttgttcttggcacttggaaaggcagccagtctaagagtactgagggcttactctgtgccagcctctacgtaggtgttaggaagagagtaatgaagcatacagagttcctgtctctgggagttgaaattcaaacagggaggatggataaacacccaccaattatcatttgaaagttatcacagttaatgggttaaagagcaacgagaggttactaactagtgaagaaaggagtgccgaactttcagctctccaggggagtcctgtatgagcaggtgacatttgagctgagtcacctcacccattgtgcctttatttcctaatatggttaatttcactgtatacttattttaaaattcagaggtttccctgagagtgtcagtcccacagagtgagagtcactagtgatgcatctcaactaactcttggttttagctgtgtattgatggggactcacggaaaaagataaggtcagtctgttttgccacagcaaccctgagtaacattcatcatcatactggatcataactagttaggaacttttttaaaaaaatgatacccttattaaaatcttgccttgtgtttttgatgttctagagacaaaaaattgcccagcactgactgcaccctttagctcattttccactacacttgcccgtctgtgtttagggcctcggtctagtaggaacatgcagttggcactcagcacaggaactgcgaagtttcactgagtgcagaatgctccctg

SEQ ID NO: 4732 - DNA, 1129 bp, Homo sapiens
tattaatagcttgttactacttagagatcccttctcaagaattaaatcaagcactaatggcctaaagcatgtattatatgtaatgaataacttctctcctctgtgtccagaatggcactacgtaccattcctttaagaattgaaaaaaaaaacagtcactgaactatttttctatgaagcataattttctcacagagcctaagttgagaaagtctgaccttgtgagatatgcaacatgcctcctcacgggtagaaaagggtatgtaacacagtgctagggaaagttactattattttgcattttagaaagaaagatacagttgccatttagttaacattccgactgtaatgttatcaagaaatccaaacataaaggatctcatttcttaaatatttaaaacatatgcacatatatacacatcaatattttattagtttatagctaaatgattctaacatactaaatgtaaaatcattttttcattactttgtagccatttcaatgtaatttgtgacttgaaatcattatgagaaaatattctgaagtctcccatgttcaggaaatagagtgattcttagtaagccatgctagctaatggaatgcagccatatggagttactcattttctaacaattataccatagtgaaatatatttagcaaacaatgtagtgtttgatgaaccacaaaggtattttaggattttgtgctttcctagggtgattgttcttaggtatcataatacagatgtattgatgtgctggacagtcaagatagtaaattaactttcattaatcagatgtttaactgagtgttactcttttgtagagagtgctgaataaatcagttctttggttttggtttgtttacatctgccaaaccgtttgcattaacacaaaataatataaagttatttttcaaaatgtatatttattgttttagatgtttacaattattttgtgttttcttggaaatcttttgtttagaattattttgtgtttccctggaaatcttttcttttttccatcttagcttccactgctaaaccacctaaggaaattttgaaagaggcagacacggatgtacaagtttgtcccaactattctatacctcagaaaacagattcctat

SEQ ID NO: 4733 - DNA, 1054 bp, Homo sapiens
cagggagtgcttaatatgtgccatatctacttcacaattttacttcaggcaaagccagccaggctctcaaaagctaacatgagactacaaattgtggaatcccaaattgtaggacaccaatccattatatctagcatctagaattcaaagtgtcaaagaattcaatcccgtaaataactcttttaatctactgggagatggtctatgtaagttcacaaagagcacccaacatctagtatagcatctggcatgttaagtattcaaaactggcagtcatttttattttaacagttacactgtcattacttccttggcttctgagatagctctgccatattcatggtgttggagagaaccactagctacctctcccactgcccctcccacatgacagatctcttgatggagagtacaaaggaagaagaactgaggggacaatcagaactcgggacaggacaaggagtagtgacaacaccgaagtaaataataataaagtaaatgtaccatatttggaataatgtcacttcttgacaatgtgtggtttctctgagactgattaaagcctgacttttgggtggctcacatctgtaatcctagcaactcagaaggctgaggcagcaggatcatgaaggccaggagtttgagagcagcctaagcaatacagtgtgacctgctccctaaaaataataataaaaaaaatttaaatctgacttttggctttgtgtaaccctaatctcattttctacatttaaagtttaaaaatagggctatggtgctgccaattcttcacaactactcaaaaaaatgattttgaaacactcttaagggattcaaaatagcagagatataaatgttttcttacaaacttaaaaacgaaacaaactaaaagggtaggcccctattcctgtccttatttattccacatgtgaaaaaaatatccttcagtaactagacttttgaatctatttctgtgtcttatgtttttcttcctctcaccccttgtaattaagaaatgagctctatcttctcttttcctcctagtggcatttgtttc

SEQ ID NO: 4734 - DNA, 1051 bp, Homo sapiens
atctgtgaagttctagtctgtgcagtcacaattgaccactgcaggttttaacaagaggaccctgtggggacacaacagacttcaattctttagccagcttttccttggctcagaatatggagagagctggaggccctccaaaccagaggatgttcgctggtcttcccaggagagaaatgaactatcttttgtaaaagtaagtttcaaaggccaagtgtagtggctcatgcctgtaatcccagcactttgggaggccaaggcaggtggataacttgaggtcaggagttcaaaaccagcttggcaaacatggtgagatcctgtgtctactaaaaatacaaaaaaaaaattagccaggcatactggtacatgcctgtaatcccagctacttgggaagctgaggtatgagaactgcttgaatccaagaggcggaggttgcagtgagccgagatcgagccactacgctccagcctgggtgacagagtgagactctgcctcaaaaaaaaaaaaaaaaaaaggaagttgcaaaacagtaaaggaactctcaacccctgcattacatgattaggacaacaaatagaaaagtaataaagtttacgatcataaaaaaaaaaaaaaagcaacaaagaagggagagggaaaaacaaacaaaaaaaagcaagacctgacatttcaaatgatttcaaatggaagaaataaaagctaaaacaaaaattttaaaacaatgtttttgaataaaaaagactagaaagttaaaaaaggacatcttcacatctcaataatattgaaaaagttttttatataagactgaagtaggcataagggtaaatatgtgataagactgaaaagaaattttaaggaaaggattaacctatattaaagcgataaaaaaaaaaaaaagaggagttaccagaacaaggaaaaacaaaaacccaacaataacaactagaagttgaaggataagggtctgaaaaaacttcttttcatgggggtcagcaggcaacagatgaatgtatatttatttggcttctcaggaaagaaaaggaaagaggca

SEQ ID NO: 4735 - DNA, 1034 bp, Homo sapiens
ataaaggatttaatcagcatttctatattaggcttgttattaggcattgcttttgggcctttctctttcacagtcattttctcttaattatagtttgtacattagaacagtttttttacttcagtacagcctcaatgtaagcatcatccatttgtgatatttggatcccttcttcccataggttgggatgaggttttatgtaccttgtaattcataataatagataaggttagataagtctaaccttattttttattcttaatattcatagtataaaagtgatatgaaagatgcattcacaactttagtaacagtggaaaacagcctgtcatagtgtaaatctgttttatagtatgacataacttgtcatagtataaaaaggatggggtttatcttcataattcctaatctttattttagttgtattgccttgggcaatgcatatcttcttgagtttcaatatttttatctataaaatgggtagataatatcaccctcactggactaaaagagatgatgtaaataaagtacctagtaatacctaggtacatagtaaacatctaagtggaatttaatcataaccattgataatgatacattccctgccttttctcaaaatagcctacgtatgttgtaaccacactcaggcctaacttttgatatagctttttcttaatagcttcaagtagctagcaaaatctttttctcaattacttgttatatggctttttgcttccactagcaacagaaatttccattagaaattttacctatccatgtgttctggccatctggaccagcacaagtgggatgagcaaactaggccaggtgctgaagttgctacctgttcatttggcagttcctctcagagtagtctttactcttccaattccatatgatcatatcctttggaagtggcaaaggctaaagtaattggaaggaagccatcaaggaaaactcatacatgagaacacatgtgtaaagtagttctcttacaatcatttggaaattggcagctttgttcatttctccct

SEQ ID NO: 4736 - DNA, 1030 bp, Homo sapiens
ttcagtattttattgtaaatatgtatattctttaagagtatatattgtactagtgctttttttcttactgttatatgatagaagctatgaaaaaaatgaagatttctttcaagccaatcaagccaacgactcttcagccagtattggaagattttgtatttgattttggttttttgtttttgttttttaatttttaccaccatgacatgtatttttctttacctccggatcctgccagagtaatatgtcaagaagctcaagaagcacactggaggttaccttgaggcgtttgtgtaatctgcatactagtggagtagccatggtgaccgtagccacatgggtgttctgttgctgttttgcaggttcaaaccttgtactactcagctgatcacaagctgcttgatgggaacctactagatggacaggctgaggtgtttggcagtgatgatgaccacattcagtttgtgcaggtacacattgcacagtctgaggtaacctcaggttaaaatttgactagagaatttgatagcatacttaaattttcctttaataaaggaaagtggaccaatttcattggtataactggacagaaacatttttgggagaaaacaagcatatcttagagttagtatttttgccacatgaaaagatattaacaaattaggaaaccctattgaaatttttttctcataaagcaggaattacaaacagtaaaggccaataagatggaacaatatagaaattatttgggaagattatgaaaagcagttgtttgtgtcaggcatgactgatagttttttttaaaaaggggcagggggacttaaattgttgatggctatgaaagaaatttttggatgttaccttaactactgagctgtcttactggaaattagaaatggtatagttaagatggactatacaatgtaataagtctaaaagtggtggatcatatgttaaaacctgatctagatgtttctttaaccaagatgaattaaaatatagtagagttccactgtgctgattgagttac

SEQ ID NO: 4737 - DNA, 1565 bp, Homo sapiens
atttgaagtaaaccatataattagggaatatcttcagaaaattccaagtcttgctacatatatttaaattaagtgtgttttaaggctttggtatcataagtaactttttttttaaataggttgaaagcagataaggaattggtaaaagatgtttattctgcagcaaaaaagctgaagatggatcgagtaaagcaggtagagtatcagaagtaaataaaatcatttatggagtcttattttgtgtgattgcaatgctgaatttgtcataaaacatcttgttagtttcaaggacttgaacatgtcccttttttccctcagagtagtcaatatgttattttaactgtttggctataataatgtagcaagatcacacttcttctcagataatttgggctgaagtctgaccctttcagcaatcttctctggtagggtggctatgtcagcctttgatagcatgaattaaaattaatatttttcttaagagttaatcacataacttatatcctcaattctgtgttctcctaaacttcctgtgctctctaaaagtattccttctagaatttaatgccagtaaaaagtacttttggaaaacaggcatttaatcccctaatgcatgggggtcagtaaacttaaggcctactggccagctgcctatttttataaagttttattcaaacacagccatgtgtgttcatttacatatggtctacactgctttccagctacagtgacggaattgagcagttgtgacaaacagaatggcctacaagcctaaaatgcttttactatctggccctttaagaaaaagtttgatttgctagcccttcttctaataccactcctttgttcaaaaatccttccttaatttacagtacatatccctgcatttagtttctagattttcccttatatagttgctgtctttccaaaactatttcctagttatcttttctccaaccaaattaaattgtttgcagcatcttctctacttctgtctgcattcaacatcaacatcatctctcctgtagagcccagttcagatactgcgtttcatgaagccttaccaaattattctacttgaaaatacttatgtgaacttacatagcatttcaatttgttgtacctctccttaaactaaaacttacatatctgtatggcataattagatgtttatcatttgtatacgtgttattaccactattaacatttgttgtattaagacagtgatttttgattctttgtatcttcacatagtctttaccacactgaacattaaatatttgttgaataaaagatatgtaagtgttggcactcatatatttcttttccaaggtttgtggtgattatttactgtctagaatggatgttaccagctgcatctcttaccgaaattttgcaagttgtatgggagactcccgtttgttgaataaggttgatgcttatattcaggagcatttgttacaaatttctgaagaggaggagtttcttaagcttccaaggctaaaggtaaggagtaaagtctataaacagatatatactatctagttccaggcgtggaatcttgg

SEQ ID NO: 4738 - DNA, 1035 bp, Homo sapiens
ttcttttttatgaaagaaatcagtggcaagatttgctctttttccgtccctccacgcttttggttaagtgtctctgattataagctcttgatgataggaaggtatcaggctgagggttgaacctagggtaacttgaaccactacttgagaactacatttactttttcccccaataggtagtggacatatctattggtttgagacagctgacatttcaaggagaaatcagatgtccaaaagggcgcatttttgtgatggagcgtgcagtgatggagcgttagaacaccttggcatcaagctgttcgttgagtgtgtcgtggtcttctgtctactaatagatgacaactctggaagcctagtaccactcttaacagatgaataagtacagcatggactagactgccacaggccatgctttcttttaataattctagcaccagtgattgatttaggaaaaacaaaatactgatgattacttttaggctaaagcctgctgacacttctgtcttaaagatactgaaagagtagttgtatttgttaagtctggacgtgaggtaaacatggactttagaattgaattgagactagtatcatttaacgccagctggcaggctgcttatcaagcttataatttggtagccagaggtaaacggaacttgagccactgaccaaagagagccctggaatggttttcctctgtgttttcctaatagatgatatctctggttaactaatagatactaatttctatagccattgtcttaatttgtagttgattttctaactttccccccaagacaaaacatttcaggttttagtcttagttttaaattagtgtctttttggctacttgcttttggaaggtgggattttttcttgcttgaaggatttgttagatggtaattaaatgtagttttgcaaatacgtttttaaatataaatgttttcctgttaaggaagtatcttaattgatattaagatgaagtaacactaagtaagtcatttcatccactttttagcagtgcgattgtatagt

SEQ ID NO: 4739 - DNA, 1042 bp, Homo sapiens
gtgaattatgctgtttgtggaattgattaccttttaatcctcagttggaattcatattaccctctttatttctgggaagctgtctggcacttggtaaatgaatagagaatgcatactactattacaataagctcaatctttagccatcataaaagtcatgtaatgtaacatctgcttgtttaggatattagttctaacactgaaggcctcttcttatatgaaattgtaagttgactttgtaaatttaaaatgttatgtgattttgtgactttgtatgttaatacagtttcctagacttgggcatctaggcttaaattggaatgccaacattttaagcttagtaaccttggtaattactttgttaattactttgtaattaacatccatagttggatactcaataaaattagcttgtatgaaactcttaagagcattttagcgaatgttttaagggtactgtagcattagaaagtttaaaggatgtctttaagttgtatttaaaattttgaggccaggtgcagtggctcacacttgtaatcccagaactttgggaggccaaggcaggaggatcacttgaggccaggagttcaggtgcagccttgacaacataacaagactgacccctgtctctacaaaaatgaaaaataattagctgggtctgtgttggtagccctagctccttgggaagctgaggtgggaggatcacttgagcccaggagtttgaggctacagtgagctatggtggtgtcactgcactcttaacttgggtgacagaacgagaccctgtctctaaaataaaataaaaaataaaagtttgagagatggatttttgcttgatggaataattaaatcgtggactttagtaaagttgtatatctccaataattaatatttttctttcacatccctgacttgttgataattttatgtttttttcagtcattcattaatattcagaattgtctttaggtttaggaatgtatgaaacacccctgttcctagctcatgaagaagagtcaggtggccgaagtgttcccactac

SEQ ID NO: 4740 - DNA, 1034 bp, Homo sapiens
tgtctttatcctttttgattgttacactgattctctaatggtctaacctttaggtaatttgtctactttattaaaattaatccagatttattaaatgttaattttagttttattttattttattaaatgtttactttaattttagtgtttttaatgtttatcataggtcgagctaagagctttatgttcattatctgaaatctttagaaaaaccattttagaaacaccagacttggaggttacatttgctctattaaccaaccaaaaaatagactcaaagaggttaagggacttgcccaaagccacacagcgaataagtacacatcccattgtctctgggtgtaaaacccacatttgcttccatcacacctcactactttacttctgaaaatattcgtacggtgaacattcctgttggcaagatttatacttctagggattgtccaagtttttttgtggtaaatttagcagttcaaaagtaaatttctcttttcctacaggtgaaggaaatacaggtgctgcagaatcttctttttctcaggaggtttctagagaacaacagccatcatcagcatctgaaagacaggcccctcgagcacctcagtcaccgagacgcccaccacatccacttcccccaagactgaccattcatgccccacctcaggagttgggaccaccagttcaggtattaaaagtactggtcattatgaaaaatgaacttgaaaaaaatcttggcttttctccctttccattatgtatttctctctctctcttggtttttttaaattagcaatcccatgaactttttggtattttggcatatttttataaaattctttgaactaaaactaatctctgagggatgtttagaaaggcaagtgttactaaaagttgtgcatacattgaaatggttatagtcatagcaaataaaattgttatttctcaagtgagaaaagaaaaagattttcttgggttttaattaaagtacattttcgcagctcaccattatctgatttgaaggtttctttctctac

SEQ ID NO: 4741 - DNA, 1060 bp, Homo sapiens
gatgggagatgagggtgaagatagtaatgaaggaactggtagtgccgatggcaatgatggttatgaagctgatgatgctgaggtaactggctagaattttaaccattcatagttctttctatgagctttctttcacttgctgttttccaaggatatagaaaggcttatgaaattcactaaaacctttggttgttttgttcatttgttttgttttttgttgttatggttacttatttgtttttgttgtggtttggtttggttaattattctgtccggtttttttaacatatttattttatttgagcattatgttaccacgttttgtttttagggtggtgatgggactgatccaggtacagaaacagaagaaagtatgggtggaggtgaaggtaatcacagagctgctgattctcaaaacagtggtgagatttttattagccttttttgaattgaatatctctggtattttctaaactagaattgcacttaattctaatatataaatttatttattgaattggtaaaaagagattggcccctgttctagctttgtgactgttgtgctctcataaaaagtctactatatttatgattgttaggtgctgtcattatactcttttctgcctcattgggctgctgtaagatgcaaacattttgtaacccttacggtattataaatgctatatgctgccattaagaggaaaaattaaattagggactacttgtaacagcagttcacaaccagaggaggtcagtctaatcaagctgcatgcttcaagatttggggctattggagctttgcagtatggtctgcttttccaatgaataaaagatttttggatcaatatagcatatattttgttaaatcttggataagtcctggaggtccactgaaaagttgtgggcattaaaagagtatggaagtcgtagaaaataattttattttgaaatgtgtattaaataattagtgattatctggtaatagataactaacaactgatactaagctgaaatcattagtgttgacatagtaaaaccttagctgtttagactaatggga

SEQ ID NO: 4742 - DNA, 1034 bp, Homo sapiens
cacagaactcattactatatgccaaatgttgatctaagaaatttttatttattaactaatttaatcttcattatacctcatagttacagaaactgatacccagataaagtagtgtaccgaagttcacatagcattggagctcagattcaaacccaggctgtgtagttttcaactgtcctaagcttgaaacagtacttttgtctgtataaactttctggatcatcttatgctataattattttatcatgtaaaattaaggaattgtctcaagctaaccataaatagccatatcgcaagtaaattttagtttcttagctgcgtttattttgtaagttaattttaccagctttctttgactgaaaacactaaactaaatcttcagatgattatgtagtacaggttgaacatccctaatttgaaaattcaaaactttttaggtgccaacattgcaagccacgtgtgtaatgttccacacctgacctcatgtgatgggccacagtcaaaacagttagaacttcattttatacacaaaactattaaaaatattgtgtcagattaacttcaggctgtgtgtataaacttcaggctgtgtgtatacacctttgtatatgaaacataagtgaattttgcatttatgcttgcatcttatagctgtctcattatggatatgcaaatattccagaattctaaaaaatccaaaatctgaaacacttctggacccaagcattttaaataacttattcagagcgtactataaatgatatctttttcatctatccttcagagagcattgtttctgaagaacataacaatttgaaaataataagattttctgccttcttgtcagacttggttaaattatactgaaatcttctgcaaaagctttttcttgaaattagcaaaattgtctgtgactccaaaataccatttggatttttattccacccctctagcattgtctactgaatgtgtaacagttcatttttctgattttctgacagtgaagcagacgttcttttcaagtgttgcttttt

SEQ ID NO: 4743 - DNA, 2807 bp, Homo sapiens
attttgaatctaaatattgtttttaattcctgaaggtaaggaatttgtatgttgagaattatgtatttatttcatgttggattagaaaataaatataaagaaaaaaaattcacaattaatacccctttgttttagccactattagtacattagtatcccttttcatacatgtaagcgacgtttttccaaagaaataatattatatgcttatattcttttgtatacttttttcacttgattcattatcatgaaaatacagttaagtgttgaaaattcaactataatgcatcattttgattagctgtttagtattcagttatgtggaaaaccataactagttccccatttttggagattacagttgtttcatagaaaattctgttttgaataccttcagggataaaatttctttgcaaagctgtgattattttcttagacaaacttgcagaaatggaattactgaatataaatatgtgagtgtattattactgtttgttgtcttaggttatggagacatcggctcagtcctctggagaccatcaggagcagcatgtttcagtccaggaaatgcaggaactcaaagaaacgctcaaccaagctgaaacaaaatcaaaatcacttgaaagtcaagtagagaatctgcagaaggtatgagtgtgagaacagtctgttcctaattctttcctgttatacacctaaagaaatatgtgttaactactgacactttgtcttaccatgtgggaatggatacattttattctttttactttgaatggctcatgtatgtaagtagtacccaatcatcttcaagtgtgcatttagttggtctgaccaccatttttatacttatacttccatttaatcttttaaaaagcaaattaataagttatactttaagttgctaccacatacagtttatattgaaatgattgaattccatggtgaatactttgttttcctttaaagacattatctgaaaaagagacagaagcaagaaatctccaggaacagactgtgcaacttcagtctgaactttcacgacttcgtcaggatcttcaagatagaaccacacaggaggagcagctccgacaacagataactgaaaaggaagaaaaaaccagaaaggctattgtagcagcaaagtcaaaaattgcacacttagctggtaaatatctgtttaaagtttgaacttggtagtgaaagttgattatgtgttgcaggcctaaaactaaatggaatagaaataaaaggtatctacttatgaagggtgtttgtgtgtgtatgtgtgctttaaatattaggaataattagttggacacaaagagcaatcctaattttcaagtgatgaggatatccttgatatgatgaaatttttctcaattgttggctggcagtagataatggaatactgctatccttctgctttcatggataacaattctatcttgtgacagagatcctttgagcccagaccgtgctgtctagaaaccttatgtagactgcataaagatctttaccagcccagggatttttttgtgcctcgtttggtggaggacccctctagcttttcagggagagtatcatgtcaaatttatgaagaacctagttcttcaaggctcagggctttattcagccttgcctatcagtctgctgagtagttaaataaaatgtcaaatcagttggattttgttacaggcatttttttaaaatgatctctaagacagtgtcctaacaacttacttgattttaaaagttcttgaattatttttaaacagtgctgtagattatatgaaataaaaattttgcaattcatagtaatgaattgcatgatacattgaaatataaacgggcttctgttaactaggatctttagctttttgagattttagttaggaaaaagtaaatttttatgttggagtaagtatattttatattctagtaataagttaaagcatgaatgtacttagaactttgctcattgagatgtatgatgtatcataactaatgtagatgttatagtagtagaatctgatgtgaccatgtgccaattaagtgcataaatgctgttttaaatgtttgattataatattaatataatcgcctggttacttctttaggtgtaaaagatcagctaactaaagaaaatgaggagcttaaacaaaggaatggagccttagatcagcagaaagatgaattggatgttcgcattactgcgctaaagtcccaatatgaaggtcgaattagtcgcttggaaagagaactcagggagcatcaagagagacaccttgagcagagagatgagcctcaagaaccttctaataaggtgattagctaattctgcttaagtaacaaattgtttttctttgtacattttacttgaaagtgcttggtgatataggagcctttgtcagtgaattttggctaaaattcaatatatgcggagagaattaacaataatgacaatttttttgtggcatttttagtggactcttgtgggctaggaacaacaatcaagagctttctctttataggtccctgaacagcagagacagatcacattgaaaacaactccagcttctggtgaaagaggaatgtgagttttagttatttcatagtctgttatttttcttttaaagctcagggaatatctagtgatctttctgtttaggaaaaagaaatctgtgtattctattgtaaaaacatacactaaagagttgttttctctgcagaactgtatcatgtatttgccagcttgttttcaccatactttcagtcctatcagatgaagctttgtgacagagaaaacg

SEQ ID NO: 4744 - DNA, 1034 bp, Homo sapiens
ggaaaagaagttgatggaagtagagaaggaaaaacaagaacttcaggatgataaaagaagagccatagagagcatggaacaacaggtaaataggttaaccgtattaattttttttttaacttgtaaggatttgaattctttcaactaagtcattagttgccatttagttcatctcaacagaaatttattgaacacataggcaaaattttagttttatgttttactcttttctgtacctctatatacatttcccgttgaaatttttagactactttacagaaataggtatcactggttctttttaaaagcccctacctgagacttgacttatgcaaatgttagggaatggatatggagttgcaaaactgattatatcagggtgtaaacattttaaatttagcagcagttttttgggctaattggatcttaaaaaatgagacttcaatttagtaacactacaatacagtattttccaagtaagtttgcaattaattttggttttaatcttgttctttctgcttagttatctgaattgaagaaaacactttctagtgttcagaatgaagtacaagaagctcttcagagagcaagcacagctttaagtaatgagcagcaagccagacgtgactgtcaggaacaagtaagtatagccaattattgagaaatgagcttcgatcctagagaatgattcttgaagtatatttatgcattataagaactggtggaccttacaaaaattcaagataatttccacttttgtggaacttagacaagacaaattgaaaagtatagatggaaggctaaaaataaatacatagggcaatattcattaacaaagcaatcttgacaatgggaaaataaaaacaggactaggagactaaaatttgtacttggctctcatttgcaaaaattattttactattgtccttcactagatctgattataaaattacagatacagttgattagaggcaacctttgctaacaaaacaagaacctcttgataacattgttaatgcattaccaagtttgcg

SEQ ID NO: 4745 - DNA, 1930 bp, Homo sapiens
ttcattcttgctcatctgtaataaaaagcaatataaaaattacattgcattgaatttatatttctgaattttaacttgaatataaatgtccatttgaaattattacttttaactaaatacttagttttgtgatgataaattttttatatagttttctttgttattcagttatctcttctgtctttgatcattacttgtaagctaggtatagttgtcccccattttacctgtgtaaaacagactcaagagctaatgtataatttgcctattttgggacagtcatgagagatgggttggttaggacttgaacccatgtcttataatgctcttataaggctgtattctttatttttatcttgctccaactccattgtgaggagtgggcagcagcactttttcaaactggtagagtgaattttatcattgatcatttatatgaatctgtgtgtaaatatgagtacttgtgtgtaaatatgagtactttgagctttcaaaacactctccctggtccccttgagactcagactcttggggttgaggggagggagaaactttaaatagatcaatcatcacttttaaacaggtactttgaaaccggcttggattctaaaagttacataatttaatagtagtcaggtatgaatgattacagcagtcatgcaattctgctttcttcttctcacatattaaatttttcttgctgttattttttaaactgtggattgttagagcaaggaaccataagtatttgtaattgaaagattttttcattgatgatccccaataatttttgcttcgtattttagcacatgaaactgttttgtatttccttatacaatgaggagatatagtccctaagagcattaaaaaaaagtagtgatgtatgaatcattttaattttataatcttaatacacttgacaccatgtttttcagcattttttatttcatttctacttatgtttaggtaagagcagaaaatttgaagaaggaaaaggaaatgcttaaattgtctgaagttcgtctttctcagcaaagagagtctttgttagctgaacaaagggggcaaaacttactgctaactaatctgcaaacaattcaggtaaccaaataaaaagcctatgtagaaaaaatgtataaaagttaaatttagattttttttatcctctcaatttccttaattagaaaatttatccatcacttttgtcatccattatgatcattgaattttgcagtttattaagacatttaaatattttaaataaaatattgaaagagaattgattgaaaccatacattggtaagtcctcaggtatatttacagtgtcctgtgcagttttactatttataagattaattctttggtttttattttctttaaaactttgggaaatctgaatgacgattataatacattccatctctttcctgtataatagatgttttaatataaaaaataccagaatactttcttgataaatactgtagattttagctgcttcatgtagaaatgggttgtaatattgtaattctttcttgccttcaatttttatttttttgtattgcctttttcttaagcataaccaaaaatcttttctttgctttagggaatactggagcgatctgaaacagaaaccaaacaaaggcttagtagccagatagaaaaactggaacatgagatctctcatctaaagaagaagttggaaaatgaggtggaacaaaggcatacacttactagaaatctagatgtgagtccatcagagttctgaatttctgtagggtgtttatgttcagtaattaatctggtgtgtggacagtctgccatccaagatgaagcatgattttgaaaaactttgttactaagtttttcttgcctcactctatacccagtaatttttttattgggtgccatatattgtgagttttaccat

SEQ ID NO: 4746 - DNA, 1027 bp, Homo sapiens
aacgttttgggaggcctaaatggggtatcatttgagcccaggaggtcgagaccagcctggacgacatagtgagaccatgtctcaaaaaaaagtaaaaaattagctgggtgtggtggcacatgtctatagtcccagctactcaggagacaggctgaggtgggaggatcacttgagtccaggagtttgaggctgcagtgaagcatgatcatgcaccacactctaagtgggacgacagggtaagaccctgttgcccgcaaaaaaaatctatgtgttcctaacagtgctagatacttgggatatagtgatatagggaggaaagaattgagcaacaataccaaacaaaaaatttctactccaagacctcaggttatgggtaagacagatgtaataaatagataataaaataggcaagtagacaatttgcattcactgtgattagtgcctatctgtgggatcatagcggtagaggacttgtcctagatttcagggagcagaccggcttcatggagaacctggagaacctatgtaagaattagtcagaggttttttcaaaatacatgtataatgtcttctagaagaggaagaatggctaagaaagcaagaagactagagtttggagtgagtggaactgatttaatttttacaaacaaatttttcagattgcattggtaagtataagtacctgagtcctgtgtggtggggatttaaaaagtagttcataaaatactcagcatgaaaaaaaataatgagagagacaaaaatggtatgatgaatggtaggcaaagatgcttggttaattacagtagaaattacaatcagttaactctcagttcagtcctgtgaattaggccgactttttctacagaatcactgagcttcagctcaaacttgagagtgcccttactgaactagaacaactccgcaaatcacgacagcatcaaatgcagcttgttgattccatagttcgtcagcgtgatatgtaccgtattttattgtcacaaacaacaggagttgccattccattaca

SEQ ID NO: 4747 - DNA, 1734 bp, Homo sapiens
aatgagattctagagcttaaatgtaatcttgaaaataaaaaagaagaggtaagttagtaaaattgtgtttttcttcatgttgagtataacttacatttgtatgtcagtttattaaatatgtattcagtagtgtgtacctgattagttgtaagatgagtggttaaatgtgaataatgcattacatttggcgtaaaaaatcaaccaattgcgtttacataaagaatttaagattctttgtcaaatctggttagtatctactgtcttacgatatatctttcctaaaatatgtgtttgtttaagaagtggtggtaagtttttgtgagctaaatctaaacattgttctgtgagcagttactcttagttttcttaaatatgcatattttaattgctttttcaggtggggagggggagttacttagcttttccttagcagcataaacctcatgtcagagtaatttcagttaatatgacatcctttccccctgctctattttttgtttttaggtttctagactggaagaacaaatgaatggcttaaaaacatcaaatgaacatcttcaaaagcatgtggaggatctgttgaccaaattaaaagaggtatatatgaccattaaaatgtcttttttacaaaatactaaagcacttacgaagctgttatttcacaaaatgatgtcattttttaatctgtccttggccccataaaacagtgagagtcctccttccatatgctgtagctaggctaaaatagaatcagaaatagcaattatatgttatattgaaaatactatctaaaaaatgagtatgggttaattttattgtttaattattttactttgaatttaaaatattagtaatattttatccttaatttatctttgtcatgaagactgatttgaatttgagtgttttagatttagctcttactttacaaaaatggaatttttcatcttgtcatttgataagcattctaaatttagttcaaagtagactgctataattgggctatttttttcaggccaaggaacaacaggccagtatggaagagaaattccacaatgaattaaatgcccacataaaactttctaatttgtacaaggtaaatatcccaccacacatgttagtatctaaatgttgcattgttgactgttaggtaactttttaagattaacttttagagtgccgctgatgactcagaagcaaagagcaatgaactaacccgggcagtagaggaactacacaaacttttgaaagaagctggtgaaggtaagtgttttcagttatgggaacattatttttgttattgtactctttttttttttttacccttgttttgtatagatgattggatttaggtgttagactttatttgggacagaattaggtacagaagaaagaactttggattaggaaattcagaattatatcttaagcaaatgtaagtttatatatttttgaaaatacagacagcagggggttttgtttgttttttatctaataatcttgtataatttgctgatttctaatgagaaagttttcttttttgaaacatttactctgataatgtttgaatactcttactttataaataagacatcctctttatttgcattttgtaaagtcttttatttcctcaaatttttgcttttttcaatgtattatatttatggtcttttccaataatttcctttacttaggattaaagatcaaaatcgaaatcaaagatatacctagaac

SEQ ID NO: 4748 - DNA, 1084 bp, Homo sapiens
aacctttgtaggcacaaacatcagtcaaattaaaatctaggtttggcagttcactcaaggcggtcaatttcaaaatgtctttttaaaaaagatgcataggcctgttttccttttattattgcaactaactgatctgaaaaaacttatagttacattatcacttctaacctgactgatataaaatagaagtttggtcatgaaagtaaattataatccttggggtttaaaaaggaggaagaaaaagaaatgggggaacatcagtatgccaagtggtaatcatcatcccccaaatcatttccatgtgtctgtgaaagcatttgtcactctgtccctctgtagagtacctgttaacctagttgtctcctcagtcgcccttctccttccaacttcttgagtgaatcttgcctaatgaaattactgaagtcaaccacatatttattaaatgaacagttaaatgaatgagagattacttttcattcaaatgggagacctggattacttggtgtggtagacagggtaattgttccccacagatgtctatgtcttaatcttctaaatttgggaatatgttaccttacatggcaagagggactttgaagatgtaattagattaagaaccttatgattgggagatttttttctggattatttggttaggctcattctcatcaaaatatgaaaaagagaggcaggaggtctgaaccagagaacaagatgtgaccatagaaacagagataagagagggaaagttagtgcagttgatgatgctatcctcctgacattggagaaatgtcttattttaagccacaagtttctagtaatttgttatagcttcaataggaaattaatacgtttgggatgtactgctgttcatctacctttctaataccttctcacagagcctgaatggaaaaactgttgtttacagtcatttctgttaaacactgatcttcttatcgggtcataggaaaaaaatgacactattcaattttctattatttaattatagccagactacaaaagaggatagttatttaccatccattcatttaaataatagctatacacttcatctcaagttcca

SEQ ID NO: 4749 - DNA, 1034 bp, Homo sapiens
tagtttgaagccattgtaatttgatgaaagggcacaaaggatcacaaattagctcccctgggtagattttctatttttagtcagctactttagtaactaaggaaacctattagaagtttttgaaaacgttttatttcttttcaaagtatactactgttgttttgtttattatttgtttgggggaggtggatatttgtttttcatttgagggtgtgtttttaattaaaaacattaagtgacatttctattcacctatacctagcatgtattaagagtgttatagaatttagtttatattgttttatgttcatttatgaagtgttctgtctgttaagcacaaaaatacatcaatgaggtaaattaatagtaatttctgcgcacaaagtaatcataatctctggagcaaacacataaaaatagatattagccatgaaacctgaccaatgatggacatatgaccactctttaataaagtcataatggaagacgggtatctcaggggaggtactgggaagagatggatcaaaaaagcttcttaaaattgttttaaaggtgaagaaaatttttaactaagtaaaaagggtggaagatttggcagcagaggcacatcaaggaagagggaacaacattccatttatttgattatcccaatttcctcacttgctattacaatattaataatacctacctcttaggaattacaaaattaaaataaaatgtaaacataaaacactatgcttagcatatcatagatgcccagtaaatttgagctatgttatagttttatactatgtttcaggagatttttagagaaaattttctttaaaataaaactattttgcttatttagcctatttgctagcaatcataaggataatatgatagaaattatactatctagattcacttgatacagacctatagaatgcgtatactcatttgttcagcgttatacttagtacatgagacacaaattcatctgtaagaagtaaatcccctataaaattaggttaccttttttgttattcagaatt

SEQ ID NO: 4750 - DNA, 1062 bp, Homo sapiens
tcttctaaaacgatttagtcttcttttcttattctatgtgttgttcctgatctttaagcctttagatgttctatttttttacattcctatattctctataggtttaaatactacctttctgtttctataattttaatattacctcgttgtgtctatacactgatgacatccaaatttataacctgacctcagactgtcttctaatatccaaatattttttatctctttctttacatttgtaatgaaacctttattttatatatttacagtataacacttaatttcctctaccaaagaaaaaataaaaaacaaaaacacctttccccccagtctccatatcttaatgacaggcaataatattcatctagttgatcaggccaaaaatatcagaggcataccctcccataactctcacatctaattgactagcaaaggagtatgggcttaatatttgtactacacgcatggtttaacttctttttccctccatttcccccactagtaacctagtcctggtcaatatcatttcttacatctttaatctgttctctctgaacagctacagaaatctgaaggaaactattaaagagcaaaggataaataaagaaagaagtaaaataggaaagaaggaagggaaataaaagaagagggaaggagaaagaggaaaaagaaataaaaaaagagagagaaaccaattcttgccattttcttgcttaaaacagtctaatggtttcccttaccttgctcatcatgccttaggtgattttgtcctctctctgcctcctttgtcttatttttctctgcctctctcattcattactctttacccataaagagtcaaatatttttatcaggatatggcccaattattcttccttatgctttatagaagcatttccctctttatttcttcagttcttcttatggtctgctccttcccatcattctggaaagcaacaggtgcccaataaatatgtattgcacaaatgacattctttgtaatcctcagtttctattctcccaaagtgagatattcacatcattttttaaaaagaaaatgct

SEQ ID NO: 4751 - DNA, 1093 bp, Homo sapiens
atgatacctggataagtgacagaatttgtgatgcttcaattttcaagtataagattttgctgaggatgatagtttgaagactacatgatagtttgaagactacaattttctacaattggagcatgaaagttgccatttctccaaacggaaagttttcaaaacttaacactttactaaagttatatggacaattcagacattaattagaaatgatgtagtcctgaaatagtggacattttttgtgaaatgtgaaatcttcttttagagggtaatgaatggatcactttggttaacttagggttacaaagtgattgtttgacatttgattttggcctactctgatgatggtggaaagtctatcaaactgcatttacttcctgaaccaaatcttttcttctcccctgtgaataatcagttattgcattcttccaagctctgacaatctacaactttttgcacacatgctatatattcttgttaaaggtgtacattcagggatggtaacacagactgtttagtgagtgtgatatattgggacaattgaaaacttaattgtggccaaagattgacagaatatatcaactcagtggaatagaaaattcttagagcagctgtttgtgtccatccttgcttcaagacactaatacacgctccttcttgaatagctttagtttttaagacatgaccacctgcaaaaccatctgtttgcttatttaatcttatttaagtttcatatatagatttgttataaatatgaatctactttggtccccaaatttggcttgcttgcaaacatattataccaacacagctgatatttgtataacctctcaagaaaaacaaatgccaaccccatttgaaaccagtctttggtttcattgtcatattgacctgggagtattttttttttctaatcagggattctttttttcttctagttaacatggtttgatacaccagtattttgctttaacattctgtgtatttgtgactattgtttcattactagtttcttagaaagttaatgtgtgttgtgtgtttcttagaaagctaacgtgtgtgtgtgtgtgtgtgtgtgtgtgtataaatgtat

SEQ ID NO: 4752 - DNA, 1027 bp, Homo sapiens
taacttttaaagcctataaaaatacaatctaggaccctccttttcttttttgtatattagaattgtattctaaaagatttcagttttttattagaattgttttctcatcagtactttgcaaatgtttacttaggttgtgactttgttgtcctcatacttcattgataagtttttcaatcttttattttccaattgacttttaagttaaatcatttatttttgtattatgtcagtttaatccagctcatttggactggagaggcgaagacaacacatagttggatagagtgataagttgacgttatagaactgaggtttcatgcttttatcgaccatttactctttgtacaaatgtataaaattttatcagccttctgtctttgagtcctcatctagtaaatgaagatgacagggaattctctaagtttatttctcactatgacattccattataattaagttttactggtcacctttctgacataatctatttgataatgttgatatgtaggataacatcactgtatatagaaattaaaagtttctaaatatgccgtagaacggactgcaggttttatttctttaaggtcaatacttaaattgttttgagtatagtttggtgatttacataattatattgaatgaacactgtggcttaacataaagatatcaaatttttctaatttctaaaattcgtgtgtaatttttttcaagataagtcctatttgcttgtaaaaagagaaacgatttaaataatgcaagagacatgaataaaacatatcagatggtaaagaaatttccattgttggatttccttagattatatttttagcaaatcatatgaatggattttcttttattttacaaaaattacaaatagctgtttcctataatcgaactttatacaatcaatgaatacattttatactacattgtacctttctaaaaatctgatttttgataactactggaagaaatacagtctgttatgttagcatatcttatattaaagtggttattcaaagta

SEQ ID NO: 4753 - DNA, 1023 bp, Homo sapiens
ttgcctggctgactgttcatgttttatagcaaagttcctgtccacgttcccaatcaggtctgtttatagaaagaatgaagcttgcttaattcagattagtcattgcagctgagttctgattgtttgatacaagttgggccttgattggccagggtaggtaagttctgattggttggtttccaagccccaaactagaagtcgctgtcagatgtttccaactgctggtggtgggggataaacctctcagtttatcttggcaaggataacagacattggtttggcaagccaaatgcggaaagggaggtcctgtgatacttttacaacatctttctgggaatgcagagtctgtgacccactgctccctcatgcaggtatggctgcctggttctgtttcaactttgaataccccagtttgccagagtgtccattttgtttgccagtagcagagatactttaaactagggaaagagaatgttttatactcttcagttccttttaaagattctcagagttctttgaatattttcttttcttttcttttcttttttttttttttgagacggagtcttgctctgtcgcccaggctagagtgcccaggcacgatctcggctcactgcaagctccgcctccctggttcacgccattctcctgcctcagcctcccgagtaactgggattacaggcgcccgccacaatgcccggctaattttttatatttttagtagagactgaatattttcttttagtcaagatacagaaggctggacaggcgcagtggctcacgcccataatcccagcactttgggaggccgagtgaggtcaggagtttgatatcattctggcctatatagtgaaaccccatctctactaaaaatacaaaatgtagacgggtgcagtggcgcacgcccatagtcccagctacttgggaggccgaggcaggagaatcacttgaacccgggaggcagagtttgcagcgagccgagattgtgccattgcactccagccttgggcaacaaaagcgaaa

SEQ ID NO: 4754 - DNA, 1021 bp, Homo sapiens
taccgtatcagtctttcagttttccatgggttctacattattcaaaatgaaagtaaatatgtttgatacaatggttttctgaaatgactttgcatattcaagttcttcagcaggttttagttcctgagagaatattttggatatgtaagcagcaaaaatcagtccaaatgcaaatacaaaaaaagaaatgatacagtttgcaatgttaattgtttaacaaatagtaataattatcactggacatctaattcagttgtggataataagatactgaggtttaaaagatgcaccactatgacatgacccaccactttaaaggatattaagtttaattcagtgattccgaatattttgtttatatctttgtagtttcagttctactggaaattcacttttactgttatagtaaatatttctttcataaatttcaatatttatgaatttcaaatatatatgatatatcagtattttagataaaagtaaggtaccaccaccttggaataagactactgacagctagtaagaaagaataatcatatttagactatatattatacacatattatttatgcatttattatgtattatatgcattagtatacattagtatatatgtaacatatttttgatgtattttatttctgcacagattgtcaaggccattgaggatttgcaaataaacttgtatcatgatgtggtcttcacagttatttttttttttttttgtgagaaagaatttaagagtaggacctatactaaatatctgcttttcaaatagatatttcaatatttatgacttattttttatgaaaaaaaccataaatacttaattaaacaccatgttttaaacataaagtcatgtttttaattttgtattgtttttaatgttttgtttttttgtgttcttcattctcttttatttctctcttttatataaaatcactctcccatggtccagaaaatatggtgcattgatgttctcatctctttagttggccagttagcctcttggttatgaata

SEQ ID NO: 4755 - DNA, 1052 bp, Homo sapiens
catggcagccactctgtctgtgcatataccaacacaaaacgcccaattcagttttcctgatatgtaatcatataaagacttgaatagttctgcagctgtggtgttggttggcaacaaaagtaaacacaacatatctgtcaggcctctgagcccaagcctgcatgtatacatacagatggcctgaagcaactgaagaatcacaaaagaagtgaaaatggcaggttcctgccttagcagatgacattaccttgtgaaattccttctcctggctcagaagctcccgcactgagcaccttgtgacccccgcccctgcctgccagagaacaatcccctttgactgtaattttccactacctacccaaatcctataaaacggccccacccctatctccctttgctgagtcttttcggactcagcctgcctgcacccaggtgattaaaaagctttattgctcacacaaagcctgtttggtggtctcttcacatggacgtgcctgacatttggtgctgtgactcggatcgggggacctcccttgggagatcaatcccttgtccttctgccctttactccgtgagaaagatccacctatgatctctggtcctcagaccaaccagcccaaggaacatctcaccaattttaaattgggtaagcggcctcttttcactctcttctccagcctctctcgctatccttgaatctccctctctcactacccttcaatctccctgtccttccaatttcagttctttttcctctctaatagagataaggagacacattttatccatggacccaaaactccgcgccggtcacggactcaggaagacagtcttcccttggtgtttaatcatgcggggacgcccgcctgattattcacccacactccattggtgtctgatcactgcagggatgcctgccttagtcattcacccacattcccttggtggcaaatcaattgccgggacgcttactttggcagctcacccacattgcagcccagggctgctcaccacccgcttctccgtgtcgctgccctctcttttctctgggc

SEQ ID NO: 4756 - DNA, 1031 bp, Homo sapiens
gatttggccaggcgtggtcattcacgtctgtaatcccagcactttgggaggccgaggcgggtggatcactaggtcaggagttcaagaccagcctggccaagatggtgaaaccccgcctctactaaaaatacaaaaattagccaggtgtggtggcatgtgcctgtagtccagctactcgggaggctgaggcagagaactgcttgaacccaggaggcagaggttgcagtgacccgagattgcaccactgcactccagcctgtgcaacagagtgagactctgtctcaaaaaaaaaaaaaaattatttgattttaatttttttctaatctggccttttagtgacatctggagagactgcttaatctaatttttcagactgtctctagatgaggggactatttcctataatctatgtaatatcagtgtatgaggaatcagtatttctattctaataatgccaatatgacctttcctaatatcttatgcctgaaatagcctatatctaacttacttgtttagaatgctctgcacacttggtacaacgtgaaaagtttttctcttagggcatacaggatagttattggagtggctgcattgcttatacagtgaacaccttgggtgatgcagttactcttcagatttcaggcagaaatttacttgaattaatgtttgtaataaaaaacaatggtgtgccaacttaagtagcctcattacatcttccatgagtaacttgctcactctagcctctatggccattctaagaactgtactttcttgccaattttattgaggttggtaaacacaacttcacagataagacagtggactttgtgcatattcttttattctaaaattgtaaccctatgttgtagtaagttggagaacagactactggatttggacttaggggacctgggattctagtcctgctagtctattaactattgtgtgatctttgcttatatcctgttatctgctgaaatgcactttgtcctttcctttgttgtaattttcaaatagcacttatagagcaa

SEQ ID NO: 4757 - DNA, 1098 bp, Homo sapiens
ttaactggcctaaatccaatgactgacatggtaaagattcaccacttctagcatactgggcactttttatttttgacttgattacattaactttttgaaaactattcagtgatttattcagccaatcttatgaggtacatctgagttgttctagatgctagaggatagtataacaggaaaaagcccctgctctcatggtgagacagataataagtatgtaatacaacttttcaaatagtagtatgaatggtaaaaaaaatagggaaaaggggtgggaggagctgaggtttgatagaatggtcatggaagatcccattaatgagatgtactttaagtagagacctaaatgaagataattttttctctagtactgaactagcactgtacaagtggattgcatataggcatataggcagaacttctctagtactgaactaacactgtacaagtggattgcatataggcatataggcagaaccaatgtgcaataattaagaatattaatttgcaatcatgtttgatggttaaatggtttattaatgttggagtgtcaatatgaaaatgggttgaataaaagatatatggaaatgcctaggactactgctctatttactttttagcttatccatatattttatgtaatatgcttctttgattctttcttgtagcaatgataatataatattgaataaaccataaaaccagtggggaaagtctcatgtaggtgtatttttaaaaaacattttgaactgtcccccgccctcccattataaccattaagactaaaacaggctgggtctggtggcttatacctgtactcctagcactttgggaggctgaggcagaagctcagaagttcaagcctagtgtgggcaagatggcaagaccctgtctcttaaaaaaaaaaaaatagctgggtatggaggtgatatgtgcgtatagtcccagttacccaaaagactgaggctggaaggtcccttgagccaggagttcgagaatgcagtgagttgtgatcagccactgtactccatcctggataagagagtgagaccctatctcagaacaaaacaaatgaaaacaatgaaattacttgaaaaa

SEQ ID NO: 4758 - DNA, 2275 bp, Homo sapiens
aattgtttcaggaaggtctgagtattatgcttcaaagcaaaatttcaggttaagaagaaattgtaaatcttaaagaatgttggtgttactctcaatggaatattgtttcaagcttgtaagctgtgtataaaaaaactggaggtctgacagttcatgttatctgcttttttaaaaagatggtagtggtgatgggggtctttctatgccaatttgaataaatttcgtacagcctgcagttttcaagagccatatgtaatttgctcacaattgatttttaaaaattgatttgggagttgctttgtaataatcttctgcttctaatcttcctttgcaagtcagactttaaagaagactttataaagctttcttttttaaaggaagtaacctacttttttctttatcaagaatatttctgaggttgatacatgactttaacattttattatttattgtaaaatcaatttagcataatttattttattagggagaatgtgtacccatcttccagcttcagcacatttttaaggattgtttttaagcttagtaattgtggtattaaatgacttagaactaatggagaaaaacctgataggaaattgatagaaaaacgaatgaaatatttttcatacataatttcagttggaggtaatggaaaatatgtagtctctcagttatttgtgggtaaatatgttttgctgttgatacagtaataattatggagtgttttcaaagccatgatataatttttaaaaatagatttttaaggaaggctcatcttgatctcattcgtttatttcagcttaatttatatattctttcctattgaggcttaaattttgttaagcaatgtgaggattattgtggtaagttgtatttagtaatcaatacagtgtgatactggcactaggattgacaaataaagcaatggaacagaagagagagcctgaaaacagatcaacgtttatatgatcacttgatttcgacaaaggtggcaaaacaattcaacagagaaggaaagtcttttcaacaaatggagccagaatagaatagctgaatatccatatagaaaaaagtgaacaatgaccccctacctcacaaaaatgactttgagatgaatcatagacctaaatgtaatattttaaaagtatgaagctttttaactgaaaacagatgatatttttgtgacttggggggttagccaaaggtttcttaggtcacagaaagcagtaaccataaaagatccaaaattagagctcatcagaattgtcattgaaagtgttaacaaaagtaatatcaaatgacatttgaaaaatatccttgtaaaatgactatattaataggtataaggatttttcttattaatctaataaaattccttaataggaatttccatagcttaagagtggtttattttatctgcatcttctttggtgattgcaaatcccttgtgatacttcatgattacttctgtctgtgaataaagaagtgtgacttgtctgggtgctatatgttgctggtttgaaattaagtcatgaagctagagggtagagaaaatggaagaataaagagcaacccataaatagataaatgctatttggaaagttttttttaaatgatattttatagaaaatcttgctcatttcatatttagtcttttctaaaattttatttaattattgggtaggtgaagtcgcttccattctattttaagccttcaaaatagccaattctaagggatgtacttctgttattatcaacaaaaaccttgccaacagctgcggcactggctactctcaccttatatgtttagttcccaagatagcttgcccttttccgaacagcagtcagctcgactgtgccactaaaacagacaaatatttgctcgggaatcacaaccacggggacttgctcccccagttaggaccatggtacatatttgtgtgtatattatggtgttacatgcagattaatactttcaattaatcctcctagttgcctgtaacgttaacatttcaagatgcatttagatatttttatcctgtaggaggattttgtttatttgagggaaaaaaagggcttttaatgtattctcctcaaaaaccatttagagaaaacagataagtaaaaataaaatttaaattaccatatttctatttacagggatgagcacattaacattttatgtatttagtgatcctttttcctcatgtgtacacatatgtttttgtgtgttagtcttgcttgccctccccatagtctgaaatagttctatgaa

SEQ ID NO: 4759 - DNA, 1033 bp, Homo sapiens
catttaattatgttgtaaagtttatatcagaaaccagtaaatttatttcttgttaatccttctcaatattctattaagtatactcagatcaataaggaaagaagcacatacttttattttaaattatgcctaaaaccaaattatatttattatttgaggacagaaaactttgtatgagatgcgatacacatatcaaattacaaattatgcttgttaactaaaaacgttgatgttggcaattaactttattatttttaatatgacacacagactatttgctcttattcattctaaggcacagcactgttttatcatactgttaaataataattatactacctaatacattacaaaaagagattgtaattgttttaattgctgtattttttatttaaggacgttttaaaaaaagttgtataatgtagaagtctaattcattgactcttctgaagtggcacagtggaaaaatattgcattgtagtactctaaaatcttgcttttagaaatgtcttctgaacaccagcagaactggcatcatctgagagtttgttagaaatacagaacctcaggcattttactaaatcagtctgcattttaacagggtctctaagtcattggtatatacattgagaagcaatgctataaagcatatgtctttgatctgtattgaggacttactgtatactagctgtgggactttggtcaagcttgataacatctataagctctggctttttcatttgctaaagaataaaacaagtactgtgttcaagctatataattgtaatgaagatctattgaactagtatgtaaaaacatttttttttaggtcatataaataaagtttgttgacaccaaggatacataatcctttagtgacattatgttaaagtcacttaaactgttatgttaaactcatttattcacatttgcagaaactaatgtaagatttttcttatgctcatgtgaataggaaatgggcaaatatgtgtatatatattgttttggaatactcatgaatgagtttgacttt

SEQ ID NO: 4760 - DNA, 1033 bp, Homo sapiens
tagcagaaatgtagttagtgtggattgatgttttattttcagattgagaatatcagaaggaagcataattatctgcctttcattatggaattgttaaagactttagcagaacaccagcagttaataccactagtagaaaaggtaagtattttattggtagatacttaaattaagtttagagtctccaaaaacataaaatgtattttttattttttgcttgaatagaggtaaaatttttggaagcttgtacgtttttattcttttgcttttgcctcttgttttctactctgtaagaattagttcaattgagactgtaaaacaaaaataaagaattaccccactgctttaggcttccagattcttagtgtcaagacctcaggttatgctgtattaaaataaaatttaaaacacttcctttaagcaaaagtagatttttaatgctgataattgaaataatattttcctatttagcaaaaatttgagttgatataacagaatttaaaagtagaatggacattgttgggtttaaaaaaaaaatagcctgtactacgaaataggttttcttatttctaatttagtatccattccactgagggaaaactagcataagttagtgaagaattctgatttctatgatttttttcataagtaacaataaaatatttgttgaataagtaaaatgcagttaaattgtttttaagttcatactgtaaatcagtgtttctgaaagtgaacatcagtggatactctttaaaatacatgttacctggcccctccccagatattctgatataggggaaggattctttaataagttccccaagtgattctaatgcaactggtctgtgtaccacagtttgagaaacactttgagaagacactactaggcaaataaaattttggaccattaacttaaagacgagaatacatggtaggtatattttccttattaattttaaagtttacaaagcaaagattgatttcaaccaagctgtttcatgttatacattctaaataatatgagatgtgagct

SEQ ID NO: 4761 - DNA, 1074 bp, Homo sapiens
ctatagttatgttggggccatttgttttcagtgaatagaactgtgtatgagaaactcttagagataaactaatgcaaaatgggctcatattttctatatattttcatcttaatgccatttacatagtgttatgaataatgcttttaatgtcagttgctaccatgaaccagcttgttatgagatgcttcattgatatcagagtagtgaaaatcaaacattcagaaattttactatacgatataattatatattatattaataaaatatgttatatttatttacatataagataaaatttaaaatatataaattaaaaatagaaagttcatcatgacttggaaaaaattatataatacggagcatagttaatacccatcaagatgccagtctaaataatttaagaaatatggagtctccatttgtttttttctgagctcttaagttaatgtgttgccatatttcttataaaggtagggaaattgatgaaaatgttttttatttcaaatgttttatgacattattttagaatatttaaaaaacatttgtgattgatggaatttagccaattttgtttttctacagttgtctttcctatatgaaagcttttttttgtttttttttttaagagacagggtcttgttctgttgcccagactggagtatagtgcactatcatagctcactgcagcctccagcttctaaactcaaaggatcctctccgctcctgagcctcccaagtagctgggaggcacctatgtgcctgacctgaaagctttttaaaagtgtccatttttattgctagccaattgatagacttttgtttatactagaaaatcaagaggggaatcacgatggattatcttaacggtaatagttgtacaattctttattacattataaacttaaataattttcttctaggtacagtgaaggtgaaattcgatttaatttaatggccattgtgtctgacagaaaaatgatatatgagcagaagatagcagagttacaaagacaacttgcagaggttcgtggccatgtttctaagtacaaagttctagcttggttattctctcag

SEQ ID NO: 4762 - DNA, 1417 bp, Homo sapiens
gtgaaaaaaaatatgtggacattgtataccctgtttgggaatttaaatgagggtggaaactaatgtgagttgggttcagaatttctctacaatcacacaggtgaattgaagcttatgctcggttataaaatactaattgaatttgaataggtagaaatgagtctaggaggaaatgaataggagagggggacaagctctgttggcttaatcagctatgttttccatcaggatgattgatcttgttaccctaactggattggtttttggtaatattatgagttcattgagttcatttggtttcctagaattttcaactccagaagtgcagcaaatttctgaaaatagattaggatagaaattaaacatatttattctgtttatgctgagacttcataaaatataatttgaaaactgttcatgttttggggccattgtcaccagttaaaaaccattttttatttttttaaacacattgatatcttcacttttatattttataggtaattaataatgcttgtgctactcaagccatagtgagtgtgttactgaactgtacccaccaggatgtccatttaggcgagacattatcagagtttaaagaattttcacaaagttttgatgcagctgtgagtacaatcttcttattcctaaaatgtcatatttgtgaaagtttgtatattaataggctactttaaaaaattattttagatgaaaggcttggcactgagcaattcagatgtgattcgacaagtacacaacagtttcgccaggtaaagagactttatgttaaataaatactgtttctttctttgcttctttgagtttcactatttttttatttactgtagacagcaaatgtttgaatttgatacgaagacatcagcaaaagaagaagatgcttttcactttgtcagttatgttcctgttaatgggagactgtatgaattagatggattaagagaaggaccgattgatttaggtaatgcagttcctgttcctgatatttcacttttgacaggggaaaatctgttgggtatttaccctcattcagtgctgcttaaattttcaaggtaaaagtgactatgaggtaacataatataatgaaggccttaagctcttcagtgtgttatattaatatataggaaggacatcttgactaccatagttcagttgatgcctttgagtttttcccaagtaaaattattttttaacctataggttacataatttatattttattttccatttaacatttaaaaactacccttagtgaacgtaaatagttactcttgtcatttttaacccattcgtaagggatagcaagcatttcttaacatccgtattaaagtattttcatttggaattggataatttattgttttgcaatcaagaaaatatttttcttaaaatttctcta

SEQ ID NO: 4763 - DNA, 1031 bp, Homo sapiens
ggttgctattggtattgctgtttggggtagatttgtcttttgggctttatatcagagttatgagcagactgcataccatagtgacaatattattctgggtttctttgtgtatttacttttaccagtggattttagaccttaaaatgttttggttttgcgcattagtgtttttttctgttcagattgaagaagtgcccttagcatttctcataaaacaagtctcgttgtggccacttctctcagcttttgtatgggaaagactttacttctcattcatatttgacggatagctttgctggagagagtattcttggatggtgttttttttttcttcttttagaatttgaaaatttcatcccactccctcctggcctgtatggtttctgttgagaaccccgttgctagatgaattgaagcacctttagatattgtttgcttgttttcccttactgcctttaggatcctctctttgtctttaacctttgagagtttgattattatatgacttggagtagttttctttgggtagttttattttttaggttgttgcctttggcataaagacaggcagttcactttcatctattaatattatatttagccatcctgctaaacttttctattatcactaataatttgtttttttttcttgagtgggtgtgtttttatcaaaatgaccatatcaggtataaataatgatagttttatttcctcctttataatccttttgactctaatttatttttcttgtcttagttcctagctaagaccctccaataaaaccacttgcaacttaaaagagaatgcctcttaccatttctccatttaggatgatgtttactccagcttttttatttttaatgttctgttattaattagtgtgtttattatgaaagtatattaaattttttcaaatcctttttctgcctctattgagatgatcttctgtattttcttccttttgctaggttaatgcagttaattatgttcggatttttctaatattaaatcattcttccaaacctgggata

SEQ ID NO: 4764 - DNA, 1029 bp, Homo sapiens
ccctttctctattgtatattcttggcacctttgttgaaaatgatttatctgtaaatgcatggagttatatctggattctctattctgttccattggtctatgtgtctgtatttatgctagaatcctgttgatttggttattatagctttgtagtctattttgaagtcagataatgtgattcttccagtttagttctttttgctcaggattgctttggccatctcgggtcttttgtgttccgtataaattttgggattgctttttctgtttctatgaagaatgccgttggtattttgatagggagtgcattgaatctgtccattgctttcagtagaattgtcattttaacaatattaattcttccagttcatgaggatggaatatccagtttttggtgaactcttcatcagtgctttatacttgtccttgtatagatcttgcacttctttggtaaaattgattcttaggtattttagattattattttttttttgagacatagtctcactaggtcacccaggctggaatgtagtggcacgatcttggctcatctccaccttgcctcccaggttcaagctattcttgtgcctcagcctcctgagtagctgggattacaggcatgtgccaccatgccaggctaatttttgtatttttagtagagataggattttgccatgttggccaggttggtctcaaacttgaggccaggttggcctcaagtgatctgcccgccttgggctcccaaagtactgggattacaggcttgagccactgcacctggcctactttatattctttgtagctcttttaaataggatttttttcttaatttctttttcagattcactgttggcatatataatagcagctgatttttgtatgctgattttatattcttcaacttttttgtttttgagacagggtcttgctctgtctggagtgaagtagcacaatcatagctcactataaccttgtgctcctgggctcaagcaatcctcctgcctcagcctcccgagtagctaagactac

SEQ ID NO: 4765 - DNA, 1073 bp, Homo sapiens
aaatggcatttataatgggattacctcaatatagagaggtaacactggctattttgtgctgatcatatactctaattcaagggggttgcgtgtgtgtgtgtgtctgtgtatcattggttaataaaatattgaggaaagaaatatatcctagtaattgcaatttgtatataaggatccagaaatgaaattttgataactgttctccctctgcaaaatattgtagtcttgttatttcactgatgagagagctgaggtgtgatttacttgcttaaaatcatgctgcagtggtactggatttgtgtgactccatgtgttcagtctttcaggaaagaatgactgaatacctacaatgtgccagatactgtggtgcttggagaatgaaaaagtgccatgattcctgccctcaaatatgcttagagtttcgtggaagcaattgatattaatcaattaaatgttaaattacaatgatgataagtgctgaatggagtgaaatgaggactatattacgaagtttaggaactgtccacaaaactaccctcactttgaacaccaactgtagagttcgaccaagaccaccttcacctctgacagcattgcaggtttgtggtggggggatccccagatcatcctcaggttctataattggttagaagactcatagacgttactgaaagctgctatactcatgattatggcttattacaacagaggaatatagattaaaattagccaagggaagagccacatggggtagagttcaggaaagttccatgtgcagagcttccagttgtcttctcccagtagtgtcacagacagtgctcactattctggcaatgctatgtgacaatatgcagagtattgccatccaaggaaccccctccgattcttggtgtccaaagtttttagtgggccttggtcacatagacctggttggccacccatgtggctggaccttagtctccagccccacaggaggttgagctgataatcttgacccaatacccccaccctaagtcacattattagactatcagtgtggcccaaagctctcaggtaaacaaagactcttaggc

SEQ ID NO: 4766 - DNA, 1114 bp, Homo sapiens
atccaataatatatgaaggttacttcctatatttaatatagataatatatgctatcaaccgtttatctataaacatgttacatgaactttatatattttggagttcagccagcttctggttttactatattcttattttttaagtgaggtaatatcaggtagaaatgaatagtctacagatttgagaataaacctttcactacaattttattttaactgatataattttaagttgtattagcatcttctaaggcaacagtctagtaactatgaatggcaatagtgatcttttaaaaatttcccatatttacttcatttgtattatatttgttagataactgactaaaattttatagattaacaatgtattatgaaagaagcagggtttgatgtcattaatttgtattttattttgtaggccagttcatgggttaatttttcttttcaagtggcagccaggagaagaaccagcaggctctgtggttcaggactcccgacttgacacgatattttttgctaagcaggtatggtccttggatactctgaaaagtctcaagagcaaccctttttataaacaagactctagtttactactgtttgctactagtgtagtagtcctcaaactcttacactcttaaaaattattgacatctccaattacagtcttaaaaattattgacatctcaaaagagcttttgtttctgggattatctatcaatgtttgccatattagacattaaaactgaaacattttaataatatttacgccaggcatggtggcttataactgtaatcccagcactttgggaggccgaggcaggaggatcccttgagcccaggaatttgttttttctttttctgagatagagtcttgctctgtcgcccaggccagagtgcaatggtgcgaggctcattgcaacctccacctcccaggttcaagccgttctcctgcctcagcctcccaagaagctaggattacaggcacataccaccacaccaggctatttttgtatttttagtagagatggggtttcaccatgttggccaggctggtctcaaactcctgacctctcaggtgatacacccgccttggcctcccaaagtgctgggatta

SEQ ID NO: 4767 - DNA, 1058 bp, Homo sapiens
ttgcctgggtctaatcccagctcttccacctattagctgagaaccatgaacaaattgttgatcttcctctgcacctcactttcctcaactgtgaagtggggacaataataggacctacctcaggattgtagtgaggtttaaataacacagtgaagataaattgttgagaatagtacctggcacacagaaatggttgctgtatatgaattggctacaattattatttattgttattgctctatgccaggcactttttgttatatcttttttctaataacattgctttgaaatgaaaaatatcctcaatctgcagatgagaaaaaatagatgatgcttagtttgagcccagaatcatgagagaccaaaatccataccctttccattatatcttaatttatttccaaatggtaatgtctagaattaaaatgattttttgtggttttatttcaggaaacaatttctgataattgtgtggtgattttctcaaaaacatcctgttcttactgtacaatggcaaaaaagcttttccatgacatgaatgttaactataaagtggtggaactggacctgcttgaatatggaaaccagttccaagatgctctttacaaaatgactggtgaaagaactgtgagtatatcctctgtggtgctgttcctctttaataggttgtaaactagatcacccagagcctagaaccttgtgttaggaaaatgagccagacattctctgaggatagataaagcagctgcagatctaggaaccagattcttagaataggaaacagcagagttgatttattttatttttattctgtgtgtgtgttttgactggggttgatgagtagtgttattatgagtgcttgtctatggatctttgagttcctcttggagctcttggcaagatgaaagtattcttcctccctttacctgggcaatacaggggttggtcttcaattacttttctaataggagtgctttagtgctccatgtttttagattcttgaaatttggatttttccataatatgcataatcagaaaaatgtacagtgttgccactt

SEQ ID NO: 4768 - DNA, 1042 bp, Homo sapiens
cctactataaaggcactgttgtgtatccagcactatactatttccactagattatgatggcatgtttaaaacacaggagagttacaactagaagaagaaatgacatcaggaaagtatatttataaatggacctcctattaaaacacacaaacacacacacacaaacacacacacacattcaatatccaacaaatagagtaataaacgtttgttgctagtgttattgatattgtggatcattttacaaggatatattaatgatattattgttatatgtgaaagtttacagttgacagatgttttctttatatattaatgtgatatgaattttcacatttctgtcaaatagaagatggctgttattatcctcacttttttataggggctatgcagttttattgtggagaaagagttaggaaacattcaaaacagaactcaaatttgtgtatattatacatataaacttaatgtactttttattatgtcctgttggaagaaagagaaaagaatgcaaattccaaacatgtaaagagcaattgatgtgttttgggtttggatttcctaaaattaaccctcaaattcttctcatttctttttactgtagttaaagtgaggttagtaaagaaatgttacttattttatggaattattgaaaaaaaagatgagattcttacagatttttatgtacaaactatgacagtttctcttgggggtattcaaaataatgctgaataggctattaaatattgcttaactaatgtatacataggtttcagttcatcttgtagatgtatactttacatgatgcctgatacacatggctaagaaaagcattcacaaaatcagtgtttcatctcctacttggaaaagaagtgaatccctatgctcccatttaaaattttttattaatttatggttttgtgacttgaattataagtgatattagatgaacatagtatctttaatgtttggtttggcaagattattatttccacatatttgtaggaaatcaaactatcactcatagggacttatgactaga

SEQ ID NO: 4769 - DNA, 1033 bp, Homo sapiens
tgctgatcaaatttatagtttgacacttatataagttaccagcagaaaataggttagtttttctgagttgcttcttggtggtgtcactttagcttcaggagtgttaaatggagctatgtggcctggcacagtggctcacacctgtaatcccagcactttgggaggcctaggcaggtagatcacaaggtcaggagttcaagatcagactggccaatatggtgaaaccccatttctactaaaaaaaaaaaatacaaaaattagtcaggtgtggtggtgcacacctgtagtcccagctactcgggaggctgaggcagaagaattgcttgaacctgggagtcggaggttgcagtgagccaagatcacgccactgcactccagcctgggtgacagagcgagactctgtctcaaataataataaaaaaaaattttttaatggagttttgctgccgtctctcctcctgagtctgagtttttcttttcctgtggtggttgtggttcacactgcaaagaatgagacaaatcaagagaaaatcaggaatgactgactggaaaaacaaaccagacagttaaatatgtaagatgtttgtctagatatgcctaaaattttaagaatactggattcaaaacaatattatttaattaaaggttaagagaagatcaagtgctttcatacccaagtaattaagcacgatcatgatctgttcaggctgctataacaaaataccatggactgggtggcttgtaaacaacagaaatttaattctcaaagttttgaaggctgagaagtccaagatcagggcaccagttgattacgtgtctgttgccgacctgcttcctggttctcagataggcatcttctcactgaattctcatctggtggaaagggaaggggatctctctgagtcctcttttataaggctctttcatgatctaatcaccttcccaaagccccaccttcaaatatcatcaacattgaggattaggttttcacatatgcattgtggggtgatggagaacaaatatttagtgtata

SEQ ID NO: 4770 - DNA, 1044 bp, Homo sapiens
atgaggatcttatgacctaatttcagtggaaggtcagctaaattttatggcctgcttcagggaagaaggggtgagagaaggttagagtccatcctgctgctgctattttctcacatgtcaagctgacatattttggagtagcatgtcctgaatcccatcaccacaacactgtccttcaatgagaaatcaaaagagctaaaaacacggaaggataactagttcataacaacaatatgaaaaatattgtgaagttcattgactattccttgccatcttgaggagctcccttttccactgtcttctgtagcccctgtctttccactcaagcttcttctcaagccatcattacctatgtaacttcagaaatatacactccttgcagcctgtgtaatttttgtagcctgctacatgcctatacaagtttgagaaagtttgaagatttttatgcttattaaagcttacaaagactaaaggtttttcagactatatttgcctttctgtgcctggcttatttttcttaacataatgactgttatgttaagagaaaccatccatgttgctgcaaataacacgatttcattatttttacagatccataatattccgttgtgtatacatatcacattttctttagccagtcatctattgatgaacacttaggttaattccatatcttggccattctaaatgatgctgttataaacatgaaagtgcagatacctctttgaaatactaattttctttcctttggatgtatacctagcagtgagattactggatcatgtggcagttctattagttttttgaagaatcttcattttgttgtccataattgctgtactactctgcattcttataaccaacagttataagcgttcccgtttctctgcatccttgctagcatttgttattttttgtctttttgatactttgataataggcattctaactggggtgagatgatgtctcattgtggccttgatttacatttccgttatgattagtaatgttgagcattttgttgttttggggagaaatgagcag

SEQ ID NO: 4771 - DNA, 1085 bp, Homo sapiens
ctactacttaggccagatatgcattttctggatgcaatctgttggtttccaatggtttactacatggtgggctctattgacaagtaggtgacaaaatctttggcacactaactagtgtagtgtcctgtggtttgtcatgtgctgtgccttgttactgcatgatgagtgtaatttgccgtgtcagtattgcaaatatgatatattttgcatgtagagcttatgttctcgtgttatacatcttgtattaaactttctgagtagtaatctattgttgaattaaaacaaatcttgctgcatgtcaattttgtcagttttgctcagtttctaatgctgttttagttttgtgtcatctataacaacattattactattgacatagtggtagagaaaactaaagttgcaatattgtgatgcattgatagcgttacgataacttctggaaactttgaaataatttagaaatgctcattttaacttagatttataaattggagcaattcctttagagtttactttggtcacatgtcagagtttataatttctaaaatatttgttaatgaaaaggtcatatgtgtttaatacattagtaattaaatacaaattcttatacatgtattatggtgacattaaaaatatatataaaaataaaagatcaaaacgctaatatacttgaaataatatatgttacttttccacttctaaaaaatgtcagccagagccttcaaaataaaatgctaaaatttaccaattgagaactttaacacttacattttatcctgtagatgttgaagaaaacacagttttacaactttgaaagtatttagtgctgtggatacattaaaggtcaaacagtctaaaatatgattagcctccattctatgttaatataatttacctcatcagttatgataatactaaccaagtaaataaactgtagttagatgtactaaaattactatttaaattctacacatgttttataaccaatcatcttttttgaaatcttttgaggtaatagtgttctgttaaaatttattagaaaaacagtatatctaaaagctaaagaataaacgtcccatatacct

SEQ ID NO: 4772 - DNA, 1047 bp, Homo sapiens
aacctagtaaaataaaaaaatatgccaaaatatatgaaatagtttgcaagtacacaagtaatgttccatcatgttgtggaaaaaaaaaattctagaggagagagtgacacagaaaaaagagcaccagaaatctaaaaacagcgctttgtaatttttttctgagtattaggtcacacatgtacaaaatgaaactctaaaagccaggctaaaaacaaccaaagaatcataagcagaacaattctcagtgctcagacagggtgggagatattcacactctgagcagacatagtagaatgaccttggcgatcagcagggcatttgaaatcttatgagatacatagtttgctagtaagactgacttagccccagagcaaagggtactctaaatagatcagtattagttttcagtaataaaagcttaccactaacttttcaatttacagtgacacaaacctattatctgtgtttctgtgggtaatgattccaggaatgggttatgtagctcccctcatcaaggtctcaccagtctgcagtgaagatatccacttgatctataatctcatttgaggtttgacatcttagaactttgtctactaacactgcccttgaaagtttaaaaatccagcagaccttcaaggtatcaaactaattctaccaaaatgaagcaccccattttaaacattgtataagataacattcacattggccagtatccaattgaaatgactagacatatcaataaatgggaaattccaactgtgattaaggtagaaataaaacctcttctgtacaagcttatatccagaaaataaaggagaggagaaaaaaaaatttatagtgattttgtaaggccggcattatttgattaggccaaagccaaagacatcatgagaaaagaaaattgcaaactgatacgttttatgaacacagatgcaaaaatcttccaacaaatcagtagcaaatccaattcagtaatatacagaaagaacatactgttacctagttgggtttatcccaaggttacaatagtcatataacatttaaaat

SEQ ID NO: 4773 - DNA, 1032 bp, Homo sapiens
cagaggaatcaaacaataccatatagttctggaaatagaaatcaatcttaaagtatatatttaataaatattcctagtaacatgagaatatggtacatacataaaataagaatagtagactagatcacaaaacaaaacaagacactcagtgaacctgaaagagctcctggaaattaaatctagcataacaaatgaataatttaataaaaagcctagaaggtaaacctaagaacattgaagaatgaagaataataaaatgaacaataaaaccaaatagtgtaaaagaagaattaaaaagttgagaaaattatggtagttagagagaagcaatatcaatatagtaggaatttaagaaagggattttataaaacactagggtagaatattatgaaagacataatacgcccaaattttccacacaaaaattgtcaaattgagagggcccactcattatacaataaggactagaaaagatctgtgctggtcagggagaaggaaacaaaagaagaagccaaaggaaaaaggaaaaggcatatgaggaagaggaacaataggagaaaaagaagaaaatattcaaaactaagggtggaaaattggaatgtcttcagatgtctcatcagtaatggcagaagacagtgggacaatgctttcaaaattctgaagggaaatattttttcacttagaattttgtatcctggcaaaagtttggtctagtaagaaagtagaaccaacccaaatgtccttggaaccaacccaaatgtccaacaatgatagactggattaagaaaatgtggcacatatacaccatggaatactatgcaaccataaagaatgatgagttcatgtcctttgtagggacatggatgcagctggaaaccatcattctcagcaaactatcgcaaggacaaaaaaccaaacaccgcatgttcttactcataggtgagaattgagcaatgagaacacatggacacaggaaggggaacatcacattctggggactgttgtggggtggggggaggggggaggggggag

SEQ ID NO: 4774 - DNA, 1030 bp, Homo sapiens
gttcatttgtgctgctgtaacaaaatacttgagactgggtaatttatgaacagaaacatatttctcacagttctagaagaaggggagttcatgatcaagggctcacagatttggtatctggtgagagccttctctctcaccaagatgacgcattgtggcgtgtcttcacatggcagaaggcagaagagcaaaaagagggctagctggttccctccaacacttttataagattgctaattccattcttgagagctccagatttaatcacctcctaaagcccacctctgaataatgttgcattctgaatttaagtttcaacatgaattttggaggggacacaagcattcaaaccatagcaattatacactgattgctgtgttgcaaatcttacatcttcctccaacattgcaaaacacattttattattcatagtctcactttgcttttttttgttgttgttaatagcagcattatttctaatgtgattttaacacatttctaatttgaggacatctaacaacttttacgctgctctcttactgtcacctcatcaatagctttgcacaaatgattgattcatttaaggacttgttttaagaattgttttgtgtcttagtccattttgtgctgccataaaataatacctgaaactgggtaatttataataaatggaagcgtatcggcttatattgcgtttggaggctgggaatccaagatcaaggtgctggcaactggtgagggccttcttgctatctcataacattgtagaaaggcaaagagagagaaagcacacatgagacagagagagagaaagagagagagaaagagagagagaaagagagagagagagagagagagagagagatcgatcttgtgagggagcccattcccaggataccaacattagttcattcatgttggtggagcccttatgacctaaacacctcttaatggtctcaccttttagtgtggtacaatggcaattaaattttaacatgagttttggaggggacagcattcaaaccatagc

SEQ ID NO: 4775 - DNA, 1032 bp, Homo sapiens
atatatatatatatacatacacacacacacataagtatctattgctaaatagcaaaacacccctaaacttagtggcttaaaatagccagttggttatttctcaaaattctgtggttgatttccagggcagattttcttccagtcttacctgtaattactctttcaacttcagtaatggcctgaggagaaatggaggatgtaagatggccctactattatgtctggcaattggaagagaaccaagtaggacatcttagttctctttcacatggcctctcatcctctagtagactgtaccaccatcttcacagtgtggtggtctcagggtatcaagtaaatgagaaaaaagagctgcaatgtctcttaaggcttagcatctgcaaccacataatgtcacttttgtcatatttattggtcaaagcaagtcattagtccagttcagattgaaggacctgaagacatagacttcatatcttgatgggtggtacaggaatattatattgcaaaagaagggtttgtagaacatatgaagacttcatttgttggcagctattataataatctatcaaactacaggttatagaggtttctttaaacagtgagaatcccgcagcttttcgaacctgaggttgagctgtgtttaaagaatatgaatactgcccttatgagtacattatgttaaaaggacaaacaaaagacctggaagcacagtaggagacttttttggtagtttaggtctagaaaatatatatttgaattaagaaatatacattttaactataatcagagatcggcttttaatgcagactcaagcaaaagcaagcactcaatatttgaatcattaaaaatatatgttatctttcttctctgttctctagtgaagtataaagaagttaagcaaaaattgtttacactctcaaacatatgttattttaaataaaattttaaaacttgacttcacagaagtgttatacaattccatttttggtaatactagactacatttgaatattctcgtaattagtttggcaa

SEQ ID NO: 4776 - DNA, 1957 bp, Homo sapiens
aatgactcatatcaccaatagtaagagcttagttcctaagcaattaatcatgtaaataaaaccaaaagtatgccatagcataaaaggagtctttaagaaaggctaagaaaatatgacagagcacaagatgtctgatttatattgttgaggtgttccctagagtctccgttacttctttgttttgttttgtttcctactgaatttcatgcccagtgaactttttgtaagtttctatcgcctctacttctgtttacttcctacagatcctttttattttctgttgcttttaaaaattacaaattaatcggaagaatagaatcaccaacatcagaaagaattggagattggaagacacttgagtctggaggaaagagaaagactttaagactcactgcttaggagcaatctttaaactagtttatttatttattcataaagttgtatacatttatggggtacaagtgcaatgttattacttagctattttgagtagtggtaaagtccagcttttcactatatccatcactcaaataatgtatgttacacttaccaggcaatttctcatcatccaccctcttcctcccttctcactcttccaagtcttcaatatctttcattctacactcattccacatgtctttcaaagtcacgatgattgtgaagtctgtatatttgtatgtgataatgaattactttaagtatgtgtgcattgtgatcataaccatgaaatcaagtttttactatgcctgggtgttttaagttttgttaaagtcaagttgttttttacatttccttactctgacttttgttgcaatatcatattaattcataaataacactgaaaatattgaaatgttcattaaaatgtagtattttaatctctgagctatccttcaattaagtgcacatttaaaataaattgttttatgaatagccatatattatcttcaaatatattttgatctattcaaattgctttttaaaacagtgatatttgaaaatactaacgatgctcttttttttttttttttttttttttttttttgagacgaagtctctctctgtcgcccaggctggagtgcagtggtgcgatctcggctcactgcaagctccgcctcctgggttcacgccattctcctgcctcagcctccggagtagctgggactacaggcgcccgccaccacgcccggctactttttttgtatttttagtagagacggggtttcaccgtgttagccaggatggtctcgatctcctgacctcgtgatccgcccacctcggcctcccaaagtgctgggattacagacgtgaactactgcgcctggccgatgttcatttttaaatagcactttgagtaaaatgttaaaaatgctctagagatcatctaatgctatgtacttctacaaaaaaagcatgagtaattatgatttagaggatttatggagaaaatgaaagagatttgcgttttctatcataataatgcctggctactgcacatacttctgaacatattttacttacactgttatgcattttatctgttttcttattgttctcctgttttaatattcttttaaattcaaagatttttatcccaacagaagaaaaaatgtaatctccagggtatctgccgttctcattcgaatagtcttaaacctcaaaaatctataaacatatatatttacctgagacactttttgtttatatttgcttatttgattctatttatctatcctaaggttgtagagtatttaacacagaataattttattattttttctagttactttttgtggcacagtaatatatttttggtagttaacactagagatggtgtatacaatagagaatatagaaaaagataaaaggatacgtaggaagatagtactaacacttctatctgcacaaggggaattggttatgaaattcattcaaataaaatctgaaagtattttga

SEQ ID NO: 4777 - DNA, 1028 bp, Homo sapiens
tcttgcatttatctgacttgctccctttgttctagccattttaattccttttacttccctgagtgtactatatatacatatatttacatatttttctctttattcttgctgttgcttaaataagaaaatatcttccatgtgtcttctcatccaaccttgccaatcatattctatatggttccctgtcaaattcctactagcgctaaacatttgattaatttacttattggcagaacatggacatttcttctcaagatagtcctatggagtcctcctgcccatttttaataaatacatttacaattgctattaatctccagaagttcagatttagtttagttgcaattcttagtttgtggcacactctcatcattgtcatatggatagactttaatttatttcattcatttattacttcattacttaattaattaacttattaaaaatatacagacacctatgacacttgaagaaccaataccttataaataaatgaagtctaactctggactgctatactgtcttctctggtcttcctcacagaaataatttctatccttgttttggcttttcatacttttgctttaaaaagtatagcttaacagatatgtatgcatctgtaaataagttattgtttaatttttaaagtttttttgaactttataaaactgatcactgacatatagtcttaggcttgcatcttttattcaacgttaggtaactaagatttattcatattattgcatataaccatagattatgaactttgactgcaattttccattgtattaatatgccacaagttatccctgtcagtggatatttaagcttcgtctgtttcatatttaaatttgctctcatgaacagtgcttccttgaaccttttttttttttttttcggagtttcgctttttttttgccccggctggagggcagtggcactatctcggctcactgcaacttccgcttcttgggttcaagcgattctcctgcctcagcctcccgagtagctaggattacaggcacacg

SEQ ID NO: 4778 - DNA, 1050 bp, Homo sapiens
tttattgaaatgaaagtttctgagtaattaagcatatatccttcatatgctagaaatatatgcaactttcaagagcacatgctgattcacaagcagaataatggtttcctattaatattgttccccatgaaagaaatttaagcagcttttaaagtacttgaaactgtaaagataatggcctcattttcaaaaaatttgttagattattaatatcattcattttacgttaccctgttttgctaataaactgtcattactcacacgtgaatacttttgaacatatttcaggtaatttaacctaacttcatgttagtatgatgcatttttatgtctgtgcttcaacctttgtgttactaataccttatattggacaaacagaagacaagttactgaagcttattaatagctctcataagttctatgaggtacatctttttacattaaaatgaataaaagagataacttgccatttcaaacgctcttttgcttcttctacaagaagatttgagatatcctatagaacagtggtccccaacctttttggcaccagtgactggttccttggaagacagttttcccatagaccagtgggggcacagttttggcatgaaactgttctacttcagatcatcagacgttagttagattctcataaggagcacaccacatagatcccttacatgcacagttcacaatagagtttgcgatcctgtgagaaactaatgtcgctgcaggaggtggagctcaggtggtaatgcttgttcaactcctgctgtgggcctaacaggtcacagactggtactagtctgaggcatgggggttagggaccactgttacagaataaacacactgaggagtatgcaaaaaagtgctagacacagtccctgactttgtgttgttaacatttaaggaacagacaagaacacattggcttatccaaaaaaaactacatagtggccgggcgcagtggatcacgcctgtaatcccagcactttaggaggccgaggtgggcagatcacgaggtgaggagattgagaccatcctggccaa

SEQ ID NO: 4779 - DNA, 1018 bp, Homo sapiens
cttgtattttatctggaaaagggaataattgttcttaaagtgtttgactacctcatatcaaaaaacatatttatttaataattgaataggtggtatatttaaatatattactaatcaatatataatggtgcattggacattatctctcccaactttatggcatatctcatgtcctagtggttaatagtatagaattattatcagataattaataataaatcctgtgcaatcaaaaactgagtcttttaaaagtgacactcaagtgtaacacattagtagaatataaaatatcctgcttgttagaaaaaagatcagcaaagtttttctgtgtaaatgccagatagtaaatatcttagtctctggggccataaggtctcttattaaatatactcatttatgctgttgtaacttaaaagcattctctgacaatatgcaatgagtatgtttgtgcgccaataagactttgtatatggacactgacatttgattttcaagtaactttaacatgccataaaacattcctattcattatatttgttttgagacatttaaaaatagaaaaaaaatatcttagtttataggttgtaaaaaaagaggcaatgggcaggattaggtccctggatttcctgacctcactctgtagcaagttatattgttgggttatataatgtaattcattttatttctgtttttttcaaatgtattcaacatattgatttaaaacatatttactgacttctttggtttcgtatattctatttattacttaggaactaagagatataataattttggagtgataattagatattagatgctttttttatctcagtacagtcacctactgaacgaatataaatagatttttatttatttatatatttatttatttatttattttgagacggactctcgctctgtcacccaggctggagtgcagtggcgcgatctcggctcactgcaacctccacctcccgggttcactccattctcctacctcagcctcccgagtagctgg

SEQ ID NO: 4780 - DNA, 1024 bp, Homo sapiens
gtctttctttcgtatttctaaggcctgatttcctctcctggcaactggcaaggctagtgattaggacctagagtaaggttcctacatttttggcaattttggggaaagactgaaggttgaaggcgtagagtaattactattcttacatgtagtgctcaagtcctggatgttagaaacctcaaattttgggacagcctctaaataataaagtatttactcctttatgttaattttctacacagaaggtcaatggacaactaggatgagtttaaagcaaagattctgcactatatttagatggtagagtttagctaaattgaaaagaaaatatctggtgtgaaagaaaatagtattttattgggtattcaggtatttcgtttggtttccttgtttacttttgtcaatagcggacattgattgttaaagacattgagctaaaatagaattgccttgggagtaattagcaattcaggaaaaaaaaaaaagagaagaaagaaatcagaaccttactgtagtaatcaattcaaaatcaacgatatcatgaccaatttattatttttgtttttttcccccagttccctcaaattcagtattcaaatttctcaaacctagcacatgactctcccccatatttgctgctcctttcatgtccaaatttcttggaatactatctaccatgttattgtaaactaaaaaataaaattctaagtcctccaatcatctgaatggacccctcctcttggccaagagcatttcaaagttagcctgcaaaactagttcaggccatgatggtaaggaggtggacagacatgcctcaacataccctccttccttttgaatgcaggcacaactgaccaacattaacattaaaacagagatcttaagactttttgtagcaataaggtaccaaattccagcctgacactagtatagtgtcatgacagatagcaggtcctgaaataaatcaaaatattttattccaaaatatatatttctttgtcatattttgaaatggccctgaaaa

SEQ ID NO: 4781 - DNA, 1044 bp, Homo sapiens
cctcaggtcttccttctggctgccattggacaattcctctctctggaatgaataacaacctctgaagacatcccactccacctctacatgtcacatgatattcacctattttttgaccagttatcacttacataatctttatctcagcattttaggaaggctttttcgctatgcaaatctctgtattttataatcctgtataattatattttataatcctgtataattatattttataatcctatgcaatctgtattatcttctgtattttatgcttttcaaacctttattgtactctatttgttctactttatttagtttggacaagctgaagcaggtgacatggttcatctgtatccttgcctgatgcatcactgaaatgtaaatgaattggtggtgagagaataattcaaaggactcagtgtttgaaccaagcctagtcaatgctgtcaatgctgctgtatcttgggtgtttgtggaggcactaaggtagtggccaggactgaagaaattgggaacttgaccttataaggcagctacaaaacttgccctctatcattctaaccaacccttccaaacttctaaaaatctcagctccacttctgcaagtttatcttccctgcttgcataaaattgcagtgcctaatttgaacaccttcggtattcatcaaaaataccaaaggtgctcaaattagacattgcattttttgcgcatgtcaagttgaaatctattcatggatctttagctccttaagagaacatgcatataacattactttttactagcattcttccaagtactttacatgcccaacgagaaagcataatattatccccattgtacagctgaagaaacaggcatagagaagttaagtaatccgttggtgattacaaagctagaaaatggcagagccaggaacttgaaccctgtttttcttggccattaggcttgctggaaggggatactaagatgtaggaagggaaggtggagatgagggtctttgttgattttcctaaaaaagttggcgttgtactggcatatgg

SEQ ID NO: 4782 - DNA, 1059 bp, Homo sapiens
ccattctagttttcaaaaatcaggtcacttgtttcaaatccaataatcatgcataccttttgtattttataggtggcctttagaagtaattcaaggaagtcaactaatgcattgtagttgttaaaacattaaaggatttgaacatagtacaagtcaatccattaacagtttaagaggtatttacaaaaatagaaaaatatttccacagcatttggaatatgtgtaattttagatatacactgcaaaatatattgctttacataatcaaattcaattgtgagaatgggttttgtattgacatattaaacattttataaattactaactttatctccattataaattatatattgttttgaaaaacagccatttattataaaatatttattctaaattttaagttcaggttagtaaagacaattttaaatttttgagcgccattaaaatgaatgacacattatttttactctttaatcgatagtggcatcaactatgcatatacaatatctacaaaaatgatttaagcatttactttagaaagagagtttagacaatcctgtgtttcttatcaatatcgactttattaagaaaaatatccacaaataaggcaatagaaaattagaaacttaaacagataatggtataaaaaatagactttgggccgggcgcggtggctcacgcctgtaatcccagcactttgggaggccgaggcgggtggatcatgaggtcaggagatcgagaccatcctggctaacaaggtgaaaccccgtctctactaaaaatacaaaaaattagccgggcgcggtggcgggcgcctgtagtcccagctactcgggaggctgaggcaggagaatggcgtgaacctgggaggcggagcttgcagtgagccgagattgcgccactgcagtccgcagtccggcctgggcgacagagcgagactccgtctcaaaaaaaaaaaaaaaaaaaaaaaaaaatagactttgaatatatatagtgtaatacataaaatgcagagaaaaatgtattatttaataattattgtttttcaatcactactaa

SEQ ID NO: 4783 - DNA, 1050 bp, Homo sapiens
agaccttgcccctgtcaagacacagatcccttttgaggcatccctctctactcaccgaatgatttatgcagataatgatcagggcatttacttactaagacacttcactgttgatacccattctttctctgtgcatgttacgtgagtctataggggatttgaaggagatacaaagctatattcacaggagtaatagaacagtttttttttcttgtgaactggtaaagttggtttatatttatcttggtcatataattgtccttgttttatttctgcatatctacaaatttctcttgggagaaaaaaacaaataaatatcctgaattaaagaatatacagcttatatttcaatgatgtcattgatgcattttattcatttaactcattaccacttgtcgttagtgattaagaaacagagaactatatgtaacccagaatgcaaaagtatttaataacatcattgttaaagaagacactataacatttttggagtcaaatcaagtgtaaactcttttgaagtgtctccaagaagataacaatacagaacaacacaaaaatcaaggtagaggatctgagtagctttatactgcagtcctctcatgcctaagatttacgtaggttgggataagagtacagattttaaatctctattcaattccgttctcctttcttttctttgcctgtcatgaaatcttttagcagaaagccgagccgtgtctgcccctgctagttcagctaagatactgcctgggtaagttttttatactatcatttttctgactgtaaacataatgtactttcagtgaagaaaatttagaatgaacaaagaatcataaaacaaggaagcaaaagctcaccccaaataaaaaatccgagatataattacaactggattatgatgaatagaaaataggtatgtacatgtgtatacatttgtatatattgtgatggcaaaatatgaaaataatttagaattggcattgtctctagaaaaatagatctgtgtggatataacacatcatataagcaacatataaataaatattaata

SEQ ID NO: 4784 - DNA, 1807 bp, Homo sapiens
tcctagacttactagcatcatatgtattttgttttattttcgagcaagctcttcttcctctcaaggagcatgtaatagagtaactaattagatcctgcctttatcattatcttacctatgattaataataccacagataagttatctttttccttagagattcttactaaagtggtcttatctttaaaagtttgcttttattgacttcaagatgtttgttttcagaggttttaaatttgatttattttatgtgaaactttagaattagggggaaaagattaagattaaaatgtgaatacacatatatgatagatccgtaaataatgataatatcaaagctatttcacaaagtcctttgcacttgctgcaggtggtccaaaaatttggctatactaagtatggacttttgtattttgtttttttggttgggttgtttgtaaatgtatgtgtttattacaacttttaatttcattctgttctcttcaagtatgagaaaactacttcagcagtttatgatgtagaaaattgtatagatatactattggagcttttgcagatataccgagaaaagcctggtaataaagttgcagacaaaggcggaagcatttttacaaaaacttgttgtttgttggctattttactgaagacaacaaatagagcctctgtaagtattagtcagttgcctttctttaagattatttttctgtggtcttaagtctatgacttttatagttttcctttagtaattatcactctaaaatagggttttatgtgtgttcaaacctgctttttgcacggataaaatgaattcaggatgtatctatgagttgtttctttctgactattaaagaaactgaattctgaaaataaatttattacagccatataagtaaccatttcccatttactagagagaaaagtatcctagcaagatagaaaaccagataggtataacttcttatcctcctgttgtaaccataattgtatttcaagcttttctacgatgagacctctgagtcattctttttaagtgtcataattaacatggggaaaccataggccataattggactgtggcctttatcctggtaagtgggaaccgctgcagggtaaagcaagggaataatattttccaatttaaattttaacaacactctggcttctgattgaagaatgaatttgggagagcatgtgtggatatagtgagaccatcaaagaaggtggcaagtgttgatatgtagtgatctaggcaagagattgtgcttgtcttaggattgtgtcgctgagaggtaagtagaagactttggaaactgcagaggtaaacttttcaagacttggtaactggatatgataggtgtgttgactataattgctatgttgactataataattccttcttatattcagtgtggagttaagtatgcaacttttgaatatttatcttccttataattgccttgcaaattagctcgtaatttaaatcaatctacctgccaaacttggtgaggtttctttgattattcaaagcttaaaagtttactgcaggctgggcacggtggctcacgcctgtaatcccagcactttgggaggctgaggtaggcagatcacgaggtcaggagattgagaccatcctggctcacacggtgaaactccatctctactaaaaatacaaaaaaaattagccgggtgtggtggcgggtgcctgtaatcccagctacttgggagactgaggcaggagaatggcgtgaacccgggaggcagagattgcattgagctaagatcgcaccactgcacttcagcctgggcg

SEQ ID NO: 4785 - DNA, 1032 bp, Homo sapiens
gattatgaaacaaagaaaactgcaattgtggttatacagaattattataggttgtatgttagagtaaaaacagaaagaaaaaactttttagcagttcagaaatctgtacgaactattcaggctgcttttagaggcatgaaagttagacaaaaattgaaaaatgtatcagaggaaaagatggcagccattgttaaccaatctgcactctgctgttacagaagtaaaactcagtatgaagctgttcaaagtgaaggtgttatgattcaagagtggtataaagcttctggccttgcttgttcacaggaagcagagtatcattctcaaagtagggctgcagtaacaattcaaaaagctttttgtagaatggtcacaagaaaactggaaacacagaaatgtgctgccctacggattcagttcttccttcagatggctgtgtatcggagaagatttgttcagcagaaaagagctgctatcactttacagcattattttaggacgtggcaaaccagaaaacagtttttactatatagaaaagcagcagtggttttacaaaatcactacagagcatttctgtctgcaaaacatcaaagacaagtctatttacagatcagaagcagtgttatcattattcaagctagaagtaaaggatttatacagaaacggaagtttcaggaaattaaaaatagcaccataaaaattcaggtatttctatatttaatttaaatataaaactgtgagtctttcttttgaccaatatttgttagaatgtataaaatgagcttaagcaggtcataaagaatagtacttagttgaggtgaccatttatcttccaaagtggaacatttttgaaagagggaaagggcactagtaagtcagccaagacagcacagaacggggattgttctggccatggtcaccctatgtgtggtgcatttcagtatgggttaattgtagcactcttagaagaattttgagaaaataggagtcctgtatttggcaaagttatttctttaagtggaaaatataagctaa

SEQ ID NO: 4786 - DNA, 1863 bp, Homo sapiens
ggtcaatcagaggaagaacttcttgcaagtcaaaaaagcagctacttgcttgcaagcagcttacagaggttataaagtacgccagctaatcaaacaacaatctatagctgctcttaaaattcagtctgcttttagaggctataataaaagggtaaaatatcaatctgtgcttcaatctataataaagattcagagatggtacagggcgtacaagactcttcatgatacaagaacacattttttgaagacaaaggcagctgtgatttccctccagtctgcttatcgtggctggaaggttcggaaacagattagaagggaacatcaagctgccttgaagattcagtctgcttttagaatggccaaggcccagaaacagtttagattgtttaaaacagcagcattagtcatccagcaaaatttcagagcatggactgcaggaaggaagcaatgtatggagtatattgaactccgtcatgcggtactggtgcttcaatctatgtggaagggaaaaacactgagaagacagcttcaaaggcaacataaatgtgctatcatcatacagtcatactatagaatgcatgtgcaacaaaagaagtggaaaatcatgaaaaaagctgctcttctgattcaaaagtattatagggcttacagtattggaagagaacagaatcatttatatttgaaaacaaaagcagctgtagtaactttacagtcagcttatcgtggtatgaaagtgagaaaaagaataaaggattgcaacaaagcagcagtcactatacagtctaaatacagagcttacaaaaccaaaaagaaatatgcaacctatagagcttcagctattataattcagagatggtatcgaggtattaaaattacaaaccatcagcataaggagtatcttaatttgaagaagacagcaattaaaatccaatctgtttatagaggtattagagttagaagacatattcaacacatgcacagggcagccacttttattaaagccatgtttaaaatgcatcagtcaagaataagttaccatacaatgagaaaagcagctattgttattcaagtaagatgtagagcatattatcaaggtaaaatgcagcgtgaaaagtacctgacaattttgaaagctgttaaagtccttcaggcaagttttagaggagtaagagttagacggactcttagaaagatgcagactgcagcaacactcattcagtcaaactacagaagatacagacagcaaacatactttaataagttaaagaaaataacaaaaacagtacagcaaagatactgggcaatgaaagaaagaaacatacaatttcaaaggtataacaaactgaggcattctgtaatatacattcaggctatttttaggggaaagaaagctagaagacatttaaaaatgatgcatatagccgcaactctcattcagaggagatttagaactctaatgatgagaagaagattcctctctctcaagaaaactgctattttgattcagagaaaatatcgggcacatctttgtacaaagcatcacttacagttccttcaggtacaaaatgcagttattaaaatccagtcatcatacagaagatggatgataaggaaaaggatgcgagagatgcacagggctgctactttcatccagtctactttcagaatgcacagattacatatgagatatcaggctttgaaacaggcctccgttgtgatccaacagcaataccaagcaaatagagctgcaaaactgcagaggcagcattatctcagacaaagacactctgctgtgatccttcaggctgcattcaggggtatgaaaactagaagacatttgaagagtatgcattcctctgcaac

SEQ ID NO: 4787 - DNA, 1048 bp, Homo sapiens
caactcttataatccaatctatgttcagaaaatggaagcaacgtaaaatgcaatcacaagtaaaagctacagtaatattgcaaagagcttttagagaatggcatttaagaaaacaagctaaagaagaaaattctgctattatcatacaatcatggtatagaatgcataaagaattacggaaatatatttatattagatcttgtgttgttatcattcagaaaagatttcggtgctttcaagcccaaaagttatataaaagaagaaaagagtccatactaaccatccagaagtactacaaagcatatctgaaaggaaagattgagcgcaccaactatttgcagaaacgagctgcagccattcaattacaagctgcttttaggagactgaaagctcataatttatgtagacaaattagagctgcttgtgttattcagtcatactggagaatgagacaagacagagttcgatttttaaaccttaagaagactattatcaaatttcaggcacatgtaagaaaacatcaacaacgacagaaatataagaagatgaagaaagcagctgttataattcagactcatttccgagcttatatttttgccatgaaagttctagcatcttaccagaaaacacgctctgctgtcattgtgctgcagtctgcatatagagggatgcaagccaggaaaatgtatattcacatcctcacatctgttataaagattcaatcatattatcgtgcttatgtttctaaaaaggaatttttgagcctaaaaaatgctacaataaaattgcagtcaactgttaagatgaaacaaacacgtaaacaatatttgcatttaagagcagctgcactatttatccagcaatgttaccgttccaaaaaaatagctgcacaaaagagagaagagtatatgcagatgcgggaatcttgtatcaaactgcaagcatttgttagaggataccttgtccgaaagcagatgaggttacaaagaaaagctgttatttcactacagtcttatttcagaatgagaaaggctcggcagtattatct

SEQ ID NO: 4788 - DNA, 1050 bp, Homo sapiens
ttgattggtgtttaacatatggttatcttacaaagaataatttaaggtcttaagtgagtgtttaatttacatttgctgacttttttattttaggagagagagaaagctgcaagaattattcaattggctgtaatcaattttctagcaaaacaaagattgagaaaaagagttaatgcagcactcgtcattcagaaatattggcgaagagtcttagcacagagaaaattattaatgttaaaaaaggaaaagctggaaaaagttcaaaataaagcagcatcacttattcaggtatagtatcctggactaatttttgaatttaaaaaattttaatgacttttttaagtaagaaggcaaaatgtgatgaagttttcaatgattatattttaggattctttatctaatacttaatttaacaaatatttactacctgaaaagctcgttatggtgttcagcagaaggctgaaacataattgaaatgcatttgctctgaaaaagcaaacattctaattctgtacctgttgctctcttctttgttgcgtcttctacgctgtgggacatgctggcctactgaaccattctactttgtagatccacataaccaaccaggttcttttttatctttgctttgagtcctggaaacttctctttgggacaactgtacacatttttctctctactccacttagttggcatgtaaaggaaatagtacttataattagtctatagaatacctatattatttttctttttaggaaaaaatatataatactgacttaatatagtctttacatctatgtaaattagtttttttatattaaattatattttaatgacatgagagatgtgcattatttaaatttactatttataaatgccattgaagcttcaccccatcaatatatctgatttatgaatttgaaagtttttgtgtctggctaccattattgataaatgagggttctctgacttaaataattgtcttttttaacctttttttaacatgtaaaatattacacatagaaaattacccaaaataaaaatatagagcct

SEQ ID NO: 4789 - DNA, 1035 bp, Homo sapiens
caggtgatccacccacctcagcctcccaaaatgttgggattacaggcgtgagccaccgcggctggccagaaagcccatttttatgcttttacaggagttactgaggatttagcactgttggatgttgatgttatttagtcggttaggaattctaagtagttaagagatcaatcttgtataaccaaatttctgttttgataagtgtcagcaaaatgactgttttataaatctttgaagtcacttgagaatgctttgggatggttactctattaatgccatgggtgatgggttggtctacaattgactggatggttggcctagaattatcttaagtctctttctagcctttagagactatggttgtataagtaattctaccagctttttgttgaagacagaaatcagttggggtttgctttttctgtctttgttaggtagatactcaaatattcgtgcgtgtatatatacatatatttttatatatatataggaattactgtggaaacaagtaaaactggattttagttctcatcttagttttgccattaccagctctatgaccataggcaattcatttaagctctatgggccttagtttctttatctaacaataattaattgtgcgctttaccatgataactaaaataagaaaataaagcacttgcttgatgtgtacaatatagtacatcccaataaatgtgcttcctctctgctctacatccctctcctctcttttctgtcctttcctttctttctcttttctgtagagccctattattttgttgatgtgtgcatttatatatgtatatcttattttcttatcatctgttcacacacttcaatcccaaacttaaaataagaactctacttgccgactatggagcaacagagttttgagatagttttttgaagtctttctgatcataaagccctgtaactgttgggatttatgtgggaaataactatatttcagtgaagggttttttcatatacgtttttatgataatttcatctgaacattttattactgccagg

SEQ ID NO: 4790 - DNA, 1030 bp, Homo sapiens
ttatatccttatcaaggaagcacttttggggtcaaggcaagagatttctttaaagcaatgaaagtttttttctctgtgtatttaggaagttgctatgcctcaaaacagctagttaaatgttgacgtatggggagcacagatttaatggtctttataaaatatctctgctacagtaaaacttaacaaactctttagctgaccctggtacatttttgtcagattttaaattgcttgtattgtagctaaaattaattgcaggcagtcttcatgttaaaattcatgttgtctaaaactcaactgaataggaaagaagctatttggatatactttttaatttctttgtttcgactagagataactttagagtataaactagaaaaccttatatccatgtttcatggagaccaattgaaagaactgtgaatatttagagaaatagaacagaagagaaaactctggggcataaatgttttaagatatttgaagaactgtcttataataaaaggtgattaaattgtttattgccaagcaaaataagtatgcatgaacaatgaaaatttcaggaagatgaatgtgggtttggtttaaaaacttgccaatattcagacgtgtctttatcaaacaaccagttcacagtgttggaaggttcaagcagaggtcagaggaccgcttggccagaatggaggaattctttgacatttatgaggacaagatcctagatttttatgaatctccggtttttgaaaaacagtttacatgtcccttgccttcttttaggctaaatttccatgaacattcttttctttctgatcagtattctcacaagttaatagtctttttactgcagctttgtctcactttagcagttccatatgagctaagatcattttgcttaaaatatttcacatttttttagttggttaatttgtttatttaataaattcaagctaccacatcaatattctggccaataggaattgtttttatactttttccactttctaggaggaacaaggattggtttaatgtt

SEQ ID NO: 4791 - DNA, 1025 bp, Homo sapiens
ttattctctatcacttttctaataagttggtattaagggttgtttcttccactattaaaataactctcctctgatttgtctccattgactctgttttaatttgtctcaccatatccaccttgggtcattgtaataactgctttgtaattttctgtttctaatcttgaccctgttcattccattgtccatactgttttcttaaatataaatgagggtttttacttccttgattaaaattcttcactagcatagaaggtgcttcaaagtgattaatagtggaggttctgtaactatactgcctttgttcaaatctttgctacttactagcttatgtgaccttagaccatgtggcttaattgctcaaagcctcagtatcctaattatatacattgtggtaataatagtacacttctcataaatttgttctcataactgtgtgagaaaaagattatgatagtgcctggcacaaagtatttaagtattagctgccactattattttgaatattattgaactcctccctacctcttctagcctcttgtatgtcatttcctacgtgtattctttgcttcatccttattgcagttctggcaacaggccacattcctcatgcctaattttaatttcataagttaactcaagtagattcccatctgggaaggctcttctaccatttttaaacttctttttttaccagactgagaactacttcagggctgagaccatatttttcaattctgcatattctcagcacctcgtagagagtctggaatatacagacacaataagttttggttgaatctagactttagcctctgtaaacacaaaataaattgtggtttatggtctgtgacttctggatgttggtttgataaaccactgaattcatagcattagtgcgtggagtacagtggttattaagtgtttgctaaatgaatatgattgtgaagaacccaaactttaactttcaaatcactgacctatttagggaatttgtattttaatgctcttagttttgttttcta

SEQ ID NO: 4792 - DNA, 1027 bp, Homo sapiens
tgttcttgggtgagttacttaacctgtctgtgtttttgtttcctcataagtaaagtgagatgatgctaatgtgatgctaatagtaccttctcatggggtagggaaaggttattatgaggattaaatggggtaattctagggaatcacttaaaatattgcacaaaatgtaggtgttctagcatatttattgtctctaagctgccaaacattattaaacaaatatgaaatgatatattctctgtcatcaagaaccttagagtttaatgggtacatgaaaaaacacaatcatgttacaataaagataattttatcaggataagtatagaagactaaggaaatcaggagaagtgtctcagagcagatagtatttgagctgagactcaaagaatagggaacagtttacaagacagaaggaccagcatgtgcaaaggcattgaggtatgttgtattctggaaattgctcaagtgtgagtggtttcaaggtggtcagggaggcatagtgaaaataacaggagatgaaggtgggcaagaaagtggtggtcagattttgtatgtcttgtatgttctacagaggtgtatactttggacaatctaatttaactagactagactttattcagtaggtgatagggactgttgaaaagaattttacaaaggaaaccatggcctgtaagaattttagaaagatcatggtggcttcagtgtggagaaggaaattggaaaaagggatgaaaaaagagccagggagacaagaaggagcatataacaaaggaccagaatgataatgtagcttagacttggaagatgagtggcgttgggagtgggatgtagaatgagagtaaagcagagagttatgatacattgaatgtagactaagtagactggtgatgagtagaatgaaaagaatatgtagcagaagatccatgtgtcttaagtgtcctctcttaccatctttattattagaagtacagtttatttaaaaaaataacaacacaggagttcgagcgccaccttcccattattctca

SEQ ID NO: 4793 - DNA, 1053 bp, Homo sapiens
agtgaaccaatattgatattccatactttattcagattttcttagttttctcctaatatccattttccacatcaagatcctattcagaataccacactatattgagttggaatgtctccttaggctcctcttgcctgtgacagtttcttagactttccttatttttgatgacattgacagctttgaagagtactgtcagataaattgtagcatgctcctctcttggagtttgttgggtatttttttcatgattagactgggattgtgggttttgaggagatgatcacagaagtaaagtgccattttcatcaggtcatatcaagggtacgtactgtcaacatgatttgtgaatgctgacagggaccttgataacctggctgaggtagcgtttgtcactctaaagttcttcctgccctttccatgctgtcatttttggaaggaagtcactacatgcaggagtgaggagtcataattccccttctttagggcagagaagtatctacataaataactgggaattctgtatagaaaatttgtttcttctttctcaaattcactgttgagctttggaattcatctgagaaggaatcatgtactaattacttcatgatagactagattaccaggcacaatcagggaaaaaagcagtgatagtatggttaaattgttattagcattttcagtatatccactttatacatccccaatcatgattttttttacatttctttttagaaaagatgttcaagaaatcattaaagaaccccaataagactatattctaaatatttattgaaagaatataatttcagctaaaatcctagaagagggtttgaaataatttaaagaaaatgaccaagtttttttaaaacctacgtttcaaaatctaaatggatatgtgttatttgggacacttattcattatgattatataagaagacaattcttgtttcccttataagtatggactgtatacattaaggaaaacaatgtttaatccttattttttaatacagaagtctcaaggttcttgtcaaattttgcctttataag

SEQ ID NO: 4794 - DNA, 1087 bp, Homo sapiens
tgaccttaacacaattatgtagaagtcatcaagcaattgacatattctatcacctgtttggacgttgttatttcttatatataaactgcagttcctaatgcaggttgatatatattcaatgactattaattagaagaagcttatttcatatatgtatataattttaagtacataagtacatgtataataagtatggataacacaaaggtcaacacccaaggaaaggaaaacaacatattaatcagttttacttctgtttataatttaattgtagtgttaaaacttatcataagatatactgtttaacatccctatatagaaatggatagaatgcttgtctagctaggaaacatgaaactaaaatgtaaatgtatctgtgaagcttatatcatgacgtagatgtttgattgtggaaaaagcagtagcttcataaaaaaagttggacttaaaaaatagagatgctatagtatatgcagacagctacagaatataaaggtaacttttgtggaagaaaatgaacaagggacttgcaacacaatagggaaagacataagttctgttttctggttcctagttttgataaagtgtgtgtgcttgggcaaattatatacttctcttggaataactccagatttattgtagggtccattagacttagagctgtttagtgtcaaaggcttgacttaatttaacttcgtagtatctgtgtgtatgtgagagtgttttgcaaagtactctacaaatataaacactgttgagtatgtattatctaatcttcctgtattagttcttaagtagcagtgattttaattgatagcaatataaagtctcagcttcctcatagactttgtttcagtttgtttcatttgtaaacaaaaacttaaatgcaggacctgctagctggtataaagccaagcatatacagagctcagtgtaatactaatggcttgtcttcagaaacaaaggattgtatcatattttgtgagttttggagagagtacatgaaatgtatttttcccacagaaatattgctgtgagtggtggctttgttcttaggctactctgcagatttctgtttaactcatgt

SEQ ID NO: 4795 - DNA, 1032 bp, Homo sapiens
ctctgctagaaaactactagtgatggttattactgagtatgaatttaagaactgaggttatgattggtaatacaatccaaaaagaagggtctgaacaccaaaattctttatacatatttaagtaactgtattattattatacagatgtctttacctttttgactttatagatcactgcagcattaagaaagtttccagtttaccattccataagtacaattaatccttctagtgtaaatgttcaaatactgttataattatctaggcaattaataatttacaaactgatatttttgcacgattgtagtggtgtatagtcttgacttgcagagcattttgcttgagtccttgaaatgtcgtgttcattcattatttgctgagtgcttacaatgtattaggcactgttctaaatattaagtgtactaaataaacaaaaatccttgtattctgtatcttagtgtgttaatttttggcctggtataatagcaattttttaaacttctttgtatgtttgttttgaggaaaaaaaacttcagtctatatgtaaataaatagatgctggaattcagaaatgacacatgaaaagacaaaacgtaataagtactcatctacacatttcacaaaatttaacgttatttttaagattcattttcccaccatgaaaatatagaaaccattgagataattggttcattaaaggaggtacaaatgaactcagtagttgcggacctttatctgatgtaagtgtagcatttcattgaaagcatttagcttggggaaaagttagtttgcttgactcagaaagtaagctgaatgtggaatcattcagctccttgcttccttcagttcatgggtaaaaatttagcttcaatggaacttttgtgttaaaataacacttttttacttctcaactcagacaagcaaaattttgtcagcccatggacaagttgcttaaggcatctattcggtatttacataactgctgtctcattatctttatgacccgtggggctagtagcttttatagaattg

SEQ ID NO: 4796 - DNA, 1032 bp, Homo sapiens
aatgtagtatatcacatttattgatttgtgaatgttgaaccatccttgcattccagggataatccttttaaaacactgttgaatttggtttgctagtattttgttgaagatttttgcatctatgtttaagggacattggatgtaattcgctttctttttggagtctccttgtctggctttggtgtgagagtaatgctggccacataaaataactttggaaatattctcttcttttcagtttttttgaagagtttgaggattggtattctttaaatgtttgttacaattcagcagtggagtcatcaggtctggggttttctttgatggaagatttttgactactgattcagtctccttgttcattatttcattatttgttaataattcagttttgataggttgtatctaggaatttattcatttcttctgggttattcaatttgttggtgtataattgttgattatagtagactcttatgattctttatatttctgtagtatcagttgaactgtgtcctcttccatttccaattttacttatttgaggcttctttatttttttctttagttagaccagctaaaggtttgtcagtttaatttttcagaatctaatgttcagtttcattgatcgtttctattgcctttctagtttctatttcatttagttctgttctaatctttatttactgtcactatttctgtctttatttactgtcattagtctttatgatttactgtccctctaggaataaatgaatgaagaaatgcacatatacttgttgttcttgttttctctgctttgaatatcctctctccattttacattccacaactcagtctattctttctttaagaccaagctcagatacaccttttccaggaattttttttttttacctctcatacttctatgaatttcccttcttttagcaccatatgatatttgttggtttgtttggctccttcttgtgttgtagactctgtaaaaacaaggttcatgctttaagtgtttttgtatcctaatagctaata

SEQ ID NO: 4797 - DNA, 1047 bp, Homo sapiens
gtaaaatatcagtacctttttgtatttttctctatcaagaagaggcactatcttccattatcaaaactgagttgtgaagattaaattatatgggggttagggattgaatgggtaggtagaatatctaacttatttccctttgatcatgaacttctgtaactagttccttaccacttaataaagttaataaaacagtaatttttttgcatagttacagaagagtttactttttaggagtcatgtatagttgggttgcattttgactgtatcgcagaatatctgttttacatgagtacatatttctttttctttaaaatagaaatattaccacctacctcacaggattattataaggtttatgtgaattaacacatgtacactctcagcacaatgcatggtgccttgttgatgctcagcaaatcttaatgtctgcctcattcttagagaaattacattaacaaaatacatatctgtgtaggacttttaaaaaatacagtttgttcaaggacgttaaatgtaaaatatgaaaatggtcaaccaaagaactaattatgtggacaatgtggatagtcttacttgcacaaattggctgtcttctagaacttgatatgctcatgattcttaaaaaagtgatacgtgaagatagccctgaaaggattgaaaagattctcgttgacagagtttcacaaacttctaaaagaagagtcaattggtaaaaaactaacacagatgaatcctcaaagatactactcatatggctgaaaaaatataaaaatatttattaggtacaaaagatttatgactatgactttgtgatccattataggtctagaattattcaggttatctcttagaacaacttatgcttcaaatttgagaggactctgacccaggagagcagcatataattttaaggaaagagttaaagtgaagttttatttctgataatatggcagggtaggatccataaataacctacatactacaatttaaaacgtaatatttaaagaactccttatgttgagacagtacaggagacaaagccta

SEQ ID NO: 4798 - DNA, 1076 bp, Homo sapiens
catatacaagcaaagtcagggctacttgcataaagaaataaaaataacccttcttgcatagatatatgtgtgcatgtgtatttgtgtatatgtgtgcatgtgttgtgtgtgtgtatatgtgtgcatgtgtatgtatgtgtgtatatgtttgcatatatatgtatgcacatatatacctaaaaaggagaaatgactattttgttatatgatagtttcataagggtaagaatatgctctgttaagtgagcattctttccaaaatttgtcgtaccagttttttttctaaataaaacagaattgttacacaacttaatatgtttccattttaagcattgatgaatatatatgagaaccaatatttttaagtgaacagaatatagttttctattttgtgtgaaaggaattggtacagtgaattggatgcataggagcattttatatctcctcctccttaaaaaataagagtttacatcaggagtatgatctcacttaaaattctgttcataaataatatgcattttctaaaatacatagcacttaaaagatagaaaaatgtatgaaaaattaaaacaaacttaaatatcttttaaaattatgcacatttttaggtaagtttttctttgatttgaaacattagtgttttaatctgattaccggttcatgaggcaatgatactgaattcaaacccaccatgtggtagtggaaaaaactggacagaactaggtttagatcccagctttgccacttattggctacatagtaagggcaaatgaattcacatctttgttcctctatttcttcattcataaatgggaatatgaatgcttttcttagaagactgtggtgaagattaaatgacacaatgtataacatttgcataaaattctccactcatggtataatttcaataactttatctcttctcccctcttctttatctcataatgacaaaaactattcaacaaatgactggaaaattatatatgcaaatgagacttccaaaaataaaattaaatggtaagtgatcctggaggacctgtaacaaataaccttacatagcaaaaacgaacaaaacc

SEQ ID NO: 4799 - DNA, 1045 bp, Homo sapiens
ccttaactgtgcttgtaaacatttaaaatatttttgttagtttctctcaattgagtaagagaacctggctttcccacagcaatgatccaggctttggtaatacccccctttatgtctctgtacttctgccattctaaagttgatttattgtttgttacttttagtgattttaagtgctcaatgaagttccttggctttctcatggcttttcatttccaactaaattacctagcctttcttttaatgtcttcctcccatgcttctttctcttgttactgcagatattttttttttctaaaaaaggtaaaccttgattttggctgttaaaattatttgcaatttatttctggtcctttaaattcttgatttttccatatccaagcaactttttgtgtgtaatattgtgagcactgtcacaatagcagttcccaaaccttgccgatatcataatgacctggtgaccttttaaatgaattatgtttctgagcaccatcacagatactttgattgagtcaactggaggaataaatgtagaattgtgcatggaacagattgttagatttgttcatttattcattcaacaggtatttatcaagtatctactatgtacacgcattgtgctaagaactgggtatatagtggtgaacaagcaaacatataccctgatttcatagagtttatggtgtgttaacactcatctagtattacaaatagagacaaatgttataaaagaacagggtgcagttggagagaattacagtggtatcctaatttagattaagggtgagataggtagaggctggacctgttgtagctcagtggcacgggaaaaaaaccatgtgtgtctctgtggtgcagcaaggcattatcttatgtggtagtgcataaattctcgggggctcaagtgttcttctccagcttaatagtaaaggttgcaagcctgaggtttcatttttcttatgacgtggcaggaacctgatgctgtgccagttgcactgaggatgggatttcaggtgcaccagtatgagaaagtatggaagcagtt

SEQ ID NO: 4800 - DNA, 1032 bp, Homo sapiens
tctagtgtctaatgtctgaaatagcctttgggttgagttctaagagcttgcatgccaaaaacctccctggttcaaagagtaagtcagtgatattcaaacaagaagttatctgaaacttcctgaaccttaaggtcacaatgataggctcagcttctatcataggaacggagtaatataatataattatttttttaaagaatagccatcagaaaacttggtaaactaaactgtttcctagggtaaacagttttcttccatttccatccttgaggttaaaaaatcatactgatctacatgtaaaagggaaaaaaattacagatcatcccttcaatctcatagttttgattaaatactttttatgaatattccagttcaaaaatagtgtcatgaagatttgataggaaaagatatatctttgctaactctttggcacgattggaactttctgaatcctgaggtaatcctacctccataaagtatttctgtttttgcaactggtagctctggtgtgggttggactgtggagagccgtaatgccatcttgtgaccatggatggatatcgcatcttggtccaccaataaagccttgctactttgttgattcattcatccattcacttgttcattaaacacttagtgaccatctattaatatttgccaagctgtgagtgtgtaatgtaatgaataagatttagtttatgccattgcaagattcacagatagcaagaaatacacacatacttacatgtgcacacatgcacacacacagcacagtgtaatactgcaatactataagtattacagaataggcatacaaaggaccatggatggcaacacataagaagaagtggcctacagtccctggtagcttagggaaggtgcctgggaggaaatgacaccatctgcattttcccctaatcagccaatgtaagagtactttaatgtggcaagtctatgatgttgcaagacagtcttaacctatctaagtccataaacacatggcaggtagtgtgactgtaggactagtaaaat

SEQ ID NO: 4801 - DNA, 1064 bp, Homo sapiens
ttgaagcaactagataaaccacaagagtcctatctggtttatcacaggatttactatttcgggaaaacaagcagtttagggatagttctgaactaggttccaggcaggaccagaaaaacaaaaacaaaaacaaaaacaaaaaaaccaaggttaattataatttattgctctgaaacatattttatcactatgttccatctgttgcacaaaaatcagttttctaatatatggcctgggcagttaatggagaatatttgcatgaatatgatgacagaaagatagtatgaacatagactaggtgtgaggactaagagaaataatgtggtggtttggtgtctacaagactgaggagaaatgtaaaatagagactgacaaagaacaaagaatgattgcttcaaaagtaaaatagaaaccaaaattctgtaatacaaggcaatgatagaaaaaggatgttctctaaggttatctttagcaataccctttgtcaagatagttgaagacaaagtctgaagacaaagcctacttttaggttgtagatgagaccaataaatacttctgtttctcaaactggccagtgccttatgtagagttggtgattaatctttatgattggattgttgaataagtacatgaataaaagaatttgatcagtatgtcccccttaaattgaaaatatctgttgatatgactctgaaggtatttttaatttgaaagaaagcagctaatgtagtagtccaaagtaagctttttgtgtgtgatgaaatcatcagatatgtacatcggataactttgcaatgttaacagtgtttgcttctattgtgtttggttagatagaagtagttgcatatattcaaatatatatttgtacatacatctgtatctatatccatacctacttacaaaatgcatgaaaaaatcttcaaaagagcagataagttattcagtataatgcttttcatcatattatatctcagtatgttaaagttttggcaacaggcattggacacaggacctttaatattgtactgtacttagtaaacacttgttaaatatatatgaattta

SEQ ID NO: 4802 - DNA, 1049 bp, Homo sapiens
agtttttaaacaattgtagatgtgtctagaatggtattgggtggggtgaagggtcactttttaaaaatttaaatgatcttccttagataatctaatgaacagaaagggttgagaactgctatgtagatatataggaaataatttgtgaacaatgggaaatagaatttcagtaaaagtttttgaatttgttttaaattatatgtaggggcgatccatttttttttttcacagctcttcaacaagagagaaaagagttaaattatcttctgagatatttagttggacattgggaagaactttcaactattagtttacactttaggagggaagctgggagatttggagcagtccctgtatatgtgtagaatataaaaggatgtgtctttttttagtggaacataaaggagcctgccatgtagggagaggaaacaaggtctcttgtgatccttcttaccgctgatctaagatatatggcaattttgtgtaatgtcacatgacaaattatctttgtgaacttgtgtttgctcttgaattctgcttagtagaatccagtccaattggcctcaaaatcagatcactgttttctattagaaatacatagcatttttaatataattcccagtaacttgataattatatgttttctttttctttttctttttttttttttgagaaggagtctcactctgtctcccaggctggagtgcagtggcgcgatcttggctcactgcaagctccgcctcccgggttcacgccattttcctgcctcagcctcccaagtagctgggactacaggtgcctgccaccacgcctggctcattgtttgtatttttagtagagatggggtttcactgtgttagccaggatggtctcaatctcctgacctcatggtccaccttccttgccctcccaaagtgctgggattacaggtgtgagccactgcgcccggcgctaattatgttttaagaaaaatgggtgaaaattactgtaggacttaattattagtaagcatgttcagactaatagttttctgccccttcaaggaaatg

SEQ ID NO: 4803 - DNA, 1026 bp, Homo sapiens
ttcttaaggtcaaggaaacaggtttaataatgtccatgttcattttcttttaaaatgttaaccttagaatctgcaaaattaggattaattttcctgcatttagtgtggcacatttgaaaaaaattagataaaaactattttcagtctaaaagccaccgtaacagattaaaaaattcaagtagccctttactttaaacatgtgattaaccgtaaagaattttttcttttccaatttaagttcccatgtcataatacagagataaaaaataatggccccctgacacaccttatttggctcacatggtattcatgaaatgtttaattatttttcccaacttaaaaattaggtgattttgttttcataaatattctggattttcttgaaaaatcaaaagtatctgtcaacactgggcccacattccacatggatggagctgaataatggttgcttttttgggaaggggaatgggatctattttttactacatgtccttttatagtctgtcttttgtaggctcactctactcatttttattacctatatatcctaaaggcatttaaccttgaaatctcccctttgtcttttctacctgtaaaaagggactatatttgtgtaatatataaggtataaataattataccttgactttttctcaggttttaaagaaaatcttaattagaaaacaagttttataccatacataaaaacattattttaatctgtttttaaaattctttgtgatatacctctggctctcaaagtgtagtctaggggtctgtggcggttccctggagtacttcaggagttctgtgaggtcagaacttttttcgtagtagtgaggcattattagcctttttcgttcccatttctcacaagtatatggtagatttttgcataggcttcaggacatgatgaagttataactctgatgactaatgaagtgtgtacttgaagatttttgtgctttactaatttttaagttttgatttttaatacataaatgtcatttactataactcacctaa

SEQ ID NO: 4804 - DNA, 1045 bp, Homo sapiens
aagaatagatgcttgggtgtgtactcagcagtcgcaaataaaaaggaagctgttttcagaatgagtggtataacaaaaatctgaatagcagtctaagagaaaggcaagcaagatcagtagagccttggggctaatgaatagacattccagtacaacaggaatgcagtatgggcatttgtaaggaaaggttacagtaacaaatttatcacagattatctcagggatgatttttatgacatacatagaatttattattttaatttaaaacataagaggctgtgcatggtggctcacacctctaatcctagtgctttgtgaggccaaggtgtgaggattgcttcaggccaggaattcaagaccagtttggacaacatagtgagaccctgtctgtacaaattattattattttttaattagctgggtgtggtggcacacgcctgtagtcttagctatttgggaggctgaggcagcctcaactgaggctgcagtaagctatgattgtgcctctgtactccaacctgagcaagagagcaagatcctgtctcgatagatagatagatagagagacagacagacaggtagaaagaattgggcaaaccatttaatcccaagtctcaaaatgagtagatcttatgttatctctgactcaaaatttttgctattcaagttcaataaaagttggaatctgcagcttaaaattgagcttgaaatcaaaagagtgggttgttttgcagtattccaacctatattttctttttttttttttaagtccaatatttatttaaaaatctaatctgccagtttagcgttttccaccaactcgagaactgaaactttcacgggcttcacaatcatttacttaggtgctgcctttgtaggtgccttaacagcagccattgcagtgtttttagatactttgcttagccttttttgcttccttagcagccctgataccttgttctcgttgagcctttctaacttcaggtttctgattcctcttggccattatatcagcaggagaggcacctgtaatagccccctgcaa

SEQ ID NO: 4805 - DNA, 1043 bp, Homo sapiens
taacataaagcattttatgaactgagtttttgaaagaaaaaattactaaagaaattagattgctatgttagatggtatcgaccaagacttgaaatagtgccattgtattatatttaacatttctccttgtaatgtaaatttgtgtactaatttacggattgaaagggattttacatatattattttaaattaattttgattttctcagcaactctctatgttaggttcagtagctatcctcattttattgagcaaattaaagctcagtgaagttcttccatacttaagattccaaagttataaagtggaagagctgagactgcaaatcgaatctctaaatgaagtttaatgttctttctgcctttctgcataccataggtgtgggttgccacgtttattttagttcttttttttctttttgagtgtatgtagtttatgcccattttattcattctgtgtataggattatgaaactgaaattttaaattctttacctggtgagattgtatagataccaatgttttaagttttgtgcctgttaaatatttgaaactacttttagaagttttattaaatagtaaatctttggtaatggcataaaaggtatgtttttgtgttactttataattactttaaattgtcaatttgataattaggttcaaacgattgtgcagaaatgtgttaaagattgtgtattgacattctcacattaggcttgttctactttgaagattaatattctaacattagaattttaaaagtatatttgtagtttaaaactgctttaatgattatttgctctataaatatgcataaataaggatggcatcattgtaatcgctttaaacccttttttgggtaatacatccttagttgggttgagttggaagtgatgatctttggaatatgcacatgaattaattggttactctatcttgggatatgtcagaagtactactgcttcagtgagaggactctggcaggagatgttattttttaccagccagcggtgtttatcttgatttgaaggaagcaagctttat

SEQ ID NO: 4806 - DNA, 1025 bp, Homo sapiens
aaatagcgagacctcatctcaacaaaccataaaagaattagctgggtgtggtggtgtggacctgtagtcccagctactctggaggcttaggggaaggattccttgagcccaggagctccaggctgcagtgggccctgagggtgctactgtattccagcctgggcgacagagcaagatcctgtctcaaaaacaaacaaacaaacaaacaacaacaaaaaaacccaaaaaacttcactataaattgaaattattaagtaagagaatccccataattatttttgtttagacaatcagttccttttttaaaaagttaagaaatgaaaaaaaaaatcttatgtacctactatttaccatttcttgcattcttcctttatgtaaatttgaagtatgatctggcctcattttcttttagcctggagtattaattgtacatcaagtctgctggtgacacattctctcagattttatctgaaaatgtctttattatatcttaatttttgaaggataatttacttgggaatagatttctagtttttttctttcagcatttttaataatgttctgttgtcttctggcttgcatagtttttgatgatacctaagcagaagtttttaatcattatctatgtgatatctttttttttcctttgtctgcttttaaggttttccctttttattgtggttttcaaaaatttggttgttatgtgctaggtttagttttctttgtatttatcctgactgggactttttgagcttcttgggtctataaatttatatatatgtacatacatattcagaaaagttttgaacattattttattgaagctgtttttctgtttatcctcctttattctttttcccttggggacacagttcatgtgtgttagactgatagtgtttcatgagtcacagggactctgttttatttttctcagtattttttgtttctgtgtctcggtttgtacagtttcaattattctgtacttaggttctctaatcttttattctacagtatccaatctgctg

SEQ ID NO: 4807 - DNA, 1044 bp, Homo sapiens
atgtatatgagtgtaaatgcctttatgttttatcaaaaaactccaggcccattgcaaaagattcaaatagaagaagaaaataacatgaagagactaaaattctatcacccagagaatataatgggtaatattttgttgaacaatctgttacacatctctatatgagtatatttgcatgaatatgcattttccgtaaactggttcatctgttcatggtatcctattatctaaccattaccaattgataatttgttatgaacatcttctcatgtctgaaaatagatttactgtatcagtttttttttttttttttttttttttttttgagacagagtctcgcattgttgcccaggctagagtgcggcgtagcacgatcttggcttactgcagcctttgcctcctgggttcaagtggttctcattcctcagccacctgagtaagtgggattacaggtgtgcaccaccacatctggctgatttttcaccatgttgcccaggctggaactcctggcctcaagtgatctgcctgcctcggcctgacaaagtgttgggattacaggtgtgagccactgtgcctggcctactttatcagttttaatagttacctggaattttattatatgggccgactgtgtatgtatctcatttatacttgtattattatctacttcaaataagttcttgagtatcattgttggacttttgatatgtattggcagattgcctttccgaaaagatatatagtcttatcaatagttagagagcctctgtgtaccacagttctccacaatactgggtattaatcctctttttaaaaatattaacaatgtattttatttaattccatatatccaaaacataattttaatagtcaatattgaaatattattaaaataatttacaggttttttttagtcttttaagtcctatatgtattttaaaaatagaatttattttatttattttattttattttattgtttttttgatttagaatcttgctctgttgccaggctggagtgcagtggcacgatctcggctcact

SEQ ID NO: 4808 - DNA, 1052 bp, Homo sapiens
attttcttaagattatcatcaaattaattataagttatttgaaattaacttacatgtttatacaggaaacatggttcaaatgaaagccaaataagttcaaatgtgttttaatacacgggaacatcatatgtcctcaaggtctatgcattaaaattataggtgctcttaaacttgcatggaagtggttcagaaaggattctttttttttcttcttcaagattacagtgtattttagatatgatatttggaagaggaagtaatataatatttagaaaatatttttgaaggtcttcatcatttttactcatattaaaagagcaatttctgtttaataattataagcagttaatgaagttaatttttttggtttttagaaaataatgtctttaaaatttttttgttcttattacttcaagacttgagaactaagttttggagtcttagttttactatgaaatgtgtgattttgttgatgaatacctgcagagtaatcactgacaataaggagcagcacaatttcatcaagattatgtgttggttctttcactgtgtacaggtttagacatgttagagaagaaataataagctaagaactgttacgtacaaaaatactagcttccaacttttaatgattactgtagtgtttgttagggatgttgactgtataccctaaacgtggaaatattgaaatggaatgctagttgaaagacaaaattttaatttgtaaatatttgtctcattttagcttaatagttgaagacataaatgagcccgcagtataatgtttaagatgtcattgttctaaattttgcctttgatagagctgatatagctgtttaaaattcattataaagcccattactaaacccattgactaataatttactcttcttgggggattataaaatctgtgggtaatttttttttttttttttttgagacaaggtctcactctgttgcccaggctgaagtgcagtgacgtgatcttggctcactgcaacttccacctcttgggcccagcatgatcttcccacctcagcctcccgagtagc

SEQ ID NO: 4809 - DNA, 1024 bp, Homo sapiens
aattacttggaagggtttcagctgtcagttccgtacaatttcctgaaaagatgagagcataatactttaatgtcatgattttcatcatttccctccacttttgtcatattgtgtattgtgcatatgtgtggtaggcggcagggttagcagacaagaataaggaattcttttcttgcctattttcttttaatgtgttcttgcatggtatgtctttctagatacttaaagtatatgtctttacttgctgtgtgcttagaccctggatagcatgatgattaagcataggggtttcgtggagactgattggccatcctaaagccttggaggaaagtctgctgacaattttagcttcagaaactatccagcaattacctactcttaagtaatttggagctgcacaccttaaaatagagaagcccaacccagttgtggtgaaatgggcatggctaattttagtatgaagtcacatattgttggctccaccagccctactactgtactcctggtctatctgaactgcagctgtggtcaggtttgtctattggcaaggagtgatcctaggttgtagggagccttttctagttgatgaagttatcttttattgtcctgtatgtagtaaagtttgtccatttgcattattttgagccccaaccgggtcctctttgaagaatggatatattaggtagaatggatactcaaatggatacattatgttttcagctccaatttaattctattctatagtggtttatgatataagttaatctaaaaaatatctaccacaacattaccgaaggtgcgtgaagtaacgctcatctgatattgcttgtaaaggcgtggcacggtggctcacgcctataatcccagcacttttggaggccgaggtggacagatcatctgaggccaggagttcgagaccagcctgaccaatatggtgaaaccccatctctactaaaaataccaaaattatgcaggcatggtggcctatgcctgtgatcccagctactggggaggctgaggcacg

SEQ ID NO: 4810 - DNA, 1096 bp, Homo sapiens
atatatgtatatatgccaaaacttatgaaattgaacactttaaatatatgcagtttatattacatcaatttgcctcaataaaatcgattctagaaagagagttatatggaattcaggctgtagctagacagaaagattttgtagctaccatcctagtggtgatagcttaggagttcctgcaaataaattcaaggtgccacaattcttctaatatatgcagaatttgagtgccctaggttatttatagtcaactgctggggattgaatcccagctatattaagttggaaagtgtggctctttggcaagttttcttatccagcttcatggagttgttgtgaggatttaatagatcaaatagtaagtgctcaataaatgttacgagcacatgttataaaatggtttattattatgtcaatatttgaaggaggagtttcattgctttggtcagctacttaaagtctatgactcagaaagtcagcaacttctctgataattgaagctatggaagagaatgagtgactcaaagacagagtgaaaggtagaggaaataaatgagaacagaaccttgggggaatgtctgagcttaagaggaaagagatggaagaggaactagataagaaaactgagaagtgatacaaaggtgggaggaaagtaggaaatggtggggtcacagagtataagaggaaatattttcaagaaaagaaaaattctcaaatgctgcagccatgaaaaagaagctcaaacataagaaaaggccattggatttggcaataatgaattcatgttgtcctttgagacagcaatttcatcagagggatggggaagcaagacacatggtatggggctatgaattagtggttaggcagtgtagcaattaacgcacaccacttttcaagaaacttagagatgcatagaagaagaacaataagattattagctccaggcagggctaagagggtatttccagtgttagggagtacctgagcatgttttcaggcctaggtgaggggacagaaaaacttaaaaaagactaagtgaactctttcaaagccaagttttgaaagaaataaaagaggataggaaataaaacacaga

SEQ ID NO: 4811 - DNA, 1053 bp, Homo sapiens
aggattattcagaaatatattgaaccactgtatatgagaatggtcttattatctagattttattcagaaaaccaaatctcatagaggttatacaatgaagctagtgactgggaggtcatgggttcattgactcagttctattgctgtttctttagttattatattatgctgcccaataaactacacctttacattgctgcaattcatatgcatagaaaaactttatgcatacagacatagtgtgcatgtatacactctactgaacaaaaacagtttaaaccagcatgtggtaagaagtgatcaatttgaggaaagtaaaataagcaaaatatatcaataatgatcaataatatcaataatcaatgggagattattaaaatattaatgttgagttacaatgattctttttaactttcttattacattaaactctgaatgtctgagtttgtatgcagtttttgaacaaacaacacacaaacatttatatctgtaaacacttataaaaacaaaccaaaaagttgagtagactgtaaatctctaaatctttccagagcttaaagctgctttaaaaatttttaatgttggccagatgcagtggcttacgcctgtaatcccagcactttggaagcctgaggtgggcggattcatgaggtcaggagatcaagaccatcttggccaacatgatgaaaacccgtctccactaaaaatacaaaaaaattagccaggcatggtagcgcgtgcctgtagtctcagctactcgggagactgaggcaggagaatttcttgaaccccagaggcggaggctgcagtgagccaagatcgtgccattgcactccagtctgggaacaaagcgaaactctgcctcaaaaataaaaagaacaaaaaagtttcagtgttcagtatgtgtcaattggttggatcttactatggaaaagatttttaaatcactcgaagtctgttttgtaacagaggcacaatgtgggtttcttatatgtaaatacagttaatatgtatgttaagaataaacctattaatgtttttcaattactaata

SEQ ID NO: 4812 - DNA, 1087 bp, Homo sapiens
gcatctattgagataattatgtggtttttgtctttgcttctgtttatatgctggattacgtttattgatttgtgtttgttgaaccagccttcaaaaggctaatatccagaatctacaaagaactcaaacaaatttacaagaaaaaaacaaccccatcaaaaagtgggcaaaggatatgaacagacatttctcaaaagaagacatttatgcagccaagagacacatgaaaaaatgctcatcatcactggccatcagagaaatgcaaatcaaaaccacaatgagataccatctcacaccagttagaatggcgatcattaaaaagtcaggaaacaacaggtgctggagaggatgtggagaaataggaacacttttacactgttggtgggactgtaaactggtgcaaccattgtggaagacagtgtggccattcctcagggatctagaactagaaataccatttgacccagccatcccattactgggtatatacccaaaggattataaatcatgctgctataaagacacatgcacacatatgtctattgtggcactcttcacaatagcaaagacttggaaccaacccaaatatccaacaatgatagactgggttgagaaaatgtcgcacatatacactatggaatactatgcagccataaaaaatgatgagttcatgtcctttgtagggacatggatgaagctggaaaccatcattgtcagcaaactgtcgcaaggacaaaaaaccaaacaccgcatgttctcactcataggtgggaattgaacaatgagagctcttggacacaggaaggggaacatcacacaccgggacctgttgtgggatgggaggtggggagggatagcattaggacatatacctaatgtaaatgacaagttaatcggtgcagcacaccaacatggcacatgtatacatgtgtaacaaacctgcacgttgtgcacatgcaccctagaactggaagtataagaaaaatatattaaaaaaaagaaaaaagaaaaaaaaaagaaaattactaaatttcccataaaagtagagcctttagtttccatgtttgcatctaaaactaaaaaaaaa

SEQ ID NO: 4813 - DNA, 1081 bp, Homo sapiens
cctgcctctttctatctcctgtcaaccaccatattactttctgtctttataaatttgactactctagttgtttcatgtaagtgaaaccatgtaatatttgtctttttgtgactgacttatttcacttagcataatgtcttcaagtttcatccatattgtagcagaatattcttcattaaggctgagtagtattccattatctgtgtgtgtgtgtgtatatatatatataatatagatataaaatcagaagatattatatatataatcataagatttttatatatgtatatcacatttcatttatccattcaaccattgatgaacagagagcagtgggttgctccaccttctggtaattgtaaatactgtttatttgaacagacgtatacaaatatcttttttagtctttgctttcaattatttttagctatgaagatttttaagaactcccattcgttatcatcctgggcagttgccatcctaggtgttaaaagaaaactctgagactggccgggcatggtggcttatgcctgtaatcccagcaatttgagaggctgaggcaggtgaatcgcttgagctccagcctgggcaatatgacaaaaccctgtctctacaataaatacaaaatacaccacagggcatggtggcatgtgcctggagtcccagctactcagaaggctgaggtgggagaatcacttgaacctatgagacagaggttgcagtgatccgagatcgcaccactgctctccagcctggggaatagagctggaccttgtcacaaaacaaaacaccctgagaatactttctttagattggcagaaggaaggatagagacaatacacgttttatatattttcttttacaatatttttgttacttgaatgcatttaattttctaaaaatgaacaagtgttattgatacagtatccaaattgctatattctaatttcaataatatgaaaccattagaattttaagtatagacacaaagttactaatttgaatagcagattttataaacactttttttcatgctactccacttaataatgggatacatttgcatggaatactaatcaaa

SEQ ID NO: 4814 - DNA, 1173 bp, Homo sapiens
actgcattttagtgtcaccaaatgcctaaaattattttgtgtttttgagctgataaatctatatattttttattcagatttctcttattctttaaaaataatcaaagggatgactgctggattgatttactgcaaatttatctttgaaatggctacaaataattgttattctcattttaagagcattagtgtcttttgttcatcaaattaagaatgaaatggattttagtactgccctacaattactttggtaatcaaaatgattgccaatgatctccaagaaactaaactgtcttgctacagaacagattgaggattgttttgattcacaggaaagctctgcaaaaatatgattaattatgattttgatttagtttataattttattttttatttccgttttccctcttccctacattcttttaaaatatggcaaagttttccattgtatatttttatttgacctaatttccaattaaatttaatatttctccttgcttaattatttcttctggaattttacactcatagtgattaaatctcaatctcctctctcttattctctttctttttttattctctttttctatcacacacaatttaatagttcatcttaagtgatttctgatgccttgtattcagtgactctaatttctaatatcctcttcttgttaaaaatatttttgcaatgtatttataatatctttctattacactgattctgtgttatgtttaagcgtttgatcacttttattcaaatgttcctatgataaccagaagatactgtgcattctcatattattttaatgctccaatgtatactgcaggcttaaataaccataaaagtaatgtttgtttagaaagtgactggtttgtttaccttcactgctgcagaaaatctcactaggcaatttgcctggggctgatacttgtaaccattagcaattatggattctagaaagacgttgataggaagtttttaaaaagctatttcaaaatcggacacaaaaaatacaacacattttctaggattgtttttcttgccattcatgctgcttgcctttcttatcttaactaaaattcacttttcatcagcctgcaatgagtcacaaaaaatgctgtatcaatcttgggttgttcctggacattcatagtcagataaattattttcag

SEQ ID NO: 4815 - DNA, 1061 bp, Homo sapiens
taatagaatcttgggggaaaaaacagtaaaattacatcggtgttataatttcagatggttgaagctaagatgttctggacagatagttttaaataaggaatagaactctgagctactcccatttttctccttttccttgttactctggaaaaattggtcttgatcctgcaagattgtagataatcaaaaatattacataaaataagaaacactttctacttatctttgaaataagttttggtacttttatttgtgttgggtcatggttgagatttactgctctgtttccatgtatcctgattctgtaggcgaacagagcataaaaaaatagggccagttagggaagctttgcaatcgtgcaaaatgtctgccccttgctgtatcctctttcctgttctctaagactgcgacaatcagttaggaacagcaatccttgagaaacccaggcctcttttaactctccagggacactacttctatctgttttcatgctccttctaaaggatcctccttcagactatagcacacttcctgaacttccacccagtttgctacattcccagtcatttctgcttagttaggactttgcctcaccctcaatggtgctctttatgtttcacacgcagagctgtcttcttaaatttttgttttaaaatgttatatttttaactctaagggaaacagggttaacagggtagacatgacatcaaaaggataaatgtagggaccgacgcagatgtctttggcattctgaaaatctgcagtgtagtagacagaataatacgattacactgaatttgattgggcagctctcacttctggttcatgaagtgttcccacttcagagtggaaggcttctctcaactaatgcacttgaagtagatgctcgactcattcttgtggtttatacttgattcggtatatttcctgtagggaaattactgttttaacttaaaggaactaacttctccttcagcaaatgttggactagaaaaataaaagacaagtatgaaaagaggagactatgccaataagaatatcagggtgtaaactgtatcaaa

SEQ ID NO: 4816 - DNA, 1043 bp, Homo sapiens
ggggtccaaaatcaagaagttggcagggtcatgctcccttgggatggtctagaggagaatccttccttgtgtcttccagctacctgtggctcctattgcttctttgctcatggcagcatcactctagcctctgcctccacagtcaaatgactgctttccctgtgtgtctatgtccaaatctccctttccttataaagataccagtcattggtttaaggcccaccgtaatccagtgtgaccttattttagcttgatgatatctacaaagactattttcaattaaggtcacattattctgaggttctaggcagatgtgaatttggggagacgatgttcaactcagtacgtgagatattgccaagttctttctctgcctcgagcctttgcacatgcaaaagtagctaacattcattaattctgtcagttctcagattaaatatcacctcctcagagagatcttctatgtctaatctaaggtaacctcattattctctatagtagtacctcttcagttccattctttgcgcttatcacgtgtaattgtttgtatatttgtttactttctacttcagaagaatacaatctccctgagattgcagagcccatgtctattttatgtactgttttagcctcagcgtttggtattattcttgacacacagtagaatctcaataaaaagtgtcgtagaaatgaaatggataaatgaataaatgaatgatatagctgactatacacaatgtttttttgaatcatactcttataaacattttgcattttggtctaataaatgaatactttgctctaataaatgaatactttgctgagtcaatatctgtataaaatactgatggccttctatgtggggtgatatgtaggagaaaatatgagaacaaactagattcaatacttgtctcccagaagcttataatttaagatataagatacagattttatgagaaaacaataatcatccttaggattttttaccccaatggtgacattaattcagcagcttctacatgttcaaaaatttgcgacatttt

SEQ ID NO: 4817 - DNA, 1093 bp, Homo sapiens
tgttgtctataacaacaaccaaaaagatctgcagttggcaagctgggcatgcaggaggagagccaatggtaaaagtttcagtcagagtctgaattaccaggagagctgaaagctggcagactcgagatccaagaagagccaatgtttctaactctgcaagccagaaaaggcgaatttgtaactcaagcaagtcaggcaggaggaattctttcttattcacctttttcttctattagggccttcaattgaatggataaggctcatcagtaattaggaaggcaatctgctgtactcagtctaccaatccaaatgttaatctcatccccctcagagacacacccagaataatgttagatcaaatgtgtgggcaccatgtggtccagtcaagttaacacataagaggcagaccaatgtggattggaatagtgaacctgaccttagccttaaagagtaggcaatattagaataggagtggaggtacttagagagaagaggaggaattgagtcaaggtagaagagatcaacaacagcagcaaaactctagaggctaaagcagagggtttgagatgagcagtgttggcacacagcatgagatagggtagtatcacccattagagagtgaaattttagagtagtgagctgaaatgcgatgtaatgatgtgaaaagcaatgggatttaatgttaggagttttaaaaatgactcaaaatgagtgatgattttgaagatcaatctggtggtagtatgaatttgagcggattgagaaatggaaactggttaaagacaatattaacagtgattcagacaagacatgatatcttagaaggaaagaaagtggttaagaaagaggaaaaatccaagaaaaatgactgttgctaggtagctgatggaataaaggagatgaagaaaagaaaggggccaaaaatcccaatcaaaatcatttatgtatttcttactgtgtactcgggtagtgctaaaactttaacctgaattagttatcacaataatccttgtcaagtatcccacatctatatagagcaaaatctatagagcatggcacacagcccatcactctaaaatttcactttcaaatg

SEQ ID NO: 4818 - DNA, 1031 bp, Homo sapiens
tttcaaaaaaaaaaaaaaaatctcagccatgtgccatggctcacgcctgtaatcctagcactttgggaggctgaggcgggtggatctcttgagcccaggagttcgagactagcctgggcaacctggcaaaaccccgtctccacaaaaaatacaaaaattaaccaggtgtggtggtgcgcgcctgtggtcccagctactccagaggcagaggtgggaggatcgcttgagcctgggaggcagaggttgcagttagctgagattgcgtcactgcactccagcctgggggacaaagtgagaccctgtcttgaaagaaaaagaaatctccctgacttcctgaaagacagatcttattttgtattcattatctgagtaacatctttatgtggcatacaagtgtggcagagtgaatgagtaacaattactgcttcacatcagtaggaactactggtaaaggcggaggagggaggagccctgttccattgttaaaagtggtttatatgtaagttgaaactctagtccattgattggaatgctgggttttggagctgcataaacagagccccctgattgttgtatgccctataatatgggaatgaatgtactaacatataaaacataattcctgaggaacctggcattgcttatgaacgttccacaggctgcttgtgggaattgtatattatcatttgttgaacacctacttcgtcagagtgtttttgggctttgcctcatttgattctgacaaattgaaaggcagggtaatattaatctcattttacagatgaacaaattgggttaggaaaattccaccagagaagcactggaaataatagagctagaatgcaaatgtaggattggtttgagatccctgaggcttcccactgtgttcaagatccagcctggcaccaagtttcagcatcatggtctcgaaagagctcaagcccaggggtcccgcagtttaagttctagtcctgactccaggactttggagctacatgattctgaagaaactgctaaacctttcttggcca

SEQ ID NO: 4819 - DNA, 1056 bp, Homo sapiens
actgctggcaagtagtagactgttagtgaatttattttctgtccttttcattaccagctacaaaacccttgttatgtatataagatcacacttggtgcaggcatatgccatttataacattctgccaatgtgccaaattgtattgcagtcctttatggcatacctgaaaatatatctgccgtcattttgttccatgataataaatggacaataaagataactaaacattatcttactgctcttaaggtataatgtgctatgtgtcctccatggagtcagtccatctgaaagttttagcaaaaggctgttttgtctagttagctaactagcatacttgagtttacagagcctaactatgtgccaataagcatttcaaggttttccctaaatatggaaagtaagaattaatcacaggtgaggggaaaaggtatcagtagtttggttcagttaaaaaaaagcttatgtgcccagcttcctgtgcatgattcatcaggtaagtttgtgctctggattttgcaagttacagtcattgcatgatataatcaagactgagcttttccatctttcttcctttagccaatattagtttatgggatttttagatgtggagcatggccatttagtttgttttagtatctgatagctaggttcattcattcattctaataattatttacttaatgctaggtatgctgttggtgttaagccatagcaacctgaaaaagattagattgcctcatggacttttgaaaggcccaacttgttggatcccagttgttcataacattatattttctcgatgccaaagacctctaaacacactaaactcaagtcgggtgcagtggcttatgcctgtaatcccaacactttgggaggctgaggagggtgaatcacttgaggccaggaatttgagaccagcccggccaacgtggtgaaaccccaacactattaaaaacacaaaagttagccggcatggtggcgcatggcacgcctgtaatcctagctacacaggaggctgaggcaggagaatggcttgaacccaggaggtagaggttg

SEQ ID NO: 4820 - DNA, 1020 bp, Homo sapiens
ttaaaaaaaaacctttatttatgatcaagtaataaagataatattctacttgtgggatcttacattacggaaatagtttgacgtttttgacctcaagagtatgtataatttgaagagatactttgtaactatgcttgggtgatattgagcagttcctaaagaataattcatttaaaaaaaaagaagaaaaaaaaagaagaattcatttaaataacctgatcctttcatttgcccttttcgaatttacagatactacttgtacatttggcataactagttgaaattggccattcgtaccatgaataaatctgatagtttccttgttaggaagagattgtaagtaaatacagtcattgcagtcagaacagtattagtgaaccttgtgtggtgttttcaagctctttaaaatggtacaatgtagcacatttgctttcatttctttttttatttttggcatttgaccttgtattctttctgaagctctatatgtgtttttattagtcaataatctggcaagtagcactttgcctgtgcagtttgctggagtgtagatgtacatatgaggatttcccgggaggtgcacttctttgaagaacttcctaaagtacctgtatagtagttttcatcttaatattcagtatttaatcttcagtttgtgctttgtaaactcatgacttaattggtcagaaactttttagtgtctttataaaattttgtatacatatttatactaaacacattgtgatactgtatttgaatgaatggtgaaaaaatatttgctattggaattatgtgcactgacaagaaatgttataaagagaatgcctttaataaatcttttcagcattagaattgcttcgtggtctatgcttttttattttactgattttctttgtttattttactcttcattcagaatagctctgccttgataatagctaggctagtgttgcaaatcaagttaataattaggaaacactaaacaaatattaatattgccataacaactattttttttta

SEQ ID NO: 4821 - DNA, 1034 bp, Homo sapiens
actcctgtaatcccagcactttgggaggctgaggggggcagactgccagagctcaggagttcaagaccagcctggacaacacagtgaaaccctgtctctactaaaatacaaaaaattagccgggtgtggcggattgcacctatagtcccagcttctccagaggctgaggcaggagaattgcttgaacctgggaggcaggttgcagtgagccgagatcaagccactgtactccagcctgggcgacagagtgagacttcgtctccaaaaaaaaaaaaaagaaaagaagcggaacattatcactagtagaaattaaattagttatcagatttaacctctttattttaatgaagaattgtataaaactaaagataaaatatttgttctgagatttagttggaccatgtaagttgaacaccagatccctaatagtctataagccaaaacatagtaaaactttttaaaattatatttttattatagaatatgtatttcagtggattatttagcaaattcataccttgtagataatctgtgaaatagaaagtttcacaattatataatcttttttaaaaactgctattcaaatttaaaatttttaattttgcaatggaccttggagcacaataaacaaaaatctaaagaagacggctgggcgtgttggctcacacctgtaatcacagcactttgggaggtcaaggcaggtggatcactaggtcaagagatggagaccatcctggccaacatggtgaaaccctgtctctactaaaaatacaaaaattagcttggcatggtggcgcgtgcctgtagtcccagctactcaggaggctgatgcaggagaatcgcttgaacccgggggcagaggtttcagtgagccgagatttcaccaccgcactccagcctggcgacagagcaagactccatttcaagaaaaaaaaggaagtcagctgtcttcttcacttgcccatgtttgtgcagtttactattggcaacatcaagaaacttaaacaaaacttgacatttgcttctatgatttc

SEQ ID NO: 4822 - DNA, 1033 bp, Homo sapiens
gggcagagttctctattggctctccagattttagagggatagtaatttgaaggtaaagccaggaagacatagataagtgtagtggaggcaaaggtctttggaatgatttcaaaggactaggaggctcagattttgcgtggaatgactatgtcattgaataacatagtgtaatgaatgcttaagagcctggttggccaggcatggtggctcacgcctgtaatcccagcactttgggaggccaaggcaggcggatcacctgaggtcaggagtttgagaccagcctggccaacatggtgaatccctgtctctactaagaatacaaaaattagccaggtgtggtggtgggcgcctgtaatcctagctattcgggaggctgaggtaggagaatcgcttgaaccctggaggcggacattgcactgagctgagatcatgccactgtactccagcctgggcgacagagcaagactctgtctcaaaaaaaagaaaaaaaaaaagagcatggactttggagatacattatttgaatttgaatctcagcttcatcactgcagtagaaatgtgatcttgaacaatttacttaatgtctttctgtgtttcagaacagaaaatagagattatattgacaatgtctttctcataggtttgttgtgagcattaaatgagttgatctatacaaaaggttttgaagagtgcctggcacatagtgagcccaactaaatgtggttatatcaactttggaattagccaggatggtagagaataatagtatgtggatgggggtaatagaaggtggtatagcgagcatgatggcaggagcctcagaggagaagaaaaaagtaggacctctccagtgtggccccagctaccttttccaatttgtttcccacactacattttcatttctaagtcctcctggagcctctataacataaaatactattttacataaaataagcattattacgtgtttattgaattctgacagcccccatccctgttcatagcatttgtcaatgaccttataattacttgg

SEQ ID NO: 4823 - DNA, 1062 bp, Homo sapiens
ctagaggaaggaggagagatctttagtagccaagagagacttatgattgaaacttacagtcaactgagtttgttaaaattagatatttgtattttatgccagctttatttagattggtacccccccaaatttgtataataaagatgtagatttggatgaagagtataggtagattatagtaggtgggatgggaaaaggtatagttcaagagaaaaaaaaaagaggaaaaaatcttgtaaaagtaggataggttttctggaggaatctgggattttccctttggtggcactggagcctcaggaaatatattttggaaacccactagaattatgtttgcttatctgcattttccacataaaactacagaattatcttgccttggaagattgtttaaatagttttgaggtatttattatgttctgtgagaataatacccttgatcattttagttacttgatttttttctttgtgcttctttcaagagagaagattgaaaaagcatcccaggtagtcttcatgagtgggaaagaaataactgtggaacaccctgacacgaaacaagtttataattttatttatgatgtttcattctggtcttttgatgaatgtcatcctcactacgctagccagacaactgtctatgagaagctagcagcaccactcctagaaagagccttcgaaggcttcaatacctgtctttttgcttatggtcagactggctctggaaaatcatatacgtaagttgtattggaaatgcaattatccagaagtgtttaaatatacttttgtgagaagtggcataggggtgatagaaagaatatagttttgaaatcacacagatcttggcccaaatctcatccattttatataccagttctgcaaacttgggcaatttacttagcctctgggcttcagtttatacatttaccttgatacaattcatcttgtaattatcattggccccattttactgtactttatatattttacataaactaaggcctagagaggttatcttttaagtattttggtgagaattaaaagtaaggcatctaagctaga

SEQ ID NO: 4824 - DNA, 2179 bp, Homo sapiens
gggtagccagaccctagcccctgggccttcttcctgtcccctgggcaatggcgtggagggcaggggagttctctagcctagtactagccctgggggcacctcggtgcattgctgaaacaacagatgtcatcaagtcctctgcctaagtgaggtcttgaagcctatacttagcatccttcttgagagttagaaatagtggaatggggcatggtgaggggtgggttcaggctgggaacctcccttgagctagctgtgtggcagtaactggagccccagcagaacctactcttcctggagtgcttcctttcccaggccccagggaggggcaggggccccatcctgcagatgctacagacactaaggcttccagcagacctggcacactgtgttcagctctgcagatgacaaggcaaggtcctcagcctgcagcacttggggaggcccagcctcccagtctggggaaggtaaggctttggggttcgttctttccatgtcagactttcaggatccaagacccttctggcttaccgtgccagatcttctctttttttcttcccactacaggatgctcgctctatggcagcagctgctgcatccctcgggggaccccgagcaaacacagtcctggagcgtgtggaaggtgcccagcagcggtggaagctgcaggtgcaggagcagcggaagacagtcttcgatcggcacaagatgctcagctagatgggctggtgtggttgggtcaaggccccaacaccatggctgccagcttccaggctggacaaagcagggggctacttctcccttccctcggttccagtcttccctttaaaagcctgtggcatttttcctccttctccctaactttagaaatgttgtacttggctattttgattagggaagagggatgtggtctctgatctctgttgtcttcttgggtctttggggttgaagggagggggaaggcaggccagaagggaatggagacattcgaggcggcctcaggagtggatgcgatctgtctctcctggctccactcttgccgccttccagctctgagtcttgggaatgttgttacccttggaagataaagctgggtcttcaggaactcagtgtctgggaggaaagcatggcccagcattcagcatgtgttcctttctgcagtggttcttatcaccacctccctcccagccccagcgcctcagccccagccccagctccagccctgaggacagctctgatgggagagctgggccccctgagcccactgggtcttcagggtgcactggaagctggtgttcgctgtcccctgtgcacttctcgcactggggcatggagtgcccatgcatactctgctgccggtcccctcacctgcacttgaggggtctgggcagtccctcctctccccagtgtccacagtcactgagccagacggtcggttggaacatgagactcgaggctgagcgtggatctgaacaccacagcccctgtacttgggttgcctcttgtccctgaacttcgttgtaccagtgcatggagagaaaattttgtcctcttgtcttagagttgtgtgtaaatcaaggaagccatcattaaattgttttatttctctcactttctggtttttaagagatttagggaactaggaatttttcacaagtgacctggtaaatgtagtatcccagaggggacagagagcattgcgttttgctaggtccagacaggcagagccttgggaagtccaggcggccgtggcagagccagccacagtgcaatcaggccaaggccacggcttgctggaagtcctcctcacctgattaggaaagaggtgggtaggctggggcaaggagcacagggtgaactggcccttgggagttatcctgagattttacttcatgtttatgggcagttcctctgaaactgaacagtgcgtgattcatcctaatatcctacagacacagtaaatagcgctccctgcaaaacctgtaagtatccccaaatgaaaaccaacaggtatttggagaggggtgggtgggggcagctagaaaacgagctgccccatacagaaggaaatgccagcagcttcaacagggacatccaggggagcccggcactgcgtcagctccagtatggatgtgcggtgcagggcatgtccaagacccaggcagaggcaaggcatctagag

SEQ ID NO: 4825 - DNA, 1025 bp, Homo sapiens
gagatgaggaaggcggctgggggtagaaccctgggaacgttgatggttttggagccagccctgtaggcagtttggagagctggttttgatgtgtaaggggcatgggctgtgaggctgtgggttaggaagggtttctgccagcctaatcctttataagcccttggccctctctgggagcacccttcacctttgcctagcccctacctctcagctcccctggctacctgcttctctggtcttgaggctctaagacgtggtggccctgcctcgacagccctgtctctctctgttgtagcaactgcctgcacgtggtggagcccatgccagtgcctggccatgacgtggaggcctactgcctgctgtgcgagtgcaggtacgaggagcgcagcaccaccaccatcaaggtaacgccagggtctcaggaagccagtgggattcccacacgccattctccaatcgcagactggcctacacccacagtttttcactttattctggaatgtcccaatggctatgagactggcttctaggctggcctagtgcagacactgggacccacatcccacaccttcctggagccagctcccttctctgctctctttccagtagttaccattacagtgagaggggagagccctgggagagctgctggagactcctttttccctgcattctttacagtttatttcgttcctctcccttcttctattcatccagtaaatctcttttcggtgcctgctatattctgggcaagatgctgccaatggggaggttgggctgccctcctggagcttagtctaattaagcttccaaagtgactaagctcctctaaaaagcatcagagctgtggactagggctgggtgttgggtgctgggagaacatcagattggttcttttgtgttttcctgaaccaccttctcattgatcatttgggtgaattcaggaaagagatgatagacacagtcaccaccatagacgtcacgaggtgtctgttcattcctgcaccaggcagaacttcccgtgt

SEQ ID NO: 4826 - DNA, 1047 bp, Homo sapiens
cttcctgacttcaaatttagcttagctgcttgttaattgtgtgacaaattacttaatctccactgcactttgatttccttatctataaatagtggcagtattttctgtgttaagtatgtacgtgtttgtgtgtgtgttgtgcgtgtatgtgcacaggtcagtaactatagcacttagaacaatacctggcacacagtaaatgcttatataaatgttagctgatattaatgtatattatcatgccttactggtggccacatagatagtcatggtcaaacttacaccacagactgagaaaatgggctcctcctgaagcactagccttctacttaggagaattccaagtaacccccttgtatcttgtggttatagttcaaatagcatcagtaaaaacttagatgggctgtcttagcccttcaccagataacaaggctatatcccaaactccttatgcaggcagacacttgcaaatttaggaacactctctctgtcctggagctatagatggcctgaaaacccaaggttggatgcctgcagaggacggagtcctgtctagacctctcaggctgtagtttatctccttcttcccctcagaagtcagaattaaggggctgcttgatgaatagccttacatcaggaacctcagggcagctccattaagggtggtgggtgtaaactgaggctggaggaaagactccaggattctaggacccagtgacactgaccttgactgggagtcatcctgtgcttgcctggagcctcttaagggtagggtggggccttgacattgatctgagtacctcagtgctagggttagaggaggccagtttgagtgggtcttctggtctctgccacattttcactttgctgtcacgttggtccatgctaaagaacacttgcacccttctccttggttgtgcagagtaaagccagaatcatctgacatgcggtcctcaggtttaatggccaagccatgtatgttcctgtgtttacaggtatcctgccacctagtgttgagagattatgaccatatgtgcataaaaaggc

SEQ ID NO: 4827 - DNA, 1030 bp, Homo sapiens
gagttatgttactacaatttcatagggaaaagattgcttcttggacccttcaattttgcaatggggaatagtaagcctatttactttcttgaagtggccaaaagaagttgaacttgattacaacagcttctaataggtcagttcacttttaccccaagaagaaaatttagcaaagtcaagagggtggtatgttttcaaacactgcagcaacccagatggaggactccggagccttgatgtttgggctggatgttttgagatccggtgaaggattctatgtccataatgtgcgagcaggggttcctcccacccccaaccatgggagtcaggagactctagcttagggtttcaggttacttctgggttaggcaaatgaccacaagcagtctggccttgccaatcaaggaatgggccacaagataaatggagacagaaaccaggcagagagggagctagagaaccagtggacagtacaggagataactttattgaaacgcaaatggcattgaacagatgaatcttgctgggaggagacatgccagatggacagagggcccagattgggggtggcctcagtggtgatgaaggaaggcctcttcagctggctctggcatgaattttatttttaaataatttgttatttaaaatgaattactgaggggacagcccggctctctcttcatgattgttaccgcaactatatacaacagtttgctttccagattcaatttcgctttttctacattagatataaaagggggtaggttgaaagaggggagggtcaaataaaaaacataaacacacagacatacacatatcctggtttgggattttgcacccaataacttaaaaaaaaagtgttgcaaaaacttctgcccactctccacctgaggaacaccatgcatttgagaaacacggactctgtcacataaacggtgctgcctaaaacagtatggaggcggggaaggaagctagcaggggttggaattcattttgaaaaaagattgttttgttagaaaaagcaaaaaca

SEQ ID NO: 4828 - DNA, 1080 bp, Homo sapiens
ctccactggagagaaagtggcgtcagttactacagagagatgtaggttagacttgaggaagaattttcccctagtctaggcaaagagattgagactgtctgacaaaagcgggtcttttcacagggcatccccaggtgtaggcgggacacataggttggtgatagcccatcctgcctgaaagcacaggatgtgcaagagtaccccacagtgggaagtctaggaagctctggcctggcctctgcatggttctcgcagcctcttggtctgcggtgggggcatatcgatttttgcactgtttcccattctgagtcttctttccagtcaggacagttcaacgaggacatgatccccaccgtgggtttcaacatgcgcaaaatcaccaaagggaatgtgactatcaaggtgagggcccagaagcttggggggtgcagaggactgtttttgtgtgtgtgtgtgtgtgtgtgtgtgtgtgtgttggggagggcaacggaggcccctgggaggagcgagctgaagtggggcagaggccagggtccccctgctgaggagctgggaaaagacagtagaagacttctaaggtagacggagagcgggtggagacgggggagaactggagaggaagccggggaggcagaggagagtagggcagggtaggagggggcatttgagacccaagacacgttttggtggcctgcccactactgaggctatctcaccctcttcttgctcagctctgggacattgggggacagccgcgtttccgcagcatgtgggagcgctactgccgaggagtgagcgccatcgtgtaagtacacgggaggcatcgccagactccagccttacccggcccccctagccctgctaccttcgaggacctcagaggcgcagggttttattagacataatccttggttcatgacacagtgtcggtccagggcctgcgtttattttgcatgccacttgtttcttattggataaatgccctgggcactcactacccaatctaagaaacagactatagactattaaccagccagatgcacctgtgcatcctcttcattgacttgtctccctcccctc

SEQ ID NO: 4829 - DNA, 1037 bp, Homo sapiens
gagtcccaaattcccctgccagggtcaagagttcctgtgatatacaggaaaagcaccccatctccagcccacaaggtcccctttttaatcttaaatttgccacttccgctggcacattctaaaagagcaggcaagctaaattcccttctttagagaggcttcccaaggaaaaccaccccatgtgggctgcagttggaattccagtgtcccggtcactccagtgttttcagatcctctggggctaccacactggcattgctgcccaccccgtgtataatcacagttgagtgtcttccagaaagaaacgaagagttgggacccctgggctctgttcccatgcctaccactgaatttctgaattacctgtgcctgttcatttggcctctgtttgtctcagatctttcgccattgggttttttctactcaccctatgaggtctggctgtaaatagaaattgagtttagtgtgtctagctgctcagcaggttaatgtgagctggaaagaaattatatacactgcttctaagaacctgaaacatcagccgggcatggtggctcacgcctgtaatcccagcaattgggaggccaaagtgggggtttcacctgaggctaggagttcgagaccagcctggccaacatggtgaaaccccatctctactaaaaatacaaaaattagccaggcatggtggtggccacctgtaatcccagctacttgggaggctgaggcaagagaattgcttgaacccaggaggcggaggctgcagtgagttaagatcgtgccgccactgcactccagcctgggcaacaagagcgaaactccgtctcaaaaaaaaaaaaggaacctaaaacatcctttgagttctgaaaaagttgtgatgctagaaaagtgggagatgttttgtcctaggaaacaacagggtcattttcaaatatttaaaagtgtcaaagactgtcctatggaataactagtcttggagtgcccaaggggacttaggaacaatgggtggacattctaggaatgatagatttttttttctt

SEQ ID NO: 4830 - DNA, 1070 bp, Homo sapiens
ggccaagcgaagactttgaggaatgtattgtagatattggacctgcctaggcagatgactaaagactgtaatgcccttgtccatatcacagtgtagcaatgatgattttttacctaggctaggcaccatgcatgtaaaatgcatctctgaataggcacctttcattcatctacctatgaattacctcgtactctttactgagcagcagcctgccgtactgcttatgtggtgtttggactcatgcaaagacaacaagaagtatgaatttatgtaatccattaatgacaggtcatggcagaagctaaaaatacaaatttctaattctacagaatttttgaacccacttttcaaaatcagttactgtctttttttaaagcccaggaattaattctattccaggcttgtttcctatgcttatgcatacttaagtcaggtttggagttcctagataccgttagtatataaattaggatacttagagttgtgagtgaaattcaactcacactggcgataatgaaagaagttcattgccttactaaatagaaagtccaggggttgagtgaacatctgggttggtaaattcaaaggctcaacaatatcatcaagatcttggtctctccatctgccatccatagtatcagctttctcttaggctgtttcttccttaagtttcttcccctcctaggatgactaccagcagcagttggggttatgtactttctatccagccaggccgggaggctctactttccatgaaacaaaagtccctgtggactgccctgaaagcagtcactgtggccagggaaatgccatgtgctgattgctctgggctaaacccagatatgaagtgagagatggacttagggagtagttgtaggaaaagagcacctcctataggacaaaaccccttacacttctatcaccatgtctagtcagctctaccagctacttttccctacctctacttaaaacactagttcagctgccatcatctctcacctgcactttagccatagccttctatcttgtttccttccccattcttgacctttgacactccatgctcttca

SEQ ID NO: 4831 - DNA, 1045 bp, Homo sapiens
gatttcaaaacttactacaaagctacagtaatcacgacagtatggtcaatagtaggcaggtgctattaaaaaaaaaaatcagtgtggtattgccatgaggttagacatacagatagaattgagagtccagaaataaaccctcatatttgtggtcagttgatattttacaagggaactaagacaactggatggaggacagaatagtcttttcaacaaatgttatataccaaatggatatccacatacaaacgaatgaatgtgaaccccttccttacgccatactcaaagtggattgtagaaacatagtggaacctaatttctagaagaaaattaaaaattagccagatgtaatggcacatggctgtagtcctagctactcgggaggctgaggctggaggatcacttgagctcaggaggccatggctgcagtgagccatgatcatgccactgcactttagcctgggtaacagagtgagaccctgtcttaaaaaataagtggcttgtagacttgaatgtgagagctaaaactatgcaactcccataagaaaacaaaggagtaaatcttagtgcccttaggtttagtgatggtttcttggatatagcaccaaaaatatggcagcaaaagaaacagctaaattggacatcatcaaaattgaaaacttttttgcttcaaaggacaccattaaaaactgaaaatatgaccaggcacagtggctcatgcctgtaatcccagcactttgggaggccgaggaggccagatcaactgaggtcaggagtttgggaccagcctggccaacatggtaaaaccccgtctctactaaaaatacaaaaattagccaggcatggtggtgagcgcctataacaatcccagctactttgggaggctgaggctggagaatcacttgaacctgggaggtggaggtggcagtgagctgagattgtgccattgcactccagcctgggcaacaagagtgaaactccatctcaaaaacaacaaaaaaacaccacacacacacaaaatgaaaatataaccctagaatgagag

SEQ ID NO: 4832 - DNA, 1113 bp, Homo sapiens
cccttgcgtgcaggtgtagccagagtctaaactcagcctgagccagagcaccccattccttccttacttcctactttcctcccgccttttcctccacgttccactccaatgcactaagcacctactctgtaaaaggcacctgggatgtaaaggagaactcaaaataaccgtgtctcctctatcagcctgggcgctccccaaggccagggcatgttgtttctcctcctctcctgggtccccctagcccccaaagtggagttctgaagctgggagcattgatggtggctggtgcagagtgacagggctcccagatgctctccaaccccaggatagtcgcctgtcaacacaaggctttcctcaatcacaaagcttgcttcacttcctcccatcccctgcagagaaactagaagcccaagggcctcatcactggacagtctgggaccaggggaggacagcagctgggtggggagtcaggaaagctcccccgaggcatttgtcaggtgcctctcagtaaggcagggagtcctcagaccatggagaactctggcaggacttgccataattgggttgatacagtggctctggaatttagtaattaggaaatattgcaattagagacggaatttacccattactattccatgcatcttaatacagggtgtaagtggttgtaactgtgagcttggcactaggcatatgggaaaatagaagtgaatggagaaatgggatgaaggaaggaggggatgggaggagcttaaccctttccatacccgagtagactgaaggagcagcctgggggtgatgcagggttagggcgagcccagcagcccaccgcatttgtaagaggtgaccgaggcaaaaatcacaggctccctccggaccttctgcttctttagctcaggtaggatcagatgcagggcttggcaggggttaggagagtggtgatggaggccaagagggagaggctgcaggggagaagggctcttctcccagtttcctgctcagctgtggagaaacagaaaagagttgtaaccacctgcagtagtgtgcatgtgagagacaggagagggtaccttgtaccttcatctctccctccccacttgttccttcccc

SEQ ID NO: 4833 - DNA, 1034 bp, Homo sapiens
atttttttttttgagacagtgtttcactcttgttgtccaagctgtggtgcaatggcacaatctcgactcactgcaacctccacctcccaggttcaaatgattctcctgcctcagcctcccaagtagctgggattacaggcatgtaccaccacactcggctaattttgtatttttagtacagacagggtttcaccatgttggctaggctgatttcgaactcctgacctcaagcgatccacccgcctcagcctcccaacatgagccaccacacctggcctaggaatttgattttagaattctaaatacttatcattttctccaatcttttgtaagaattttacccacctaaatagacagttttacaactaactcaatctggtttttataaaaactctttacacactcatttcattggtttatgtaatagtcaaaacatagttactataacaatttgacctagtatatgattaggaacaaatactacttggtgagagcaggccacaggtgctcggcaggccgagaccacgagtatattttacagaaggaatgtagagggagagcataggttggtcgaagttgcttaagagtgtattagtatctggttgtgtgtgtgtgtgtgtgtgtggtttttggttttgtttttgtttttttgagacaaggtcttgctctttcacatagtttggagtacagtggcgtgatcatagctcaatgcagcttccacctcccgtgcttcaagcggtcctcccacctcagccttccaggtagctgggactacaggtgtgggccaccaagcctggctaatttttaaaaaagtttttttgtagagatggggtctcactatgttgtccaggccggtctcaaactcctgtgctcattgggggatcatcctgcattggcctcccaaagtgctggcattacatgcaagagagtgtctgtttttaaatcacttggtctgcctcttgcaagactttcttctttttttttttttttttttttgagatgaggtctcactctgtcaccgaggctggagtgca

SEQ ID NO: 4834 - DNA, 1035 bp, Homo sapiens
ttctttgtatgccacacatttttaatcatgcatccctattttggtaaagcttttttttttttttcagactcaagtactactgcatgtttgtcttgggctggtggattatattatcctttggaggtctctctaaagtatactttattctagggagtgattgattcggaaagaatggattttgagctgttgccagatgatgaacgtcagtgtgtaaaatgcaaaactacatgcttcatgtctgccatctcctgttcttgtaaacctggccttcttgtttgcctgcatcatgtaaaagaattgtgttcctgtcctccttacaaatataaattgcggtaagtaggaagaacgattttttttcctatggaaaacagttgatccttactaaaagctcaatgataccgcagttctagggctgaaatgttaagtataaaacatctagttttctccaaagctacacgtctcaaagctaagtgtggtggtattatttccaggtataggtacacgctggatgatctctaccctatgatgaatgcattgaagcttcgagcagaatcttacaacgaatgggccttgaatgtgaatgaagctttggaggcaaagatcaacaagaagaaaagtatgtgatacagaaagtgacttggtgattggcaaattggggcttattgtgatgtagccaaattaaagtcaacaaaacatttcttgaaacagcctgacctcatccttggttagcccctctacatagcccggtttacagagcaccggcagagaaggttttaaaaccaagagtggataaggcagttgcccttacatcccagtgaaattttgttatatgagttgtgcaacatcacttacttaacaaaaacgatattgttaggaaacctttatttttgtctcagaaataaaaatttcacatttcttacaaagatgttgaaatctttaaaaaaacaaaaacaaaaacaaagcatcttgtgacaaaggcagcatgacactaaatcaggagtctctgaaatggtagtttatcacttcttagttcta

SEQ ID NO: 4835 - DNA, 1030 bp, Homo sapiens
cctgtagtcccagctacttgggaggctgaggtaggagaatggcgtgaacccaggaggtggagcttgcagtgagccaagatggcgccactgcactgcagcctgggcgacaaagcgagactctgtctcaaaaaaaaaaaaaagaaaaaaaaagaatataataggccgtaggccgggtgcagtggctcacacctgtaatcccagcactttgggaggctgaggcgggctgatcacctgaggtcaggagtttgagaccagcctcaacatggagaaaccccgtctctactaaaaatacaaaatcagccgggcgtggtggtgcatgcctgtaatcccagctacttgggaggctgaggcaggagaattgcttgaacctgggaggtggaggttgcagtgagccgagattgcacctttgcactccagcctgggcaacaagagcgaaactccatctcaaaaaaaaaaaaaaaaagaatagttaacttttctggatcaaatcaatatgtaggtttaagtagaatgagcagaatgtttaatatttatagagcgctattaccagtggtagatttattacttgttaacaagtaatgagtcagtttttaatagtatatcatatttcttaactattagaaataaattttatcattgtgttgctttgtactttattttgttcttcgcccagtctctgtatttctgcaaatgtgagggggaaaggggcgaatctcattagtgagattctatggtagtaactatgctcatagtgttagtgcttcaggaaggttgttatttccacgtatctcattccagatatagctgctataacacaccctagagggttacttttggaacttacttttacaaaggtttttcgtgatgttcctgggtcctgttatgaaaaagtagtgcttacctgaaattcatattagcttcggtggcaatattttgtcgtgttaatgttatattggcattaaataccctcctttagccagcttagaataaaactaaaaagaaaaaccaaagaagagatgcatttctgatc

SEQ ID NO: 4836 - DNA, 1029 bp, Homo sapiens
cactccagcctgggtgacagaatgagactcagaatgagactgtctcaaaaaataaataaataaacaaacataaaaaataaaaaatagaatgttgaatgtggaacctttttgcctcttatagtcagatctagatacagttgcccatagtagattaattttctcttcttgaactcttcctaagtacggaagtgatagtgaataaagggagagagagtccctttaatgatgctttgtgggttgtaacattttagaaacatgtcacttatatacttaaaaaggcaatgtagttttatggttaaaaagcacttaagtatttatacaatcaaggagtctgaaaggaataagcatttaaaggtacccttttgtaaacattgcatctacaatataggtagatatttgtgagggacttactctgtgccaagtatgttttaggaagtgatacacattctttgtagaaagtttaaaaacataggaaagtatggcaaaaataaaatcactcctgatccttccacctgttacttctctcacggctatttttatgcatacattcacaaattcaagtgtactgttcatatacatcattgcatcttaggtttttttactaatcatatgagcatttgctgtatcattgaatagtttttgaaaatgcaatttctaatgactgcggcaatccgttttttatagccagactttattttgatgtcttctattgtagaatgtttaggtcagttctagttttttattataatactatgatgaatattccttgtatgtaaatttttacacctatttctgatttttgaaatagttattagggagagaagaattgaagaacatatacttaagaaaaacagaggtgtacagtaaaggaattattgcaaaagggtgaagtagggtgtaagttaaatttcaggaagcttgagaaaagttgatgcactgttccagtggaacagaggcctcaatcttgcatcatcatgttttctaaatgttttaagggattgctctgtctttgggatgatgtgattatgg

SEQ ID NO: 4837 - DNA, 1512 bp, Homo sapiens
ggtaagtttgggggctagccttaacctgttttatcttactacttattggtacattgtcttttcagggaaatgaaaaagccttgattgtgtttggaagaccttgttttagaagaccttattttggtggggcgcggtggctcactcctgtaatcccaacactttgggaggccaaggcaggtgaatcacctgaggacaggagtttgagaccagcctggccaacatggcgaaacctcgtctctactaaaaatacaaaaatttgctgggcatggtggcgtgtgcctgtaatcccagctactagggaggctgaggcaggagaaccgcttgaacccggaaggtggaggttgcagtgagccgagatggtgccacttcactcaagcctgggcaaagagcgagactctgagactccgtctgaaaaaaaaaaaaagaccttgttttgtgttttttcctctagtgtttttgttctgctttgagagcagctatacttagaagtttgtttctggaatgagtaagattgtggaggaaatttttttactgtccaaagctgaggagttgattattatctacttgttacaactttgcattctctttaaatttaaagtagctaaagtattcctggctgtcatatgaaggtataagctgtgaaataacttgcctacctgttctcttctgccagctgagatttttgaggagattgtcagaatgttgatatggtaaaaggggattttataatgctacatagctaacgggttcctcttctagtaattcctatgtagccaagttcatttctgacaaaatggtatttgtgaaattattcacttaaaaacttttaggtaaaacagtactgtaaaagcttcccatttatttccaggccttggtagaaagaagaggggtgtcattatccattcacaccctttgagttattttaggactacagcagtgagtcctataactttaagaattgttttctgtgctgtagagaggtaggaagagaataacatagtttttgaggggtaaatcactaaccaaagtcctgtcctaatactatacacacacaaacacaccatctgtaatgcttaaatccagtagattttttcttccctctctcccttattgattccaggtgaacactttttagcctagaagaaagtagccaatctgacattcaaaacttttttttttaatacattatatgaatgtttagtgagcccatggatgaaattgtttagaatgttgaatgtgagccgggcgcgatggctcacgcctgtaatcccagcactttgggaggccaaggtgggtggatcatgaggtcaagagatggagaccatcctggccaacatggtgaaaccctgtctccactaaaaatacgtaaattagctgagcgtggtggtgcgtgcctgtagtcccagctacttgggaggctggggcaggagaatcacttgaacccaggaggcagaggttgcagtgagctgagattgtgccactgcactccagcctgggtgacagagcaagact

SEQ ID NO: 4838 - DNA, 1047 bp, Homo sapiens
ggtgaaaccccgcctctactaaaaatacaaaattagctgggtgtggtggcacatgcctgtaatcccagctactcgggaggctgaggcaggagaatcacttgaacccgggaggcagaggctgcagcgagctgaggtcacgtcattgtactccagcctgggtgacagagcgaaactctgtctccaaaaagtgaataaataagtaaataaataaataaaagatctatgctacagggtacatttttccttttttgcttttttcattgtattaaaatattaaaatgtacataacattaaatttttgcctttgtaaccatttttaaggatacagttcagtggcattgggtacatttacattgctgtacagccattaccattgtctacctccagaccctttcatcattatcccagactgaaacctattaacacatttttatacctttagctgttctcttgttgtagacattcatttccagttttctcccttcgtaggtaacaattcatacatatatgtgtgtgtgtgtatatatatatatttaattgtctgattacttcctcatgatggcagttcttccatgataggaaaattctcctctagagaacagttgtctatacgagtatacatattaaggacaaatttttttttttttgaggtgaagtcttgctctgttgcccaggttggagtgcaatggcgcgatcttggctcactgcaacctctgcctcttgtgttccagcgattctcctgtctcagcctcctgagtagctgggactacaggcgcctgccaccccatctggctaatttttgtagttttagtagagacagggtttcaccatgttggtcaggctggtcttgaactcctgacctcaggtgatccaccctccttggcctcccaaagtgctaggattacaggttgagccaccttgcccggccaaggatgacttttaaaattggatttggatgtcagtttttctccccctgacaccactgtagaatttaccctcaatttaataagaaaagttaaggtgggccaggctcagtggctcacactt

SEQ ID NO: 4839 - DNA, 1047 bp, Homo sapiens
ataacattatatatcacctgtaagtcttagttgttaaaattttcaggccattttgaaagtatgttaagactaaatatttgaacatttacttctatattctgacacattatttttcatatgcttttgatctcagcttaacccagatcaattcatttctgaaaaccaacagcttttataacacactggaagcaaagctctgagcaatataaaggcttcctgttagcctaccatagaatatcaagaagcagtgtgatttccttttgctaggatgtgttctgtataaattaaacacattactttggcttttagttattgagctaaacaaaaataaatcagactttaatctttttcacttgggatggaggtattttttaactttaacaaagtatagtattttttaactgacatttaaaacattaaccataaaaaggcagtacaactatgttaaacatttgaaggccttaccgataattacctttgctttttagcttaacattttatcatgcatcaccggcgggcatttttattgaagtctttgttatcactaaaacaaaacaaaatttcatttatgtatttattttagagctaggttcgtgctctgttgcccaagcaggagtgcagtggcacaatcatagctcactgtaaacttaagccccctgggcttaagtcatcctcctgccttagcctcctgagtaggtaggactacaggtttgcaccactatgcctaatttttacattttttggtagagacggatagagactggtctcaaactgctagcttcaagtgatcctcctgctgctgcagcccaaagtgctgagattataggcatgagccactgtgcctggccgtcatttttattctaaactaaaagcagtctataatgataagttccaacagcacaaatttgaaatgttaaaaaagcctcttttctccttattattgtgatattatttaaaatctgcatatgtaaaattcaacacaatgttattaggttggcgcaaacgtaattgtggtttttgtcatatgtatatgtaggtaatggcaaa

SEQ ID NO: 4840 - DNA, 1049 bp, Homo sapiens
gagattttgtggaaagaatagagtaggaatcaaaatgttgggtttctggcatgtgttccattatttccatgttatccttgagctcctaaccttaaggagggtcatgactattttcagagctttattctattaacctatctgtaaaatgggcagcttaaaatatcagcccttctttacatagtgaggcccaaagagggaaggaatctagcccaaatcctggtggagccagatttgaacttaggctgtgcaggtcctcagttactgctctgaactactgcattgccttttatataaccatagtaatgatacaattgtgatttcatgagatgattaatgggaaattatgaatctattatttttgcatatatactttgtatcctggtaggttcagcaaaacaaaaacaaaagcaacatatttgttggtttttgctgctaaggcagatccattttatagaaaaggaaacaaactgagcttgagagacttgacttgcctaaggtgacacagccttgaaaggacaaattggatgttgcaaaccatggctctttattcccaagttcagtgttcttctaatttaatatataatggctcccttcatagatcctagaaattagcctgcttctctctttcatctccccttacagtcttttttttttttttttgagagggagtctcgctgtgtggcccaggctggagttggagtgcaatggcacggtcttggctcactgcaacctctgcctcctgggttcaagcgattctcctgcctcagcctccggagcagctgggattacaggcacccaccaccatgcccggctaattttttttgtatttttagtagagacggggtttcaccatgttggccaggctggtctcaaactcctgacctcgtgatccacccacctcagcctcccaaagtgctgggattacaggcgtgggccactgtgcccggcctacagtctttttttgactgtggtcttctctctcttccttctggccacccagacttgaattcattaataacaatagtaagctgcatgtatacagttatcaa

SEQ ID NO: 4841 - DNA, 1030 bp, Homo sapiens
aaagcttttctgtccctgaatctttattttttttgagacagggtctcactatgttgccaggctggagtgcagcatgatgtgatcttggctcactgcaaactccgccttctgggctcaagtcatccttccacctcagcctccctagtagctgggactgggactacaggtgcataccatcatgcccagctagtttttgtatttattttaatagagacggggttcaccatgctgcctaggctggtcttgaactcctgagctcaagcagtccacctgcctaggcctcccagagtgctgggattacaggcacaagccactatgcccggcctgtccctaaacagattagtgagattaacatgttttaaaaggtagagctgttaaaaattatttcagaaaatttgcaggtgcatttgtgtgtcttatgtagtgcatgtatataggcaggagtttagtttggtgagatttgtattaagaagggtttacagtgatttaaatttcccctaatatgggatgactgtgacattgtggaagccacgcaaatagaaggatattgtacttactaacataatttaaataatctcaattcatgtctgacaggaggggtcaatagttgaagtctagtaattttgcaattatcctacttgtaaagtggggagaaaagtagaagtggcaggaaaaatgtttacctagatcttttaagaaaatattttaggacaagagccaccatcatattttattcttttatttatttatttattgaagttaattatatttagacttaaggaattaacaaaggagcagggagactagaccaggtcccaggatatcttgactccttggggcaggcccagctacagcaagcacagagggaaacataggggaggggcagatagcagatttggtcttgaacttggagggtaggaaatggatgatccccaggatggaagcagcaggaggaagctgtgtctgaggatggcctgggctgcccagaggggcagcctacccctggacccctggggctgttgcacagcgg

SEQ ID NO: 4842 - DNA, 1028 bp, Homo sapiens
aattttatttatttatttgtagagacagggtctcactatgttgcccacgctggtcttgaactcctgggctcaagcaatcctcctgccttggcctcccagagtggccacacctggcattacaggtgtgagccacggcatccagccttttttccttctaaagtttaaaaatttttaagtgaataccagagggataaggaggaaggaaggagagaggagtaggattcaaaccacatcccactcctcctaacaatatgtgaagaaaatcagtgtaaattttaggataacttcaaatgaaaggaagaagagtttttaatgaatagctgtacaggcgttgagtgtataacctgagaaaggatgttaactcataagcacttaacaaagggaattaggaaaaggttggcttgagagaatacaggtagtgctcacaaagtattaagaaacactacttagtaattgcctgacaaaatacttgaaatgtatagtaaggctgctgaatatattgtgttgaatattcttagaaagctgaacagaaaataacattgcaaatctttgtttttcaagatcccaagtctcattttaagagcagatttaaataaattatcttgatttattttttcaaagctcagttgtgggtgcatcactgtttattatataatttacacttacatgtatgcctgaaatatttcattatgaaaacactgttttaaaagtctttttaagcacaagttttttgtttgttttttgttttttttttagttagttctatcatcttagtgtagatattgctgctgaatcagaatgggagaggcgtattctgtgatggtaataactaccttttatgggccaggtactgtgctagtaattgttgtgcatatctgactcaccctaggggtaggtattaccatctcattttacaaatgaaggaatagggtttcagatattaaatcacttgcccaaagtcccatggcttgtaagtgctagaggtgggatttcattttatattttccaactctaaagcccaaacagtt

SEQ ID NO: 4843 - DNA, 1061 bp, Homo sapiens
gatgtccccagccagcaagcttgcactgggtcgaagagcttttattcctgggaaggagtggatttgttttttggttaagatgaggtaaatcaatgtgaagactggctaaatttttactgcctactctgtgaggcattgttcaaaatatattcttaaaacggattcttttctatgcaaggggcgcctttggaagtcatcaaaatatttcaatatgacagtaatatgaatgcctttgttaacacattaaatatacatgaatgatgagcactaatgtattttattaaaatttgtaatttctaagtaatgatgaatagaaacagtattttgagatacctgcagaactaatgtgtgagagtatctgatttctattggtgacaaagccacaagttctactaatactgtggtttgttgcttatgcttataattgaggaaaatgctcaatttacttagaggtaaatggaaatacaattttttccatctattccctggatcctgtccatagtgcatggatcctagattaagaacccctactctaaaaagatgtggtaagaacttagaatctaattgggggagggatgagacatgagatagaatctcctggagaggggcaaaggagggatctgtacgttttttaaaacaacgtttataatttttttgtttttattcagtatatcaattttgaaatttcaagtagcctaaaggaggttgtaccatatatatatatatatttttttgagacagagttttgctcttgtctcccagctgcagtggcacgatctcagctcactgcaacctctgcctgccaggttcaagcacttctcctgcctcagcctcccgagtagctgggattacaggcatgtgccaccacgcctggcttatttttgtatttttagtagagacggggtttctccatgttggtcaggctagtctcgaactcccaacctcaggtgatccgcccgcctcagcctcccaaagtgctgggattacaggcgtgaaccactgcgcccagcctggttggaccatattttcttaaaaggttgagaaacacttacctaaaactt

SEQ ID NO: 4844 - DNA, 1004 bp, Homo sapiens
ggctgggatggacactggggcctctcggggcatggggctttgaggacggggggacggctgggtgactctaggggcatggggctttgggacccgggggggacagccggctgaccgttgactcagtttccatgttcccaggggcctctctaacactgccctctccatctttcttccctcactccttacagttgctttctttttcctttctctttttctcttttctcccttttactcattatttacttggcaaatttgagctctgaaataggccaagcatgattctctcaccttctatgttctcccttccaaaggacttctctaaaaactgaatattcatcgtgtcccttctgaactctctgtccccttttccaccaattctctttcctccagaatgttcttctcttctctcccaagagctctgggatcagtagcaccaggaagtgttaagggaggaagcagcctgggaggtgccagctgtttgcccaaggtggggttggctgtagcatgggtcgctgggctgggctgggctgcagcatggacttaggtgcttagctcttctgtgttcttgttcttcccacgccttctgcctcctttcttcttcctgtttcccacttctggtacctacctaatgcaggcagaaaggcaacaaggcatttgatcagttgctgcaggtgctgcttggctgagatgctcattcctttttttttttttttttttttgagacagagtctcactttgatgcccaggctggagtgcagtggcatgatctcagctcactgcaaccttcgcctccttggttcaagtgattctcctgcctcagcctccagagtaactgggattagaggcatgcgccgccaacatgcatggctaatttttttgtatttttagtggagatggggtttcgtcatgttggccaggctggtctcgaactcctgacctcaggtgatctgcctgccttggcctcccaaagtgctaggattacaggcgtgagccaacgtgcctgg

SEQ ID NO: 4845 - DNA, 1055 bp, Homo sapiens
cagtacatggtagcttttaatctctcttgaaataaattgtctggaattgaacacaatactctagacattgtctgttccatgggaccctgatgccctccaacttgatgatatatttctattatgtcagactaaatttgcaaatcactggtgtttaaattgagctcattgtactgaagccctcaggttattttcccacggacagctgtcaggcttagatctcccctttgctgcataaaagatgtgatctgagttagagggaaggtcagggtcaaggggagcccaaagcctcccctcacattggttccaaacacacatgaactctcactgatgcagtcgcgtcctttttataatgctgttctgcgatctggcgttctatttggaaaatctcttgacccacacggggctaaaataaaattccctccccatgggtcttttctttctttcagtgggtctcttttattcttctttgctcattcattgcatttgcttatcaggtgagctgagcacttactgttgggaacttccttacctccaactctagctcctctgcttctccaagttcccaggctataggggaaaagacacagatgcccacagcataatcagagtgactgttttcacagacaaacctctggggctctctaaatccttggtcttcatggtccactagcatctgtatcatcagggagcttgctggaaatgcagaatctcaggcctcaccccaacatgctgaatcagaatctatgttttaacaaggccctccaggtgattcatatgcacattaaaagcggagaagccttgctctaagtcattcaatgtggagtaggaatgcggaaagcaagaagcctatctttcaaggccttgatattagtcctactgaccaggttcctggggacataaagctatttctgtactatttgatcacaagctatttcttggaatgctcataataaaggtttttttgtttgtttgtttgtttttgctatgttgcccaggctggtcttgaactcctagaacaattctcccgcctcagcctcccgaatagctgggactac

SEQ ID NO: 4846 - DNA, 1473 bp, Homo sapiens
aagaagcaattttgtatgtgaaaaggtctatcttcaatgtttacattattttgtatttgtagtatttgatttttttttttttgaaaagctagcattattagtgatgacctgaaacccaaagttttaaatcagttgatgtaaggtcgtcatgactactctttccagtggtagcctaaggttcgctgaaacattgtcatcgttatgaaaggcacttcattatgcaggataccattcatatccagttttctaagatggttgaggacattgttttttaaacttttctgttttttaaattgacaaaaattgtatatgtttactgtctacaacatgatgttttgaaatatgtgtacattgtggaatggtaagtcaagctaattaacatgtattacctcacatacttagcattttttttgtggtaagaacccttaaaatctactcttagcaatttcctttttctatttatttatttatttgagacaagctggagtgcagtggtgcaatttcgcctcactgtaacctccgcgtcctgggctcaagcaattctcatgtctcagcctcccaagtagctgggactacaggcgcgtgccaccacacccggctaattttttgtattttagtagagacaggtttcaccccatgttgcccagggtggtctcgtactcctgagctcaggtgatctgcctgccttggccttccaaagtgctgggattacaggcgtgagccatcacgcctgggctttttatttatttattttattttattttattatttatttatgtatttatttattttgagacagaaccttgctctgttgccaagctggagtgcagtggcatgatcatggctttcttcagcctcaacctcctgggctcaggcaatcctcttgcctcagtttcccgagtagctgggaccacaggctcacaccaccacaacaggctaatttttaagttatctgtaggggcgagatctccctatattgcccaggctggtcttgaagtcctaggcttaagtgttcctcctgcctcccaaagtgttgagattacaggtgtgagccacctcacctggccaatttgcaagaatataatacattgttattgactatggtcaccatgtcgtacagtagatctcttgaacttattcctcctcactgaaagtttgtatcctttgagcaacgtctccccaacccacttcttgttttttattaacttattaaagtataatttacaataagtttcactcattttaagtatgaattcaatgagttttgataaacacgtgtagtcatataaacaccaccactatcaaaatatggatcatttccatcacccagaaagttcccttatgttcttttgtattcggtccccttcccaacctccagcttttggcagccattgcttttcttttctttgtctttttttttttttttgacagacagggtcttactgtcacccaggctggagtgtagtggtgtga

SEQ ID NO: 4847 - DNA, 1776 bp, Homo sapiens
gtgatagtaaatgctgctttgagttaagccttcttttcttttttttttttttttgagacagtgtctcactgtcacccaggctctgaagtacagtggcatgatcacagctcactgcagcctcgacttcccaggcttaggcaatcctcctatctcagcctctcgagtagctgggaccataggtgtgcaccactttgctcacctattttttgtagagacagggtctcactatgttgcccgggctggtctcaaactactgaactcaagcaagtagcccaccttggcctcccaaagtgctgggattacaggcatgagtcgtcaggtccagccatacctccttttcttaatgggctctgaaggcaaaaaccagaggagtcccaggggttttgaaaaagacttatctggatatatgttctgaagtgggtgtttttaagaccgcattttatcatgaaagactagttcctctttggatctcaaataatcacctcaaagagccctctgatcactctatcccccaacccctcctttttctctcacagtaccttttaaaattatgttcactctgccctcatcttgttaacatttttacttgtttctcatctaccaccaccctcactagtctgtaaactccatgagaacagggatcttgtcgtttatgagtccagagcctagaactgtgtctggtatgctatagtcaataaatatttgttgaataacaacttttttttttttttttgagacagggttccactcccatcacccagactggagtgcaatggtgcaatcttggtgctgaacctccgcctcccaggctccagcgattctcctgccttagcctcctaagtagctgggactacaggcagatgccatcacacccagctaactttaatttttttgtagagatggggtttcaccatgttgcccaggctggtctcgaactcttgggctcatgagctgcctgccttggcctcccaaaatgctgggattataggcgtgagccaccacgcctggactcttttttttaatatatataaatagagatggggtctggctatgttgcccatatagcaactcctggcctcaagcagtcctcctgccttggcctcccaaagtgctgggattacatgtgtgagccactgggcctggccaagttaatagctttcccaaagtcacctctcttatcagctttattgaagtttcatccacacagccttgtctgaccagaaacaagtgtgccacaatcatcagatgatgtagaatcacagaatttaaatgtccttagagaaaagctaccgtaagctttaactaaatttgtagaaagtaattacaaatttcaatttggctaggtataccacatccattaattctagtgtcattattaatataagacacattgttaatttatgaatttaatatgcgagcaaatcaactgagaccctcctttcccagaattaataggctgcattggagtaccagagtattcttgccaccacaccaggggttttagctctttggcagaagattggctttgggtttctagtgatgctctgttgtctccaccagatggcgttatcttccatctgggagtgcctgatggacacctgttattacagatctggttgctattgctcccctggaggtgggtccctcaatgtgtaaacaagctggaaaactgccctgccctgcccattccaggcctgcctggcccagtgtgactccacctttttgtggtaattacccagaagtaggggctctttcttataggagaaccaagatttg

SEQ ID NO: 4848 - DNA, 1120 bp, Homo sapiens
cgcccggctaattttttgtgtctttttagtagagacggggtttcgctatgttggccagactggtcttgaactgctgacctcgtgatccgcccgcctcggcctctcaaagtgctgggattctgtgtgttttgtgcacctccactttaggtaatcatagggagcacatttacaggatggtctaataacatgaaaacaggctagtttcaagcaacagcaatgtcggttggaaagcaggcgtcatttgccttgaaaaaagccttttgacaacatacaggcattcttttaaaaccaggctgaaacattttatttccgagacttaacgttgtgtttcctgtttcttaaacctagcacctctgtgtatttgaaaataatgagacatctttcattggattttggaaaattgttccccatgggattctaacctcactaccaaatgagtgaaagcttgattaagagttcttccatatactagcctccttggaagaagtgatcagaaggtgataagaaggacagaaaggactattttaaagttggactgaaggagaaaaaagcaaaattcttgtttcatcccaattctagttagaacaaagttaaacccccgtaatcttaaagagaaaatctttggaggttttaattaaacattttatacatttaaagtcttgttaatggtgctttaagtgtcaatgtagcatgtaaaaggctttgtacagacaggtaaaagttccatttctgagtgatgaaatgtaacacttcttcatctttaacttgaaatcaaaactatcagattttatttttgtataatttaaggaaggtaaagttaggggactagaagactctaaattggcttctacagatcaataatttaaatgtaactagttgggattttatagttaaaattatatttgtgtatataacataactaatctgtaaattgtaataaatatatttgcaattattaaatgttaagtgatattttggttcaactttatattatatgtatcatagtattttacaatggttttggaattactaagcaggattagtataattgcaaacaacattttagtaatagaagaacttggttcttgcagtattatgagaggcccttctaagaaactga

SEQ ID NO: 4849 - DNA, 1029 bp, Homo sapiens
gcctgtctatgttaggctaaaaaataaccttgtgtatgctaccaacttaaagtgcattattttgtgtcacttttttttttcttgtaaaaatgacttggattgaaaatatgtggtagcctttttatttctacattaagttctacctaggatatttccaaggactgccacaaaacccatatgtgcagtactttactactttgggaaagctgcatctttctaccacattttaacatctaatatatttaatttctttgaagagggttctgtgtacgttattgtagttcccagtttaatatagttctttgtatctcttaacaggttgaagttattgcaaaacactctggaaagtaataattacatcataatcatttattttttaaacttaaaagcctagaaatttcctagaaagaaaataggagacatctcagagcaatttggttttggtgtatatgttctcaacagaaaaccagtgttaatgaatatcatgcctcagcactgtcacttttaaaacctgtcaggatcccactgtaaaattggaaatgggcagttctgaattttcacgtttgaaatgtaaaatataaacttcagtcaatatccaggtttattgtgtcctactatttaataatgagagaagtaatggcaaggcctttactttcaggaaaggatagaagtatagattaatgactggaaagttttaatatatttagcccaaaggttactttgaattgaagtctttgcattgactgtttgtgtttggtttatttgtttagctttacaaggtacacataagttaggttgaggggttgttaacccttccgtggtctgctttcattccgtgtgcttcctgtcacaggtaatggaaaacataagtagaataggtgacctcttagttttgaacttatttaagtgtggggatgaatttttcatcagaagtgcttacagggttactacctcagtttacaatctacctggtcattattttatttctatccagttctaagaactgcctccactgtttatatattcata

SEQ ID NO: 4850 - DNA, 1071 bp, Homo sapiens
caggttatatgcaaacactataccattttacataagggacttgaccgtctgcggattctggtgtctacggggtcctggaactaatccccatttcatgagaggggatgactgtacacacgtcagtgtgtattaggccatcaaaacgcctccgggaaattctcgggttattttgaaaacccctcccctccccaagacctttaacctagagggctgttggggcggtctcctaggagaccacacagaaacgactgcgcatgcgtgcattcccccccccccccccccccccccccccgccccggctgatgcaacctcacgctgccgtgcggctctacctcgagtaaggaagccgacagggaaatctggcaaaaccaatcggcggccacacggaagtgggcggaaaggcccgccccccggggattttgcgagtgacgttgggcggcgcggcgctagggacgtagacgcccaacagtcctgcgtctcttccggcgtctaggggggtgtcctgccggcgcgcgggccctgcggccattttgggcttcgcttccaccgcaccagccggcctacccagtccttccggtatcgcgttgctcaggggcttttcaaccctctgtcagtcggaaaaccatcgccgaggccgtggggggactcctatccatggtgttgaagcgtcgagccgactagggaacctccttccccgccaggatggaagtcgcatcagtcgccgcctattgcgcgggctgttcttccctgtgttctgccgcccgctgccgcattcgctgccctctgtggcttttctgctggctcgaagatcggcctggagcagcgacgccaccgctgggcaaggccgagactctgtaggcttcctccgaatcccgtcgacctccagccgctgagcgccgcggccctacctgagagactgtcaagaaaaaggagatggagccggggacaggcggatcgcggaaacggcttggccctcgggcgggcttccggttctggccaccctttttccctcggcgatcgcaagcaggctcttctaagttcccgacgcctcttggcccggaaaactccggg

SEQ ID NO: 4851 - DNA, 1047 bp, Homo sapiens
aatataattagcacctatatatccatcacctaaacacttaacattttgctatatttgcttcttctattttttatgaagtattttaaaataaataacatgccaggtgcagtggctcatgcctgtaatcttagcactttgggaggccgaggcaggtggatcacctgaggttaggaatttgagaccagcctggccaacatgtctctaccaaaaatacaaaaattagctgggcgtggtggcgcaggcctgtaatctcatctacttgggagcctgaggttgcagtgagctgagatcgccccactgcactccagcctaggtgtcagagcgagactccatctcaaacaaacaaacaaagtaaattacagacatcataatactgtaccccctaaatactcactatgcatctctaaacaataaagtcttgtttttaaagtaactacagtattattatattatccagtccatagtccatattcaaaatttccctatcatcccccaaattccttttactgttggcttgttagagctataatccacataagaactgcatgttgttggttgttatatttcctaagtctttttacatctggaacagtccccttcctttttgtattgggccattgtcttattgaagaatggccctgtttctgattctgttccagtgtgatttggtgtacaccttcttccacccactgccccgggatgagaaggctatgggcaccagcccagctcctaagtcctcaggtacagtatcttctctgagaccttactgccaactcctctgaactaccccaagggtaactgcttctgccccaacctcttctcagttctctctccttgacttgcctcctgttccttttcttactctctgggaaatctagtttcccactcaggccgtggggtccatagttccttacctgggttccccacagggtggatattcagtcgattatatccttagacccatcccaacccaattaactctaatcacattcagactacacttatgtagatgcctcatgagtatcagaaatctgacatggagaggct

SEQ ID NO: 4852 - DNA, 1017 bp, Homo sapiens
ggggttttcctgccctgtgcttcatctgtgctatgctctaccttccttccagtcagtcagaaaatcccctgtttgctgcccccggctttgcttccccacactgactatattagagtcctcatttgcagagcagcactgcaagctaagtatttgtagcacagattaaagagactgaggagggtcctggggaggccgaggatgcaaaataggtagatgaagaatctggagatgctggaagaggtgggtccttttacagatggacaactgggaaaatggaccctttctcatgcccttcacacttaggtaattcttagagcaataaaggtgtatatggctgggcacgatggctcacacctgtagtctcaccgtactttgggaggacaaggcgggataatcacttgagatcaggaatttgagaccagcctgggcaacacaaagaggccttatctctactaaaaaattattttaaatgagctgagtgtggtggcgtgcatctgtagtcctagctacttaagaggctgaggtgggagagtcacttgagcctgggaggtcgaggctgcagtgagccatgatcacaccactgcactatagcctgggcaacagagtgagaccctatcttaaaaaaaaaaaaaaaaaaaaaggacatggggtgtgcattaaaggtcctcaagcaaacaactgccaggacaggagaaactccttgcaggcagaggatagctgcattaaatggcccttgagttccaccattcccttgggattttttggtcacaattactgctgctgtcaagagaaggggtgccagcctgggcaacaagggagacccaatctctacaaaaaatacaaaaaattagccaagtgtggtggcatacacctgtggttccagctacttaggaggctgaggtgggagaatcacttgagcctgggaggtcaaggctgcagtgagtatccagcctcggcaacagagcgagaccctgtctcaaaaaaaaaaaaaaaaaaaaaaaaagggtgctgcacagt

SEQ ID NO: 4853 - DNA, 1050 bp, Homo sapiens
acatttttagcaaaattcatgaaacctccattgaatggtcaaagtatcctgatcactctagagtctgaccctcagttgcccttaagagcaaatgcaccccagctggcgataagagtgttatctggaactaaaagagaaaggaaatggattcataaaaaattttccattaaacttagcatggaaagctttgtcattttagaactatttgtactgttcaatggtgggaaacattttgcaattataagagaagtgtcaagaagggggtttctcagagctgctaccccactgcccccatcctggcctgcaaatttggagggctgggctgagtggggacagaggggctcttgagcctcagagcatgaggttcccaacagatgtcttcttgactactctcttctaaaggcacagtgagggttttttttcttcctgtacagccttcgatctggctctgacatccaagactacttcctcactggctatgtctggagtgctgtcacccctagcccagagcacctcggggatgaggtcaacctgaaggtgactgtgttgtgtgacaggcttcaagaggcactcactttcacctgcaactgtaagttagtgaggggggagaggatgtgagcatcccttgaagtggggtggggatgactgtgttttgactcgatttccacctcatcttgtggcccagatgaagggcagtgaggatgctcctttgggggtgaggggctggctatggggccagcattctagtacagtcactttcctcaactctgaactacttgcctgctttatctggttggtgatggtgctggagaatacttagctggaaagggggatcagggtggggaaactgagacccatctgccttgacatccatcatgattgctccccctaccttacccttcacaggttcctccactgtagacttgcttatctaccagaccctgtgctacacccatgatgacctgaggaatgtggacgtgggtgactttgtgctaaagccctgcgggctggaggagttcctgcagaagtgagtgaatgggtgggaggtag

SEQ ID NO: 4854 - DNA, 1050 bp, Homo sapiens
gatcttgggcaggaggcttaacttcttttaacctcagttttctcatctgcacaatggggataataatataatagagttttatgaggattaaaagagatagtgaatggcaagtgcctggcagagagtaagcccttaatgaaattagctaattgtattgcatctattttagctatacaaggcatatgtcattactaaattatatttatttatttacttactttagagacagtgccttctgtcacccaagcttggagtgcgatggtgcattcttagctcactatagcctcacctcctgggctcaagcaatcctcctgccttagcctctcaagtagcttggactacaagtgtgcaccaccacaacaggctaatgtttttaaaaagagttgttatagagacgggggtctcacttgttgcccaggctggtcttgaactcctggcctcaagtgatcctcccaactgggcctcccgaagtgctgggattacaggcatgagccaccatgcccggctattactcccattttagaattgaggaaactgagcccaggaggatgtttctctgtacatgtctggagggcagcaccttgtcttattcatctctgtgatcctgtacacaggattgggctcaatgaatctttgtagagtaaaagacgtgtcaccccttgctcagtggggacctggcactggaatgcacagctctgggctgctaagcctgggttctctccatcaagccaggctgaccagctagggaggttgagagagcccttatggcccaggagcctcctagaggcctatcgccctctccagagctacccagggggccgtgccaccacttgctcacaggggaaagactttcaaaggtgggagctgaggctgccctgccaggcgatggccatctcagggcagggtcattcagcaggctcacggagcccccaaaacccttccccagcctgggagcaggagcctgggggtggcgtcccactagccaggcagatgaacagcttctttggtctgggatttcactgaaagccctgaagccctgagccctgcttc

SEQ ID NO: 4855 - DNA, 1023 bp, Homo sapiens
tgcagtggcatgatcttggctcactgcaacctctgcctcccaggttcaagcaattctccggcctcagcctcccgagtagctgggattacaggtgtgggccaccacgcctggctaattttttgtatttttagtagagactgggtttcaccatgatggccaggctggtctcaaattcctgacctaaagtgatccatctgccttggcatcccaaagagctgggattacaggcatgagccaccgcgcccagtggctttttttgtattcagcataatttccttgaggttcatccaagtagttgcctatatcagtagttagtttgttcttttttgtcaccatgtagtataacatgatagggatgtgccacaattatttaaccatccacccactgaagggcattggcattacctcgttttgcaagtgagaaagctaactggcccaggatcacatgactagcaagtggcacttaataaatgtttagcaataagcacctaacaaacgtttattgtacaagctcaactgaatgagggtactttatgctcttcacttagcacctagcatggtgttttacacatagtaggtgctcaataaatgtttgccagtgaggatatggatgagatggcatttatatttacataacttgtatcatgaccaacttattcctatgcctagacattcacaggagaggaatatgtccctctcaatatcttacactttccgttttacttagaatatcaggaaaggaaaattggggcagtaaatatgaccacatacagggctggcattttattgcctaaaatgcccagagcttttggttccaaattaatatatgccatcttttcatagtattttgcatcgaatttgcaggttgctcattttatcaaaatgcaaagcaacccttccaactcctgcttcttcctgtaccaccaccctcccagcaggtgctgggtcaggctgtgccaacgcagtctgcagaaacaattggttgggttccgaaagtgtccatgctaagctgaaaagtctact

SEQ ID NO: 4856 - DNA, 1034 bp, Homo sapiens
taaattatcctggattatctgggtgggcccagtgtaatcacatgggtcctttaaaggtggaagaaggaggcagaagtcagcatctgggtaatgccatgtgtgaaaggctggacctgccagtgctggtgttgaagatggaaggggccatgggccagggcctgtgggcagcctctagattcctgtctaagaagctgggaaagtccaggaaacagagtctctcctccagcctccagaaagaaacacaaccctaccgacacctagcttgaagccggggagacccattttggacttctggcctccagaactgtaagagaatacatctgtgttgtttatagccactaagtttgtggtcctttgctcacagcagcatcaggaaactaaatacaaggcaaaagccaagcggtggaccagaacccagttggcctccttctgacctcccagccaccccggagggattgcttcagaactcggtggctccgagaagcctggtttgaaatacagcgtgtctgaaatgcaacctgctaattctccagacaatgaaatcgaggcccaggaaggagtggttttgtgtgaggtcatgctgagttagtggatgagccgggactgcaacccacggtccactcctgttttgtcagaaatcccagatgcttacatgaattctctcatgaactcgtccgttacaacaattgtatgtgtatatttttacattttcaacaaacgtgtgcatataaaggcccaagcactgtgctaagaactgggcagaggcgacgtgagcactggcgcaggaagatgagcagctctgagttccagtcctgacctcagccccttcctgggcctcagctttctccaaacatccgcagccagcccaggttgctcagatctgtccgtgttctttgtcctggaactggtcaccaggtgggctttctcacagccacctgctctgagtggagacacagctctgggaaaggagaggacccagcccactggcccaggctgcacctgccctcgtgaagcttatgcagcatttatcaccc

SEQ ID NO: 4857 - DNA, 1761 bp, Homo sapiens
acaaaggcagaagataaactgagaaacaaaaaacacttttgacaaaaatgaagtagctaaaaaagacaacaaaacaaaaccgaagacaagagatatgcaaaaaagacagcagcatgtgattagattgctgaaaggacgagtcagaaagatgcctttatctgttactttccagtgcggggcctgggtctccgtggcctacagctcagaggctgaaatttcaccaagttagcctcaatcaggcatttgcttattcagtcaacccatcttttctaagtacctactgtgtgcctggctctgtgctaggtgcaggggacaaagagacagatcagatgtccctgccttcaaggagttcaccgtcagagtagagattctagagccacacagctggagttcaaatccaggcttcaccacttctagctgggtgacattgagcaggtcacgtaacctctcttcgtctcagtttcctcatctataaatgggataataaaagtacctacttcataaagctgtcatgaggactacatgaggtgatacatgtaatgagcttagaacagtatctggtatatatatagtaagtgctatgtaagtaatattattattgttattattattagatgggggagtcagtcccatagacaataatgaaacaagtgttggactatagggataagcagataaaaaggcgactctcagccaggcttggtggttcacacctgtaatcctagggaggccaaggcgggtggatcacatgaggtcaggagttcaagaccagcctggccaaaatggtgaaaccccatctctgctaaaaatacaaagattagccgggcgtggtggcacacacctgtaatcccagctacttgggaggctgaggcgggagaatcacttgaacccaggtggcggagattgtagtgagctgagattacaccactgcactctagcctgagcaacagagcaagactctgtctttaaaaaaaaaaaaaaagtgactctctgtttgctgtttgcggattaggaaagggttgccaaatgatgtgatatttgaaccaaggcttgaaaaagagtcaaccaggcagagatggtgggtctggggacacaggtgatgagggtatttggggcacaggtatcgtgcatgaaaagataccagggtgtgtatgtgttcattgctctttgtgaatgtcaccatcaccgctgacacgtccctctcagcctctttttctccagagctgggagctgggcttccagtggggctggctggtcgcccagaacattcccacatgtcttggtgcaggggacctggtgcatccctgctgggggttagcctcatgaccttgggctcctgcacgttctaagcccgcatcaagcagactctgctccaaacccagagctgctaggccttgcactctgccttctggcacttcttagggacctgggagacgccttggcctgagggggctgccttttaggaggtgagtttaaccaggtttggtttggaattcgtttttttctgtgtgtttcttgcacccacaccttccctgctactcagcatttgatggacctgaagcgagttccaagataaagtgcagacagagggttcctggggcaataactgtttctcagcttctacctctcacgtggtaacaacactaattatgatacccagcatttattgagcatttactgtgtgccaggcactgtgccaactgctttacctgcattatcccattaagctttcaaaagtacccctattagataggtagttaa

SEQ ID NO: 4858 - DNA, 1029 bp, Homo sapiens
agaactctgatcattttgcttttcccccaaccctttgggacagtactgaggaaagtattggggtggggggtttggatttggattgttttttgttcaataaagagtaattgggagttggagttggttatgtattttcttaaaaaggggaatttcttggtccacgtgtgcttgtaatgcatcatccagcattcagtatttctgttcttacaagtaactggtctaaattgaagctaaaagaaatctttttgtgtctaatctctttagcaggaggagcaatctcagaactgttatgaagaccttcgaagttcttcattctttctcactttgccatcatgtggcctctggacactgtggtcagtcatttgaaaattgactttaatttaaaacaaaggcctgtgcctcccacccaggaggtgggagggtgaattttatgtttaaatgaagaagtgaattatggaagaagagtatacgaccttcccttccctttcaagcataagtccaaatagactctcaggaatgaagatttgtgaagacatcagataggaattttgactcatttaaactttgatgcttagttatgttgctggagaaaagatacttatgttttgctcatctaacttcattgtacccagcgtcattttgacatgtcatttcctatctcccatttgccttcggtcctcaatgcatgtctttgagtgacttcttatctgaaattttgctactggtatcctaggaaagcttttgttggatactctcattttaaacttctcctctccccagatacctcctatatttccatattgtgtgcaaaggatgggcagaaaagaaagtgcttgaaagatttcaaattttcagaaagggaacaacgaaggccctctcttcctctcataccacgttttgctcaagaagctgggctgtaacaattcagggttttcccttgttttcctctcattgcatgtttccctccaatattggttcattgtcatcaatcatggtttttgaagatagctagttttatccatctccagc

SEQ ID NO: 4859 - DNA, 1064 bp, Homo sapiens
tttctggctcttttcagggagaaactctattgaactttctgttgcatttttctattatttatttgagataacatttttcttttgcttttcttactttcagctcagtttctgttttacatcttaattttactttgaacacctttaaattatgtttgtaatcagtgtacttacaagaaaatttaacattttacctctaaattcctaaaatgaccaaagaaggcagtgattcaaaagagctacagttaataacttagcttatcttaatgtttaagatagaaaatacctaagctagtaaaacttacagatacccatttttttcttgtctgccaaatttaatctaagaattgtgaattcctttcatgctcacatctttcattttatcattaatgtgtagattacagattattgctttcacatatggttaagtagtatatcttgttgtataggaaaactggagtgcatttgcaccagacttcaaagaattggatgaaaatgtagaatacgaagaaagggaatcagagtttgatattgaagatgaagataagagtgagcctgagcagacaggtactatttctaaattgcagacaggatttcctaaagggaaaatgattgctttacttaatattcttcatttgtgttgtaaatttatttcagcacttcatctaaaatgcccccctccaccccacacttttttttttttttttttttgagatggaatttcgctcttgtcacccaggctggatgcaatgatgtgattttggctcactgcaacctctgccccctgggttcaagtgattctcctgcctcagcctcccgagtagctgggattacaggtgcctgccaccactcccagcgaattttttgtatttttagtagagatggggtttccccatgttggccaggctggtctggaactcctgacctcaggtgatccacccactttggcctcccaaagtgctgccattacagacatgagccactgtgcctggcctatgaaccactgtgcctggccttcttttttctttaagcttacacaatttccacagtatttggagagccttaat

SEQ ID NO: 4860 - DNA, 2022 bp, Homo sapiens
aactgtcaggaatgtctcccagctggaaagggtgttggatgctgatagctcacagccaagttcctctccacagattttgccttcagcagatacgagttggctctcacaaggtgttgcctccttgccaaaaccagtcaatgtccaatggctggtcattcaaggctataatggcctggccctctgaccttaatttggtatgactcggaaggagcattcctcctctggtgcttattgtggggttgtctgaggcctctgctgtggggcaagtgaggcacttgtttggcgtgcaaaatttaagggggcactccaaaactcaatacttttaaaagtcagaattaatgccaaaaagaagccatgatgaaaaaaaaattttaaataaagataggacctgtctgcatttcattttcctctgccttccctgatcggcttttgatctgtcttgattaactggattggtgagctgaactcagtgtgcaagtttggatcgcaattaatataagctaacacgtggctttgaatgtgctaggtattttgtctttatcacttataaaatgtacagtgaattagtttcaaggttgtgtactgtttttagataataacataaagtaataaaaaaaagcctaggatgagaattatagttcataaattgttcctgtggttgtttattgatcaacaattatttattgaggatgtatagtgtgccaaccactaatctagacacttggaaacaaaacagagtaggctgcttgccttcaagaagcttatgttcaaagaattgattaggcattcccttaagatattaatgaactggagagaaactcactatattccaattttcctttccttctagctaatagtcttttgtttcctagctccagaaagtttagtgtatcctggtgctaaagataaattaaggtcaggcacagtggctcatgcctgtaatcctagcactctggaaggctgaggtgggcagattgcttgagtccaggagtttgagactagcctaggcagcatggtgaaaccctgtctctacaaaagatacaaaaattagccaggcatggtggcacatgcctgtagtctcagctacttgggaggctgaggtgggaggatcaccagagcccaggaggtagaggctgtagtgagccgtgattgcaccactgcactccagcctgggtgacagagtaagacactgtctcagaaaaaaaaaaaaaaaaaagggataaattaagtgcttaataaagtgcttctaagaattttctttctttttcccctgacactggccttttatcttctatctatcaaagtgtaagactgtccatgtggctgcaaaatcctctacaaataaaagtataccccatgagtacacacatgagatcactttttcagttctattgttcatacaggcacaagcaagaaaaaatttgagagagaagagtatcatgatagtacaatcttgatccatgatcttgagaaaaagctgtctacatctgggatgccatctgcttctggagagaatcttccctggttagctttaccttaaggtttccaatcagtatacagttccaagagtctggaggaggcccttctgagttgtgagattatgagaccaaggttcaggatctcaaagttttgctgcattgtggatgccaagggcagtttttctgtgatgttgccctcagaagacccaatcgatctccaggttctagattgtgaaaggtttgattgtcctcagtcagtggactatgaaagttttttttaacctggtgaaaatacactttggcataatgcattaaaaccttgtagcatttagtcatatcagtatttagtagcagaagatacaagacgttctattattaggtgcataggcctttccagtgactatttatttcataaggggtcaacttccatcttctactggaagtggatctgattgtcatcaatctggtacacctttgaccaaggcaatctagtcaattcagttagctttgcctaatgttattgtatctgcaatccttttttaaa

SEQ ID NO: 4861 - DNA, 1032 bp, Homo sapiens
tacttgcaaatgataaagtaactgactcagtgtctttgggctctgcaggctttagccttgttttggtaggatgttcagtatattctcagaatttttaccacctatttagctatacttcaagtactctattctctgcactaacttactgtccttctgggaactatgatggggcttcaagggagtcaggtgtcaagaaaggaggggtaagtactctctacttgctggaaaatcattgtaagtctgttgtgtatgaaattttaggaaaagtcttatatagttccctttccagactgttttcttttgactctaactataatcataagtctgtgcttccattatgaaggtcacattcctagcattcttgggaagtattagctcatactctcattcacatatgggaggttagatttttttcctctacccagagtccctttttagtttaccccacggcttagtttgctgtcagataccagttctctagcagattccccaacagttttttccccagtggggagggtggaagggagggactgatataagtaaggagatgagtagttgtgttacagttcattttctttaaaaaaaagtattttgagaaaaggtgcaaaatattcttgaaagtctctaggccagccaaagtccacatatggatatttggggatgttatttaaatactcagcaggctgagtgcaggtatacgtgtgtatagagtgtgtatactttgcttttgttttataacattgtcagctaattttggctttgttctttggcatccattcttattataagtgatggaatgccatgaaatgtactgtattgtatattacttgggaggacactaggttttcaaagaagtctggcagcacttgggttatagagggctcagcatgaccaaagtcctaaagattttacctcccagctttggttgtatgtgttcccaagtggtgaggtgagattgtggctggaggaagaaaaaggatggcatgaaagaatgacccttattgtggtctgtccttctaatcaacataatta

SEQ ID NO: 4862 - DNA, 1062 bp, Homo sapiens
ctcttgggtttttctcattaatatgctagggagtgtgaaattttgcaaagatcataggatttggaataatgagcactgggttcaaaagctggctgtattacttcctaactgtactattcccttcccatgtctactttgttctctctttgaggctgtttcctgatctataatacccatgtaacaaagttattgtgaagatgaaattagattacatgtgtaaaatccttattttagtgcctttcaaatagtttgcacttcataaatgttgttcctcccctcctataaatgtgacataaaagctaacaaaattgccgggcacggtggctcacacctgtaatcccagcactttgggaggccgaggtgggcagatcacgaggtcaggagatcgagaccatcctggccaacatggggaaaccccgtctctactaaaaatacaaaaaatcagccaggcgtggtggcgggtgcctgtagtcgcagctactcgggaggctgaggcaggagaatggcttgaactcgggaggcggagcttgcagtgagccgagattgcatcactccactccagcctgggcgacacagcgagactccgtctcaaaaaaaaaaaaaagctaacaaaatcaacagtctcattctagacttattgcttcttatttattttttttttttgagacggggtctcactcccatcacccaggcaggagtgcagtggcacaatcacagctcattgtagcctctacttcctaggttcaagccatcctcccgcctgcctcatctttttactttttgtagagatgaggtctcactgttacccaagctcatcttgaactcctgggctcaagcaatcctcctgcctcagcctcccaaagttttggaattacaggcgtgaatcactgcacctggacttaattgcttcttctcaggatcttagctgcctttagtagttgagggttacgtgacccctgatcattgtgagagttagacatcatcaacgaatcatgtctttttgcagccatcatcatcacggtagttccatggttctgatttgggagatgactttatttagtg

SEQ ID NO: 4863 - DNA, 1016 bp, Homo sapiens
cgcctgtagtcccagctacttggtacttgggaggctgaggcacaggaattgcttgaaccagggaggtggaggttgctatgacccaagatcatgctactgcactccagcctgggcgacagagctggagttttctttttttgagctctgtctctgtcttttttttttaggccaggcacggcggctcatgcctataatcctagcactttgggaggctgaggtgggagggtcgcttgaacccaggagtttgagaccagcctgggcaacatagtgagaccccatctctattttaaaaaaaaaaaaaaaagtgagatttttaaaactactgaaggagggaaatccttgggtaccaggaacaagtattgcagtaataactctgttgagacctgaattaactttgaagtccatgttaactttatgagctgcaggagtataataaagcaaaagcattttctatttcaccaacttttgtagtgccttccctaccttggacatagactgtaccttaagagccttcagttacctttcacgagtatgtattattgattggtagtggctgaaaggtgtgatagatttcctcactcatcttgagggtcatggccaacacttctctaacaaaagacagtttaacaagagaaaagcataacaaatttatgtgacacgggagcctttagaaatgaagtcacaaagacccagggaaaactgtttttatgcttaggtttgatgaagaattgactgctttgtagaaagtgattggacagtaggacatgatctaatggtaatagactgagaaacccagcaaggctggtctgctcaggttattcttgggctctttatgtgcattccttcccccagggtgtgggatgtggcaggtcctctctggaatgagggtcttcagaggaaaagagagcaacctttctagttttatggcttgcttcagagaagaggattgctagttagttcctttttttttttttttttgagacggagtctcactctgttgcccaggctggagtgca

SEQ ID NO: 4864 - DNA, 1062 bp, Homo sapiens
ggcagcgagtcccgggagtccgaggaggccatgggactgtagtcgggtgtgtgggtttgatgatgtatgtgaaatgtgttcacaccaatcatgaggcagctctgtgaagaggggacattctctaaatagggttgggggtcgccagaggaaatcatatctgatgggtgccacggaattgccagagatgttgctcatgcttaaggtgaagaagagagggaagggatcattttggtcctgagccaatggagaactagctactcttgttctttcttgcatgattctttctaggatgtgccagaggcccccaaacacttaaaatcgtgcagtctttaatctttcctaacgtcttgcttccttttaaactgctgttggtggggaactggaggatttgttaactactgcgtctaattaggaaataactttagattggaagggagaagggactgacattccacgtagatagatatcttggggacaaaacagcaaagaagtctgtgggtttaatttagtgattctcaaactaaagtgtgtattaaactcaccccaggggcgtattaaaaatgccatgtctcgtgctctagctcataaattcctattgaataggtgtgtgaagtgggtcctaagaatctaatttaacatgaaaagaccctgaagaggccgggcgcggtggctcacgtctgtaatcccagcactttgggaggcagaggcggggcggatcacttgaggtcaggaattcgggaccagcctggccaacatggtgaaaccccgtctctaccaaaaatataagaaactagccaggtgtggtggttgaggcctgtaatctcagccactggggaggctgaggcaggagaatcgcttgaaaccaggcggcggaggttgcagtgagcagagattgtgccactgcactccaccctgtgcgacggagcaagactctgtctcaataataataataataataataatagtaataataaaagacactggggaaggtgatgcaggtggtccgttaaaatactttcagaaccatgaatttagatgctcatagcaaatttgaacacaagg

SEQ ID NO: 4865 - DNA, 1095 bp, Homo sapiens
gtgttattcatttaatgttcagcaaatattaattgaatgtaggtcttaaatgaaactcctgtgtgtgtgcaaccagtactgctgtctcagaagtgaggctatagttagtgctgttttgggggccacctttccttctgggcctttgtactgagcgtttagagcgtagatatgttcacccactgagagcggatggtgaatgcctgttcctttagtctttttgtgatgattttgctttttatagggaggacagagtctccgcctgggcaccttctcttaagaactggctttgcacacagccgatgcagtccctgggcactttgaaagcagtgggcaaaagggcaggtaagggctcagggttatgaaaattgctttgggactccccctgcctggggtctctagaagggagactattcttaggaggtgtctgtgccctgaaggagactttctttgctacttggcctgaaggacttctttttgaaaaaaagatttggactagaatcaaaatcctgaactgcaaagagatggccaattaggccgttgggctgagttccagccaaggagtcgggctctgcctttcagttccctgaacaggctggaaagagattcttggctcatggtcccatgacatggtgggatgcaggaagccaagttcacaatccatacccctctgctaatggagaaaccatgagtcagccgacccagctctcgcctatcttaagagtccagcgcagacaatcgtatggaaagcaggaagagaggaaaaggaagctgtagaaaaataaacatttccttgcattttacttggaacagagcagcgtttctggcacgttaagatccatagcatctcctgctcccccgctccccgaccccggctctgttttcctcctcttgtgtagaaacagatactttccttacctgatgggagtccagggtgcatcctgtggaaaaacaggagcaagatatagaaggtaaaagccagacaaccaaagatcacgccacagaccaggaaactatagctgccctgagcctggaatatctgccaaaggggaaaacacagagagacagacaattaaaacttcacgtggaaggtgtatc

SEQ ID NO: 4866 - DNA, 1041 bp, Homo sapiens
cattgatttttttttttttaaatgtatgcacaaacaatctggattttgaggagtacggtcaggaaaaaaaaaaaagaattagaggcccttgaaaggtcaaccgtaagcttcttagagttaaaatatgagtttaattttttcccacattttgacagttgaaattttgatagggacagtaaacctatgagcctctattaggctactggattttttttaactggaaaattccttgaagatttacatactatattacagattttaaaagtcaagactgacttaagtaaatcagaggtttggaattctggagctgtaactccaggctgttgatagtatcacttcagttccattcacccctgcattgtgtgacgtccagtctgacaacattgtttcatcctgatctgactttctactatgattcttaagttcttaaaggtgtccttttatgtttttggtgaatgtaagcacatttagagccactcagtaccacttctcaatacctctgaagcagtggttcagaaaaggagtgtccagcctttttgaacacacaaattgatcagtaagagttattgaacataaaaactttccctattaaaaattcatatgggtatatgttaaattatataccgctataccaaagtaatatgtgtgttataaaaaaatacacaaaaattgaagtgaaggatggcataaaaagtaattcttgagtagcagttatagtattttcttcccacaccccagttggttgtcttgtgcaccctccagaagcacacgcttttcctaaagactgctgactcaggatattctcattctaatctccaaacatatatgatgctctcttatgatatatggagaaatcctagagatttggagtttttcaggagagcttattgtcaacttttgaaatttcacattaattctttttgataaattcccaaataataatccattaccacatgttttccacagctttattcctattactttcgtcagcctgttgtctcttatcttcatgttaggtatgactctatttttattttacta

SEQ ID NO: 4867 - DNA, 1027 bp, Homo sapiens
ctgggaagatcaattggaaacatctttcggggcgggatagtaactggccttggaaggaaatagggatgttgttgactgaagtagtcaaaagtacacacttcactttttctccagctattgctatttgaaatttggggaatttaaataaagattctggagttctatgcctcatcagaatggtttgtccatctctttggttgatagatcagatcctctgtcgtcttttcccaccccctacaccccctggcttggaaaacttggtgcttcaatatttaggtttggcagcggtgttttcattaaaatgtagtatgattcaatattttcccttcaggaacactcttctctttgattttacttaaacattaaaactgcgtaagtggaatctgttcattcctagtgaggtagtgtctttaagttttattgtaagaatattgtaagaactgtgcaggatcctatacaaagagtattttttaggagcctgtgtagttaaaaacgtcatgttacttttggttactttttgacaacggtgagtattttgattcgaaactaggcttgatacattcataacttggttttttaagtagcaggctgaagaaaatttggagactttgtgtttttttgggtcttagctactgtctctgaaaaatagttgggctatgggtcaccacagcaactggactgtgtgtattataaacatgtttagggtggaaaaggttttatttaatagagacttcctttccttaatacattacttcaacatgctccctttcaatttaggacagggattggtctatctttgaagtgttaaaatagaatcaattatgttttcagcctttaccccctcaaaaatcaaataccttcatttggaccagttaagtgttttcttcctttgttataactttaaactttaaaaattgcaattgtggaaaactcgggattcctgtaagaaggaaaatcaagtaattagcctcttttttttttttgataggtaacaagaataaaaggttttgtttggttttgttttgtt

SEQ ID NO: 4868 - DNA, 1052 bp, Homo sapiens
ggagttcgacaccagcctggccaacaatggtgaaaccccgtctctactaaaaatacaaaaattagctgggtgcggtggcaggtgcctgttatcccagctactcagggaactgaggcaagagaatcgcttgaacttgggaggtgaaggttgcagtgagccgagaccgcaccattgcactccagcctgggcgacaagagtgaaactccatcttaaaaaaaagatgtgaatggcagtggaaagaaattgtaggaattgtgggcaggggtgttaggggaagagatagagtcggagaccaaggatgggccttgcctttatatccaggagttcaaagaacttgcctgtctgatacctctcttgttcacgacagggccaggccttttgagtggctgttacctacctctaagggtatgatgatgaattttatgtgtcaatttgactgggccacaggatgtttagatatttggtcaaacattattctggatgtttttggatgggatgaacatttaaatcggtagactgagtaaagcagtttgtcttccataatgtgggtgggcctcatccaatcagtaaaggcctgaacagaacaaaacagatccttgctctgagtaagacagaattcctcttgcctggctgcatttaaactgggatattgactttttcctgcctgtggacttaaaatattggctcttcctgggtctgtaactgctagcctttggaccggaactgtaccacaggctctcctgggtctctagcttgctgacttaccctgcagatcttgggacttgggacttgtcagccttcaataagtgtgagccaattctttgtaataaatctctttacacacacaccacacacacacacaaaccctattggttctatttatctggagatcctaatacaaggtgacagtgttttgatgggggcccaggggtttgggagtgcacagagggcccctaggtttatttactaacaccaaataaatcatcaatccttagataccagagctggggatcaaagcactctctcagtttacagatgaggaaactgaggcc

SEQ ID NO: 4869 - DNA, 1060 bp, Homo sapiens
acggcttctcatgggtgtggaacatctctgcttgcggtttcaggaaggcctctggctgctctaggagtctgatcagagtcgttgccccagtttgacagaaggaaaggcggagcttattcaaagtctagagggagtggaggagttaaggctggatttcagatctgcctggttccagccgcagtgtgccctctgctcccccaacgactttccaaataatctcaccagcgccttccagctcaggcgtcctagaagcgtcttgaagcctatggccagctgtctttgtgttccctctcacccgcctgtcctcacagctgagactcccaggaaaccttcagactaccttcctctgccttcagcaaggggcgttgcccacattctctgagggtcagtggaagaacctagactcccattgctagaggtagaaaggggaagggtgctggggagcagggctggtccacagcaggtctcgtgcagcaggtacctgtggttccgccttctcatctccctgagactgctccgacccttccctcccaggctctgtctgatggcccctctccctctgcaggcgttcggatgggcagcctggggctgttcctgcagtgcgccatctccctggtcttctctctggtcatggaccggctggtgcagcgattcggcactcgagcagtctatttggccagtgtggcagctttccctgtggctgccggtgccacatgcctgtcccacagtgtggccgtggtgacagcttcagccgccctcaccgggttcaccttctcagccctgcagatcctgccctacacactggcctccctctaccaccgggagaagcaggtactcattggccagtgggtggagtcagggtgggaggggtggtctgggtttttgggaggccaactagctcagaacctggtatctggcaagcaactttggagaatgcttctttgaatcagagaagaagcttatcctagccccagggccagaggcttgggctgcagaacagtgtagattagattctgggaatgacttcctggggtcaggactgtgtagcacttgaatggat

SEQ ID NO: 4870 - DNA, 1031 bp, Homo sapiens
aggagcagtagggcaggaggattttagaagcatctccaagactggagggtgtaagggagaattggaccctgtccccaggaggacaggggagttccgcagacttggggcaggaggcggggttccaacactgatctgtcacttgcaagctttggcaagaagcttgccctgaggctgctgatgggagtggtggccagaaaagtggtactgaaagacttcttgttctctgacctccctgagcctgacaactgagaaaggctgggctcctccgtttgtgctccagggaaggcggccctggagcggggatggcgagcagctggacttagtgctcaggagtcctctgtggtctccttagcccgaggaccctggaggagggatgaaatgacagggactggggcactggaaagcatgcaaggataagaaaagggggctttggagggtagtgtgtgcttatgggcttggaacttctcaggcaattccgggctgggaagagtaaagtctgggggtatcaagaggactctggacccgctgggcagagtagaactcaaacaagggaggacggactctgccaccaaagaatacaggggtgcttgaagcctgcacccttcctagtcaaatcctttccccacctggcccaaccccaagttaccaggtaaagaatctctgggtggggatggggggcgttggagaaaggcaccccaggaactgggaggctactaatgagctatctgggctgtaggaggatggtggggggcactcttctctttacctctttctttttgtctttttcccatgtgggctaagaaggatcctgctaattcctggggggcctgggaacttgattaagggaggggcaaggcaggtggggtgattaatggttgctggacagctgtggtttatttttatttttttattttttagagaccaggtctcactctgttgcccaggctggagaacactggcacgatcatagctcacttgcagcctcgaactcctggactcaggagatcctcccacctcagcctcctgagtag

SEQ ID NO: 4871 - DNA, 1050 bp, Homo sapiens
gccaaagcgaatccctcttttccagggcaggtcatagaaactagaagccttctccccaaagccagccatacagcctaaaaatattactctttctcctggctttctaggtaagaactggtgatcaagaaatgatctgacctgccttgtttgatagtaggtcataaggccctcattgcagaggggtcctaccccattcctgggaggaagaaatctggcaacggagaggccaagaagaatctggacaggccttgctgggcttcaccactcagtctattagcattagctcataccatttttgtctggtcacatttctgcatcctgtgtgtgcttcctcaaacctaagcataaaaatggatacttaggctgggcgcggtggctcacgcctgtaatcccagcactttgggaggccgagttgggtggatcagctgaggtcaggtgttcgagaccagcctggccaacacagtgaaaccccacctctactaaaaatacaaaaattagcctggcgtggtgacacacgcctgtagtcccagctacttgggaggtggaggcaggacaattgcttgaatccgggaggcagaggttgcagtgagctgagatcgtgcactgcacaccagcctgggcaacagaatgagagctagtctcaaaaagaaaaaagaaaagatacttcaccctgggtctttgggttttcatttctaagggctcttgtgtcatacaaaactatgatcaaataaatttgtatgcttttctcttttttttttttttttttttttttttgaaacagcatcaattttggatggcatctcgctctgttgcccaggctggagtgcagtcacgcaatctcagctcactgcaacctctgcctcccaggttcaagcgattcacctgcctcaacctcctgagtagctgggattacaggcacgtgccaccacacccagctaatttttgtatttttagtagagatgaggttttaccatgttgcccaggctggtctcaaactcctgacctcaagtcatacgcctccctcagcctcccaaagtgctgggattacag

SEQ ID NO: 4872 - DNA, 1127 bp, Homo sapiens
tcagtcagcacagtctctgggaggtggtttcagaaaacagtcagttggggactataggtgaggggggctggggagagaagttaccggtccaggaaacagctgggctgctgtttccctagagaggttactcatggagcagattccaggatgtgagggttctgggcacctttcctctttccactactggaaaggagagagagagagagagagagagagagagacccacagtggttccatggtctcttcaacacctacagtgagatggaagctggtcagctgggagcctggcaatgtgggattacacaagagaaaatctctggcctcttctctttcagccacccaccctccaaaaaacacaaaaatttcatactctgcctctctatttctctatcatacacatgaacaggtcaaacacaaacaagaaacagggttatcctgaaggttctaagagcttcccacctcccaattctcctttaaaaaaataaaatgccaaagttgaagagactgggattggggaaatcaggaagaggagtaacctgaatatatggtccttcaccaatcatttagcaatgtcttcccggaagaaaatcaggacagtcatttgttgtgcatcgatggcattcagctagataagagaaacaggcagaagaaagaaaccggaaacacagttgagagtacaagccctttgagggcaggagacctttcaagtcttttgtgtttggttttttgttttgttttgttttattttgttttgttttgttttgtttttgagatggagccttgctctgtcgcccaggctggagtgcagtggcgtgatctcagctcactgagggatcatgccacctctgcctcccatgttcaagcaattctgcctcagcctcctgagtagctgggattacaagtgtgcaccaccaggccaggctaatttttttatttttagtaaagacagggtttcaccatgttggccaggctgatctcaaactcttgactttaagtgatctgcccaccttggcctcccaaagtgctgggattacaggcctgaaccaccgcaccggcctcaagtctttttttgaattaaactttttattaagatcattgtagattcacatgcagttataagaaacaat

SEQ ID NO: 4873 - DNA, 1033 bp, Homo sapiens
ctgtgtatagtggcatgcacctataatcccagctactggggaggcttaggaggaagaatcacctgagcccaggagttcaaggctgcagtgagctatgatcgcaccactgcactccagcctgggtgacagaatgagaccctgtctcttaaaagataaaaagaaataacgaaaaatagattgtgaaacactggtgtttaccaagaagtgtgtagacagtgacccacactggatcctcattttgtggctataaattgggtctcttgtggttcactaattcagcctagaggaatacaaatactaaacactttaaaaatatcgttttacttctaaggtaatcaggaataatgatatagctaagctcttttataaggcactaaatgtctttaggaatcaaagactcaatggacgttctgtttagaccttggaacataatctggggcttcagtaacctgacttcaaatctaatgcatgccacatctcagttacaaaccccaagctccccctgttttgtcttttcctcctgcttctgacctaattaaccccatctttcttttccttcgtgtgtgtatgtgtgcgtgtgtgtgtgtgtgtgtgtgtgtgtggatgaacagttagtttccatggggttagcgtttttgaggcaaaaatattgtttatacatcaactagatagtcctagaggtggatggggaaccagctgttcggtagagagccacacagttggcctgagtacaagataaatagcattcctaagctctgttgtagggaatgctggtgtgacttgaagtacacaggatatacacagtatctagttcaaaagagtggtttttgtgctaaaccttataaaatcaccagtcctgggccattggcaaagcaagtcagtccttttctcaccttgctttcctttctcttgccatgcacttaagggaagcaataagacctctaatatttagctcttgggctactcttctctagaagtcaacaccattgcacagtcactgtgcaatgagagaagcagatggctctctctctgg

SEQ ID NO: 4874 - DNA, 5909 bp, Homo sapiens
atgttaaatgctgctcccatacaattcagttagctcttgtctttttatttggtccaacccctgctttactgctcatgctgcttaaagcaggagggactagagaaacaaggcattttaggaggcctgtgtgcagttgaaaaccgacttttacacgccttataaaagcagtcaggagatagatccgtaggtttgatccttcacatctaataccaggcgctaatgggaacaaggtttaaagggtcctggtatgctaataaattgaaaaattagtgaaatttaaacttctgcctttttttcctgccttttaatctagatttgcttcctcaatatcctactttgtggtttactaggaacatgcttactctgatctttttttaaaaaacacacagtggcagagtcatttcactattgcactgtgtgttaaagaatgaataaggagttttcagttacatggccaaaaatacaggacttgaacataaatagcagttggatcattctctttcatgacggttaaattcagaggtgtgaactttgtaatgagggtgttaaagattaatctatttgcctaaatgggtttgttcaggtatccatttttaacaaagaagtttgtgttcatatagtaaaagacctatcagtgtttccaccatgcacttctattttttaggagtttataattttaagtcttacattcctagtaacatttgggcttttcttaggttatgtttcgtgaagatttggggggagggctcttttaaaacttcagcctcagttgtttaacagtctctttaatatattaatctgcactaacatctctgtgatatatgcacatattttagaggtaatcatgtcttctagattacttgtgtgcatttgattgggcttcttgtttagggtcccttttaaaattaattcattagattgaaaaatgtattctatatttctgatagactggacagaaggatctgtgtccccaagtgagacaggctctgaataacctttgttttctccactttttattgatgatttaaaacactctagtcttcccctcaaatcatgcatgcaaataggaggacagtggtggtgactcaactggatacaggtgctcaatagtcaggcttgatagtgatgtcaggacgcattacaagctgtaagccgatactgactggccattggcaccatccttgactaaccttcctctttttctctagtgtgcctatggtgaaatggcaatagcattcactgtcgtattttgcagtgctcaggaagtgggacgttaactttgaaggtgcttgtttgtattagctctgctaggtttacctctacaacgtagatttcagcagctatgctgactgacactacattctagttcttaagattttttttccagatccccccttccccagctagacatacgtagcatactttcatcttattcagtctttctgtaacctgctgctgcttttagtcctcctcacctcagatcggaatcaatggagtgggcccagaggatacattttaattccagtaatggtaggtagatttgtcctgctttctaaaacatctcctcatttcatatttccactccatattgattccataagggaaaattaatgggtgtttcctcctttagggaggtaatgcaaagagtgtggacatcttctaatcttgaggaacagtagttgatttcccttgaaggagcttacatattgactgttttcacaataacctgtttgccccagttcaatcctcattttaatacttaatttggtactggctcaaatagcattttcttacagataacaaatcaagagtgaaatttgaggttatactccagtaaagtttttaacacttgtgaatatggtcagctagactaaacttgactcttttttttaatggcttttttatctgtgaacattcagataagtggattttcaagtactggttggggatgggaatcgtgcttttctttaaacttcagtttacgagatgctttgagagcgttaggcaaaagcagaaataaatatcaggagcaacggggaaagctttataaaagatcatggtggccactgttgcagctttgaagaatgagtgctggcttgaacagttctttgcctgcatcattggtagctgcactgaaaggaaaaaactttcaccttaagaatttgaaaaggaagaaacctgggctctggtcttcatggcatttagactgagatgcttaaacagaacagaagtaatacgcatttcctgccataggatagggaaaatgtaacaagctggttgctcttgaggttagaaaattgtctgtttctctgtggatgaagctggatttacttgaaaatggagagttggcttattgtttgaatattgggacatcaagctatctatagccaagtttcagtcgcaaccagttttccctttgtctggggtaaattcgatacaaaatgattctttttgaatcctgaatccataaattacacttttttttttcaaattcacaaaattcacagtggtgctgactgtgtaataaccactattgggaaacatcccgtaaacctgcctgttgccatgccaatggagtgactgaactggtgacatctgtttgagcatgctttgtgtggctggtagaatgccaccgttgtgcatacactttgtacatcaggggtgaagggagggttttctagattattgggggagggtaaaattgggatttttttgttgttccttttttgatggggtgtgggggtatagtactcagcttatgccctaaaataacatgtataaaaacccctgaagtattgtgtgggtgtgtacgtgtgagtgtgtgtttgtatacatctggcaattaaagctttgtcttctggaacttagtgaattcttttctctttttcctccagaagtatttgttacaagatttgtaaataagagctctacttagtttgtttaccatgaacatgttgcagcaaaccttatgcatctaattcctacaaggttaaagaaaggcttttagacttgccaggttaagcaacagccaagttctcagtaattgtttgccttgatttatcttttagacttcattttgccagctctaaaactcccagtcttccttgattttagtccttaatcttttatgttctgagcaggaagggtaaaagacaggaacctgcttcactgtattaactagtccatgggctgagaccggggcatctcttttcttcatactgcaatgttgctagatacatgatcagacaccagagggttgggcattcttgcaataccttaacagtgctgaaatctgcagcatggtactaaggaagttaaagtttgaatgtaaccactttatttaaaaggtttttttctttaatttaaatgaaatggggttgaagtgaacatgattttgttgaccatgttcgtgaattacagatgcaacatgcattggtagaatcgtgtgatggtcttttgtgatacttaatttttacatatcccagtctctgtatgtatctgcatagacaaagaaaaaacaaactcctgctttgcttttattgaagggtttccaggactgcgtgtctgctcctgagctctgttttaagtatgtgtatcctttgcttgtattttgtattaaaaaaataagaaaaagaagcctttattgttgagcatgttggcattgtcccctttatttttttctctttttgggacatatgaagcaagttattctttttctgtatctttttttcttttgtaaactttttttttgttttgtttaaaaatggctttataaaagggcttttataacccagatgtgtgctctgtgtacttcttgtaataccttaaagcaaacacactaacttacacagctttgttaatcagctcccagttcagcctgactttgtgggaacttatttccctaataaattatttagaaactttaacagtgaccatccctgttgttggtaaaagataaacatgtcttggttcaaaagttaatacctcaggatggaatcaagaagcagtagacttaccagtttgattaattaagggagcactggactgggtgcgtaaggattcttaattagcattttttctcatgtttacatccaaggttatgaagtgttgtggaaagcaaagtttaacaatcatatataataaaagataatgtttatactcacagaacacacttgcattcaattccaaatacccataagaactacgctgaattttgaattaaagattacttgttaggtggacaatgtggtacaagatccctctttagaactgggctgatattgtagctattagggcttttttctttttaacttttcctcttgtttacatacttgccttgtcagccaaatactataattgaaatgcaaatttggctttgaaattaaatgctttgtgcatcctgttatccgtcagtgactagctaactttttaaatttctttctttcttttttttttttttttttttgagatggagtcttgctcttgtcgcccaggctggagtgcaatgacatgatctcagctcactgcaaactccacctcccgggttcaagtgattctcctgcctcagcctcccaagtagctgggattacaggcatacaccaccacacctggctaatttttgtatttttagtacagacggggtttcactatgttggccaggctggtcttgaactcctgatctcaagtgatctgcccacctcggcctcccaaagttctaggattataggcgtgagccacccctcccggccattttattctttttcggagatatgagagtcttgctatgttgcctgggctggtctcaaattcctggactcaagggatcctcctgcttcagctcccccagtagctcagattacaggtgcaggcacactgcccacatacatttatttcttaatataatgagttgtctcaggttaaagttgaatttggatgagcattaaccatctacttttcctcataatccttaagtattttatggataacatagacaattttatgtttcaggacagtgctgaagaaatgcagtctgatttaaaggatttcaaaaaccaacaagtggataaacagatgaagagaggttaaaacacacttggagctacctagactcctatccatgaacatcggtatacagtactacactgtagttgtgcaacacatattacctcatttaatttttccaacaactgtgagatcggcaagtgtttgttcttccaatattgtaaagaataacctggttcaggtaagatgaggttttatgtggtacctgatgtagctagtatgtagtacaacaagggtttgaatcagtgctgtgtgctttaagttatcacagttgttcgttctaaagccagctccctttggtatacatgggtcccttaagccttcttcctggtattgagcttttgagcattttgctgttctctcacatctcccagtaacagtgatacttgaaccagtccaatgagttacatcaaagatttaatggggaaagtcggaaacttcaatgagtaaggagatttctcattgaatacttcggtttgcttgaaaatcctggtgacccctagacacaaagcctcaaattatttaaaagcttttattttctgattatgtctcatgatagtgactgttgaggaaaatgttcgtcatgttgactgtatagcagttacagtctgccagtagagggcagtgtttgtcctccataggtagtggaatgcttgctctccccatctcatttttagatactatcagactaggctcaggacatttttagatactgtcggctaggctcagttgatattctgcaagtgtatcaacaccttgccacttacttgggttatcgaagccctgtgatcagtgtacccagttaacatcctaatgtatgtagcagcaatcttttctgaattttaaat

SEQ ID NO: 4875 - DNA, 1026 bp, Homo sapiens
cactggtatcacagtctcagcagccagcaaagacttaattgtgaaaatgcacaaacctagagtaatacgtttaagttccacgttctgaactctaccccatcctctgtgctatcagaataaaaccacacttgatgacatgagttgatttttttctgagccctaatggtttctcctcgttggagctagtttgttaactaaatcagaaatcaatttgctttttgtgtaggtggttttattctgttaggtagaactagtcattgttaaacttctgtttatcacttcctactgttaggaatgatggaactatcaaatgttatttgatggctttagtttctgatcagattaattcttttccttccgtctttttgacctgctttttataaacaacttttatcataaacaactgttagtttaccaagcaattaaggatgttgtgcatattctatagcatggtgcttcttctttacaggtattactgctaacatcatagagtgttggtaaaaactgatgggaaatactgtagcatagtgtagtaacttatgaccagtttagaaactgagatagatttacctagggatatatgtgctcccttgtgcccaccttggtttttagtaagttgcatattgtctttatagattttattcttacagattgttgtattttgtagctgacttttattaaagacatttttttctcttcccttccccaaattatttttctattttcagtgacgccaagtccagtgaaaggcaaagggaaagtgggtcgccccacagcttcaaaggcatcaaaggaaaagactccttctcccaaagaagaagatgaggaaccggaaagcccgccagaaaagaaaacatctacaagccccccacccgagaaatctggggatgaagggtctgaagatgaagccccttctggggaggattaaaagtgatgatggtctggggagagattttattaaaaaaaaaaagaaaaaaaaagaaaaaagagggaggaaaaaaaagaacctacttaagatagaacatg

SEQ ID NO: 4876 - DNA, 1050 bp, Homo sapiens
ctcattgttcagctcccacttataagcgagaacatggcagtgtttggtcttttgtgcctgcattagtttgctgaggataatggcctccagctccatccatgtccctgcaaagagcatgatctccttccctttttatggctgcatagtattccatggtgtgtatgtaccacattttctttatccagtctatcattgatgggcatttgagttgattccatcattttgcagaaatgttgaaggatagaatttgcccttttacaatgaaataaagctgcagattatatcctatattggccactgtgttggccttttcagtcagttatgttttcagtcaattattaatcttttgcactatcttgtcaaatataaaattctttaatcattatatcatggtaattctgatattgcagaggatagtgaagatgaaaaagaagatcataaaaatgtgcgccaacaacggcaggcggcatctaaagcagcttctaaacagagagagatgctcatggaagatgtgggcagtgaggaagaacaagaagaggaggatgaggcaccattccaggagagtatgtgaagttgttttgtgtactttggttgtttggtcataattgtagtttgtgaccttggttactttggcattttctaggatgctaaatgttacaaccagtcccttaaattgggtagatactccgtgttaaaagagatgactgtattggttcctgttaatatttttaaaggttcagagattctcacgattgcccaccatttgtaatggttgcaccctttatttaatgatgtctgtgttcaaacactgaatgaacaatttgcttaagtaacagtcacattaggcattgtgattgagatttgtattttgccctggtggaggaggttgtagacctcttttcacagaaaaaaacatgttaataataaaatttaggtgtttcacaggttattcagattagttaatcctatgtatttttgttttgtgtttggttttcttgtttcacttattcataattggaccaaaaaggccctgtcagttcagttttgttt

SEQ ID NO: 4877 - DNA, 1025 bp, Homo sapiens
tttagtggagacatagccttttgtaacagtagccatagagaaagttttttttgtaaaaattttaacttaaattaatatgaattaatggggagtctccatggccaaataaaatgttcagtcctgatgattctacttgttgttggtatttatttttaaatttaatcttctaagaattgagatttttaatccatattacttccagccactttagttttgacctacattcccttgctgttgtctccctggatctccctttaaatgagactgctgtttagctaatacaaaggggagagacaaagttctgctaaattcactctgcttagctgttttgctttccctcctattcaagtatactatctggctacctaagttgaaaagaaactgtattaatcttttgcactatctggtgatcctgtgataatagagtatatgctttcagtcatttgccttgtaaatcctagtttgaatctcttacacttgctagtttattgagcacttctagataaataactctgtactagtattaagctaagcttctaccaagtgggtttagttttgggtcggccatgtcagctttattctgtttgtctctagatgagatttttaaaagtgaaagagatgacttgaacactgactatggcaaggctcatgggactagaagtgttttcagaaaagggctgtaggtagagactaaggcaaatatggtttagtctagaggcagtaggctggcagcctaccctttaaccaaatttattcacaaacacaactgtgtgttaaaaaaattttttttaggctgagcatggtggctcccacccgccatcccagcactttgggaggccaaggtgggtggatcacctgaggtcaagggttcaagaccagcctggccaacatggcaaaaccctgtctctatcaaaaatacaaaaatttggctgagcccggtggctcatgcctgtaatcccagcactttgggaggccaaggcaggtggatcacctgaggtcaggagttcgagaccagcctggccaac

SEQ ID NO: 4878 - DNA, 1100 bp, Homo sapiens
gaattgcttctatattcatattttgctttacactgattttatggtatttgtgataaatggcatatgagatcattctggctgttttcagatcattgaaagttaaaatacttcatatttcaacggaagggatagtctttcaatttaattttaaaatttaattgtttatataatgccaatatagtctacatggcatttctgtagttctgtttgttgaaaagtaggatagaaaaatatgtactaaataaaaagtatcctttttagtgtcttaggtttaaagtaacaagttacaggccaggcctggtggctcacacctgtaatcccagcattttgggagattaaggtgagaggattgcttgaggccaggagtttgagaccagcatgggaaacatagaaaggccccgtctctacaaaaaaaaaaaattgtttttaattagccaggcatggtggctgtgtgcctttctgtagttccacaagctaaggtgggaggatcacttgagctcaggagttggagactgcagtgagctatgactgccactgcactccagcctggatgacagaacaagaccctgtctcaattgttggatggatggatgggtggacggacagatggaagataggtaggtaggtctgtctagatagatacagatagatatacagggaaggaggaggagattaagttttcttctgttgtggagggcagttaatttttaatgacaaatgccatgaaaaacagtattgtgatcataatgcaatatgatcatttgcagtgaccattttctatattatattttaatataatgcctgccatttatgttatttattaaatattttatttattatttaatttattatttaaacatttaattttatagaatatcttttagatctgtcaagcaatttaggttatcagttccaacagaggaagaactaaggcccagagaaattacatgattttcttgacattctagaaccagaacccaggattcctagtacaaagagtccatactaattcctttcttgagtgtttctagtgatagagtaaggaagtagccattgttagcagacagttaaagctctttatgttgaacctacacttaatg

SEQ ID NO: 4879 - DNA, 1909 bp, Homo sapiens
atggtggctcatgcctgtaatcctagcacgttgggaggccaaggcgggcagatcacttgaggtcagcggtttgaaaccagcctggccaacatgatggaaccctgtctctactaaaaatacaaaaaaagtagccgggcatggtggtggatacctgtaatctcagctattggggaggctgaggcaggagaattgcttgaacccgggaggtagaggttgcagtgagccgagatcacgccactgcactccagcctgggaaacaaagcgagactccgtctcaaaaaataaataaaagataaaaatagataaatataattttggaggtaaagtttagcagttttctttaatgtggaactttcaaagcttttcacattaaaattcattttgaatgtttattggggtggtaatactgataatatccaactgataattaccagtaaatctttagaaaacctattttgacaacacaggttggacaattctgtaatgagataatttttaaaatacgatactataagacaaatgtatacttttaaaatacttttgattagctgtgtttaattttatgattcctgggaagattttatttgaacaaaaagtgtttactgctaaaaagtttaactgtcactgatttaaatgaactaatttccttttttaaaaatttattagagcaaaagaattctgtgaaaataccgaggttttatttcaacaaggattttgacagcttcacataggtccttgtaagatggagaaatacaggcagaatgatagctcagtgtgagggactttgcctgagcagccttacccggagagggctgacaaataaatagattgttaccctggaagactgtttgcactgttgcctgaaaggattctgttcttggcatatcttctaattaatgatatagatgaggacactgatggtgtgctgattaaatttgcagatgttaagaagttggggaagataaataatatgctgaaatggcaggatcaggataccaaacggtcttagattatggaaaaggaggttttagtcattggaattacaatatatagtccactgaatgatggaacagtccaaaagggaactgaaatcttggattgcattgaagtatagagtagaataggaagaggagggtcataatcctgatttgctccccattccccatctttttataatcatattatgtttcatcctgggtgctgctttagtatttactaaatccaaggtggtatggaggaaagcagctagagcatgaagcgagtacttgaaatatgaggaagtgttaaaaaggagccctagtatttagcttcagagaaaaagtgggaatagtcatataaatttaaggaatgctctgaagaggaggggttagatttagaccatgctaatcccaggaggtggaactagatagaaccagtgagtggacactagaggcagattcatctccttgtaaagaactatttaattattggaattttttttttttttttttagaaggagttttgctctgtcacccaggctggagtgcagtggcgtgatctcggctcactgcaaactccgttccccgggttcaagctattctcctgcctcaacctcccaagtacctgggattacaggcgcctacaaccacgccgggctaattttttattttttattttttagtagagatggagttttgccatgttggccaggctggtcttgaactcctgacctcaggtgatccactgcctcggcctctcaaagtgctgggattacaggggtgagccaccacacctggcaattactggaattttcttagcataggctgccttggagatcatgagaagttctcagtcattctcttctagggatatttgttaacaggatacaagctaaaggttgaattagattgtctagggtccagtagctcta

SEQ ID NO: 4880 - DNA, 2028 bp, Homo sapiens
cacttagtagaattagcaattactgagcaactcttagatgccaaataattccaccaggtactttatacatatttcaaaatcatgcacaactcttaaaggcatatgttatcctcatttcatatgttaggcctgaggttaggataaaaaaagtaactacacagttcacctaactattaagagatgaagcaggaatttgtatcccactgtgaacaacccaaagccagttcgtgatcttttcaatgtgacattgtcacagggtacactttgtcacggtgttagcacattttgtcttctttggagcaagttacagttcataatagaacttttgttgtggggaggcctaattttctagggaggaagaggagaaaatgtgaagagattaaggggagatacacctgacaggaggaaaaaccagtggagtatttagtgtgaacctttgccgagaaaaaggtggcattgttttaagtttatacgtttcaaaatatgagggcgtttccccttaactaggtgattccaaagccacctaaaggacaaaaagggaatgaggggctcattttacataaaaatatggatgcaaaaatgctaaacagacaattagctaactgaaaccaatgagtacactaactcactgtcatcagtaggctcttggaaacttctaactttaagcaacatgatatacagtaaacaggttttttaataatgttgtgttacaaggtcgatgagaaaggtctactgcaacatttcacttaaggctccactttccaagagcctatcagtgacgttaagtgagaactgtattaaaaatatatgtgatcaagtagggtttgtcccaagaacaaaacaatctttctgtgagtcaatgtattaaaagactaaaggaaaaaccattgcatttgaaaaaggtttaacgcctattgtaaaacttaatgcattaaaattagaaggaaatgattaacttgactgaggttacaaataggttaagtggttgagtttttagtgttttaagtcgattagtgattaattattggggagagataatcctggcacaacaaaagaagccctgggtatcaggaaacggatttcagcctcttctgggtttatatagtggagatgttgaactccattggagtaatagtatcttgcagtcacaaagcattttacaattttcaaaactttttctcactggcttcctccagcccaaaaaacaccgttagttaagaaagaaagctaattttgaataaaagtttttggtttttggggtttttttggcctgttttttcccaaaaatgtaacagtcaccatactgtgtaacgctgggatactgcgcctacgcattctacatgaaggttgtccctctagagttgtatgacttacagtctgcatggccaaatgggttactttgcaaactttgaacttaaaaagtattgagcatgctgaaaagtgttaaatttgcattttaaaaacaattcctagctgtaaaaggaatgtgaccgtattactctaaattcagaagtagctttttggattgttgagactggagactgcacctaggagactcacatgttgtggacaataggaggaaaccttttatttatttgtttgtttatttatttatttttttttctttgagaccgagtctcgctctgtcctccaggctggaatgcagtggagcgatctcggctcactgcaagctccgcctcccgggttcacgccattctcccgcctcagcctcgcgagtagctgggactacaggcgcccgccaccacgcccggctaattttttagtatttttagtagagacggggtttcaccgtgttggccaggatggtctcgatcccctgaccttgtgatccgcccacctcggcctcccaaagtgctgggattacaggcgtgagccacagcgtccggccccaggaggaaaccttttattttttagcacaagaccacttcggtcaaactgggcgcccctttattttgttgggaaaaaattattgctgtctagattctaggaagtgaaactaatcgttat

SEQ ID NO: 4881 - DNA, 1070 bp, Homo sapiens
tggttctcgttccactctcacccgcgtacgcgtctcgggatatttttgtaaccctcttgtccccgagtgactttagtaataaaagggctaggttcgggtaaccatcagacttcattctcggaatttcaacaagtttgctattcccccagctgtcggtggaatcgtcctatgccattctccaggctattgtatggaatgtgccatttatggaggggtgtggtttagtccaatctgttgaggccttaaaaaggagagctgttgcaaataaatatttttaatgtaaggaattggcttctttgcatagtgtgttttctaaataaatagataaaggcttagtttttaaatgttttaacagtcgttgcttccccttcattccaagttgtgtgggaaacggaagtacctttaattagagttctaaagagaggtttgggaccctggcaagggttttgttctacaccgttctgtctccagactagatcatcctccaactggtggtggtatgagactgcgtactcctacacacggggtgggaatgaggagaaagctgctgttagctctgtttcaatcagcatctgtggtaactcacgatctctactctgaaagttatgctggccttttggcaaggagtctggatagctctttcagagtatagtttgcgtaatttttttggcataaaacttgaccaatgtatccatcaactcacgtagaatattttctttaggatcaggtaaaataataaaataaagatttattttacctggattggatcttttgtcttctggaagtaattactgtgtggtcaaattaggtcaaattaggaaaaataattcctctaccttttaaattttagttcactaagttttgatgactttattttattgtggtgacgttcttatctcatctgcctgaatttgttttcccagatttaggtattggaacatgaacagaacatttttactggaaaacttggattttttatgttaccatgtggggatatatatattaagcacattctatcagttttttggaggcattgggacttctgcacaacttttttattactcagtatg

SEQ ID NO: 4882 - DNA, 1037 bp, Homo sapiens
gttgttgggtccttcttcgggtcaggaagtactgtctgggaacctagatggtgtaattgccgggtgtttggtttacacgcctctcttgagtttcccgttagattttcccaaactgagcccactgccaggagaaaggtaagagcaaaggcgtgaagatgagaaatagggaagggaggatgaggatgagcaattgctgtttattgcaggcgtactgtgaacttaagtctccagcctttcagctgtccggcaaatctctccaatcagcagaagcagctgagatcctctgtggggcctcctggttaggtgccggctggggctgtagtcctgcccctctgttgagggaggaaccgcaaggtgtttaacctggcttcagtgggagaacgcaggaagcggaactggtctgaaggactgtagctttgttgtggggctgtgggtgggatggaagacacaaaatccccgaacgagccccttggctacgcagtcagatgcccatgagggctgatgagctgtgtttttgtccgttgattgcttaaataaaggtaaccaaggaattcttccaagaatgtgaaatataccacttctctgacctatcttcccaccacttttttcctcaaactggagaaggtagggaggaaggggacaccgagttcattcatttctttcccgggtgtggcctttggactcaactattttttcagaggcagaaatgccttattgttaattagaaggtatttagctaggaagagctggtgatgggggagagtaacttaaaattttatttctctctgttaaaagaacttgtttcaaggggggaaaactcgtaccaatggaaaaattgaaaatgtgtgctcctgttcatatggaagtttaaaaagaaattaacaaacatttacattgcaattaaaacattctccttaagaacccccagtagggcccagtaccgtggttcatacttgcaatcccagcactttaggaggctgaggcgggaggattgcttgagcccaggagttcgagaccagccatgggaaacatggcaa

SEQ ID NO: 4883 - DNA, 1028 bp, Homo sapiens
aggcaagagggctgagtttctgcaacaagtaggatttaggtcaggaagctccttgtttggtaaacttgggagcagaatataatgctgatgtgggtgaccctgggtcgtagcagcatcttcctttctaaagagctcttattgtgcctgttgtctgctcaaagtggtaattgtggggtggagaaacacagagaggttgctggggtggaaagaggaagattaaaaagtaaggattatggccagccaagccctgtgatgcactgaatgggtctgatcatgtggcctctggctccccctggagagagaggatggctataggctgggcccttttgtctccccaggtgctgattctcctgtacatcgcagactggatggtgcactggatgtggggccggggcctggacccggacaacttctccatcccatacttgactgctctgggggacctgcttggcactgggctcctagcactcagcttccatgttctctggctcataggggaccgagacacggatgtcggggactagcttggtcactcaacattttccccatccctctgcactttctatttgaaatttttcttttgttcccctgtccctcctccaccccacactcccacctctttctaggacttcactttgataccaaattctcattattttcaatgggaatttttatacattgagccaagtttgtatagcaagaatttgggaaacacagatggcctgagataagcagtacaagtaggtttttgagacaatcaccaagtgcagtttcatggtgggtgcctccaggtgatgtggactggagcaggggagttttgtctggaatctggggacatggggtttggctttagcaacctgtcttggccctaatgagaaaccctttgtaagtgggctctggatttttggttttgttttctttttatctgttttgttttatttttggttttggttgaacagagggacagaagaataagtaacactcccaaacacagacatacttttgtagaagtggaccaacttcaaagc

SEQ ID NO: 4884 - DNA, 1048 bp, Homo sapiens
attcccagctaggttaagacaggtccttattttaactcactactcacctgctaaggatcttgaacaaagtagatcctgctgtgtatacagaagtctacaacgatgaaagtgcatggcaagcgtggccttggggaagtagagtgggaaggaagtattcctcctgtgcctggcctgctcctgtggccgcagcatccctgggcgggacactcttatctgcttcacttgaccaccccttctgcttttcccatctctgtcccctgcctgctgtcagggacccatttgctttgctcctgctttgtcctgcaccgtatatccaggtgttgccctaaagccctttcctggacacctagaggatgccttttggaaaagcctcagacaggtgaagcctggggttactgtaatctcatctgacccagtccttaccctaaaagatcagctccagcccagcttctcccacaggagcccagattctccccagcctggagcctaaagcttgtatctgggaatttaagtcttcttaatgtcttgattcctggctctgactttcttccctgctgctaccctcctgaggtggctcaggccagaacccttgaaggcaggtcagggtcagtgtatgagcttggattggagtaggtgaaggatggaagaggcgcattggaagggcaaggaagaggtactggcaggaccactgaggatcgagacttaaggtgattgctgtgcctcaggattcattttggctatgggggaggcagtctattccctcacctgcagaataccagggatccatgagcccctcacaccaaggttagagaaggaaagagatgaggagctgcatttctgagaagtagttaaaatctagatgctcccctcacctccaagcagggcagcacttcctggaacatgccctttttcatccccatcagagcaggaaggcgtgggtggctgcttggcagacgggtgtgacttcaggggcagatactcctagcctggatgaacaggatggggctgaatttggccaaaggaggaagaagagctactcactgtctgc

SEQ ID NO: 4885 - DNA, 1059 bp, Homo sapiens
actgggtggattagaatctggattaattagcgttatcttctgaagtgagcaagaataaaagttcttagatggggtagggagggacccccgcatacacaccacacccctacccatcccacacacttagattccaaagtttctgatgtgttgccccatccccactccaggcccatgagctggagacattgagaggcctgggtagggaacctttggagctgctctcagtgtggcacctcagctcacctcagagctagggtccacttggtgtggatgacaatgacaggtttgtccatgtcctcctcccccagccttcctgctacagctgggctggagcaggccctgcagatggcaacagtgagatggcaggagggggtgagtgcagagggaccgagacatgggaccacagggagattgttattccacatccatgggagtaaaagggggactgacaatctcagattcaggaagagcgggatggtttctaaggattcacacctatattaccccttcataagctaagatggacttcagtaagagaatctgaaagtgccccaagaccatggggccatctggagaagctggctatggagtgtccccagcatcttggagcaactgagcaggagtccatattgggcctggttcagatgtctccttggtccagggcccccatctttccttgctgctgtagaaaacttggtttctttttcaccaacgagatgcaaaaaaaataaaaataaaaagttgaattttaattttaatttaaaagaaaaagaaaacccactctcttcctagaagggtcatttctgcctcctcttatctgccctcccgtaaatgtgcacagcagcatctgcagtgaaataaggggctggtgctggcccaaagtaggaaaaggataaatggacctccatctgctctaacttcccaaccatggctgaaagttcctgcagcatctggaagggaagcaggctggggcctggtgttggcttctgaagggggttgggatatgggagcctcctcactgcaggagccttgtgcccatctgcccagtttggtcctagg

SEQ ID NO: 4886 - DNA, 1053 bp, Homo sapiens
ctatctctaccggcatgagcatatgaaactaggaaagggatttccagaaattgagcctaaacaggatcctgttaaagcctttggcctgccagagtctgatctgagggattatgatctgtatagtagtaatgaactatggttccttatgtgaatacaagtaaaatatagcactgtgcaaagttctttcacaaacttgatttgttttgcacgatcttgaagggagtggaggctaagaaaggtcatgtcccgccttgttgatctctgctgaagacacaaagccagtaagtggtagggctgggtctaaaatgaacatctacccttaattgtggtttgacccacaattctgccatgacacagtgctgtccagacctgtgcattgagtggtttttccagtaacggtgacacatttgcattgagtcatcttccctctccccctgtgaacagcatagggacatattcaaaggcagagtagagccagactgtgtaacaggttctttttcctatgtgctaagtcaaataatctgtatcaatgtcaaacgtacaactttgaatttattaaccctatgctgtaaccatatgagattcaatgaaaagcagaaagtgcttcatttttggactttggcaaaatcattgaaagatacatttcttgggggtttagatgaacaaaaatgttacagatgtgccccattcttgggcagttttaaggatgcttgttggacattcattcattctttgggccccatgtattgcattctatgtgatcaatactggaaggcagcaagaatttctttttaataatttaatgtggttatttccatgattactgagatgttcctttgatgaaagtcagagaactcaagtgaaaggactgtttgttttggtcatttgatctagcccccttcctccaggtgaagtgatcttaaacttttaaagatctattcctttctaccttatttttaaataattccagaagtagaagaatcatggctcagctcagtagcctgtcctggtgtcaaatcacccttagctccagaaggcccttctctttcccac

SEQ ID NO: 4887 - DNA, 1066 bp, Homo sapiens
gtgctttccacaggagaaagcttcgagctgatgtgacaactgctttccccacccttggaactgatcaagtctctgagttagtacctggaaaggaggagctcaacattgtgaagttgtatgctcacaaaggggatgcagtgactgtgtacgtgagtggtggtaaccccatcctctttgaactggagaaaaatctgtatccaacaggtatgacaacaggacgaagatggccattaccattaggtagttcttgcctaacatctgcttctctctgtttcttccattgtctcccataaaataagcaagcacgaaatctcccaataccatccccaaggatctttatggacctggtgttcctagaattgggtctttcaattctaggatgcaaaaggttttctcttatgcaaaaccactataggagggattaaaaaaagggctgacatagtaagtaagggtggttgcaaagggaagttctgagatgaaggaacagtggctgagaagtttacagtgggttgactaggaatagagcagaggtcttgaaaaggatggaatttcagggcatgtcttcatgagacagagtcttgctctgttgcccaggctggagtgcagtggcgcaatctcagctcactgcaagctccgcctcctgggttcacaccattctcttgcctcagcctcccgagtagcaggaactacaggcacccgccaccacaccttgctaattttttgcattttttagtagagacgggatttcaccatgttagccaggatgatcttgatctcctgacctcatgatccgcccgcctcggcctcccaaagtgctggaattacagacgtgagccaccgcgcctggccaaaaatatatatattttttagagacaaggtcttactctgtcacccaggctgaagtgcagtggtgtgatcgtagctaactgtaacctcaacctcctgtgcttaagggatcctcccacctcagcctcctgtgtagctgggactacaggcatatgccaccatgtctggctacgtttaaaatttttggtagagacaaggtctcactatgttgctcgggctg

SEQ ID NO: 4888 - DNA, 1072 bp, Homo sapiens
gttggacactgatactctgtcaaattcctttcaaaaatgactctttagtctgctgaaatttagcactagtactttagtgttctgatcctggaaaattcaaggtgaagctttatttgtggaccatctgatttaattattgaggattaaaaacctaaacctttgctcattctaaactcaagcttttaagcctcacagaatttacaggggtttgctttttgtttgtttgttttttcattttttactgtgcttattaaactcttggaattagttattaaagggagtaaattctcatcttgggaattttgaaaatctatggacttacaactttcaggaggattaaatgtcttaagttttgtactagagcagaatgaaatctttcctattcattgagtttttgcctgccatagaggaatttttttaaaaattaaaatgacagtttatattagtggcaaagtgaataaagacctcactttcccaccccacccttcttcctttctcttacttttctttggattaaaggtcaggtgtagtactatgaagattcactcctgaataaagtgatttcagaagctaaaatttaacatacctggaaattttgtgatgtgttagccaagtgaagacattagtgtgttccatcttttgctaatggttcatggttgatttcttcattgtttcccatgaaattagcatagtcaagtggtacccttgacgcttgactgctggtcagtttgaccctgtttttaacaactaatgtagtcatgccgcttgattattccatgaagtcccagcaaaataataatgaggaattaactaacattatgttatctatctaatttgtctgtgtccctaaatgcccatgcctaacttgcttctctagtttattccttctgtggagggattaaaacgtgggtgttgcaagttgccctaagctaaacatagttttcttacatctttttgggaaaaaaaatggaatgggaagtatgcaagattaagcaagagtgatttttttttttttttgacaaatcaggtggccttcctaaacatactaagaattatgttctttcatgtgtgg

SEQ ID NO: 4889 - DNA, 1034 bp, Homo sapiens
gttaatcttggctgggcacagtggctcatgcctggatccccagtaatttggaacactgaggcaggcagattgcttgaggccaggagttcgagactagcttgggcaacatgcgagagcccgtctctacaaaaaaaaaaaaaaaatacaaaaattatccaggcatggtggtgcacacctgtagtcccagctgttggggaaagctaagttgggaggatcccttgaacccaggaggttgaggctgcagtaagctgtgattgagccactgagctccagcctgggtgacagagcgagatcctgtgtcaaaaaataattttgatttcacggaaggagaagaggactagtcttataccatatcccaaatgaaattgaaaatgtcttctgggaatcacagcaatgactcaaacttctgaatagtgactaggtttgagctggtaaggaagggattgtcaaatgccgtgacagtccacaggagggcagcagtgctccgatttacaaaggattagtcatactagtgtaaccttttctgagtgagcctagaaattctgatgaaaacagtgtagtccaggaaaaaaaaaaaaaaaatctgtatgtacaatcactcaattttgaatcatttctggaagttattagactccatgttaaatcctacttaagtacaagtatgcaaaatttaaaaatatgcagaaaagctcattcttggttaaaatgttagctgaaagacattactaagttttagaataccatagagttgactatttcccacaaaccctaaaatctacttgaacaccacaaattcatattccttctaatcccaagtcccttcagcattcttacagatttattgttagttaccttacaaagtaactaactgtccccatgtattttatcccaatttaaaaaatacattacagtctcaaggtcacataagattttccaaaatgctctattcatagtcaatataattttcaggccgggtgcggtggctcatgcctgtaatcccagcactttgggaggccaaggtgggcggatcacct

SEQ ID NO: 4890 - DNA, 1064 bp, Homo sapiens
ggaaaagctgcagttctgctcttgcaacacaaggagcagactggagaatttagatctgcgtcacagagctgagagagagagagagagagagagagagagagagagtgagagagcgagcgagcaagcaagctccgtcgataggtctgctagcaacagccgtgctgcagcagagagagagagagaaatcaagaaacaagtcatagcaacaccgggcaccaggttctgccagctcacttgctgagcgttcagagatctgtcagggccagaggcctctgggtagcctaggctaggagatgacacgcaaggtggcacgggcggttcccgtggggaggaggtggggtggtggtggggggcaggggtgggagcaagaggttgtggggcgacggtggagggtttgatgggaccaaattctggaacattcgggactgcggcaccttacggcgggaccaagatttgggtctgcgcaggcggcgatgggtggtccgacgggcttcaggacttgatggcgtaacccccttcttcccccacgtatgtatttgctgggatcaggggcgctgtctctgtgtatgtgggtgctctgtctttctcaccttctttctcgatttttgctatttatttctctgagggagggttttttcccactttaatttcttttccctagtgtcagctgctcaagcctgaccagggtagaggtgagaggagtgaaccatcccctgcttcccacctgacctcccagcttttaccctatttccttctagtggacagacagactggttctccaagttgtttgggtgtcagcgtccatctgtctgtccgtgcaggtcttatgtggaaggtaagggagtgagaagtgccgaaaggaagacagagggacagttttttcccaggggttgccttattgaaaggtctggccctgggattctgaggctggtggggagccgagtggccagggtggggtgtgggctgggagaagtggggtaaagctggtaggtttgtcactgcgtagttgggaaaagtggggaatggtgacgcagtcactgttgcatctggttaggagctctatg

SEQ ID NO: 4891 - DNA, 1034 bp, Homo sapiens
cttagctagtgatgctatttctttaccagttcttgctcatcctattcattctcagaagcccaggctggagttctcttctcagactatgcatgtccacatcaagctggcttctcacaattggcccctcagtgtattttcctaaaccttacttgtaaacatgttaaaatgaccagatttacaattagtgatctacaccgtaatagcagacctatttgtttgtcttatttctaccaaagaaatggaacagggagctcagaaacagacctatatgtatctggacacctgatttatgatgaagaaggcactgctgggcagtggggaatggatggttattttaataaacagtgctggttcaactggatatccacaggaaagaaatgaatcttgatcatatacaaaaataaattccaaagcgatcatcaatctaaatgtgaaaattaaaacaaaacttcatctacaagatagcatagaatatctttataactttggggtagccatacatttcttaaagaagacacagaaagcactaactctaagggagaagactgataagttggatgtcattaaaatgaggagcttctgattatcaaatgacatcaataaaagagagtgaagccaagcagagaggagaagatatactcagtacctatacctggcaagtggattcatatccagaatatataaataactccaacaaatccatcagtaaaagaaacccttccccctggacagaaaaaagttccatactgaacaattgtgagttgtatgcagttttcttctcccagtgcaaggttctaaccagtatgtcctggatcactggcacagcctggtggctggccttgggaactgtctgatctggtggctcttggcattttcttttgtgtatggactgtgggcccttcctttcccatgtgcttcttcacttgctattggtttggccacaagaggctcctgtctcatgaatgcctgtgtctcttcctcttttcctttggcttgttaacttttgatcagttatttcgagaatatttctctct

SEQ ID NO: 4892 - DNA, 1030 bp, Homo sapiens
tcctgctacaccccgggaaatttaatagtgtctcccagtctgctcatgggaagcccggaggcctacagtctttcccctagttctgctgtgagctagctctgggaccctgggctactccagtttcccatatgtaggagaacaagcttgaatttgagcagtagtttccaaataaataaataaataaataaatatatatatatatatatatatatttttttttttttattgcagtggaacactttcttcaagcaaggtattaaggataggtacagaatgtggaacagttaaaagcagaagtgtatattttccaaaaaatggaaaaaggggaaacaaccttagggcagtcagacttctctatgaattcctcccagagcctgcagggttctgctgcatatgcactcctgccccttgggttgcctttgctccttcattctcatggaaggctttacattcttcagagcctccctcagcttccatctccttcgtggagcatctgcctgcagtgacttctgcccctttctgttcctgttatacatatttattagctatttcaatcattgggctcccctatactgcctagtgatgggcttaaaaaatttataacacatataatatttacatatattgtgtataaattagcatatacttatatatttacatatatgtgtatgtatgtatatgtatgtatacgccacacatgcatacacacacatcctttaaagagagaccatgtctgtatgtcccccatttcctggtacataataaatccctaataaagatttttttaaaaaaatttttatttgctcacatgctcttgctcagacaatacaagtttttaatcatggggattatcttccttgtcctcccacatattttgccaggtcagtactcagtaaatagtagtgttaggtgattgtacaatatggtttattttgttcccaggaagtcctggatttgaattttagttctgccatatactagctttatgtctataggaaatatacttaattcttcttatttataaggtaga

SEQ ID NO: 4893 - DNA, 1496 bp, Homo sapiens
cagtggcccttctcactctgcatgccacctagagggcagagcctgcttcagagccctggagacctccaactggtttctcacatcttctgctccctggggcccctgacttcagcggggaagggagagggtcacatgagggcagatctcttctggacaagtcccattcctctctgtctgtccctgactgaacctgaaatggacacgaagagcagagtcgtttgggtggctgggaacagcactaaatttagcaaaactgtagctggtggggggccggcccagagtgagccaaacccagccctgagtggactagatttacagtcagtaacacagtcagcatcatctctgcttgggaaagtgtgtggttacacaggatcttccgttttccaaagcccagaagcttgtcagcctgtcccacaggcctccctgactctgtcccttgaagacttggctccacccccaccactgatgctgtcccttggacttagtcttccatccatctgtctgtctctcccttgtgtgtctggaatttccacttcagtaccttcaccttcttttatgcctcttagccaatgctgccaaccttgactcccaaggccctggagggcaagaccctagcattggtagattttctttagggcatctggcaccaaggacacctttcagtcaaggtggacaagtggaggaaagccaggagctgggatggttagtcgaacaagtgttgagggactgagatgtactttccctcctcccagaaacttagccacgtagatggtatttgtatacccaacaactgaagtgaattatgatggggacacagtggctgtgagactcttggacagttgggagtttctctttggttggctgagtctctgccctggtgtcgatgtatcttggaagaggtgggttttgtgggattaaagagtggaggtctgtgggtgacaggacatcttcccctgctggctccctctcccactcctcagatctgatggtggtgacttgtctggaggagcttctgttttcttaatgccctgggagataatgaccaggctaaatttactcaactctttacaaagtggatgattacactgagaggccaggactgggatcatgcctatgggagtgaaggcttcagggctctggcagccactggaaatttaagccttggattttgctgattgggaactgtgtcatctccttggtcttcttggttttcactcccttcacccaggactaggatcaaacatgatttgttagtgtagggcagtgggtctcaaccaggggcaattctgtactccctagctctggctcccaggggacagttggcaatgtccagagacattttttggttgtcataactgggctgcaggaagggtgttactggcatctggtgtgtagaaaacaggtatcctgctgaatattatacaatgcacagaacaactgtccctacaacagagttgttggtccaaaatatcaatcgtgctggggttgagaaacct

SEQ ID NO: 4894 - DNA, 1057 bp, Homo sapiens
cagaggtaaataaaagattcacagtttgatctggaaggtttatgggcagctgaaccaattttaattccatctgcactggatcacatgcttcaagagagcatgtctgtatctgtcttgtcctttgctgtcaccccagtgctgagtggagagcttggcacacaataggcctcagatatttattggctgacccatccttgtttgatctgtcctggaaatgtgcaggaggaatctgagtgggtaagtggaggaagagaggtgcttaacgcagcaagtgtgacaaatttgggggaagatggacatacttggatgtatgacgatgagtgcctttaagtgactgcctttaaggaaaagagaagggttaaagctgtatgggcatgacagaatccattggcattagggccatgagaaggaaggaatataacctggctacaaaggtgggttagaggtagtcaggatcattgggtatagcagagggccaccagaattgtgaagaactaaccagcggcagagaagggaagagtggaaggagagtaggagccattgtgagaggaaacatggagacctcttcaggcctaggatgaaagcagaaatgacacaagtgagtctcagatgaacatgatggcagggataaagaaaagatgggactctcagctctgttctgctggtctcctcagaaaccactgtgtccatgtatgactaaaaatgcctctcagttattttccaacagtgcggcaaatgcgaggaaattaactatggtttgacattatggttagtcttttttttttttttcaaatttgtcaatggaaattttcacaggtacacaaagatagagttagcgtaatacacctcaatgttcccatcccccagtttttcgacttgtaatcaacacatggcttttctcatttcttttataccttcacccacctttttcttactcccttcttggattattttacagcaagacctagatcctgtattattttatctataaatactttttaatatatctctaaatgataataccttttaaaaacttaaccctagtggtattattaca

SEQ ID NO: 4895 - DNA, 1050 bp, Homo sapiens
actcttgaaagccttccctgatttgtacttcccttttgctcctatagcttttaccatgtctcaatcatattgctaatatttcattatagtttgggaggtgtgtctgtcttcctgacaacactatgagtactttgggatcaaggttgtatctgtgcattctgtgaacttaatgtctacacagactgtattgtaggtgtttaatacatatttattaataataactatcagctatcagcaaggtacagggcttagcattttctaacccatgccatccttcatgtctaagaggcggtatggtgtaaaagttgagaacatgggctctgtagccagcctgcctgagtgcgagtcccagctgtataacttactgaatacatgactttaaacaacttcactgagactctctgttcctcagtttcttcttcagctgcagataacttttatacaacttatatatatagcagtctggtggatgaatggatggatgaatggatgaactcagcggatagactaatgattgagtaaatgaatgaataaacaagcaaatgcacaaagtatatgtgcccggtgtatttctaccacattcaggttgacttggtgataaatcaaatatatcagaatgcagattcacaaggtcacgccaatcaacccacactgactaacccctgggtacaaagcactgaggccatgtggtcattgctgcctccatggaatggtcttgatccaactgaccagtctataaaggttcccaaaccaacacagaggcactggatccagcaaagcctaggagctttcctgcctcatatcaccaccttgccagagttgaatgaatgaatggcaggaatgaataaatgagctctataccaaaaggaaattaaaatgttccaatgtaagtataggagactcttgtttccccttaggcagagatttaatacatattcttatcctccatctccctcccgctccctctatccttccttccctctctcgctctctctctctttcacacacatacacacacactcatctactcactcactgccttctaggaag

SEQ ID NO: 4896 - DNA, 1034 bp, Homo sapiens
agaagtgacatctaaattgttcctttggtcccgctattttccataggaaattctttctctcctcacccccctcccccttttccctttaaatcgcgtgcataaaatatactaataacaatcttcggtgtctgtgcatgagtgacagctgaaataagaaaaagactaatcgtacctcctgcagccctgtcacatggagattaaatgagtctctctccccaccctctccctgctccccaccccctcacccccactctctcctctctcttggttctcaatgagaatcatgggcatttgaataataatattatagacgccatcagagtgacagtggggaaaaaatcagctcaaacccatgattattccttcactctaataattatttaaataccagataactcctttcactctaattgaggactttcagccgtcggcattacccggggcttttgcgttcgccctcttgctcaccttgtgctacccaacgtgcctggactacctctaaggtcggtgttagacagagcgatgctcagaatgcttgcacgtacagctgcacaagggatatgaagacaggtccttcagtagcattccacccacggggaaaagatggggcctcagactctcacatttagacaattttattctcacagaaatcttaaaccaaaaggagccttctgagatcattgggaccaatcccctgcctctaggtaaactgattcctaggcagcttccaggaaaattcaatatcagaaaatttcagaatctccttggcaggatgctctgcagatcctctctaggcagaatgtcccccttaatatctaactttaatcccttctgctgtagctctaactctttgggaagaaggagctttctgtgcatagactaaatctgacctgtccgtggggttgtggcagaggacaccatagcccccaagttacagcataggtgacggtcctgagtgtgacatttgcctgggcctgcctgggcctagaagaggacagaagcaatcattctccccaagggggaaaggagccatt

SEQ ID NO: 4897 - DNA, 1050 bp, Homo sapiens
aagctcggtagaggtacacaaggcctctctgtactactgctgcaacttcctgtaaatgtgtaattgtttcaaaataagatgatgctaaagataacaaatcgtactccaagtcccattatacaaaaagggctaaaacgagtttccatggttaacccaggatgggatttagaactcagctagcatggcctctacttcgccccctagtggtagcaccaaaggcacccggtgaataacaaggtgtggaatctcaaggtgatgactcaacatctcatttgcatacccatagtaccctgcacatagtaaattatttaaagcttaaaagaatatttcttttgactcaacatttctaactatgggaagattaaagaattctttttgtgcaaactgtaggcagtaattctttttgtgcgaactgtaggcaccatcggcgtactaggagttgcggttactgcaacaatgagttgaactaatttgtagcattacactggtttctcttcagatcgaataaatctttcgccttttactaaagatttccgtggagagaaacaaatcagttataagctaattttttgtaagccttgccctggggaggcagatcatgttttataaaaaaagacttaaagaggaaaacattatggtgcaactttaggcttaagtgattcattgtcactgtttgtttaaacattgtgtaacagaacttgcaaagacagttaactcttgttttccatgtcaaaggtctgaatacttgcatgataaaagtctgtgtaactttccctggtgacatctgacttgctaattagcaacattaacattggagacacagactggcttagacaatttggagactcccccttaagtgatggcctttaagatcctaaactcagccacatagttgggagaatttctggttgcctgtctgcaaaaaagccccaaatccatccttctctagataacattctattatctatctacctagtaacaaattcaatgcaaggtggtgatgcaagctccttaaaggactccatcaattccactgatcagcttggtgta

SEQ ID NO: 4898 - DNA, 1040 bp, Homo sapiens
gaactaggctacatgagagcaagggcttgctgagtacttcactatttttgtgaagtaaagttcaaaagtgatcagaacattcaaacagctttagagctaacaagaagatgtctgattgatgacagagacatgcctgtgaaagtggaagctgccattgtccttcaagtatttatcagcaatcaagaaaaatctaaagaatgtatcacagcatttatcagacctgtaatgcaggctcttcttcatattataacagaaacagaaaatgatgaccttaccaatgtaattcagaaaatgatctgtgaaaatagtgaagaagttactcctattgcagtagaaatgacacaacagttggcaatgacatttagccaagtaatccagacagggccagatgaagaaggtagtgatgacaaagcagttactgctatgggaattctgaatacaattgacacacttcttagtgtagttgaagatcataaagagataacccaacagcttgagggaatctgcttacaggtcattggtactgttttacaacagcatgtctcagaattctatgaggacatctctttagcgcatagcctgacatgtcaacaagtgtctccacagatgtggcagctactaccccttgtatttgaagtctttcagcaagatggctttgattactttacagatatgatgcccctcctttataattatgtaacagttgataccaagacacttctgtctgataccaagtatcttgaaatgatatacagtatgtgcacaaaagattcttccagtagttgcaggagaagatgcagcgtgtcatacggcaaaattgttagaggtcatcgttctgcagtgcaaagggcgtcacgttgaccagtgcattcccttattcgtggaagcagccttagaaagactgccaagagaggttaagacaagtgaactttgaactatgggtatgcaagttgcaattgcagctttacattataatgcatacctattactaaataccttagaaaatcttcacttccctaataatgttgaaccagttacaa

SEQ ID NO: 4899 - DNA, 2067 bp, Homo sapiens
gcaaacaataaaataggtaaggataatattagttactactgtgatttatggagtggactaagacaaaatataaatggataattcaattagctatttatgtctatatccatttaaatgtggactagatacatattttgactattcttaaatttcctctagttcttttaaaatggtgtttcttaatttgccttgagagtagaagtctctcatattcacctctgtattgtcagtgcctagtctatactaagcactttcatttgtgaatggaaaatgagtgaatgaattatgtatgatggagtgtattggaacaagatcattgccttttttccattataaatttcaagataaagtataagctaaaaactttgaggttctgtttttatctcaggagtaatttaatgtgttttttaagtttcaaaacaaaataaactcttaacaccttccactttcttaccctttttccctgtataggaacaaatgaatcgcatgtcctacaatgagaaatcagatatctggtcattgggctgcttgctgtatgagttatgtgcattaatgtaagtatgatgaagacagattcctagtctaaggtttgtactgtttgtcacatttcactgggttcagttttttgagcctctgtgctaacgaaagtatattcaagtctgaaagaattgtaccctgggtaaaattaaggtagatagatgaacaggctaaaagaaactattcacaaattaaaactataagccatgaggctgggtcttgactgttcaagggtcttggctggttaggtgctttcttattagattgacacttagctcaagggagagcacataggtcaggcaggtaaggtaaagctactgtaaggatgtggaagaaatgaaacaagactcgggtagaggtctggggatctgtagagcagggaagagctccaattcttttcctttgttcttcttttcattttctttccctttgaaactattctgtagagcagtgattctcaactagggataagggaagcaaatttgcctcttatggggcatttgatgatgtttggataaatttttagttatcacagctggggagtgcttctggcatctagagggtagagggcagggaggctacaaaatacctataatgcacaggacagccccccacaacaaagaattatatgacctcaaatgtcaatagtgccaaggttgggaaacttacttataagaagaaaatcccagaagtagaaacttaaatacaaactggagcttaagctgtgcttttgatttagttcctattgtatattttcatttttacaatttgaaaatgtcttcgtcgtcttcttcttcttttttaaccctaggcctccatttacagcttttagccagaaagaactcgctgggaaaatcagagaaggcaaattcaggcgaattccataccgttactctgatgaattgaatgaaattattacgaggatgttaaacttaaaggtaaagatgataagatgatatattgtctgtttctagctgtcagttaagtgtcagagcatacattctctcttgtagatcaatggagactgaagaaacgttaaatatactttcttagctaaatttactgtgttaacacaagtgaaaacatatgtaaatttggcaaattgcacatccttgctggcccaccttctgcgctttctttatttctcctcccactctgtcatgctaacagatggtcggtagcaaggaaagattgcaaaaagaattcaaattctcgttccccttgtccttgcctacctcacagtggcaggtagtgagggaaggggccagaaataagagtttattactctgcctctagctctaattgagagattaaagaccagaagaaggggaggggtgatggagggcggacggaggacagctaaaaacagagggaaaatcaataaagagattatgtggaaaaactctggctatagaatggggaaggagatgttctggggaccaggctgacataagagaagaaggaaaatgccgtaggatcacagagaaggatacagatgaagtgacaggattgagagtcagtgagagagta

SEQ ID NO: 4900 - DNA, 1041 bp, Homo sapiens
agagctctaagagtggccctctcaggcacaagaaaggggcaggactaccagaacccgaagctttgtatctgcagtcagactccctcaaaatatccattattaggattattggattcatatttcccaatgtatataggtagaacttttacagaaagtaacattggacaggaaactgcctggctgctgatggagggatctttaccaaggtgtctcatcctgggaaaacacgactggggtggaatggggcagggactttgaccaccttcaccccaattttgactatagtaccttttagccaacttcccactaaccaactgagggtaggggttgggggagtcctcatgtgcctcattcccgtttgtctccccacaacatacatttactgcttagaactggaggaagattatggaagtaaactcacagctccttaagttcattgaactaaattagataatgaccttgattgtaggatataattaaaagggaggtaatttgttaaatcttggaactttcattctttgtttttgagcataatgagttcattcataccttggaaattcttatttcagatattagtttggaaagaacttgactatggctccatgacagaagctgagaaacagatgcttgtttctgaagtgaatttgcttcgtgaactgaaacatccaaacatcgttcgttactatgatcggattattgaccggaccaatacaacactgtacattgtaatggaatattgtgaaggaggggatctggctagtgtaattacaaagggaaccaaggaaaggtaagcataatcttttaaaaatgtaagctgaaattggtctagtttcatttattttaagcatcttgttttaggatcagtaatatggaagagtgtatttgtatttgtttggtaggtccacagtactttagaaaattcctggtgaatcaacacccatattttatatcaaaataacaatttataggctgagtgtggtggctcacacctgtaatcccaacactttgggaggccgatgcgggaggatcacttgagcccag

SEQ ID NO: 4901 - DNA, 1875 bp, Homo sapiens
ttttgggcaagcaaacaaattcactgagaattccaaaagtatattaaaaaagaagatagctatgagttcagatctatcttattggtctttaatattacaaccaatccttaactttccactataaaggaaggattactagattgattactttctggatagataatctggtaataaatgataggtaaatcaaaaattacttttatttaggagtttgaattcttactctcatcagacattttttttctagggacgcttactaattaaatgatttaagttgtttcttaggggttttttgcctatatatttatgactgtgttaatgagtagtgaaatgatgcggaaagacagctatcaggaagaggaaatacagaagcctgaataatctatgggttagaaaagcatccctgaataatcaaaaattggcagtattggcattgttctcaagcctttttatgaaaatgaaatctgaaatcaccaaatgtaaacctgggaacattattctagtgttgctgtcttggattcatgttaagaagcgtcttcattctttgctcatgttgcccacttcttgtggatttgtctgagtgttttttgacaatcacttccttaaagactcttctgaactagttggacctggttaatcatagagagtagcctttaatcatggatagtcttcttggattatttttatatttgaaaagaaaatgttttatttgcactactgagtaggaagagttaattgttttctttgttctttttttgaagtcattacacaggacttcactccagagttaccattatgagtgtgttcagctctggtccacagaggatggataaaaatggtttgttatgtttttttgctctgcagtgctatgagccttatatctgttaatatgaaggacaaagtcaaaagcagcagtggatagcaggaagggtagagactaatatgtttgggaccaaaaccatctaagttagagatttccagatcacagaggggctgggcattctctggagcagtcattggttggtgctttattgtaatcattttgcgccaatccccaacaattaggaactggaccctgggaataagctgagggtgctgaactgttggggaagggtgactgtagccacatggaagataaaatatgggtttttctgcaaaatttccatctgagggtttttacatttaatatttttttaagacagtttaaagagcaaacgttttttaagtgtattctagttgcaaagtatgcacacatatcttgaatggctttatttttattgtgtaaaactgttgaacacatgactgtgatgcacaaattctttacgtgtaaggagtctatgcattttacagtaacttattttatgatcgggtgatgagacagttatactttcaactgccattatttttattaagtgctttcattttctttacagttattataaaattgtatttattttatacagatgggttttcattttcctgatgctgtaatgtttacttcagcttgttgacctttctttgtgttatctgcatgttgtaacgtgtgataagaatgaatgtaaaggctgtggcaactgtaattaatttttgtaaagggctggtcacacgtggatctggtttatgaatgcatttgggatgattttggtaaccagatcaccttttcagaaatttagatgtgaacaccaaaagaagcattttctcaacaaaaattaatagctggttctattttttttaaacctagaaaaaataaagttgatttttttcaattaaagtgcttttaattcttagcagtggggatggggcatgtgtgttttaccagagctatttgggcattaatatctgcaggcaagtacttaaagcacactgtggcagttg

SEQ ID NO: 4902 - DNA, 1070 bp, Homo sapiens
gtagactagtaaatgtttgaattaatgcataaattaactctcttgtgtaatcaacaatttttaataaccaagatacctgaaaagctgaagaaaccaacccttgttaaagcaaaagatgacaacacaattttattcagcttttcatcataagttgtggttctgaatgattttgacttctgaactaaatagtttttgttcttttcttctaacccttaataggatctttccaattaaagatgtacccctggagactgatgaccttaccacttggctctatcagcggtttgttgaaaaagaagacctcttatcacatttttatgaaacaggtacacagtaacctttaaatagttgctaaattatagcaacagtaatgaaagcctcttttaaagaaagctgtttgcatattagatcttgaaacttgaaaatgcactctgtaaattgcctgtgagaagcaaatcccctcatgaatcagcttaccctggggattatcagcaaggacaaagactgcttgaaatgctgatgagtgttatcaagatgaccttaggtaatattgctgtatgaagttatctagcattcctttccagaaacgaatttaaagacatctgtttactttgtatttcttttattattaagatacatttcataaagcatattgccttttaaaaataatgtcagtgttatacaactacttttttgacaaaaaatttgtaaatagaggaatcagcataaagtgtgctatttcagaaattatttcatgtcaatctcacataatcctgggtcctgatcactgtgggaatctctagggatccagcagagacaaggcagctagagtgcctgctctcatgcagattatattccagtgggagacatggcaaacaagtctgcagaaagaaagataattgggatcatgaccaattggaaaaagttccaggaaggagataaacagagatgggagggggaatatcttttctgatatggaaaggatgcacatgagccagctattcattaagtggaggaggacagcattgcaggcagagaaaaggcaaaggctcagaggcaagaaggggcta

SEQ ID NO: 4903 - DNA, 1072 bp, Homo sapiens
gaaggtgaattgggaagtcccaagcattaggaatagtttagtgtaggaagaagaatgatagcctcttatcagcactacattattttcttgacttgttactagtattatatgctttattttcaccagaatggataactgaaatatggtatgtacgagcttttatgcatgacaataccacagttatttggtgtttacatatttaacaacctggattgtgccgtgctttgcacataattattacttaatgaataattggtgaatctaattaagccttttccaagaaccacaaattcagaaataagctggaattgagtagagaaacttctaagttctgtgaaaataagtgtcacaaaacacatgtactttactccagacagttttatgtactggacattatatcatttcattttggaaacatcctttgttcttctgagcagagaaacaaatataagcataccctggaaccacaagaagtggcaatggggagtggacacaaggtcaagacaaaataaactgatcaggacaacttaacaaagatcctagtgtaatagctcagagaaggcagcggaaccaacaattagaaagcttagcagtctcagggatccgaaaagctagctgagcaccttacctcatttccagctttaggaaataattgaatttacagtgtagtgtaacagttgattctaatgatgatcatcaggcatcaagaagaggggctgggctcggtggctcatgcctgtaatcccagcactttgggaggccgaggtggacagattgcttgaggccaggagttcgaggccagcctggccaacatggtgaaggcctgtttctactaaagatacaaaaattggctgggcatggtagcatgaacctgtagtcccagctacttgggaggctgaggcaggagaatcgcttgaacctgggaggcagaggttgcagtgggccgagattgcgtcactgcactccagcctgggtgacacagcaagattccatctcaaaaaaaaaaaaaagaggctaaattatactagattatcggtgtacttttagataaaagttgaaaattaggtactcc

SEQ ID NO: 4904 - DNA, 1034 bp, Homo sapiens
aaaatagaatggaaagggaagagagaggatggggaaaattgagggaggggttatgttaattccttagggctgccataacaaattaccacaaagtgggttttacagcagatatttattctttcacagttctggaagttagaagtcttgaaatcaaggcgtcagcagggccatgctctctcgaaagactctcagggaggctcttcccttgcctcttccagcttcttctggtggttgtccaccatccttggtgtccctcagcttgtaggtgcgtcacttcaatctctgcctctgtcatcacgtggtggtctccctgtgtgtctctctgacccacattttcctattcttataaggactccagtcttattggatttaggtttagggcccaccctaatccagtatgacctcatcttgattcacagattttggggggacatgaatttttggagtatactgttcaacccagtacagagggttccaaattcaatttatgttttcatatttaaaccagtcacacttactagatttatctgatttatataaagcaaacaggtaagatatattttatgtaaaaacttattcttatttgcagttatattgacatatatgccttcccactgcatgggcctaggtatctagtattttccactcatgtagcacagattgcgttaaaggactatttggtgatgagacatctattaatacagatggagagccagaaaactgtccacattacctcttaatagcccactatttatagaaccaagctagacttttcttgagttttaactgctgttcactttagaataatacttgaaatgttcttacttattttatatccacaacacctaaccatgcctgatgctgatttattgaatgaagattgtattaatgaaagaatgttgtgcatgtgtgtgtgtgtttgtgtgtttgtatgtccgtgtgtctccattggagggttgtcaacaggggcatatggggagttttcatttggttagtatattctctgtcctttttaaaaacataactaggctggg

SEQ ID NO: 4905 - DNA, 1867 bp, Homo sapiens
cataaatgttagctattaagattattatttatatatctatttaataatatctgctactattattattttagttatgtaacccctccaaaagctacctcttgagccttgctttctcaaattttaacctcttaaaatttaagagtcaaagggacactgaccatgatttcctagtgtgtacaatgtacttgcttaaaaaaaaataaaattaaacttatcagcacttcaattccagtggttcttatttagaagtatgtattaggaggtttttcaaaagtctgggccttcccttgggaagcttgactagaatgttatggagatgggggtggcatcagcatctctatgtatgattgccctccctccctctcttttctaggtagtcagctgtttgtttgcaaggctgcttttcctcaccagtctccactccattaatcagtactttaagccactctctcatggccacttttaatgaactaacaccctcccttggatgaatccaatcctgtctgcctcaaacctggactgctgaaagccacagttctccagctatgtgaaattcacttatggattattttggctctctaattttttatttgttttttgttgttgttgtttgtttgtttttagagagagtgtctatatatgtcaaccagactggagtgtagtggcatgatcacagctcactacagccttgagcttctgagcccaagagatcctctgccttagcccctagagtagctaggaccacaggtacatgccaccacacccagctaattttaaatttttttatagagacagatctcactttgttgcccagactggtcctgaactcctggcctcaaggggtcctcctgcctcggcctcccagagtgctgggattacaggtatgaggcactgtgcccagctggctctttaatctttactattagactgattttcatatgacacagtaggcatagggctcttttagttactagtgattccaaaagtgactttaatcccattactcaggatctctatggtactgtcaattagatcttcctcatttttgcaacatgtttacgtagcattaatgatattattgtttcataagtgagaaaatgaagacacagaaggataaaatagtttgttgcatcagcttgcgggcataataagcaacctttcttctctctgttaattctgttttgtaggccagtataatggctttagtgtcactgttgttaaggagtttttgatgggttgtttctattttctttttgagatgtgaactgtccagattaattctaatctataacttttgggaaaagtatattgatatacatgttagaatgtgtgtgtgtatgtgtgtgtgttgtgtgtatgtagtagatgataacctttagctttggttttcaataagaattttaaaatttattacaattagaaaatttttcctccagtttttattcagttgtcctttttccctttggaaatagtggacctgacccaattcttttttgagaattcatttcatagagcagcgtgttagaatatttttgttcttctaatcaagtgcagtgtaagaactgtagacatccataatttcttttctatcccttggttaagatattagctttattactatatttactggtcctggaatagcaaggcataatctgaggagcatagctacttcatctgtgtaataaattgctctttcactacaaacattttaatactgattttgttggtcatttaactttctaatagtggtccttaaattatgctctaaaagaagaataccatatatattggaaattaaatttgttgttgaataaaattagaattattataaaattcaacacgaccttattgctacctcaggataatt

SEQ ID NO: 4906 - DNA, 1076 bp, Homo sapiens
tcataaaccttccttcattgttaatgtcctctttctttaactttcataaaaactcttgactttccaattacttttaaagaattggaggatatggtagcctgggtctgtgtttccaaatatcagcaagagactagagctgaatagtgtctccccactttgggtggtgaatgttctctttatttaaacacagtcccactgctccctattgtcatataggaagcctacttccctctgttgtcacctgtgtggtgataaaacaggaattttgtattccctggcctaaagtctagtatctgacttttaaaagtaatcctataatctgaatttgtatttatagatataatcttatttcctcttcttctcagtaccagctgtctccccaggaaggttactacccgggcatgttctcgctgtcttttgtatctcttcccttcatatttcagctcacaatgacttcttttcctagcttctgtggtacgtacatattttcgtgtgtattgtattatttcacagtttgttttttattcccaataagtgagcaaacttcttgaagacagggattgtattacctcaattaaaaagttgacttaagttttatatggaagaaaacatacctttaaaaagcaaaaatcacacagctaagtgagatgctggcatgatgatgggcatatgagatgctgacatgatgatgggcatgagagctgaatatgacagggaacagcatattcaagattccagtctatctgtactccagggcatacatctgttgactggaaaggcaggcaaattgtgtatactatttaaaatgtttatctgttttaatttttcttttttccttccaccctctatcttccgtcacgttctactttctcttgaattgcattaattacttcatgatagaattctagtatacttttatgtcttctgcagtggtagaaccctgtgtctctctgaagaaaataaaaccagttgaatgaatgaacatatcaattagtgctttgggggatagtgaacaggaggtggtgtaaattaattatatttaccatctgtgtttttcttttcaactaattcattca

SEQ ID NO: 4907 - DNA, 1048 bp, Homo sapiens
gtgctgggattataggcgtgagccatcgcccctggcctgttttcacattttctttagtaggaagtgctgtacagatatctcacgttgaggaaatgctttatattgcctttgtcttaatatttcaagggcaaaccaaaagagatactagcttaactaatgatccacttctgcatgctttatttggatctaggataaatcagtaccccaccccccggagtttaagtgatgattggtaaatgtcagagaaagatttcataccaaacaaaatgtattctatttatttaaaatagtttatttttattttcatttacttattttaataaaggaattgtcatccaaacacatttaattaaagtcttagccaggtacagtggcttatgcctgtaatcttaacaacttgggaagccaaggtgggagaatcacatgagcccaggagttcgaggttacagtgagctgtgatcatgccactgcactccaatctgggcgacagagacctgtctcaaaaaaaaaaaaaaaaaaaaaaaaaagaagactgtgcatgaaatactttaaaaatatttactgttaatagaaactccagaatttttatttttatatagggtgagagagagtcatgggccaaagtctggctggaagggagctgaaatgccaggggacttgctgccaagctgtttttacgtagcaaacagttttccttaaattggggcattatttggggggggctttagggaaagctgatggagattacgtttagttacctcctgctccccaactgacagctgccctgtctttctgggttatgtgattatttgatagtgtcctgcttttcggggagggatacatattcattgtgtgacaaaaagtaatttttaggaattatttctgactttgaaattctacggaaagtttcaaaaatgtatttcgagagcaatgtcttgtaacctttgagccgtaaaaccaatttagtatgtgaagatgaacattttaagaatgtgaaataaaatagaattcaatagaatatatcagaaatgcatgtgtttatactgag

SEQ ID NO: 4908 - DNA, 1054 bp, Homo sapiens
gagacacggtgcggggacggccaccgattactgaatgggaattgtgttatcatttgctaaatatattgtgacatacttcgtgcctcggtgaacagctcccttgaccttgtgcggctcctcctccctcgctctctgtccccctctggaatttcccctgagagatcaccgaggtactacacccggaaagcttcgaccctcgctgttttattttgtgctgggggcgatttctatgttggtgactgtttagatgtatttaatgaattttcctttttaagtgaatttttctttcaccccagaaagacaggacggagtccagtgtgagaatggctataactttggaagaagctccgtggctgggctggctcttggtgaaagcactgatgaggtttgccttcatggtcgtcaacaacctggttgctattccatcctacatctgctatgtaattatacttcagccccttcgagtgctggacagtaagcggttctggtatatcgaaggaatcatgtataaatggcttttaggaatggtagcttcctggggatggtatgctggatatacaggtaagagtgagaacacttttctttaatgcataagaaaaaatttgtcaggaaccatgattaaatgtatattacactttgggttgaggatgctttcatgtcttcactattgaaaaaaataaaaagaaaacagttctattgggtttctcttcagaatctcaggaagaccaatgttttcagaagtataatttcataattatgtattggtaaatttcttagtgtttttattgtgattgacatacatttattaaaactggtctgcaaaagctctggtagaggaataggagtgcgttgtataggactcgagagcttataaagtgaagatgtaagatatttcatctatttcatggaagatgcccataaacattggaaatttagaaaaagaatgggaccatatttgtgctaagatagtttaataagtttcttcatcatttaacgtgatattgtactgttagccttttgagcaagcaaaaatggctttcttttctcttacgta

SEQ ID NO: 4909 - DNA, 1027 bp, Homo sapiens
agatctttccgagcggccctttccctcagtatgttctggactcactgaggtcctggccgagcgtccaggtagccccgagggccccgactcgctggcgcaggggtagggggagcgggccaggcggggcaagcgggccaggcagcggcggcggcgctttcattagagggcgctgtgggagcggctccgccgcagtcccgactcccgccgcttcctcccgccgcccctccccgccagtccgggcgaacgcggccgggcccttggggaccgagtctcggcgccgccggggaacgggcgcgggccgcgccacagccggagcggggcagggccccgccaccgccttcttccgccggccccgccgccggccatgcattcttccggctcctctgactcccaaagccccggctggggcccggccagcccgaggtaacctccggctccgcggtcgcaggccccagagcggcagcggagccgggccaggggaggcgctgggggcggggaagggggtgtcgtcgtcgcgtggcccggggaggcggcagcggcctgagggacgagggcgcggtaggccccggggaggaggcgggggcgcggggcatccgcccgcctccccgggacccgcccgggtgacaggtccggcctctgagtccccgccgtccctctgtccgcaggcagccgcgaggggagtagggcgccagcgcgcccgctcgcgcagcgcctcgggccgcttgggccgccaccgcgtccatgaccgcgacccctcggcgggggacacccgcccccgctctccgcagccgcccgccgtccgcgcccgccgaggtgagcccggcgcgcgggccgcgcccgccgccacgacccttccacatccgcggaaaccgctgcaggctccaccggctccccgcgctgcggtcgcctcttctctgcccctttcatcatcccctgcttccttgccctctggtcggaaatctcattctcttcatccccagttccttggcttttacctctttctggcttttgctcccttccccctact

SEQ ID NO: 4910 - DNA, 1107 bp, Homo sapiens
tcaaaggagaatggagcttaagataaaaaataaaaaggggttgttgttttttttttctttcttgtcatgcggcctctgggactgagaagtgatttgcaacttgggtctctccaagattgcttgccttcatgagcacaacccattgtactgctaacagccagaacattctcataaaatgtgtacagatctacagtgtccacggttgaatgacatctcttcagatgcagcccagttgtatgaggttcacacaacctacacagtcatctcagcacctgggaacacgtgcttaggaaaaattgccagagcagtgcagaaccccttgttcttttaccaggtgtggaaacagctgaatcagaaagcctgggtttcactcttggttctggtgaattagctgtgtgaccaagcaagtcactttacctctacatcttaggggtttttttttttgtctgtcaagtgactgaattagactggttttctggattccagcctagagttgtattatcaagtgactgaaagactaaaaacaaacaaaaacatttcttaaattggagatcttttttatttgtaattaagtggctattttcagggttaaagtttacaatgtggatttcaagcttctggtgccattcaaggtagatttctccaaaaaagaagcaaatcttgtaagccatcaattccctttgagaacttcccaaatgttatgttcttaaaagataggttttgatagctatgtttatgaactttttaacttggtgtattatgggctcctggcacaaactcagaaaggaattttttttttttttttttgagacagagtctcgctctgttgcccaggctggagtgcagtggtgcaatctcagctcactgcaacctctacctcccaggctccggtgattctcctgcctcagtctcccgagtagctgggattacaggcatgtgccaccacgcctggttagtttttatattttttagtagagatgggtttcaccatgttggccaggatggtcccaaactctggtgatcgcccgtcttggcctcccaaagtgctaggattacaggtgtgagccaccgtgcctggccaggaattattaaaataaaagcaagtcc

SEQ ID NO: 4911 - DNA, 1050 bp, Homo sapiens
cctaacttaaatttgcttagtgttttgttctttttcagtctcttaggttttaaactctctggaacaggtgatttcatcctatttcttcagaatatctcttcacagtctaaaggaagatagggatttagagatggggttgagtaagcaaggaagaaaggccagcatgtgaaggggctgtcaacggctctgggagctcattctactcaagtagagtgaggagcatcacttagtagttcagagtgtaggccctggaggtagtctgcctgtgttcagattcctactccgttcactaatcatgtgactttggagacattacttaacctgtctgccttagactcctcatcggtgaagcaaggatgatagcagtacctaattttttattgtctgcatggtctaaataagctcttagaacagggcctaactcatagtaagcactgaagaaatgttagccattgttgttagttaacaattgtttcattgcagatacccattgacaacatgaccaatgagatggagcaaagggttgaacctcataatgattacttcagtactcaatttctgttgaactttgctatccttggaacacacaacattacagtggaatcttctgtgaaagatgccaatggtatagtatggaagactggtcccagaactaccatatttgtaaaatccctggaagacccttattcccagcaaattcgcttacaacagcagcaagcccagcagccattacagcagcagcagcaacgcaatgcctacacacggttttaaccatggaatgaatgcactgcagactctcaagagatcaatcaaattgccagaaacagtttggtttttcatatggaataagtattaaagttacagtgtagttcatttattcattgatttttgtaatgtaatattctggaaaaaattttgttttcttaaaaattttgtctgacagctgggcgtggttgctcacgcctgtaatcccagcactttgggaggctgaggtgggcggctcacgaggagatcaagaccatcctggctaacacagtgaaaccccgtctc

SEQ ID NO: 4912 - DNA, 1028 bp, Homo sapiens
ggcacagtgccttatgcccataatcccagcactttgggaggccaaggcgggtggatcacgaggtcaggagtttgagatcagcctgaccaacatggtgaaaccctgtctctactaaaaatacaaagttagccaggcgtggtggcgcatgcctgtaatcccagctactcaggaggctgatgctggagaattgcttgaacctgggaggccgagggtgcagtgagccgagattgtgccattgcactccagcttgggcaacagagagagactccgtctcaaaaaacaaaacaaaacaaaacaaaaagcgttaacgtctttctgctggtttactgatcatgatacgtaatttacatctccagacatcttaatagtgatctgctaatacacctatggaggtcaatacccaaggggctgttgacctcagaggcactccacacttttccaagagggtattgcaaaatctgcaccattcttttaaaaggcaaaatggtgactttctgcctgaaaacagcctgaagtcccttgtggtcctctgagtccacgcttcaaagatgtttctctccttagacactagtgtggcatcagaggtccaccaaaggtggatgtctctgcaaatactttccaaattacttgttgcaggaagctgattaatgctattttaacagttaaatctgaaaaaatagaaccagtgtctttaaatctgtgttgtgattatctcaggtaatagacttggcatttgtactatgagtctgttgggcacaaaatgttcaattgcctgaacccaataaggaatggatttttctggcttttagccttaacacccaactttaaaaaaaaaaatgtttacagcatgagcaactaggtgacactctgcttgaaagcaggagcctagagggacagacagcataccacatggtgcatgcagcagttttcaacctgtggtgttgggtttcaatcaggctggtgggaaaaatattagagatagttatagaaatagacacaaatcttcttggaaggctgagaagtttgcc

SEQ ID NO: 4913 - DNA, 1034 bp, Homo sapiens
gggcttctctactgtaaattacaatagttacaacatgaaccttgcattccagaatttcaaatgtgaattttaaaaattgctgcaatctatagcatggaatttaaggtataaagcagaagagtataataacaggggcattagaacatgactgataagttttatgaacttaatggcaagattcttaaaattttggggctttgggctttgattccacctgtaaaaatagggtgtgttaaatcagatgatcccaaaattctttccagctctacaatcacgaattcatatgaggtataaatgtgtgtcagcaatctgagatggaaaaaaaaagcaaatttaaatttttttctcttttctctcctatcttgaaagtatggttttgtctgacaagaggcctataatgatacctgttttaatcagaattcatttgaactcttaggatagttgttttggcttttgtactgttagtcaatttttattaatattttttaagaaattatacgttgattttagatcttagtcattacgaaactgttggcacatacctatttcaagtaccttaatggagagaaatgctgatatgtattgatagtgggattgtggtaggaaattttgttgaagtttattgttagagacttttctcaaaaattaagaaaattgaacctatgagctgaactgcttttgaactatttgaattacaatttctactacttttctctgcttttttaggaaatgtgagttcttctcccagatcttctgatttagtcaaattagcccaagagtgctgttaccataataacaggggcattgcagctcatggagttagagtcctaactaatataactgtttcttgtcaagaaaagggtaagtttgatcaggactgatattacgtataaactttggtttagaccttggacagaattctgtttgatttttttttaatcccttatttttagcctgtgtgccttgatctacaaattgactcctttcaaagtgttcttagagcatgtgttcttaagactactttatccttgtga

SEQ ID NO: 4914 - DNA, 1045 bp, Homo sapiens
tcattacaaacagaactttaccatcctttgtatctaactcagctactgacagtgagaagaaaatgaaacaatccaattactgtggattttttcaacccctttgccaacacatatacgtaagcacacatctctgttccttctcacctccatcctcagctatgtctttccccttctctgccctgtgtgtcccttgacccgtttttcatatcaggcttttagaaaagtaaggctacatgagccacactgccagctacttagaattatcccttttggcgttgtgtttgataggaaaaggatttctagagcttcagaggcagttctttgtgtgtgtaagagggtgaaggggaggagggagcagatgaaggagggatgtgttctatctcagttagaaatgttaattaattttcccatagaaacatttattataaatggttattaggttccagagtactgtgagtgccgatagtgctattattttcctatgaggaaataatgttctaagtactgaataactaacatgagtgcattacggaacatcacccattagtaaatgatagaaattacctatgcagttttactttgtggttgtcttttgtatgaaacattgtggcaactaggaaaagccttcagatttcctttgtctttttgttttttttggagacagggtctctgtcacccaggctggagtgcagtggcgtgatattggctcactgcaacctccgcctcccgagttcaagcagttctcatgcctcagcctccctagtagctgtgattacaggtgcctgccatcacgctgggctaatttttgtatttaaacggggttttaccatgttgcccaggctggtcttgaactcctggcctcaggtgatctgccagcctcggcctcccaaagtgctgggattacaggcatgagccactgtgcctggcctcctttgttgttttttttaagaataatcaaaggttactggacagagatattctaagatacttattcctgtgaggacataatcagcattttgtgactggtaaaatactaaacagagac

SEQ ID NO: 4915 - DNA, 1035 bp, Homo sapiens
aacagaagggtctaaaattctcttaatactaatacgtagtgaataaggaaggcaaagtgttatggcaaaaggtaataagaattcagctgaggctgggcatggtggctcacgcctgtaatcccagcactgtgggaggccgaagggggtggattgcctgaggtcaggagttcaagaccagcctggccaacacggtgaaaccccatcgctactaaaaataaaaattaaaaaattcgttgggtgtggtggcaggcacctgtaatcccagctactcaggaggctgaggctggggaatctcttgaacccgggaggcagaggttgcagtgagccgagaacgcgccattgcactccagcctgggcaacaagagcgaaactccgtctcaaaaaaaaaaaaaagacttcagttgagaaactatgtgttctacatttaaactctaaaatatgacataatttctccaaccccagctaagattttaatacataaaacattcacttacttaattcttaaaaagaacaaaaaaacctgacctaccttcctaatatttcaagaagttcagcaacaccattgaaatgttctgtttcatatataaacctgaatttaaaataaagacaagatgtaatcaaaatcaaacttcagaaaactaagagaaacaggcaggagggtgaagaaatcaatccaaaggacagctattagaaacacacaagcatgttttgggtcttataagcagttttgccccaaacagttaattcatatcaatcttaaaaaagaagatgtttcctactgaactacatatgcctttgccaaaactcgccatatgtgaagataacagattgtcatttcacctggaatattcaacttaataattaataagaaagataagtttcctcaaagaaatactttttaaaataagaaacctctaattatagggaaatccaagagaaaaagacccatatgtaataaagccatttttaatcagaatttctttacacctctaactatataggctgcatagctttccaagattagggctgccttta

SEQ ID NO: 4916 - DNA, 1048 bp, Homo sapiens
gtcattaggcaacttcatcatttaaatgtcacagggtgtacttaaacctagatggtatggcctactacacacctaggctgtatggtgtagccttttgctcctaggctacaaacctgtacaggatgttcttgtactgaataccgtaggcactgtaggcagttgtaacaatagtatttgtgtatctaaacacgaaaggtacagtaaaaatatagcattataatcttatgggatcaccatttttctttctcttggaatcacatttctctctctctctctctctctcaacatttctctctctttttgatgaggcctcactctgttgcctaggctggagtgtagtgacatgatcagaggtcattgtaaccttgaactcctaggcttattgtaaccttgaactcctaggcttaaatgatcctcctgcctcagcctcccaagtagctgggactacgggtgtatgccaccacatctggctaattttaattttttactttttgtagaaacgaggtcttgctctgttgcccaggctggtcttaaagtcctggcttcaaccaatcctcctaccttggcctcccaaagtgctgggattacagacatgagcaaccatgcccagttccatttttattttttaagagacagtccagacttgcattgtcggccaggctggggtgcactggtgtgatcacagttcactgcaaccccctaggctcaagagatccccctaccccagcctcccaagtagctgggattacagtcctgagccaccacgcctgtctgggactgacattttatatgtagcctgttatttttatttatttatttatttttgagacagagtctcgctctgtcacccaggctggagtgcagtggcacgatctcggctcactgcaacctctgcctcccgggttcatgctattctcctgcctcagcctcctgagtagctgggactacaggcgcccgccaccaggctcagctaattttttgtatttttagtagagacggggtttcactgtgttagccaggatggtctcgatctcctgacctcgtgatc

SEQ ID NO: 4917 - DNA, 1037 bp, Homo sapiens
tgggcacaggcaagggaagggcacacagaggtggtaacactgctttctctcctccacatctagacaagtgtggttaactacattgaccagaggccagctgccaaaaaaagtgctcaattgttttttgtggtctttgaatggaaagatcctttcatccagaaagtccaagatgtgagtatttaagattatgatagtattatttaagattatgatagtattatttaagattatgatagatgtattatttaagattatgatgctgccctgaagtcttttggctcattcttgtagactgataagtctacctacctgtcctcatcttttttcatagcacaaatcagcttgtaatttatatttatgacatcaatgttatatattctttgtgtttggtcttgtcttcatcactagactttctctgtaaaggagggggactttcattttgctcaccataatttatctgggatatagtggagtgcttagtgcaaagtagctgcttagtagtaatgttcgttgaataaattgagtagaaagcattaagttaccactatacaggttactgcagttgcaagttattctttttcttaatggttccctgtaggataaatactacttgtagtaagaacataatggtacaaataaaatattaacaaagcattaattaatgccatattttaaaaaaattgatacataatatacatatttatgtggtacatgtaatattttgataaatgcagacaaagtctaatgatcaaaaatcagggtagttgggttatccatcatctcaaacatttataatttccttgcattgggaacattcttctagctattttgaaatatataatacattcttgttaactataattgctctactgtattatcatgtcatctatcttactgtatttttgtacccattaaccaatttctcttcatctcctgcttcccccaacccttcccagcctctggtaaccaccattttactcgctacctccatgagactcatttttttttaagctcccacatgagtgagaacgtgtggt

SEQ ID NO: 4918 - DNA, 1037 bp, Homo sapiens
ggctgagatgagaaagaattgccttaattccttttggacaactagagctgctgtggaccttggtggcttagctctcagctacccattgggtttccccagttctcacttatcctcgtacctgtagagtaaacctccactgcccacagtaacctgttccttaaaacctaaaggggcctcactgacagttctggaaatttgcatttctgtgtaaagtgaaaaccttctaaagtattttgccaaaaaacagcaaggaacattcactggtttatagttttacatgcttgattgcactaatattctctgatggattgagttagcatggcaagacttagttcatctattatttaggttatttattcattcgacaaacatggaaacattacattcctactatgtgaaagatactatattctgccctgcctccattttattttcaatgtatatcttttcagatttatttttcaaaagagattatagttctatgatctttatttttgctattttcataaatgagcacttcattttttgaagggtagagggtacattctgtttctttggtaccagtaattgttaccattgagcaggcactgtgtaatgcattttgcagcgttctgtcatctgcttctctcaaaaatcctgtaaaatggaaatgattattttctttttacatgaaaaatgtaaggctttaggagcactgagtaacttgtctaggatcatggagtagttagtagcaaagctgcagctggagctcaaaactctgactctaaagctcatgctcgtaaccactgcacagtatatctgctctttcagtcagaaaataaatgaataatggaaaccaaattatttcttccttaaaattctccttgtggtttaggtgcagaactaacatgaccccctccacagagtctttgctgataactgcccttctccctgtgcttcccattcttcctgcagttgaaggaaacctcatgttttatatccttatatgtttctgaattctgtagcactttggattagagaccatcagtcctccattt

SEQ ID NO: 4919 - DNA, 1058 bp, Homo sapiens
ctttcccactggttgcttttcttttctttcttttttttttttgagactgagtttcactcttgtcactcagactggagtgcaatggtgcgatctcggctcactacaacctccgcctcccgggttcaagagattctcctgcttcaacctcccaagtagctgggactacaggtgtgcgctattatgcccggctaatttttgtatttttagtagagatggggtttcaccatgttgaccaggcaggtctcgaactcctgacctcaggcgatccgcccacctcggcctcccaaagtgctggaattacaggcatgagccaccgtgtcaggccccgcacctggccttttcttttgtgcttcgagggctttaaactggagattttgcctgattctaaggggcaggagtggagtcgtggagagggagatagaagaatagattcgtaagagatgtttttcacttgtctcttggaggtgagtttttaatgaaaatgtctagaaaccttaaaaccttaaacactgatgctgtgaacctgacaaagtgcttgggaaagctgtcccctctccctcccaattcagggatggcttctcttctaagctctggtcttgagctctcttgccctcctccttaatcctacagagacttgttgattatcatggtatcctttccgtccttcttcccttctcagtggtataattttccccatttgacaggtgagaccactggtgaagtgaggttgaggttgctggctaccaggctgctgattataatcagcacctatccctgtggtggactgcctgcccttcctgctgtgttctgccatttgcagcccaagtcagtggacttcagccagagtgccagagagagctctgacaccaccttcactgttccctcttttctctcagcagactctaagccgtatttcctcttcctttgggaagtggttaagactatgggctttggaactagaccaacttggattttactcctgccatatctttccctggctttatggccatggaaaatattgtgggttgaattgtgtttccttaaaaaagatatgttga

SEQ ID NO: 4920 - DNA, 1021 bp, Homo sapiens
agaacctttctcggggtttcagtttttcagggtttcagaagctttctcagggtttcaaaacaggcgtgtgccaccatgcccggctagtttatttgttttagagatggggtctcgccatattgccccggctggtcttgaattcctgggctcaagccatcctcctgcctcagcttcccaaagtgctgggattacaggaatgagccactgcacctggcctatcacagtatatttcagataagacttactattctctgtttttggctgataattctagttttggtttcttcaggtttttttttttttctcccctctgaccatttgttttgcaaatagattatattatgaaagtctctgaagaaaaaaatatctctctagagaaccactgaagggggttcttggggattttatatgaaaggatttgagaaaattaatgttatattcatttgaagcttcaggggtaaagaatcccttgtaattcgttgctgtgtctctacattgctcatactttgcccatgggctgtaaactaatattcgttgaatgaatgagttcatattgcaaatttctaacttgtcggtttccctggatcacaatctcacacattaatggcttgtggcatttatattcattattaattgaacttagaaggtgagtgtggggaggggagaggtaaaaaactgaggacagatcactgggaaactgacctgaattaggactccagagtctcctgtctactagaactacgtctactagaactaagtctaattcccatatccctgcaggacataagagcagaggatggcattgacatccctcagtgacatcactgtgctagcaggtatagttgccttctgatcaccttttcctttggtcacatcccctgacttctgggtggcctgggatagctagagaagaaaattcaacttctccctgcaggtcttctgctccagctgactcctgtgcctgtgtaaaagattgggcatttctatcatcaccttgactagccttactcagagaatggct

SEQ ID NO: 4921 - DNA, 1021 bp, Homo sapiens
tctcagatatgcaaagcgtcaaaaaaaattacctccaaggcatcccgtttgggggttctaccaggggctgtgctctattccaaagggtaaaccaaaaaagcagcagccatgggatctgggaaactaaggctcccaaaacacagcacactcgagtctacaggctactaactaatcagcagatttggagactaggcagaccaggttggaataagactatgtaggccgggtgcggtggctcacacctgtaatcccagcaccttgggaggccgagacaggcagatcacctgaggctgggaattggagaccagcctgaccaacaactaaaaatacaaaattagctgggcgtggtggcgcatgcctgtaatcccagctactcaggaggctgaggctggagaatcgcttgaacccaggaggcagaggttgcagtgagccaagatcacgccatcgcactccagcctgggcaacaagaacgaaacttcatctcaaaaaaaaaaaaaggactatgtaggactccaaaagagatattttcagaaaaaaataaaagtgacaacacgagtgataatgttaactatgcagaaaattgtataaaggagatgttttgtaatatgattaagatgttcaaagaaacaaaaaataaggcagttattcactacagtagaggcagaaagctgtacaaaaaaagaaatgtaatcatggttacaaattagttctccagtgaacaatatttatatagccataataataaaaaccctgaatctgaattcagtaaaaaaaaaaaaaaaaaattgggacagttacactgggaggctaaaggatgggaattagcaattagtacagcacaggcactgaacagttagatggacattggttaaagcagtaaggtggggtgtggaggcccttatagctgctgggtcctggggcagggtagggtgtcccaggacatggagctggagcagccagagtggcagggatagtgaggaggcttctgtgccaaccagtacaatccatatgtttgtaacag

SEQ ID NO: 4922 - DNA, 1055 bp, Homo sapiens
tgggccctcgatgcatagtggttaactgagtgaattaaaacaaaaaccaaagagaataaaggacctcaaagaaaacagatacatacaaagcaaaatcccagaatgatgactgtactcccagaaagaagagaaaatcatacattttttggaaaatcggaatgctattaaataatgttcagtaaataagaaaaagtttttgaaaattaaaaatatgaaagttgaaataaaaattcagtgggagggctgggagataaaatgaaattttcccaaaaataaaacagaaagattaagaaatggcaaattagaaaagtaagaataaagagaataagttcataaagttcaaagtctaatcgatacccattccagagatagcatgcagaaaaagcagcagagtcaaaattatcaaagagataatgcagttaccatatggcccagcaattttactccacgttctaaacctaagagaattgaaaacatgctcacacaataacttacacacaaatgtttgtagcagcaggttgaactttcatgaactgatgaatggataaataaaatgtggactatccactcaatagaatattatttggcaataagaagaaatgaggtactggtaaatgccacagtgtagatgaaccttaaaacatgccaagtgaaagaagcctctcacaaaagactgctgaattttgtagactccatgtaaatgaactgtccagaacaggcaaatctacagaaacaaaaaatagatctgtcactgcctaaggctggaaagatggagagggtggaaggaataggaagtgactgctaatgggtatgggatttttttttttttttttttgtgaaacaaggtcttgctgtgttgcccaagctggagtacagtggtgctatcttggcttactgcaacctctgcccccgcaactcaagccatcctcccaccttagcctcccaagtaggtgggactataggcatgcaccatcatgcccagctaatttttgtattttttgtagagacggagtttcgctatgtggctggtctcaaactcgtgagctcaagcgatc

SEQ ID NO: 4923 - DNA, 1050 bp, Homo sapiens
tggtgagggctgtcttcccgacttgtagatgaccacctccttactatgtcctcacatggcctttcctcagtgcatgcatgtggagagagggacagagtgcaagctctctggtgtctcttcttataaggacaccaattgtatcagatcagagccccacccttatggcctcatttaaccttaattatttccttagaggccccatctccaaatacagctataggcacatgggagttaaggcttcatcatacagattttagggggacacaaacattgagtccataacacaagcccacagaaaatcttatcctagacctctttccctggccctttatggcttgggctccgtagaggacaaagtgaataaaaccaaattttttattgcttcaaacagtatgatttcatcttgtaagatgtactttttcttttctaaggctgaatttgtttgatttctggtgaacacctatcttctctatccaccttcattcatttattcatctgttcaacacatacagttggacacctactcggatcaaaagtcagagatcttaagagcacagcctctaagccagatcatctgagttcagatttcagttctaccattattagttcaatgatattggacaagttacttaacctgtctatgatcaaaagtcagagatcttaaagagcatagtctctgagccagatcatctgggttcagattgcagttctaccattattagttcagtgacattgggcaagttacataacctgtctatgctgcagttttctcatgtgcaaaatggggataataattatgcctacctcatagcgttattctgagaagtaaatgagttcataatgtgaaggccttagactaataactggtgcatatgagtactctatgatcactgttattacttcttttgataaaggaaatgaaaacactcaggacaagtgttgccttcaggaaggtcatattccagtgaagaggatgagtgtgcaaacaatgataatgccatgcagcaaatggtatgatagatgtatgtgtggaacttaggggagtagtca

SEQ ID NO: 4924 - DNA, 1099 bp, Homo sapiens
tcaaaatatatatcagattaatacactggcaaagtgtcattgtgttattgaactatttcacatttgaagatgtttatatatcaggtatataatcactgggagaagtctgagaaaacgatattggctttacttctaacatttaactatagtttcttatagctcttattgtgtgtcttacattatacagtgtaggcagggccatcaaacttaccaactgtttccccttttgatgactctgataccttcattcatttttcaaaggaatttactgatcatgaggttggaaaatctgtatttctcttgcttattatgtattaataatcataaatgtctagattcaccagaagtcaccagaaggtctgtctcagtgaagaaaacttataaagccactttgttgcattttgtgtttcagtgttacagtttgagatctgtatatttgtacacagctatgtgtttttcattgaaataatgtacaaagactgatcttgatgctgtgtatttttatgagttgtcttaggcattcctgagctcagcttcagttggatggtgggtcagcaccctgcgtttctgaacatactagacttcagtttaaaactgttttgaggctgtataatatgttgctgtttttacagtgctaatgtttttatagtattaaaattctgtatgatttgtttcacttcagaggtccccaaacaaaagagttattgttaattctattagattatataagctacttgcattttgattatataagaacatggtccctcccttttaagagaggtatattgtgctacatagagtttttaaatgacatgatagatttgctctgaagtattcagcagagaaacaaggaatcgattaaggaaatgtgacaaaaatcctgttaatgttgaatctgtgtaatgactatattctactttgtgttggaaatttttataagtttttaaaaaatggttatattttaaagtccccaggcagacagctgagatttgaaatcctcttgagagcccaaagttttactccatagttatagcagagtttaaaatagaaataccactgggaaagacagtacgtattagcattattaactaagaaaagc

SEQ ID NO: 4925 - DNA, 1039 bp, Homo sapiens
agcctgggcaacaaagcaagacttctcaagaaaaaaaaaaaaaattagagtactgcatccatctttgtctgtttgtgtttcaacctgagattaatgttgaatattactgtttgtttgtttgaagtccttgcctgcattaattgaacaaggagagggattttcccaagttctcaggatgcagcctgttatccacctccagaggattcaccaagaagtcttttccagttgtcataggaaaccagatgctaaacctgagaactttataacacagatagaaaccacaccaacagagactgcttccaggaaaacctctgacatggtactgaaaagaaagcaaactaaagactgcccccagagaaaatggtatccattgcggccaaagaaaattaatcttgatacatgagctctttctgtttattttgggagttgaaaataggcaccatcaacatttagattacagcctaattaatacctagataagacttcatttgaaataagaaataactcttttactagtgattcatttatacagatatagtatctctgtgcggggatatgatataatattgtatttccttactgttttatctattgtaaataaaaagcattttaaaaagtattgacacaaagcccatcagtgggcattaaaaatattaaaagtgcagacttttactgtccttaagtgccatcaactctcagctcccttgtagcttttgtgggatttaacaagtaacaaattctgttgtgtttccctggtatacatctttctaggaaaaaaaaaaaaaagagagagagctgtataatgatttttcgtttacatgctgaaaagtaattatcagttctgcacagcagcagatgcagggtttttttttaaagatgtagtttgatttatcaaattaatgtgctgatgataatactggctttgactttgttactccatgttcagctaatttaggtttgtgagattaactttaggattttttgttgtgtaagacaatgataactattatttgtgcaacattactctttgaaataaaaa

SEQ ID NO: 4926 - DNA, 1074 bp, Homo sapiens
ttcttgtaaaaaaaatcaatagtatttcatatttgtatttttatgactatgtaagtgttcttcaatctgagtcaggtaattattattttgttcctgagtcagataattattactacgagtatattctttcttgaatagctttctaccccttttggaacaataattgctttattattattttttttcgtttgaggcagtcttgctctgtgactctggctggagtgcagtggcgctatctcggctcactgcaacctctgcctctcaggttcaagccatcctcccacctcagcctccctagtagctgggattacaggcgcccgccaccatgcccggctaattttttgtatttttagtagagacagggtttcaccatgttagccaggctagtctcgaactcctgacctcaggtgatttacctgcctctgcctcccaaagtgctgggattacaggtgtggctcaccatacctggcctatttttctgtttgctttgttttctgttgtgtctaacagaactgtaaaattcatctcaatatggcaaacacttaaggttatctctcagatccatttttaaactttatcttttcctcggagatacttctctgggaaccttctgtcctcctattccagtctggactggctgctgtctaggcctggtgcaaaattttcatcctgcctgttcctttcatcatcgtcctgggaatttcccttccttctctcatgttttaaatcgtgtttcctggttcctgttttctactctttcttgatttattctcttgtctttgatgtatcacatcctctaccacccacctcctcccagctcacctagccccaaatcctctattaaggcaactttcttacatcacctgtgaagatttccctctcccttcggttcccttgttagattgatctcaccctcctttgtgcctccatggcaccctctatcatagccttggtccatcatgactactgaacacctactgtacacgttaggcactctgttcaacattagggattctgagattaaaagaatgtgtttcctgttcccaagggagttctggaagctaaatgagaatg

SEQ ID NO: 4927 - DNA, 1024 bp, Homo sapiens
gctttggctattcggactcttgtggttttgtactaattttagggtttctttctttctttttttctttttttgagacaatgtctcactctgtcactcaggcttgagtgcagtggtgcagtctcagctcactgcaaccttggcctcccgagttcaagtgattcttgtgcctcagcctcccaagtagctgggattacaggtgcacactaccacacccagctaatttttatttatttatttatttatttttgttttttggtagaaacaagagtttcaccaggtaggctggtcttgaactcctgacctcaaatgatccacctgcctcagcctcccaaagtgctagggttacaggtgtgagccactgtacctggcctaggattgctttctctatttctgtgaggaatgttattggtattttggtaggaattacattgtattcgtagattgctttgggtattatggttattttataatgttaattcttctgatttgtgcacaagggatgtctttctatttgtatcctgtactagtctgttttcatgctgctgacaaagacatacctgacactgggtaatttataaagtaagagtggtttaatggactcacagttcaacatgcctgaggaggcctcacaatcatggcagaagacaaacggcacttcttaaatggcggtggcaagagagaatcagagagccaaactaaaggggttttcccttataaaaccattggatctcatgagaatttattcactgttacaagagcagtatggaggaaaccgcccccatgattcaattatctcccaccaggtccctcctgtaatatgtgggaattatgggagctacaattcaagatgagatttgggtggggacacagccaaactatatcatattctcttcaattgcttttaatagtgtactgtagttttccttatagaggtcttttgcttccttggttaaatttatttccagatattttattttttttatagctattataaatgggattgacttcttgatttcttctttag

SEQ ID NO: 4928 - DNA, 1075 bp, Homo sapiens
tgttattgtcatctctattctaggttaccatcactctagccaggatttctacaaatgctctcttagaaggtcttcttgtttcactcttgctctcttccatttcattctgcatacatagggcagtgtgattattttattcttcgaaatatttcacatatttgaaagaaatatagaaaataaagaatgcaacataatgaacatctctgttcccaccacccatatttaagtgttaatcacattttgtcatacttgtttcagacctttttaggaactaaaatgttcagatatagttgaaactttctttgtgtcttccactattccattccactccctctcttacctcagaagtataaccaggatcctcaagctgtgtaaatccttgctattcatgtttttatacttaatttatagatacatatccataaacaatgtatgggatttaagtttttatataaattgtatcatactgatcatatcattttgtaacttttttctccatcaacgttgtgtacacgcagagctctctattcatttagctattgtatatagtattctagtttatgaatattccactatccattcctttacagggggactaacttagattgttcctttttttcttgacatcttgttctaggttcctttttttttttgaggcaggctgaagccacccaggctgaactgcagtggtatgatcatggctcattgccacctcaatctcttgggctcaagtgatcttccagcctcaacctcctgagtagctgggacttcaggcatgtgtcaccatgcctggctagttaaaaaatttttttttgtagcgatggagtcccactatgttacccaggctggtctggaactcctgggctcaagtgcttctcctgccttggcctccaaaagtgctaggattacaggcatgagctactgcaccagcctaggttgtttttgtttttgtttttttttttttagtcttttcagagagtcagcttttagttttgttgccttctctaatttttttgtttgtttgttttctggttccttgatttctaatctttattatgatcctcctgtttttgtg

SEQ ID NO: 4929 - DNA, 1029 bp, Homo sapiens
tgtttttgtcttgtttcttctcggtccatgatgccagttgaggtcatcagtacagcgaaaccaaactggtgagatgggaacaaattattctgtcacttttctagatctttttatttatttttttatttattttttgagatggagtctcgctcttgttgcccagtctggagtgcaatggcgagcctgggttcaagaccagcctgggtaacatggcgaaaccccttctctaccaaaaaaatacagtatttagctgggcctggtgcatgcctgtagtcccagctacctgagaggctgaggtgggaagatcgcttgagcccaggaggtcaaggctgcaatgggctgagatcacgccactccagcctaggcaacagagtgaggccttgtcaaaaaaaaaaaagagagagagagagatacaagccttcagagaccctcatattaacttcatggtaaatctgcctctgctcacccctcccacctgtagcaactaatatcttcatttccagatttactctgaaaaaactgtgcaactgcttcacatgtttcctcttgattcactaatttgtaactcacttactgaaactctgatgaaagaattgagtcaaaaaataaatagacctccttcccagccctggcttgttcagagcatctactacagaggagtcttaagggttttgtatgcttagagttgagagaccaaatagctcctgaaaactgtagctagaggaaatgccatatggagacaggccacaaggagaactcaagcccctgtaaaccaaaaatgaaatattctaagcccccaatttactaaacagattcaacctcccacttcagcctcccaaatagctgggattacaggcgcatgcaaccatgcccggcaaatttttgtgttttttgtagagatggggtttcgccatgttggccaggctggtcttgaactcctgacttcaagtgatctgtccacctcaccctcccaaagtgctgggattagtgagccactgcaacagccctctaacacttatttctgaagtt

SEQ ID NO: 4930 - DNA, 1120 bp, Homo sapiens
tcactatttcaaacatctgaatacatgtggccaagaggctgcgaatgggtttgctgtgtgtagataaacagagctaactcattttaaactctgataatactgttcttaaagagattaaactgataatttttaaccctgtgctacattttaatctaatggagatgtatacttggtcttgttcatctaaaggacattcgacttctttaagaaaacagtacttttcattaataatactgattttcagggtgaagtaagctcttgtgcacccttttgctttgaagtccttttgctttccctgtcacccccagaaatcttgtaaagaattggtaaagaatctcaatgagctttttttttttttaacttccttcctataaacaccttcagtcaaagaaagccagaggagatgcactgagactgaaataacatctgttgactaccagacttcactgaaatcggccgtctgctctcctgagttggcattgttgctaagataaagcaaatgaaattgaagctgtactcttgatatttacaccatacaagactaggctgttagggttgtcctgtgtggtctgcagccagaggttacactgtaactaccatatgcaggccagacattcattctgtgcttagggactgaattacactataaggtgtaacactggaccgaagacttttccattaaaaaaaaagtgctgcttttctaattctttatattttccaatactcattcctaaaatgtcatgaaatggtacctaaaagcaaagtactggaagataatcacatcatgtcacatttggtcttaatataagacatcagaacacatctttaacagtgagtcctcccttagtttgattcttggcatccttcagaagaatcaaagcctgcctcagtttaaaaatcagatgaaatgtgaacagaaaggttttttggttctgaagacctgctgatcactcctggtctctgcctgagtgtgttaatgtcagaggtaaatccagtaccgctaaatttgtataatagtacgtgacctcttgtgctttttgttagagtctgcaaagtttaaatgttagtgacagaacatagactagcttctcaatgtgatatttttgtttcattttgaaaa

SEQ ID NO: 4931 - DNA, 1083 bp, Homo sapiens
ttgcagaatacagtttggtaaacattgttcagaagtatcaggtgagctgtgttttgataaatatataaaagcagtcatttgttttaaattcatttgtttcttgtaggttatcactgtgaatataagatgcggacaggaaggaaacctgatggctgtgctatttgcttcaaacattccaaattttcactcttgtcagtgaacccagtggaattcttccgccctgatatttctctgttggacagagacaatgttggattagttttactcttacagcccaaaattccatatgctgcctgccctgcaatctgcgtagcaaatacgcatctgttgtataatccaaggcgaggtgatattaagctgacgcaattggcaatgctactggcagagatttccagtgttgcccaccagaaagatggcagcttctgccctattgttatgtgtggtgactttaattctgttcctggttctccactatatagtttcataaaggaaggaaaattgaattatgaaggacttcccataggaaaggtaagtgctttcttcattgttattagggagtggacatagttgctctgctcatgataatgtgaagatagtcattacatggctatttgaaaaccttggatgatccagtaccctcactttatcaaactatgattttccatgactttttttttttttttttttttttttttgagacagtctcactctgtcgcccaggctggagtgcagtgtcatgatctcagctcactgcaagctccacctcccgggttcaagtgattctcctgcctcagcctcccgagtggctggggttacaggtgtgtgccaccacacctggctaatttttgtatttttagtagagacggggtttcagcttgttgaccaggctggtctcgaactccttacgtcgtgatccacctgcttcggcctcccaaagtgctgggattacaggcgtgagccactgtgcccagcttcttctagtaagtaattattttcacttggttgatttatatctttttcatctatctgtggcaacatactgcttggaggaattaacaggcagcaaaaaaaaaaaaagtattg

SEQ ID NO: 4932 - DNA, 1049 bp, Homo sapiens
ttactgtggtccctgaatcatgggggctgaatttgatgtcttcatccttgagatgagcctgctggcttagctgaggaatgtcctgctgaggtttcttaggtttccttgggttctaaggatatactggatataccatcttttagcaagagtatctggtagcatttacagatagcatagacattggtatgcacttctttccccagataggaagtaaaggaggatttagttgcatgaaaaaaggatgttaaacattgattacataggagtaaagatgaatgagctgcaatattcagtcggagctaaacaataagatcagggaaggtaaaaatacctatgtggaatattttgaatcgtaagcttttgaggagcttaaattgagagaattttacttttaattttgtagattgagaagaggaaccgctttttaaaattatagctaaactgtcattgttttcctaagagtcacttggccatctctggccccctctttcatcagcctgaagagagggtctttgtagactgctgagggtgggccttgtaggacttgaccatggcttacacctacttaacctttatcctgctttctttcagcttgtgcttttcagttataaactccagtgggtacagcaggctggccttttcatccagctgattatttttccagcttaatatagattgacccatatgaaatttccaataatggaccatattttctgcaaatagacagtactcgcatggatcacctatatcttccccctgatacactgtgggtcccaacaccagatgtcatttctccagagcagtgctaatgaacacaaaaggtataccctgggtggcccagctcttttcacgaacgtgctgccctgctcatagtgatccttgcatcacttggtgaatgggccatctcctgggacatggaagttgcagaggtagatagtgcactgcagcttctcttaagccggattggccatcaggcatatcactctggagtttttagctgctgtcctttcccgatgaacagtctgtattagctgacctcagcctacttg

SEQ ID NO: 4933 - DNA, 1031 bp, Homo sapiens
taaaaatatgttgcttcttagtctggaaaatatctgatcaatgtttgtaaaatgtgttatcttaataaaaagtatctttatatggtcacactaaaaatattgtatctattttgtattttcatttgactggaagtattttaaaaatattttttcttgcattttttttaaaaactgtgaaagattttacatatatacaacagtagaaagagtacaattttttaaaatccatgtaataatggtgatatttttcagtctggcttatttccctcagtctttctatagaaataagcctccattggtttaatattactttgtaaaatttattctaaaagtatccttatccgaacattttgaaaataaagaaaaacaaagcaaatcaagattgttcttagtgttaccacccagaaataagccacgtttatgttttgatataacgattaccagtcttgtttattctcttcctctccttcccttgtctatctggtctttttatatcaataataataaccattctcattttttcacctcttcatgtagacagtcaaattctccaccccccatcagacgccagcccacctggagccgatcctctctggtatgtatagaagctgcagtgatcaagtgatctgactgttgagcattctttgttattaatttgaggtggggggatgatgagggcatcatgatgaggtgaaattttgtgagaacacagaggcgtcattctgtcaagcagatgcgatggacacccgttttgtcccccttggacccatccatgcccaccactactctaagtgtggctgaggctgagggtttaccctgagagtaggtcttattccaggcctgtgggaccatgttccatcagcatacagcccatggtgtgttttcattcccttgctcatctgttctggttgttgtgtgaagatacatcttcagttacgagctccacaaattcctttgtgttcactgccgtagagagagcttaataaactagtgagaaaatgccttctaaatgagcaaaaattgaacggatc

SEQ ID NO: 4934 - DNA, 1106 bp, Homo sapiens
aggatgtgcagagctatagaatttttagcatacatttatgtctgtgctttccagttttaaaatatattgatttttcagattttaatgatttgagatgggatgtttttcacagttttgaggtgtacatttttaggggtagtgttttcatccatgtaaagttaagttggagatgaatctttatataagtggtattttagaatcaaaggaatggggcgtttggtatgatttctgccaaaacatcagtccctacctcccatcctagtaggatgagcttcaggtacccatcagggtgtagctcagagttccttctgacatctgctctggaggtcacaggaaaatggtgcccatctgtgaccctcttggtgcttactagcctggaatatgtgggacctgctgcccaggaaagctagaggcagctggcttggggcttgagccccaggccaccacaggcatgagacaaactctagaatctctacctctatcaatttctcaagaatgcattgcttcggtctgcttattttggattattcctcttgattccatctcaccatcctaagcagtgcttccctggccagtgtttagcaagcctatttctgtgatgtaaatcctcccactgtggtgttacggaagggtagttgggaaaagatgtgtgtaatcagttcttctgagcccatagtagtcagcacatcacaggttccaggggcctggggttcagctggtagagatgctgactagtcagctacgcaactgttgccttacagagctctctggagatgttttagccgtcatggcttcctctgcccccgtgaccatcaagtaacatcagaatgagcctactctgccttcagtggttttgaattcgtttcctggtatacagaaaggcctggcacagtcccttcctaggctcaacttttgaagggatgatggcctggaaactcattggcctataccccaatcattagaaatatgtaagcacacgcaaagcattttttataaacgtacatctgagaggcaggcggatagggaagaatgaatgaaaagagctattccctggcaccacagaacttacgcggcaacccaaaatatgcctggaaataacctgttat

SEQ ID NO: 4935 - DNA, 1050 bp, Homo sapiens
ttgggtggctaacttccagaaaagcattcttttttacccactgggtgtctctgagtcagtaaatgatcataatgctttttgtgcaactaccaagtctaggatcatctactgagtctgtgaattgtagaatagagagaggtggttcccgccttcaaggtacttctgggctagtagggtgctaaatagagattgatgggctggatggacctggtggcccatggctgtaatcccagcgctttgggaggccgaggcaggtggatcacttgaggccaggaattcgagaccagcctggccaacgtggcataacctctgcctctactaaaaaaaaaacagagatggataggcatgttatcattacaaatgcataaaatctttaatattaaattgctgtgattggggagaggctgaacatggatcatagtggccacatggaatgtagggtgggcgggccgggcacggtgtctcacacctgcaatcccagcactttggaaggccaaggcatggagatcgtctgaggtcaggagttcaagaccagccttgccaacatggcaaaactgcatctgtactaaaaataccaaaaataaaaaataataaaacaaagttagccaggtgtggtggcacacacctttagtcccagctactcgggaggctgaggcaggagaatcacttgaacccgggagatggaggttgcaatgagccaagattgcatcactgcactccagcctgggcaacagagcaagactctgtctaaaaaaaaaaaaaagaaagaaagtggggtgtcccactcaattgtctcaccacaggtccatgctatggaaattaaagtcatccagcaggatctccgaattatctctcatattgctgacttctgagcagatagcccctattttgctatttctgataaacattccatccagcttttgtgtttgtttgttatgtctgtgttttcaaacgttcttttaatatgggttacttgtgtggtactctgattttttttttttttaatagagtctcactctgttgcccaggctggagtgcagtggtgcaatc

SEQ ID NO: 4936 - DNA, 1073 bp, Homo sapiens
aatagtaaaataaatcagtgttcttttgtaatatcacttggcataacttattatttattgtaggtgtcctataatgaagaggaaactcagaatttcaaaaggaaataaatcagaggcattattcgtatttcaaaaggagtcttcatgtaatgtttgtgttctttaatgcatctgagatgtttgattgagatgctttataaagcaagatatgcttatacgtatgttttagccattagaaaaacaaagtttaccaaaaaaataggttgagcatccctaattcaaaaattcaaaatctataatgtaccaaaattgaaaactttttgagcaccaacatgatgctcaaaggaaatgctcgttgaagcattcaggatttctgatttttggatgagagatgctctactgggtaagtatagcaaatatttcaaaatctgaaatcccaaacacttctcgtccctaacattttgcataaggggtactaacctgtttagtatacttcaaagaagtgataattttattattacatctttaaatcacatggttaatgtgttagtatttggtctatttggaacttttctcaaaagcaaacaaaaataatgtgctattgagctattttgaaaataagttcttaagcagaggtattgatttttatcctttgtgaattccttgattttcaaagatacattcattcatttgttcattcattcattgattccaaattgttctttattagtgttacattgcaggactgagaaagattaaacaattgaactcatgaaataataaagatttgtaatagagcatgagtcaaaatgttaaaatagtctactttttctaaagcttgagtagaatacgatgatgccacattgtagtgtttacctttaacaaaggtgtgaaaagaagggggaaaaacaacagaagctatatgaagaggtgttttgtcatgttgaagcatgcaggctgtgccttatgaatttttaagagacatccgcttcccataaaggattctcaagattgtaggggtatcattacaatgggtgggattgagaatggtgtgtcaatttcaaaaatggatt

SEQ ID NO: 4937 - DNA, 1044 bp, Homo sapiens
agagtcttgctctgtcacttacactggagtgcagtggcacaatcatagttcactgcagccacaaactcctgggctcccgcaatcctcctgcgtcagcctcctgagtagctgggactacaggcatgtgccaccaagcctggctaaattttcttctaattttgtagagatgaagtctcgctgtatttcccaggctgtcttgaactcctggcctcaggtgatccttctaccttggcctcccaaagtgcttatttttttcactttcgttctttccttttttttttatttttatttttaaatcaaaaggtattgtaagtagatggcataattgcaaacagaggccgtgagttagcttacagcttgatccaaaaaacctagtgttcagtttttcatgtgatagacatttaaagcactctgttgcataccattgctccctgttttcaagttgattcacatatccaagttcttcctgtacaaaaaattattaactcctcaaaatgtgatgatttccgttggcttttgaatcctccttgagtactttacacggtgctaggaacacagcattaagttaataaatacttgctgattcttggctctcggccattaagtgcaaggtaatgagtgatgagggtgaaacatggactagaaattagtgtatattgaaaaaagttctgtctgtaagaaaaatgaagtattgttactctagacagacctatcctgtaaggcctattggtgagaaagagcagttgaaataaagagggactcagaagttatgctttatgaagttaaaagaaaaaggttgtttaagcttagaaaaattaagtcggccgggcgcggtggctcacgcctgtaatcccagcactttgggaggccgaggcgggcggatcacgaggtcaggagatcgagaccatcctggctaacaccgtgaaaccccgtctctactaaaaatacaaaaaattagccgggcgtggtggtgggcgcctgtagtcccagctactcgggaggctgaggcaggagaatggcatgaacccaagaggcggagcttgc

SEQ ID NO: 4938 - DNA, 1030 bp, Homo sapiens
ggggaaaagtcagcactatcccttccctgcgcgactccccttacctcacatgggcgctttggtatctgcaagcacaaacagtagtaatgagtagggatactgcatctggatactccatgtatgttacagtagtgtgtggttgtggtttcttttgattagtcccaaagttatatgtcaaagctggatcttatatatgggctggggaacccagggtgggatgcagcatgctggagtctcgtttcttgtgtggccttgggatgcttgtggtgagcatgaactgatgctattttacccttttatctagacgcactactttggcctttggtttctcagcaagagccagcaagcacgatgggtggagctggagaaacctctgaagaaacatctggacaaattcgctaatgagcctttgcttttctttggagtcatgttctatgtgccaaatgtgtcatggcttcagcaagaggccacaaggtaggtgcattttccccctgtgtgccatataagggtgttgactaactgtgaagcttccaatgaagtagatgagctggtagatttaggggtgtgtgggtgtgggtgcgggtgtgtggtgggggagagggtaaaatagttgggggttgtttactcattgctttgcagctttagagttttggttgaatccatgtagctaaccccagcagttttctgtaatgctggtaaggtagtagggatcctgagccaggcagaatttcatctctagcagcgtggaaatattcatcggagactgtgggtaaaataggcatgcaagaatttaataaaaaattaatgacctggccaggcgtggtgtctcatacctgtaatatcaacactttgggaagctgaggtgggaggagagcttgaggccaagagtttgagaccagcctgggcagcatagcaagaccctgtctctacaaaaagaaaaaaatataaaaactagctagacatggtgttttgtgcttttagttccagctcctcgggacactgaggttggaagatcacttgagcccagaag

SEQ ID NO: 4939 - DNA, 1570 bp, Homo sapiens
agaaatttaaaaaacaaaacaccagtgttcaagttccactcctagtgggctttttaatttaatttaattttttttgtttgagacagaatcttactctgttgcccaagctggagtgcaggcatgatcatgggtcactgcagccttggcctcccaggctcaagagatcctcccatctcagcctcccaagtagctgggactacaggcacacgccatcatgcctggctaatttttatttatttatttatttttttgtagagacagggtctcattgtgttgtccaggctggttttggactcctgggcttaagtaatccttccgcctcaacctcccaaaatgctgggattacaggcatgagccaccacgcccagcctcctaacactttcttgagtggacagcattgcatagtgaaaaacgcatgtgaactgaagttacgtagacattggtttaaattctggcattgccatttacactgtgcacctgtgaatgaatgctttaatctctttgaatcttcctttcttcaactgtaaagtagcttttatcgtatcacccttgtaagataaggcatagggcatgggctctgccaagacacttaggaactccagaacttgcagcttatcaaacctgagtgttgatctgtttggcggggtgggggggggggggggcttctgtgtgtgtggaatatggtaccattgataggtcccttctggagcatgaccatggcatttcttttgcatttacagctatcttccagagggccacactgggcatggacacccttttccctgcctggaggagcacaggtgatagtgtaattttccagtcacgaaactgctaaggccatctcaggggcgtgtgcgccaggataggcgggcggcgtccgaggaccacatagccatgccttttggtctgaagctccgccggacacggcgctacaacgtcctgagcaagaactgctttgtcacacggattcgcctgctggacagcaatgttatcgagtgcacgctgtcggtggaaagcacagggcaagaatgcctggaggctgtggcccagaggctggagctgcgagaggtaagaggggtgtgtctgtgtgcgcatgtgcgcgtgcatgcgtgttgggtatgtgaaggagaactcaccgaagggaccagccatctgttttttggcatctgttgtgttttttggcctaagcgacgatgtgtttataagaatcctgttattcttagcacggctgtgatcttatccatcattggatggggagacttgaacaccgcctagagctgcatggcgtggcaggtttccttttatttcagctggggaagaggttttgggggagttgaaaatgagagactctccccaccaaagtcatcttctctctttaaaacaattgagtgggtagctggtattttggcattctggctgcacattaaggagaaaaaacgcccacatacggatgcatgcagctgccttttttttttttttttggttgtttctatattttcctctaaaaaaaaaaaaaccccaccgaataaagagaaaaagcatttagagtgagcatgaccagtgaggcttt

SEQ ID NO: 4940 - DNA, 1047 bp, Homo sapiens
taggtttttaaaatgacagatttgagcaacttttcacttaatttttctaagatcttctgcaaaaactgagggaagcctgaatacatcctatgcaaataattgacataaggataacacagtttcatttatgttttccctatttttttctgtgatattgttatttttaacattattgcgctatattttattatggaacacttttttacacaactaaatcactctgtctttattttgatcatttgttccaagtcttcaacattttttcgtaacgtttaaatgctaaaactgtttagttggcctcgcacagtggctcctgcctgtaatcccagcactttgggaggctgaggtgggagggttacttgataccgggagtatgagaccagcctgggcaacatagtgagatcctgtctctaaaaataaataaataaaaaataagttgaatgaatattacaaatatttttcaagacctgctgtgtgttgcacactatttgcatatgtttttcttgtttaccactctgagctgtattgtattataggacaatgaagctattttgcatataggaaaacaggtttataaaatgcacatcattgtttggctagtaaagaacagagttgggttgaacacagatctctctctgttaatctcaggctcttaattatcatggtaaaactttttcaaaatgaccctaccgccatcagtaggatggtggaatagggggtccagccctcttccccccttagaagcacctatttaacaaccctccagggatgaaaaatctttatgagagctcccaaattcagttctatgcattaaatatatgcaactttttgtatgtcaatcacaccttataaagtggtttgaaaaataaccttttttttttttttttttttttttgagacagagccttgcaccgtcgcccaggctggagggcagtggcacagtctcggctcactgcaagctccgcctcctgagttcatgccattctcctgcttcagcctccccagtagctgggactacaggcgcccaccaccatgcctggctaattt

SEQ ID NO: 4941 - DNA, 1079 bp, Homo sapiens
agtttatagcaactggccctgtgatggatgccaaacagagaattatagaatctaaaaaaagacagaacacttaatccactcagcataatatcctcaaggttcatccatgttgtagcatgtatcaggatttccttccattgtatgtatagaccacaagttgtttatccaaccattcatgtgttgatggacacttgggttgcttccaccttttgcctgccatgaataatgctgctgtgacatgggtgtgcaaatatctcttcaagactctgttttaaattcttttgggtctatactcagaaagagaatccatagatcctaagggaattctgtttttaatttgttaaaggtactgctgaactgttttctgtagcagctgcaccattctgtattcccaccaacagtgcacaagagttccaatttttcccacatcctcgccaacacttgttattttcttttctttctatttttttttttttgataagggccatcctgtgaggtgatacctcattgtctcactgtggctttgatttctactgatgattagtgttgctaagcatctttcatgtgcttattagtgatgcttttgtattttacaatttggtagtctgtgtttttaaattgagtcacacaatttaagtgtgagttttgaagagttataaaaacgtattttttattagtaccttttgtagtacgggaaagtcttctcaaggtgattgcttttttgcacagagaggcaaaaggttatccattcagcctaacttcagaagctgttaaagaatcagcaactagcagtggcttatgccttgtaatcctagtgacttggaaagcaggaggatcacttgacaccaggagtttgagatcagcttgggcaacacagcgagatgtggttttaaaaataaaaaaaaaaaaccaaagacttagtttggcctggtggcatgtgtgcctgtagtcacggatactcaggagctgaggtgggagacttgcttgagcccagcagttcgaggctgcagtgagttgtgattgtgccactgcacttcagcctaggtgacagagcaagacctcatctcttaaaaaaaaaa

SEQ ID NO: 4942 - DNA, 1022 bp, Homo sapiens
acatctaagagtattttttctcccaaatgctgaactcagtttttaaaaactccattaactaatgtgtaaatttttcattgtctttaatcactgaaataaggcttttttctacttacggagggatttctctcctgatttattgatagttgactggtcaaaaggcatggaaaagctgccattccctgggctctgttgccatttgatttatttagaagatgtaataggaggaagaatttctgttcttgctgttagtcctgctcggtcacggcagtggatgatggagagagatggatgcttgtttattgtcggctacaggaggggagctgccaggcgaccgaacaaagttctgcttagtatgtgacttgtaccgatgcctccagtgcctgctctggtccacatgctgggtttaggggctctcagattctctgctttgttcaattctctcaacagttcttatttcccttctaaagaggaaggactggagggcacactgcaagtctcttttgcagccttaaatgtgtggtgttgcacaaagtggtttgagctggggtcatggggtgaaggcttgtttggatgatggaggagttggcacacatcctcagtattattttcagtagtatggggactgcctgagtcagccccgcccgcctgcccgggagcacattaaaactcaggcaccagcaccatcgaggggggaccccaggctcagggaatcagactgtctagtagagagagtctgggaatctgttggcaatctgcacctttacaaattccctggtgccttttcagttgtaaaaccactggttcatactttcctatccatagaggactgctctaagtctatatggcaaatttggaaaatcttccctcaaatgctgcatctacgggatggtgggtgagtggcccagagcaattcttatgcatcagtaggacccatacatgcggcatgtcttaaaatcatagtcgtggcttcatgatatctttgtagagcgtttgagggctttcaagcactaggtttattg

SEQ ID NO: 4943 - DNA, 1045 bp, Homo sapiens
ttttctgcttttcttcccatttatctttttagtcacacttttctctgttgccacatattcttaatatacttagaatgttaatggatgtatagctcattgagtagtatgttataattaacaatttccatttgttgactatttgggttatttccaggtgtttgtttggctactataaataaaataccattaacgtctttgtacatatagtgtctttttttctttccagttattcctttgggttgaattcccaggagtaggtttaatgcatgaaataaaataacatatacatttttatgttcttcgttgccaaaacttctcttccaaggattgcccagtttacatactgccagattttataatttgtaaggctgtatttagtcactgttttgttttatacatgaatattaaatatttattaagatatcgatgacttaaagttagagtgtcttattgcaatattgatccttggtaggtgctcagtaacttttgactttagagaggagtgactttagagagaagctgtcgagagaagtgcttatcagtgttactattttcaatattgtaaccattcttctttctgtgtatcttactgatgcttaaacattccttacagacttttagtaaaaaagctatgaagagaaaaacattttaaaaccaccagactgcatttggctgataggctgcaagttcagcttacctactttctctaccaccttacagatttttctacttcattgtgtttgactaggcatgtgttcctcagcatgcatttctgccttagtctgagatccagtccatgttttagccacatgaccgttcagaatcttggaagcaagaggaaacactgttatgtcaatagaagtttttggttaatagaaaggaatgctaaataggaaattattaaaaaatatataattaatttttagagaagactctgaaatagcagtggaattactgatgcatgcttcaagcctatcctcctttcattataatggttagggtgattaaatccctttattcagaatttttgaattctgaagtgatt

SEQ ID NO: 4944 - DNA, 1095 bp, Homo sapiens
gatctggaaaccagagcccctggcacgtgcataggctctggccacgctgttgaccagctgggcggctggacagagcccagggaccagtaattggtggagaagttggagcaagtggtgaaactcatgctgtctggggaggagaacgagaggacaggacccaggctttgccaacgacctcagtatactactacttcaatacatatttattctgacattaaaataagacagtgaaaaagtaaaaacaaaacatacttgatacaaggttttataacttttatctcaatcaaatcatagtaattatcactacagaattgaacaagtggtcaaacctgctcagattgctgagttttgtttcatattttaaagtcttaggagggaatttatttattgccctgttgcctaatattggatggctttaattccatggttttcagaattgcctattgccatatggtttacatacaaaataccacctgaaacataagaacgggtctttcctacggctttccccccacaaactgtaaatgaaaactttttattactgactgtatcctctcatttggtttaacttacaagtgtcatgttgcctgctgttacacttgtctttggcgtctgctcagaaataatggtgtctagacagacccataaatatcctgggttatagttcctcatttaaggctctgagacttcacagcaggggcaagaagacttgcagggcagatacgagaaatcttcaggccacttaattcagagtccattggcagaataggcagagaatgtgtgtgtgtgtgtgtgtgtgtgtgtgtgtgtgtgtgtgtgttaggctgggttgtagagatgggttttggaaatgatagttgggtcttgaaactactattggagtgcaaatgcctcctccctcatttggcggagaaacgtcaaaaatcctcagaacggaagaatccattctctttattttgggacacagcctggtaaaacttgtaagaaattatgacagctctgtgggaagcaagtgcaagtgtgggagaagcaagttgatgtgtgaagcagacatcagtgtgtgaaccagagtttatttgaacagtagtagttgct

SEQ ID NO: 4945 - DNA, 1058 bp, Homo sapiens
gacatgtgatactgttttgtttcctaagctgagtgatggaaacgtgtgtttattacattctcccttctaaaatatttcatttaaaaactgcttatgattaaagtacacactctctagcagagcactcaaggctctgcacagctcttttttaaaaatgtaaacagaaagtctcatttatttttgtctgaagcacacaggagctcactcagcacaatacaataagcgaatcatacaaatattgagaaaaaatattcccatgaatacatatgtatatattcttaagagcagcaatcaggagtttaacaacaatgtaaagtggttttctctaaataatgctttctgatgggcttttgggtaggaaatggacaggtaaatcaccatcacgtaacagatgagctaagaataacatctgttacccaagtcactggaaccctgtggcctgcgaaagccctcttggagtttacatttaattccgtcattggcctggttgacttccacatttcactaaatttggacaagatcaagaaactaacccctcaactctcaatctctcatactcagggatgtgggagggaagggcaggtgagatcaggtgtgaacacagtcagggctctgcatagctcttgatcacacctaacttcctagccttgtctggcctctcccctaaacatctcttggctccctgtgaaccttctccaaacatttctcagggttgaaaccttgttgctttgacttatgctgttattgttactttctgcccccactgcaattcttttttacatctgatcacataatctctttctgattctttaatgtgtatatgatttttatgtcctttttggaggttttatctgatgttccctttttattattagggataataatatccctaataatagttatattatcattgccatcttctctgccttcctataatactgtactgtttgcttattttcacacctttggagacatattttgtaatttatttatacttgggtttatggcatctgatgcagagtacatgttcaataaatgtttagggaattgatgagtaa

SEQ ID NO: 4946 - DNA, 1066 bp, Homo sapiens
gaggggagcggagttttcctgccctctcactaggccccagtggtgccaccgaactcctgggcgtcgaggctcctacttgggtggtcgagctggctcgtagaaaaaaagctgtggccaaacaatttcagatcaggtcttcacctcaaacttccaaagttgtaggtattaacagcctctccttccccacgtgacccccagatctcaggtttgaatacttgtaaatggggtttacaccttttcgtttggagagagcagtgaggtaacgctgcccctatctccctttccctctcacttccttgggttcttgttctccaaccttctcatccccacctacaatttcagaaattgtggggtttccgcttaagtctagggactggctgtcgcaggttctttgtgaaggtgaggaatctctagactgcaggtgcgggcagttacagagtttccaccaatgtgttaacttcttgaaatggattagtttactcattcatccaacaaacccagcttctactctgctaggaacaggatagaaagatgctaaatgagatcacagggcaggagtctgcagcctagtggaggaaacttgaaggccggtgaagaatgataatacatggaagaggggttctgtgagagtctgaggcgagcttggtcctggtgaagggtgcactacacttagaggatagaggttgtgctcctctggagggtgtattccaggcagaggaaacagctcgtgcagagtgaacacaagaaggacagaaagtttccctagccatctgggggcctgaggggcatttatggccatgttggtgcagtgttgctgggatagcattctctccacccccaatatcagaaataaatctagaagcacgttagccacttatgggaaccacaagtagcttaccgaggagccaaggcctccctaattggatacacctccatgcctgctgctgttttaccacaagcagctgttgtatgatcatctacattttaattggcccatgctcggtttcattaaaatggtattgattcttcttttttgtcccccacattcaagcaatgattccttttt

SEQ ID NO: 4947 - DNA, 1051 bp, Homo sapiens
aaaaaaagctcagcatcactgatcattagagaaatgcatatcaaaaccacaatgagataccagctcatgccagtcagaatggcgattattaaaagttaaaaaatgacacaaatttttaattcctcacttctcttaatcagaacatagtctaacactgtgtccatttcctgccatcaacaactcactgattcagggtgacatttaccacatttacaacagtatcactcttgggcttgctacaacattcactactatgtatatccttatacatgggcgacatcactttggtgaactacctggccttgaaagactcggagcttcttaacctcctaaagcaaaactgatggatagattgagacactagaagctagaatacatttttaattattctgagtagagaaagaccagctgttcattgctatattcattgttaactcctatttcttttacccctttataaaaataaaaactcacaaataaccgaaaacaactcaagaaaatctattagcaaagacactgtttactctgagatgaaattaaagccatgcttactttttttttaattacatttttgacatctaaaaacatttaccttggggagcctcactgattctcctctgcactctttgaccaggaactccgatacatttttgtattgtactggcaattttaaggccttgactttaatgtatgatacataccataaatacttcactcatagagaatacttttagaatacttgtcgcatttctttccaagaatgaaaaaaaagcagtaaatgcttaatttactaggctcactttagaactgatttagggtgaaacaaatccaaaagcctagatgctattcattaactttcatacaaagttaaatatttcaaagtagaaattagaaatacatggtattgaacttgcatgaatcattatatatctcacaagttacaaacatgttatttataaatgtttaatttcatttgaataaaaaatagccactgttacttgcatttttaagtaaacttttaattttgagataattatagatttatatacag

SEQ ID NO: 4948 - DNA, 1046 bp, Homo sapiens
tatgtttggattgtttaagaggtatttgcctgcagaaaggaagggaaaaggcatttcacacaaaggtgaagaaatatccagtgcacagaaatacaaaacagcatggcttgtttgggaaagggaaaatgatagttggaacacaggaagacaaacagtgctgcatggtggttaaattctaagttctcaaatggcatcggtacaaatcatacctctaataattttagtcaggtgacttggagtgggtttgcacctcagtttcctcaaatgtaaagtggcaaagagaataatgtgttctccataaggttttagtgagaatgcttttgactgccttactcctatcccatacctagtcagctttcaaaatacaaatcagatcctgtctcctttttgttcaaagcccccagtgacttcccatctcacttaaagtaaaggctgcaaaagtttgcacaaagttgcaaagcctttgtgacatgcctgccccattctccagtcagcaccatctcctgctactcctctccagctgcactagcctctgtaaaattctctgaaccaaaacaagaaggctccttctttggtatatgtgtcttttccattccctctgcctgaaagttctagtgttctagtccgtttgggctgttacgacaaaaataccatagaatgggtggcttataattaacagaaatgcatttcttatggttctagaggctaggaagtccaagatcaaggtgctggcacattcagtgtctggtgagggtcccctttctgtttcatagatggctctcttctcaccatgctctgttatggagaaggggcaaagggagctctctggtctctttcataagggcactaatttcattaatgagggctctgttcaccttcatgacctaatcgcctcctagacaccctccttcctaatgtcatacctttggcgataggatttcaactaagaattttagaggaatataaactgtcagtctatagcaccctgatagacaaaggacttgctctctcacctccttcagatctctgctcaaagctcaggtacc

SEQ ID NO: 4949 - DNA, 1027 bp, Homo sapiens
tctaagccattctctgtgaagacgtgcatgtatgcagtgccccagtatggccaagaaagagaaagagtgtgttaatttggggcacatactgaaatcttggtagatataagatgttataattcaaaggataataaatataattgtatggatggactatctgatctgaatgtcttttctctaattatgctctcctggcaactcaatatctgctgatgacctgtgacacttgtccctttatttctttatttatttgcagaaattgtcctatcacaaatggaggaccctccccaatctctcttggttctatttgattatctcaatgcaatcaatattcatacttttccctcctttccaatatttttctcttatctatttctctttcttttgagttctgatataaaaagttcttttccatcactgatcttacggtatttaaaatttgcaactctctgattttctttttggtcttagccttacctagttactgacatcacttttgttcattttctttcttctctgtaaaagttatttgccttctccagtgtaagttgctaaatagcatgtgaagaacatatttatatgaccttggtgcacctgctacttatttcggtggcacttgaaatagtcattgagagattctagtttgtcttgacagatttgtcatgttctatacagttaaaatttagagcttaacatttggcagtaccaatcatttggcctgctaggtcccttatttgcatggagaaaagcaaattctttggaatcttacttaataaacactctcatttgaaattgacaaaattaaaatttttactgcattatttacttaattattttaaatgtgttgggtacctttacggtaattactctgcaaggcaatatacaaaagtaagtagggtagatgggggcacactttcctaaagcttagagtctattggggaatacggacgagcaaggaggcatttataacagtgctctatgtgcactgatggagtagcccagcgtactataggtgtaccatggtgga

SEQ ID NO: 4950 - DNA, 1027 bp, Homo sapiens
caaagtggggaaggaaaggagaatgagaggaagaatggcttttctatgtattttcatgtcaaagcatatattaactcttggctatgctctctcctttatgacatggtgatatggtttggctgtgtccccatccagatctcatcttgaattcccatgtgttgtggaggcaaccagtgggaaccaatttaatcatggattcaagtctttcccatgatgttctcatgatagtgaataagtttcatgagatctgatggtttttaaaaagaggagttcccctgcacaagctctctctctctttgcctgctgccatccatgtaagatgtgacttgctcctccttgccttccaccatgattgtcaggcttttccagccacgtggaactgtaagtccaattaaacctcattcctttgtaaattgcccagtctcgggtatgtctttattatgacattaaagcatgttcctgggctgctttggtggcccagtttctgtgctttctttacctactgtatggtaacttgagttcaatttcacagtctttcatttattcagccagagggactctgaatgctaagaggccagccatgaagcccctgtagagggaggggatgcctcatgctgcccagcagcaaccttcttgactgatgagggcactgcaatgacaacttccaaggggattccaatctagtttcctcaatggcagcagagatgagaggctttgtagagtgagtttttgaaatacatacattgagagaagccagtacttctgtcagaggccttgctgaagtgatttggcattgacaggaattatggaataaccattgacttcagtaggtgtacacatatgactttcatctgttgctaacaagttcatatgtttactgtctctagctgcaatgatactaatattctggtggtctaggatatattgctggccatccagtatgtgtcatgtcctgtttaaagattcattttttcaccctatgtaatgtgctatttggcatatgggcagttcttcataatatgcctgc

SEQ ID NO: 4951 - DNA, 1058 bp, Homo sapiens
gcagtggcatgatcttggctcactgcagccttgacctctggagctcaagtgattctcttgtctcagcttcctgagtagctgggactacaggcccatgccaccatgctacttttattttaattttttccttagaaatggcatctcactatgttactcaggctgttctcaaacacctggccccaagtgatcctccagtttcggcctcccaaaggactaggattacaggcatgaaccactgtgcctgggcctacgctttagtttttaattttgatttctcgtctacctaatactgtgatgtgatttggagcaagtccattcatctctaagagtctccattcctgtatcttcaggggaccagttagactatattctttcttaacccttcaaatctgaaattatatatattttattaaaaatgatataatgcctatagaaacattattccaatatatgacaccaagagacttataattacaatgatgatgatgatgatgatgatgatgactatatcaatgaagctggaactaccataggagctctggtttgatagctatggataatgagatgttctatttgtgaattttgtcttaactgaaaattcttctaatgcttttcatcttcctaggggagcaagaaatatgttatttttttcaaagttaacagacgtgagagttgaaggcacagtagagcaattaataggtatttaaataagtaggaactgaagtattgattgtgtatttttgcctgtgtgtgaaaaacttttgctttttatttcctcacatttccttccagctcttgtcaatatattgaagtgcagtcagtatggttttatttctgtgggcatctgaaatctcaacacagattgctgtgattgctaccagtcagattttatttgaagtttgttactttttaaataaaaatattgacagcagtaggaaaggagaagagcaggcttatataattttaaatggcttctaaatatttcctatggaggaaacaataagttattaaaacaagcaaaacaaatcagatagttatgtgttttattgatacccatt

SEQ ID NO: 4952 - DNA, 1073 bp, Homo sapiens
gcctgtggagggttcccccatctcgggccctgtgtgagtgaatggcccataagtacacaaagtggtttttgaaatctgagtaagagctcagctatcatctatgaaattgtggatcatggagtagaaattatgaagagatcctgtttttcgctttgttttattggcaagcatcctgagtgatactgactctttccataataaactgtcatcggacacaattgtttcagaatatggtctcggtgtttgattgcagggtctgcagactcagacagtgggaatgcaatgcttaagcttcttcacttattgcctgctggtgtacaaatataggatttggcaatttagcctaaagccttcgtctctcccgctacatccacccgctctgggaggctccaggaacgcaacttgccacaggctcccaggcaagaggaggcccatagagctgatatcagagccaaggtgtgggcctgcctcatgtataatccaccctcaaaacacagtctgatggaccccttgctagagttgaactttggactccccaccactgaaataaaaaaataaataactgccaaatcctcataaatgctgaaaagaagcagctggtagccactttaataataggaataaaaataaaactaaagctgggtacaaaaaagcttatatctgtaaaaagagaattaatgtaaagaaggggatcaaagccacgtttgtgtcatgccactttgtcacagaggcaggcaggagaagggaaggcatttcaaaatcagaaaccagcttgacgcccaccagataatagcacaaaatgcaccttaaaatccctgtgttaacatgctctgttgggacagggatggagttatttccatttcctcttacaggagaagaatccccctataacaacaatattgatgggatagctttctttgtacagaggcatccatgttgaccctgcctggcagcggagtccttcctgaattttgtttaatccaaatgctttgctagtaactgaattcccaagtccttgatcactgggcaacctgtctatctgctgagcctaaggtcatttttatggaacatgg

SEQ ID NO: 4953 - DNA, 1039 bp, Homo sapiens
ttataatatatatctctttaatattattttcctctattttctttctactaacttatataatcatttaaacatggccatggaaggaaaaggaggaaaggaactaaaggaggcatatgttacagactgaataataaataacaaggagagagattataagaatgtaaattcctaggaattcaagatgccaccagttgtgctttttgtttggtttggttttagttttggttctgttgaatgtcaaggtcatgggcaaatgtgagatattacaatataggttggtgattttctgaataatccataaggctaacatggtaatgaaaataaatccattagtagagtactttatggtttactgagaagtttctttacatacatgatctcatctgtcctacaaagttctgtgagataggcaatgtaggttgtattatggctgtttcacagatgaggaaacaaaagcccagagaggctgaatagctcaccctgctgtgaagtgctagaattgaaattctaaacaagatctttcttccattgttctctcaactacaaaaagtatccaaagatgaatacgcaaccccctctagtacctggttgaaaaacaaaacaaaacaaaacttaggagaacatcgttttcatagcctaatatcttcacctgtgttcatactgattaatgtgtgctgttgttttatcatttcaggatttgtaggtgaaaatgcccagccaatcctagaaaataatattggaaaccgaatgcttcagaatatgggctggacgcctgggtcaggccttggacgagatggcaaggggatctctgagccaattcaagccatgcagaggccaaagggattaggacttggatttcctctaccaaaaagtacttccgcaactactacccccaatgcaggaaaatccgcctaagaaaagcaaagaagaaatgttttacagactttattcactatgtcccattgttctaaaatgataacatgacttctgtttttgaagcaaaaatctacattgcctcaaacacatcactctagcttcc

SEQ ID NO: 4954 - DNA, 1112 bp, Homo sapiens
aagaatcgagtagaaatttgagattattttattatgaaaatatcttaaaaactgtgcaaatcactgaatgggttatatgacagattagatacagctgaaaagacactgaattttaggcgagatctgaagagtgatctctatgctacataaaagcagcacagagagataaaatgattgaaaatataaaagaggctgaaggacttaaggacaatgaagttcaacctatgtccaatagaacttacagaaggaagagtagagagaataagatggtgcaatattcaggaaaataagaatttttagaatggaaggaaaacatgaattttcatattgaacaagtacgagtctatatcaagaaatattaaatataaataaagtcacattgtaataaaacttgagaacaccaaagacaaggagaatgacttaagagcagccaaggagaaaaaatataacctacgtaagaatgaaattgtaccggtagcaaacttaaaaatagcagtacaattgagaatgtaagagagaatatttccaaagtgctaagacaaaataaccaagtgaacctgagttacatatccagctaaattattacccaagagtgaggatgaaataaagtcatttcggataaagactgaccactactaaattttatacctcttgtagaagaaaacagaatccattaaaaacgaatgaaattcaggaagtaatggtgagcaaagaaattgttgagcgtgtactaaaagctaaattaatattgactgtataaaagtaataatgatggtgacagtgaccatgtagatgattaatttggatgtgtaaaagtaagatggacaataatatgtaaaatgtgagagaataaacaagatatgcatgttgacttttaaaggtcatcacttaaaaggatagaaatattgcatatagtcttcaagatagtataagcaagcaataaattccagaaaggaagaaataaaaattcacagaaaaagcaaagctagtagcattatataatatagtaaaaataaatctaggtatattagtaatcatgataaatgtaaatggagaaactacatctgttaaatttagggattataatggataaaagaagaaaactcagtata

SEQ ID NO: 4955 - DNA, 1025 bp, Homo sapiens
ttccaattgaattccaccaataagcaatagtttaacctaaatgcaagtaagtttgcatttacatggtaacactgtctgacatatttcaaaatagaaataacttcttatatatttcaaaagtttctgatattctggcctaatattaagacatttagtcttatcttctcaatatggagataaaagtagcaagcacatttttctttgctctttagtagtcctactcagaaaatgtacattatagcatatagaactgttacattatcattaccatattactttgcacgacaagcaaagtcatgggacacgttgcagaaaatcaaagctgaattcagtcttcagcctgtatttgccaaatcaattatgcaagtaaattgtagactctcttgaatgagtggggactctcaacttcaagagttagcttggaaatggatccacatttgactccatctctgcctgagagcaacttccagaattgtgtctatagagaattatggagcggactttttccattgaattcaatttgtcagtatgattaataaactgcataaattaaataagtttcttaaggggaattttcaataattgtgaatagacagatttatagaatttactaaaacttgatgtgtgcagagaggtgtcatctcctcccactgctccatatgtgccaactccagttatactgagttgcctacagagcgacacagctatggcacgtcacgtgcacatctgaatgcctttgtgcctctgcaaatgtgttctctcacttaggggcctagaatgcccttatatgctggttgaggattctctttgaaaattggtttggaatcatttttcccacatgatcaatagacttgaacccctagaaaatgaacatcgtatcttttttatttctcaattaaaaaatgtatttcctgtctgatggcatagggcatggcatacattacgttttcagcagaagtttattaagtaggttataataaagtacgttggatgatgtagtaaggtacgggggaaaagtagttcct

SEQ ID NO: 4956 - DNA, 1045 bp, Homo sapiens
actctttttgtctgaagtttattctctagttttttcctctggaagtgctcattcaaacaatatttcctgagttcttgcttgttattagcagtttatgcatgaactgtatatttaaaggtcattttggccagatatgcaatccatggctcatgtttttcttctcctaactatcttaaatatgttactccaatgcctgtataaaacgttgctttctatatctgatatagtctgattttcttagacataaaagtgacttggttttgcctagatgctcaatgtgcattttccttttctttaaaggccaagagtttgactagactacattctaatgttgataattttaggtgatttttcccagggatgaagttatccttttttagtagctagttgttattgttttatatattagtctgttttcatgcttctgataatgacatacccaagactgggaagaaagagatttaattggatttacagttccacatggctggggaaggtctcacaatcacggtgaagaatgaaaggcagttcttacatgttggcggcaagagagaatgaggaagaagcaaaaccagaaacccctgataaaccaatcagatctcatgagacttattcattattatgagaatagcatgggaagactggtccccatgattcagttacctccccctggtccctcccacaacatgtgagaattgtgggagatacaattcaagttgagatttgagtgaggacacaggcagaccatctcattttaaaaataaatttcaagatgttctccaattataatgttttatatttgttttgttttgttgctttgactttgttgttttaaaaatttgtattatacttatattggatcttctttgcctatcttccgtagctatcactttcttttaatttccttttaatttcactttctaattcactttttaatttatcactttccttttaatttctttttttaattttaaagtttttattttttgccttttccatttttattgtattttcatattctagttctccatcatatggctcactc

SEQ ID NO: 4957 - DNA, 1047 bp, Homo sapiens
ttgatatataaattccccttctccagctctctcttctatctctctttctctttctctctgtgtgtgtgtgtgtgtgtgtgtgtgtgtgtgtgtgtgtgtgtgtgtggttgtgtgtgcattccttgacattttttggttgaagacatcaggtgtttggcccataaagtttctcacatattggaatgttgccgattttctctacatggtgtcttttaacatactccactgtcctctgtgtttcctgtaattggtatttacatctagagaactgattagagattcaggtttggtgttttgttttgtttggcaagattgttccaaaggtgatattgtgtacttccctcacttatatctctttccgtgatttatttgccatgatgattattgcccagatttattcactaagggttgcaaaatagtgctgtgttaattcttttaatatgttctagttacttctgttgaaaacttcctcctccccaactatgtgattactttaaggtacagatcatgtagggaaagcaagagaaatacttgattctttccccttattatatgccagttttcaaaatgaattggttcctaacattttccaaaggtgaactcactgatttaaacacatttgatatgtttcgtccattagttataattctaattgatgctaaaattgtcccatctgtggccaatgggagattatttaaggtaattgtgtgtttctttgctgccagtctttgctttctgatatgtttacattttctaggcttttcttggaccttttctggcttagaccaggagtcacccacttctccaagaagtgctgattcctttactataataggaaataggtttagaaaccacagtctggatgttaggaatgtctgtgtttctaggccttttcagataaatgagttaggatttttttttttaaagaaaaatcatattgattcatactgatagttccagttcaaattcaagactttattgtttatactttctgtcattgattttaatctttttccaaccatattaaaaatattacatctcaatgac

SEQ ID NO: 4958 - DNA, 1026 bp, Homo sapiens
cccatctactcaggaggccaaggtaggaggattgcttgagcctgggaggcagaggttgcagtgagccaagattgtaccactgcactctagcctgggcgacagagacagaatgagactgtctcaaacaaacaaacaaacaaaacaagattggtatacaaatatttgtagcatctttattcataatagtaaaagcaaaaaggaaacaaccaatatatactaaaacttcgacagagagtatatggataaacaatgttggtatatccatacagtggaaagcaattcagtcaccaataaaaaggaatgaagaattgatacacataacacatttatgtaaaattctaggaaacataaactactacatagtgaaagaaagcagatcagttgttgcccagacatggggtgaggaccagggggatgtgggaggaaagggctacaaatgggcatgtagaaacttttgggatgatagatatgttcattatcttgattatagtgatggtttcacgtgtgtatgaatgtgtcaaaacttatcaaattgtatactttaaggatttgaagtttatgtatgtcaggcaccaggatgatagggaaactgtcaaaactcttcaaactatttttttttaaataaaatctttagtggctttctctttcattccaagtaaaaactgaagtcttttctttttggcctacaagactatatgtgatgtgactcaccccttgtggcttcctccctgacctcatctcctcccacttcaactcttattcaccgtgagctccagacacactggcctcttagtggttgctccagcacaccatccacactcacatctcagggcctttgcacctgctgttacctctgccagaacactctgtctacaagtacccatatggctttctcctcatttccttcaattctctgctcagtgtaaggtccactgtccaccagtaccatcataccctgtcccctctccctgctttatgtgtcttccctattgtctctatttttcctctttttaagcttcgtgaata

SEQ ID NO: 4959 - DNA, 1024 bp, Homo sapiens
catattcttgatcatctaaggaaggtctattccttctcaaggacagctaagtaaactaataattgattctaagtgatgtaattgaacagttcaaagcagttattcgtcattagaaattattgatactggtcagataatacctactgagagctagtcccattaattttcatcataattataatcatagcatttaagccatattatttctcagcatttcctatgttccagttttatagcactgaatattttaaatggtttatattacttaatactcacagtagctttacaggtagatattattgttatttccattttacaggtggagaccaaggcttagagaagttaagtactttgcctaaagttacacaggttgtaaatggtaaagctattattggaacctagtgactttttagttactggcccagctgggattagaacccagctctatcctgtattattatttccaagacttttatttttgttggggttaattgctaatattctgtacaacttcgttttagcccagtcttgcatataatcatattttctgcataaataagataagctagagtttgagtgagcacatagtgaagaatattgactatttgtttttttctttccaattagttagggtaaagcaagtgtaaagggaagtggatggtaaggcattttgaggaggcaatcaaatatgtttttttctaattatatatttccaagccaataatttctttgaagaagaatgttttaagcgtgtttctttaccatgttaggccagtaggtacagagaaaataatattagctctttatgtcagcataggtaacaaagccttaaaaaattcacagctgaatgcaacagtgaaggccgttgacaagagaggttgcattacttcaaccagggctactgcagtgaaccaaaaaaagaactgagttctaggcttccatctccaggctacatcttaactgactaagagggcagtttagctgtccaggaagaactcgattgctaactctcactgataatttt

SEQ ID NO: 4960 - DNA, 1116 bp, Homo sapiens
tggtggaatttgacctgcctagaagcatcactatcactatctatgagcttgagaaattctatattaaggcctaaacaaggcctattaatgtagaggctgtttgttcctggttttaataccacagaggctagagaatgcaaagaagtcttggagcgtcccaggagatgtaaaccctttctagccccttgcccttctgcagcgtggtgtggtgaaaacacaccttatgcaagtaagctaacattttgagccctcatttctgtatttggaacatgagcctaaccttgtaaggattttatgaagatgggaaataaaacatgtcacgtgcttagtacatagaggtacttggtattatggttgttgaaatcataaatagcattaatagtaatgttagtatcattccctgtgatcgtgggcctttagtgattgatttgccataatacctctctcaatctcctagtccttgatgtttacagttagtttttttatgcagaataatgccagaggactgggcgcatagctaatgctaacaactcccgtggaaaaggtattgccagatacatcggtattaagagtcccaggggcagctgaagcaaaatgggctgggctaggctatgtgagaaggcaaggctttgatgatgcagtgacttctatatttttaatgttgttgaacttcattctcagccagaatctaggttgttataactgtggagggaataggtccaaggtacctcagctgatgctgcagaattcatatcaagggctttgtgtattgctcctgggggcatagctagataatgtaatattgttgtatttttaacattttttttataactccaacaatcaaagggtcataatgtgttgtaatgatgctataattaagttgtggtaaatgatagcatttgtaggttttataaccagaattgattcataaaatgaatacagtcccagcagtttatgttaacataattaaatggaaatgtaattctaactcagtttgcttattaaattgaaaattaccaggttatgagcacttttacagttctgtcaaaattggtctaagtctagaattacatgaaacatccattaaaataaagcatatttaaggctgtgttgctg

SEQ ID NO: 4961 - DNA, 1004 bp, Homo sapiens
tgctggcacttagcacactttttttttcctcctggaattcaacgttcttcatctgactgctacttgagaaactcccctggctactcttatatataaccatcacccagaactaatagagctctgaaattttgaatggtatgataccattttcttaccacaacctaatactctttcagcttttttatcttatgttcactacctgtgttctttaggctcattaagactgctatttaaatttggataaacttatccaaatatactttcactcccctttttcttagacttagaggaaaagatctctcttctcctgtccaaggctaattcataacacctatgcttttgattgaaaggttttttttcctttccaaaagtttctttcatcatccactacattttgtaacctcccctttaattttctttaatgtgttttctgtctctcatactttgaaagccaaacttctagaaagaatagattacagtatagtcccttctgctccatcctaccatgatattatactcctgatttcttcctacgtcactttttagaaacttctctggaaaagttcaccagtggcccctccagttgtgttttctcagttcctgtcagacttgatttctctatatttaacaccagtgaccactcccttcttaaaacgtttcttcatggcctcagtggtaccactgtctcttggttgtttgctgctctgaacatttatttttattcttcctacccaaattccactagaaagaagaaaaaagatataaacacacaatgacaaagaaggaacacttcagcagattagagatttcagccaatttctagagctagaaagcacttggagatttgtacctaaacaggcaggtagaataaatataaacttaagagtctgatgaaataaatgctgatttgtccctcacaggccctagaaaatctgaaaacttctaaatagggtggggcatggaactgaaatagtatgtctcagtcaagaaagtaaatctttctt

SEQ ID NO: 4962 - DNA, 1022 bp, Homo sapiens
ttcagataattttcatatgcaccactgtttttagtatttttactacctctctcaagtagtcatagcaggtattagaccccattttataaataatttgacttttctaaagttacacactacacatcgctcaaccaaaagtcaattaaaaagacaaatgtattaagcctctattaattgttggttaacatgctaaacctgttagggtataagtaatgccctttagcacttgtttctttatagacatttagaaattaaaaggtaattattgcatgttaaaacttatggaataaaagtttacatattactatattccactgtactgttaggggaagaaaattaatatttattttaaacaccatctgccaatttattagtgttgttttaagtcttacaaatactgagagtggttaattttattttatgcatgaggaagaaactgagactcagaaaataaaataatttgtcagaattcacctaaccagtaagttccagagcctgtatccaagcttaggtctttctgatttagtaaccacatcaggctgaacttcctgaatttacattagcagtttaatacaagaaataaagtttagcagggcctcttgagcataattttagagttgactttttgttacatacaacatgttattgagtgaggaataccgttagcatcctggtcttctagtccatagaacataagaacccaaaggaatcttaaaagatcacacagcccagtgttctcattcttttaccttcatatagaacagcatagcaaccatagttgatgaaactccatcctgtatctcaagtcattcatttgtccattcattcagaagatatttatgagggtgtactaggtgccgggtgtacagtagtgaataggatgacatgatcacagttgttgtggttctcacattactcacagtgtgatagaggtaatagagattactcagtaagcacacacacaaatgtataattatatgctgacacataaatgcattattatatactgagctaagtactct

SEQ ID NO: 4963 - DNA, 1030 bp, Homo sapiens
attaaatgaaaatgagacataaaaccaactttttatcttttaagcaaaattataaaattggtatcaatacatcagggacaaaaagaataagaaaatgcttttaatatgtcttataactttgagagaacagacattttgtcattgataattgatcatttagcagaatttccaatatattggtacatattgacctcctgaatcgatagtggtacttgtacaactattgttaaattttcatctcttgctactacattcttatttcctgagactgataatatttaaacaacagcaaaatctaagatccatgtgatcttttagaattaggacacaaaagttatgttatctagaaagcatcaattcctttctaactttcagtttacttcttaagactttgtgtgataagcgtctaataaaaagaaatatatctgctttatttcagattgtagtcgttatttatatagtaatatttaacaaatgaatcataagaattcagggcgtgtaatgtgatgtctaagtttatcaacactaaatattggctaattacataaatgattgtctccagagttttgtcaattataagaattggattgtggagatactgtttctcatgaagaacagaatacctgtttcctgtctaatcttatggaataaaatgtatttttcttactaataaactttactatgtgaatattttattagatatttaaagtgaaacaacttcttaaaatttgtgatttctaagacagttctgaaatcactaaaattagcatgtgttttggagaagaaaacagtcaccatacttaattatatgctagaaattaatactttgatctgatgtttaaaactgcttctttaatttttgtaaagattattttctatcttgaattaatgataagacagaaacttttagaaagaattccttaagtatgttccttgaagttttataatattttgaagtagtctcctaataatcagattaaacatgttttaaagtttaaaattcactgaaacttcagtataacactgcttt

SEQ ID NO: 4964 - DNA, 1017 bp, Homo sapiens
cataagttgcctcaggcctagtgaaggtgccaaggcatgggtaagaggataggaatccagcctgccatcatagtaattcacttagccttaaggttccaagcaagatttttattaggaaaattttcctgccgaaaaagttacaaaataatatgctctactccatgtaacattattcctagacctctgtttacacctgtttatgaagttaataaacccaatgctgtgttttaaaaaagggaggggggcattccgtgttaatttcagtagtatttctaagccacttgtctcctccccaagcactggagtacttttcagatcatttggaattgctaaggttgatcttgactgctggggcactagtgtggtgatagttttcttgcactgcggggctttggtggtagaaaggagaaaagttgtatgctcaggtatgttcagaacttggcatgcctgattgaagagagatattcttccttgaaattccagtatacctgcttgagaaaacacaaactagaaccagtccccagagagaataatttttctatccttaagggcttgccattgcctgttagagatcctttgggtccgttcagaagcaaggcaggtacctaatcataccctgcagaggagagtgtctgtgagctgtgtaccccatgtttctcctctacttcttgcacttgtcaagggatgaaaacagtggtgatgatctggtttctgaaagtctgtaggtcactcagactttcagtgagccaggctctagataaccacatttatctcagaggaaagtggggaaaagaccattggcagaagaggaaataccgatgtgtgaagacaccgttttgaaaatgaacttggcacaaatcaaagtttgaaaagaataaacaggattattttgtgcagttaaaaagagaaggagtttctactgaatatggtgggcttgcctaaaatgcattaaatacacacacacacctcgatgacaaacgtcatcatacatcttctcgctgcttgaagtgtcaccta

SEQ ID NO: 4965 - DNA, 1061 bp, Homo sapiens
taaaataatacagttgtccatgcctgtttttgctcatcactattatgataagtgaaataaaactcctggaaagtattgtttttcttttcaggaatttccttaaatttcgtaaagaataataactgtttattttaaaaaattgaatttctctacttaggaatttttctgtattcagttacaaatacaaatacaaagtattaagttttctttttttctcttaatgtacattgactataaataaatgcacttgcccttatacatttgcatgtttgaaaatcagtattttatatatagatttaagcgttggactaaaggaattccagggacttgaggttcttagaacatttagggccttttgtattgccagtagtgaataattcagtgactaaaatctcaaataataaatcattagtcaaattagcattaccttttagagttgaatgtaaaatttgttgatcagcctattcatgacaacacaggagcccaccagttcctgttttttgtgctcagcactgtttaaacattctgcttcttctttttcaactctcctcaatgatgtctagtttgagaggcagaacaaaagtatttaatgtaatatttgtaaaggaaataaatgagatcgcagtcattttttttagactatgatatctaaaaacttaacacttagagccagcagcacgtttttgtctttcctaaagtatgcattatggaaatgtattaataacttaatatatggttgtacccaagttaggatttcactgatatttgtttctttcttgatttttcttaatgaaagaagcagacacttctgaaatagattgtagccatggggaatttcgtgtccttggttgttcaacacacatacacctgctgtattatttggccataaaccagaaaaaaagttgtagctgaaatggaaaaaaatgggacattctgttgcattttgagtatgttttcaaagagttgctggaaggtaagccttgactcggtgatgtaatgtgtggagtcaaacggagtatttgccgtgccggagaaaactaatggaaacattcacttggggt

SEQ ID NO: 4966 - DNA, 1059 bp, Homo sapiens
gcctcagcctcccaaagtgctagaattacaggcaagagccaccgcacctggcctaaacttctaatatttcacactgttctcttgggaagcactccagagctgggcagacctaggttttcacatgtgtgcacattcacctattcacaaggacatactctcttacgtacatcccagtgagaagttgggggaggtgggactcagcaactctggctttgccttgcatcgtatattggaatgagcattgatctttggagtcaacatgagacacagtttcaccatgcaactaattagctatagaaaccgtctaaatccttaacctcttttagcttcaacttctctgtcatcttgcctttgtcttccaacttgtcttttattaagggccttttcttgtaaggtcttgtgctaggcattaaagtttatttctagtttatctgtaaaatggaagttttgaaatcaatagtttttaagatgcttactaaccttattaacctgaggaccaatgaaaacatataaagggtaagaacaagagacacagaccgtgaggctagaaatcctttccaccaagtgtagagcggagatgcttaaatttaatctcccagcggatcttggggctggtgggagtggatcttgttaaaatgtcaattctgatttaataagtcgtgggaggaacttgagattctgcctttctttttttttttttttttttttgagacggagtctcgctctgtcgcccaggctggactgcggactgcagtggcgcaatctcggctcactgcaagctccgcttcccgggttcaacgccattctcctgcctcagcctccccagtagctgggactacaggcgcccgccaccgcgcccggctaattttttgtatttttagtagagacggggtttcaccttgttagccaggatggtctcgatctcctgacctcatgatccacccgcctcggcctcccaaagtgctgggattacaggagattctgcctttctaatgggctcccagaagatgctgatgatgctggcctgggacccactcttagtaagtagcaaagcttgag

SEQ ID NO: 4967 - DNA, 1708 bp, Homo sapiens
acagctgtgcaatgtatgttttaagctaagtgttattacaagagtcaaaaagtgaagaattttaaaggttgataaagttaaaagttacaataaaccaaggttaatttattattgaagaaagaggatattttaaaataaatttagtgtagcttaagtgtacaatatttataaagtctacattagtgtctagaagtgttctaggccttcactttcactcacctctccctcactcactaacccagagcaacttccagtactgcaagctccattcatggtaagtgccctatacaggtataccatttatatcatattttttattatagattttctgtatttagatatgtctaggtacacaaataccattgtgttagagttgcatatattattcaatacagtaacatgctgtagaggtttgtagcctggaagcaataggctataccatatagcctagttataataggctatatcatctgggtttgtgtaagtatactctacgatgtttgtgtgtgactgtgacattgcctaacgatgcctttctcagaatgtatccctggtgttaagcaatgcatggctttagtgctacatatttgtgcaatctctaagcaatcttgtgagtctctgtattgttacaagtttctggctattacaaacattcctgctgttctttttttatattgttattattttttgagagagactcttgctctgtcaccaggctggagtgcagtggcgtgatctcggctaactacaacctctgcctcccaggttcaagcgattctcctgcctcagcctaccgagtagctggaactacaggagtgtgccaccacaccagctaatttttgtatttttagtagagatggggtttcaccatgttggccaggatggtctcaatctctcgacctcgtgatttgcctgcctcggcctcccaaagcgctgggattataggcgtgagccaccgcgcccggcactgctgttcttattcatgtcacttgtttcactttttaccaattaatattagaatatattaataatagatatatttctactatggaattcagcagtggaatgaactataactgcaaacattaacatgaatgagtctcattgagagaaaaaaaaagcaaattgtagaagaaaacatagtgtaagatcccattcttataaatagtacccaaacagacaaaattaaagacactagtgtttgaagtggattaaccttcctggttaatttaacttttgttttatttttaataatgcttttaatattatataaggtctattatgcattatattaacatatctgccctcatctttctttagtttatattttcctggtattattttttccacccttttattttttctacctttctgggtccttttgttttagtatatcttttgtagacagcatacggttggatttttaaaaatctaacatgttattgtctaccatataactaatgctttcagattattgtgatttctgatatatgtggacatgtatttatatcaactccatacttttatttttctaacattttaaaagttttttttccttctagtattgacttgttgctctcttttctttttcgttctaattttctcctccattttactagtttggaagctaggtatctaccctggttgcttccatgcctctgatgtctttgaaattttgctgtgtgtgtttaacagcttttaacatcta

SEQ ID NO: 4968 - DNA, 1026 bp, Homo sapiens
gaagccatctactttcccaccaatttaataaaaatgtgtttgaaatcaacgtgttttgaggcttggtgttaagcctatactttttgagttataccaattaaaattctaaagtagaaagtgacattaactaatttgactcaaactggtaacttattggcaaattgatgtagttgctataatacaagatgccatatgattaagttagcagttaaaaaatataacttgtgtagccagaatagacggagtagaattaattatttgggctacgtacatggcaaggaaaagatacattttctaaggcaaagatcagaaattaattccaagtctttcttgttcatcaaaaaatagttctttctttaagttgtgaacttgttcattttttttgatatacgaagtctttaatataaaatatattactcatttggacttgccaaattaatttctacattaacaaattataggttttaatacatttagctagctgtaaaaactttaaaaataatctgacttatgtgtacttcctgattgtttttcccatcacattaaatataaaagtaaatcagatcatgtttctttaaataaaaaatgataaactaaaatgcttatgcctttcttttaaaatactgataatagatttcggtgatttcttctagttatcttatagaattggttaatacagagttcatgtattgctaaggtttagggttttctctattactgtcaatagtgtagactaacaataactgtaatgtcacagttgtcacctttgcatggttagaactcagttttttgaaggacaacagttttatcatactcacctttcaaaagaggaagttatgatttggacagaataagtaactcacataataagatattagccagggtttagttatttctggtccttttgtctgtctccttcatctgtcttgctaatctttctagctgaatgtgaattcatcctagagacagaaattttgtcaatgcttttaactaggcttttaggaattaccagggaaattttactat

SEQ ID NO: 4969 - DNA, 1020 bp, Homo sapiens
ataaatgatattgaaataaataatttaattcaagccacatatttggcattagcccctttcatatatactaatatcagacctgttccttcttcagtaatccttcttcctcatatagcttctcaaaactgtgcttgctcaacttttggaattgactgtttttaggaaataccaattaatctaactcattccttgactgaatgtaatctcagagtcaccctctttccttaacatcttactgtaatcatatgtttgttactgaaatgcctttactttcctttggcatgctccttaaaggtgccagctgtctagctgactggatgcgttttctttcatcctatttctcccaatgtataactcccagctccacagtgtagcactgtgaaggacaaggagggcaaagcaggcactttatatatgggaaaggtacctttacacacatgtgcacacacaaacactttctttttagattatcttatttctaataagtaatccttgatttcatttaggaggacataaacttatttttataacaattataatcatgaattttttaaaaagtgaattaagatatgaatatgtatgaagaaattagatgttctaaccatgaatatatagcatcactgtgtcttgagtgaattacagactttactcatttctgggccatttgttttatatatagattaaatatagataattactcatttgacaggttactttattactttgatatatctcaaagtaccacatgaagttacagtgtgattattataataatttggaatcattaataaccaaaattagcatttcatataaattaaaatttaaaagttggaatttgattttgtttaaagtcagttttacttctgttggttattttgatttaataataaaatatactttttttaaacagcagttgttaattatttttaagctcacatgttaaatataaaaatgttttgtaactgttctaaattatacttagaaatattagctcctgtagatgaatcaattcatttttgc

SEQ ID NO: 4970 - DNA, 1031 bp, Homo sapiens
aaataaaaatggacatggagaaaattaagcagggtaagtgttagagaattataggatatgaagttgattggagagaatatgatttgcaggctggaattttcagccttggacagccttggacagtctagtgcctttcttctaattgcccttttaacaactggggaaaggagcaagggtgttcattattcattattgaatgaacattattcatacctgttcattcaagaagttggtgggatgggttttagccatctctcctgattcctgatcagattgcccaaagcttttaaatgtcagtatggataggcctgcgaatagcaaaaaaggcacttttgtttaccaggtacagctttactactaatgcttctgaatttttttttttgcctttatgtttatttttttaattgagacagtaataattatacatatttatggggtaatgtgatattttgaaacacgtaagcaatatgtaataaatcagattaattacgatgtccatcacctcaaacatgtatcgtttctttgtaacttttgaatgattttttttaaagaaagtttacagatgctaaatatttatatagcattttggatgttccctttagatttcatcataatgtatgtcctgaaatttaatatgtaagaacttcgctacagaggttaccagtttactcttctgctttcatggctacttaaatattatgcagtacaactagtctttttattagctttttaaaaatgcatgaaataccatgctttctgcattttatttttctcactttagtatttgcatacaaattcttaagtcattcctttattagtaaagaaatggcttattttactgttttgttttcgagatatatgtgatctatggactttttaatgaatgtctttaaaaacattgaatttgcaaatgtaaggttttctaaaaatacgtcttagactgtgatcatcattttaaaacttttcttttttgtatcctaacaaacctttgaaaattgttttaaaatgctctttctttcaaaattaaggct

SEQ ID NO: 4971 - DNA, 1049 bp, Homo sapiens
agtactaggattacagtcgtgagccactgtgcccggccagaaactgacacttttttaaataacttattttgagataacttgattctgtatcttagaaaggtacaacttaatagaattataataaatatttcttttacaaaagacattttaatacagtctctttgattcaaaattctctattttgggccaggcacggtggctcacacctataatcacagcactttgggaggccaaggcagatggatcacttaaggtcaggagttcaagaccagcctggccaacatggtgaagccccgtctctactaaaaatacaaaaattagcagggcatggtgatatgtgcctgtaatcccagctactagggaggcagaagcaggagaatcacttaaactcaggaagtggaggttgcagtgagcggagatcatgccactggactccagtctgggcaacagagtgagactccatctcaaaaaaagtaaaaataaataaataaataaataaattctctattttgatgtcatttacaactgtagattcgatatcataaaaatttaatatccatagttatttgaaaatatgacttgaataatttttcattcagttctattaaatgatgtctgtcttgatatttttattgtattatgctttattaaaagagcagatatttacaaatttaaatagtgccaatacagtagtatatttgttcatttaattaacagtattttaatgtgtattatattctccatatttagtcttgaaaaccctttaggaaaaactatataaacaggtgttcaatcttggtattttaatgttaccaaaattgacaacatatttttccatatatttaaaatattggttcttgcttctctgataacttagtcttcgaattggcttgacttcatagacttcattgtcatttgggtttgtgatgcttcagaaatatggaaccttgcaaagtgaatgttagtattttggtaattagacacaatgatgcttacttactatgtgccagacacttttctacaggctatttatatatattttttcatta

SEQ ID NO: 4972 - DNA, 1259 bp, Homo sapiens
tcttcttcttctatgcttcagtgatcatagaaaacttctaaattgagtactttgattttacaggtttccaagctagactcagtcgccttcatggaatgtcttcaaagaatattaaaaaatctggagggactccaacttcaatggtaggcatactttttctgtgtaattgtcatgtttggaaatgtttccatttctatggaataaaaagccacatcctcatcctttattcatattctaatgttaaacttaaaaataatccatttttttgtaggctacaaactggaccagtgagattcccctataaaccaaatcttctaatgctaataaattagttacgttttgaacatctggggaatgacattcgagggaacctggctcctgtcctcttccctggaggaatatcattgaagtgagagcctctttgatgaaaagatggggctgtttttgctggaggactggtattcttccttttagtcagaagtgaacctgactggggaggctttctagggatttaggttggcccagggtggatagaaactactgtaaattatatatttttctcttttatggttttttttttacattgaatccatttatgtatacttgctttgccaaaatgctaacaaagctagaaaattttaaacttccagatcgacaagtattccttaatgtttatattgtgactgattaagaattaatttttacatatctgactgttgtaaataaaaatcatgatgcattgacatttatggttcatttttagagaagtcttatataaccagcattatttaaaatatttgcattttactcagggtattttaacaagggctaagatgagtagtaggtaaggttgataatctttgctggagtttgtattttgttcagcttcctttctacttgggtaatctgcttgtattgcaaactcattgtattttatagtatagctttcattgtactgcaaaaatcatcctcgttttaaattagccacagtgataactagtctgcactagtagaatcatttaccttttaaattatctgctttgtctgatacctgaaacacatcaaaattattattttggtttagagcttaatgaaacatgtgaaagctggtatttttaacaaatgctgtgtgattctgaatcatattgtcatgtttaaaagtgagagctgcttgtacatctttagaatggcagaccatatgtgtcactgtgagtgtcagaaatacttgcatgagctcattttcaccaactggggggaaa

SEQ ID NO: 4973 - DNA, 1022 bp, Homo sapiens
gaagaaagctagagagaggtctaaattcagaactccttggaagaatgtgcctcttaagaaattcctatattcttcattaatatttattttttaagaaatcgaacagaaacaaattatattcagaaaatgtatgtgaatttagatctcatctataattttaatcctaaacttctcaatttaaatattttaaaacaagttaggatgccttattaaaaaataagattatggaattctacatattaatggaaaaagtattttaattaaaaaaagggatgatttcctgattggttaaaattaagaattacagtaaaaataaaatacatgagaatttttaaagaacatcactaaattttctttaaaagctaagcctctcattatattatatgactttgttctcctggtattttaaactagactgtcatataagcattacttctattagaatagtaacagtttgtttatgttattcaaatatctgctatttgttttatttgtatgttagatttgactctggagcttctgtgggaatatatgtacacactccctccttaatatttgtaatattattttttttttttttttgcttaaaagtgaccttaacttcgatataatggattatcaccgttttaaactttttattccttgcaaactaatagagttgttgtgaattcttaagtaatgtcttctccagaatatttgtaaatgtggttatgaaaagtaatctcatcctagtcctttgtatttcatgtgctgaggaaaggcttagcctgcttttgattgagacttttcccattttattgagcagtggtgttccaggctcaagctgaattgcatgacgtaagaaaggagcagtgagcatttgatgaaagtacatgataaaatgcatcaattgtgtcagcatctcgttgcagtcacatctggcttactgtcagggtcccattagattcctgtggttttatgtgccaaaaataatatgctctgtagtgaatggaaccaggatattagcagtttgattaaaaaaa

SEQ ID NO: 4974 - DNA, 1045 bp, Homo sapiens
ttaatggtataactagcatagaatgaaatgcacaatttttacaggcttaattttattagttttggcaattgcatatacttatgtaaacaccacacaaaacaagataatggatttgtccatcaccccacagttccctctcaaggatacctgtcttaatgtttcactgttcattatcttggttaagtcagggagacaaaatgtcctatgtagattggtctgctcttcctagggtgctattgatttgtagggtaggtgactacatcagaatgtgattgattctctcaacttcttttacctttaaaatcatggttaggtactgagagaaacctccttcaattctctttaaaggctcgcttgtcatacaactcaccatttcttatggcaccagagtataacaaagtggtagcacttagtatttttgaatgaaattctaaagtcattcctgttctgtcagaatgaatatgttccagaaaactggatctttattttctagtctatctgtatgactatctgtatgactatctggaatgtaaaaattccagatttcttaatggaattttcttcttcattaattgaacagatatttactatataagtatgtttgatcccagtaataaattccagtcccactgggaatactgctactaagcagttaattaggtgccaggttttacaaatatgtgtcatctcatgtaaatcttttgaggtaggtgtatcattctttgcattttagataaggtgacacagaagcaaagatggtttaagtaactggcctaagtatcatatttgcaggatgattccagtatacccccccaaaattcttaaccacttttatatgttgcctatgtgtctgaatgagatataatatctcaaggaatatgtaacctagcagttagatgcccaaatttgttaaccagtctggattttctgacttatttagctcccatcttgactttttcaacttctccagtgtggacgttgctgtttcaatttttaggcaccaaatgggtaaatgtggataatttctgtattcaactatggtatt

SEQ ID NO: 4975 - DNA, 1023 bp, Homo sapiens
ttaacttctcttctttgaaattctcttccactttccatcttacctcttcaatgccactttgtctggatctctgactcctcttcttccctgacttagaaatttggatgttcttaatcatatccacggcttgtctctgtttttttttttttttcacctatatttttttctttagtgatcccttttatttcctagcaccatttcttaaattatttcattttacatgtaattcattcattttacatgtaatttatcagtactagaaactgtaaaccgtcattgatatgtatgtaaacactaaatctataatctgtagtcccatcctctcttcaaactctgatttcacacttccacttgagatgtccttttggagaggctgaaatcttcaatctcattttcgcaaacctaacccatagtctttcttctcctcaaacttggcttttttttttttttttttttttttttggttaatgtgttctatttctattacacatcctaaccttgctacttaggtgtgatctttgactctttccttgctttttcttactctatatccagtcaatctccaactcctatgtattctgctgctaaaatgtcagtttatatctagaaaactctcactaacacttgtctggactaattgcaatagtctgttaattgacatagtctttgtaaaatccaatttcctttcattggcattatcttattcatgatctatcttcaacttactttccagacttctatcttattaattttctatggcacagccaaacataattattcatctttccttaaaacatcccaaactttgtgtctctttgttcatcatttacttttttctttaatgtgcccaccacccctttaccttgttgaaatacaatccatcttcaagctccatcttgaatactaccacctccctggagataattgatttcttgatctcatgatttcttctcactctgaattcccacaggaatttgtttctactgctcttattttgtacattttcaagactttcattccata

SEQ ID NO: 4976 - DNA, 1048 bp, Homo sapiens
taatccggcttgtgtgtttttgcttttgttgcctctgcttttagtgttatatccaggaaatcattgctaagatcaatgttatgaagctttccttctatgttgttttctctgagttttatagttttaggtattacacttaaggatttaatacattttgagttgatttttgtgtaatgtgaaagatgagtccagtttcatttgtttgcatgtgggcatccaggtttcctaaattcatttgtaaaacagactatcattttcccatctgtggtcttggtgcccttatcaaagatcatttgacccactatgtaaaggtttatttctgtactctctattttcctctgttgtctatagacttgtctttatgccagtaccatcctattatgattactctacctctgtaatatgttttgaagtcagaaagtgtgaggtgtttttagctatctgggttttctttttttgtggtttcatataaattttataattttttttcctatttctgcaaaaagtactattgggatttttatggtagttgcattgagtctgtagatcactttggctacaatggacaatttaaaaacattaaattttttattccatgaacctgggatatcttttcacttatctgaatcttctttaattttttcatgaataaattgtgtttttcagtgtacacatctttcatttccttgattaagttttacctaagtattgtattcttcttaatagtattgtaaatgagattgttttccttatgtcctttttggatgtttattattaattaatagaaatgcaactgatttttgtatactaagtttgtattctgcaactttgctgaatgtgttcattagctctaataggtttgttttggtggacttattcatggtttatatatataagatcatgtcatgtgttaataaggacaattttatttcttcttttacaatttgcatgcattttatttgtctttcttgcctaattgctctggctatgactttcagtactagaaatagtactgaatagaagtggtgtgagtgggtatccttgactt

SEQ ID NO: 4977 - DNA, 1071 bp, Homo sapiens
tagtcattagccacatgtggctattgagcatttgaaatgtgattgtggtgactgaggaagtgaatttttaattttatttactttaaattaaattcagccacatgactactatttggataatgcagttatagactgtgctgttttccagtcacagttttgcacaattctatccctgtttatcataatctttataatttcaatagttggtgtaacacctaccccaaacccctctgtccccaaacccctgtctttaattgtgtttgcagatctacttttaaactttggacagatccttttgtagttcctaagtgtgatggttgggttttcacactcatatgtgagatatgcctccctcaaaccttatcaccacctgggcacattccccgtgtgatattggcggaaaaaagaaagctttgagcattgtatttgtttaagtgtgcttagacaatgacttgagttaaatactgtcttctctttttcctcttttgttaaactaaaggatcaagtagatatagctgttcaagaactccttcagctaaaggcacagtacaagtctttgataggagtagagtataagcctgtgtcggccactggagctgaggacaaagataagaagaagaaagaaaaagaaaataaatctgaaaagcagaataagcctcagaaacaaaatgatggccaaaggaaagacccttctaaaaaccaaggaggtgggctctcatcaagtggagcaggagaagggcaggggcctaagaaacagaccaggtaatgaatcgcagaaacttcatttgaagcaaagcagtgaattaattcaattcttaatagtttttaaaacaaattttgactggtttaaccatcacattaagttagagaacgctaaagctacaatgtcagcagatagcatttattgattttccatttagttttaaaaataggtaacacgtttgtttggttcaagaatctcagaatgtaagaagttcctgtgcatgtttcccatctttccggttttccccaccaccgtaatcagtcagtagccactgttaacagtttcttctgtatctgttgagcgatttt

SEQ ID NO: 4978 - DNA, 1030 bp, Homo sapiens
tacctgaggacaaacagtaaatagtagagttgggattcaaatctgaccctcgtatttaagccttacgccagcatgcctttcacctaagtctattacatgcttcttgcatcatatttcatatttatagcagggaaattatttcttctggaatgctaatcaagttatttaaaaggttttttgaggccagtttatgaatgttaacttttaaaaatgtgataaattgaattgtcatttaacacttcaccgtttcattgtgtgtcctcaagtagtgaactttttaacatatctgtttaaaatgggagtattttagttagtggaaactgcttgcattttagagttattttactactatgattttgagaaagtgtactttggtttatatcatctttacagcatgaagagctaatgctaggggatccctgccttaaggatttgaaaaaaggagatattatacaactccagagaagaggattcttcatatgtgatcaaccttatgaacctgttaggtaagtaaatgtaactgaacgtctaaatgaaaatgcttaaagttgttatagtgagtaatattttagaaattgaactttcactaaaataacgtacctaacagttttctttctcagtctctcagttttattttatatttaacattttagacaagtaatttattttaacaagtgatctttgaaacaacacgcacattgaacattaataaattattcatttctgaaattaaacctcttataattaactttcctgtagcccaagtataaagaacaaaatttcagtctgtatattacctatctttgggtgaaaattattaccattatctttttctttgtagtgtattttcactagataaatggtacaaacagcatacatttagagggaagaaataaccagtatttgtatttttttttttaaccatgaagtaataggattattagaaggagaactctatgtaaatttttgtcccttttttttcttttctgtttgtctctgctatttttttaagtgatatctctgtaactgt

SEQ ID NO: 4979 - DNA, 1050 bp, Homo sapiens
tatatttcactagaagtaaacttgaaagtatttatcgagttttttttttttttctaaacatgcttagcatgaaataaaggcaaagttctaattaatactgcttgcccttaaaatcatgttgttattgttttttagggctcctcacgttcagtcgtgaacatggagtgggacaaaatctgggcgtttaacaaaaaggtatgtatgttaactctctgccttcttttctcatgcttaagtcccaaataatgtacaagtagaagtcattactgtgctcatggtagagaaaagtttgtgaagaatattaacattttgcagactttcaggaaaatggaatgttttccttttttaaatacacgaagagcattaattaagcctattaactattccaaataagtaacaatgattgaaacaaacaaacttggaattatggggaacagtaatatttttttccttaaattttttatgaacactctgcatttcatttttctgctttcaagctgcgagctctctgtaagaaggtattacttaatgcttttatttgccttaaacatagcttttagcatattacatgttaaaacctgagatgttatatggctttgaagcacaatcacatttatataaaagacttgcttatacaaacgcattgaaaatgcattattcctagtgttaaaaaccatgtcctctggttttcttagtgccaaggggaatattgggataactctattctaccccattcccttgtgtgctgagaggacatagaattctaaaagtatgtatttcattgagttgtattaaagtttcattaattacagttcctttgtcttactgaatccagcttttttttttttaactgtttcttaactgaaagtcaaatgaggaacattgcctattgacattgttaattactaattggaaagcagatgcttggacactataataaggcaaatcattcaaatgccatgttttaaattatggtttctgtgattgtgttctgtaaattcttatttgggattgctgcttgatggtgctgatgtcttgcctcaagatata

SEQ ID NO: 4980 - DNA, 1038 bp, Homo sapiens
cagagtgagactccgtctcaaaaaaaaagatgttcaaaagctaaatttccttaaaattattacatgtattatttattgcttcctactatgttatacattggccattacagaaatattatgattatacaatttgccaagccaatacctaattttgtattagattgcaaatttgcttttttgtttgactgctaagttgacaactgactcattgttctcaaaggctgataatgttttgatacactttgagtattaagtcataaaaccttttggtttttaagaatctcttaacttgtaaagaattacattttaaattagtattgttgtttataatgcttaatctaagagggaaagggtaaaatgttttgtttattttattttctttttttctagtgtttatccaacatatgattttgcctgccccatagttgacagcatcgaaggtgttacacatgccctgagaacaacagaataccatgacagagatgagcagttttactggattattgaagctttaggcataagaaaaccatatatttgggaatatagtcggctaaatctcaacaacacagtgctatccaaaagaaaactcacatggtttgtcaatgaaggactagtagatggatggtatgtttaatgttacttagaattgacaagaagtaaggacatagtagatcagtgatttttaaactgcttgagagatagggaaggtgattgggaggagggggaatgggtaggcctatagaattcctgattcttatcttcttctcagccagtgcattagggcttccccttcttgttttaatgccacaaataatggagtgcccactggggatcatggaatgaaaaacacacatgagggcacatcctctgcaggtcttagcatttaatagaagaacagttttgactttctggttcttggtatatttggttactgatctctactctctgctgaggctgaggtttttctttttggctaggtcccaagaaggttaaaatacccttgaatcgaagtgaagatgtaaaagtttatcttgagct

SEQ ID NO: 4981 - DNA, 1033 bp, Homo sapiens
tgtagtatcagctacttgggaggctgaggtaggagaatggtgtgaacctgagaggcagaacttgcagtgagctgagatcacgccactgcactccagcctgggcgacagagcgagagtccgtctcaaaaaaaaaacaaacaaaacaacaacaacaaaaaaaactgtaccactgctgccatcattataatttgaaactaatacaagttggtgaaagctgattaaacttccttgcttcatgccttgtcagcccaatcaactgtatttcaacatagtggtgtaacatattttcttttactcatgtacttgatagaaggagggtgttgatgtgtgatattatcaacagtgtctctgatctgtattcttccttacaattgtcagctgctcacaggaacagcagaacagtgtttttgtagattctgattcattgagtgttggtgctgatgagacctttgggattatttagttaaaattcttttatttttaatctccgtgacatgagtttacctatataacaaaacttcacatgtacccctgaacctaaaatagaagttaaaaaattaaagttaaaaaataatcttttggctgggtgcggtggctcacgcctgtaatcccagcactttgggaggccaaggcaggcggatcacgaggtcaagagatcgagaccatcctggccaacatggtgaaacctcgtttctactaaaaatacaaaaattagctgggcatggtggcgcgtgcctgtagtcccagctatttggggggctgaggcaggagaatcgcttgaacccaggaggtggaggttgcagtgagctgagaacgtgccactgcactccagcctgggcgacagagcgagattccgtctcaaaaaaaaaaaaaaaaacttttattttggcatctgagaaaaccaaagcctagagaagtaaagcggcttttactaattgtcatgtgctcttttcatttagtcatcacagtgacagtctcagaagagcttctctccagtggcataggtgggcacccagttctcagtagtagtagg

SEQ ID NO: 4982 - DNA, 1046 bp, Homo sapiens
ttgaactttgatctgcatacagttaatttaatttagcccttatttatagcctttttttttttttgacacagggtcgctattgtctaggctggaatgcagtggtgcaatcatggctcactgcacccttgaactcctgggcttgtagtgaaccgaggttgtagtaactgagattgtgccattgcactccagcctgggcaagactccatctcaaaaaaaaaaaaaaaaaaaaaaaagaaaagaaaatgctaaataaaattaatattaatcagagaaaaaataattttatatcctttagttagttaaaattgttctgtagtcttaaatttcaagtgaattaaaacttaacctttatggacactcattatttcatccagaatttattggctactattggataaggaagcaaaaggcacttaaaaataactagaaaaaccacaatccaattagccactaacttgattgattgattgatgtttttctataggcaagttaaccgatatccatgggaatgttcttcagtaccacaaggatgtgaagcatatgaactctgcaggagtcctggccacactgaggaattatgactactatgcaagccgagttccagaatctattaaaaatgcacttgttccttaaaggaaagtttcatttggccgggcgcggtggctcatgcctgtaatcccagcactttgggaggccgaggcaggtggatcacttgagctcaggagtttgagaccagcctgggcaatatcgtgagaccccatctctacaaaaatacaaattaactgggcatcctgtcatgcgcctgtcatcccagctacttgagaggctgaagcagaagaatctcttgagcccggaaggcagaggttgcagtgagctgagatcgtgccactgcactccagcctgagtgacaggagttaagccctgtctcagaaaaaaaaaaaacaaaaacccaaaaagtacttaaagtttcatttacttagctaggagaaagacttggttctcaaaataatacattttaagattaattgggtagaattagagttcca

SEQ ID NO: 4983 - DNA, 1045 bp, Homo sapiens
atctggggattgctgagaacaataataagctgaagtatggctcacagaatcctaacacaaatcattaagtctctagttagatttgttatcctaaaatttttcatagaattttaaaatctaattctgacttgtatggttaagaaaagcagttaaatattttactacttatcaagggcttttaaaataaataaatctgattgataggaagaaaggcaaataaatacctatgtagacattctataataacaaagagccatagatgataaaggaattagattttaatgtagaatgggtggtttctgaaacaaaggtatgtggtactttgtagttattgatgagaagccagtaaccagtagtgttttcctagatatatgcccaccctcacacaactttcttcattaacaaacattaaatatgcatttgtatcttattaaattatattgtataatgctgaaggaaaacaaaaagtgttcaaataatcataacttctacattacaggttctgtttagatgcagaactagaggggccagggtaaatgtagataaagagatatatagcaccatgcttcttaatgcttcatacttttgcaaacagaaaaaaaaagttttacttttattataaaacttcatctatggtcaaagtaaacactgttacatttaaattgctttttaaaaacaattgcgatctaaaaagtcaaaaatctgaaatttaataatatgagacttacactgaatataatgttcatttagaagttgctgtggtccacttcatttataaggaacaaatatttttacagtacactatagcaacagcaaaagccctctctcaccctgataggaatgggtttgctgggtgtctagaagttagattcctgctgaatagaattagccatccttaaaagattttaatccaatactgaactgtttataaaatgctttctctattgtaatgtactgtaagtagtgaaattctgtatatactgctattttctgtctgttcattgttgtgaacttcttatgtatattagtgaaataaattttcagc

SEQ ID NO: 4984 - DNA, 1061 bp, Homo sapiens
actggtggagcaccactccatcctgtgctccatcttgtatgcagtcatgaggttttctctgaagaccgtgaagccactttcactttttgacagtaaggtaagtacctcacaggatttcagagctattttggagttgcaggcttagcagacacatggattttcatatttaatagaagctgtccagtacttttgtgactggtataatttggtgtgaggttccaactccctcattccctgcttgattccgttctttttatttaccttctgtactgctccccttggagttttgccctctcagctgtctgctcttctcattctccatattattcctggacagactcattttctccctcttatatatctctaggcctgaccaatccctagagtttgaggcattcatttcttttgaacttctctctttgagtgtcttataggacttcagacacctcatatctaaaatatatctgcaaaccaatacccacatcctgcccctaacctaaatttgctgttccttctgaattccctgacttggttattttattaacgatgtcatcatttttgccctggcaaaaactagaaactttgaagttatctcaccaattccttacttcaagccaattttcttcattgtaaattcattcttgtaaattctgccatagatcatgcctgtccgtttctctccatgactataaccctagttcaggcataatcatctttccctcggctattacaacagccctttcttaatcacgctgcctccagtttctctctctccagtcccatgctgcaagagctgtcttcctaagagacaggtttaattgtattagttctatacctaagattttttttggctcctctgcaggatcaagtccaaatttgtgagtagaatatgtttttacatattctattgtaaccttcacagtttagctgcagtggatagtaaaatcctttccttccccacgcaggtgtcaaattttgagagacaggacaaactgttggagacaaaaacgtcaacattattacttagctttttactgatagaagctgggttagagaacaca

SEQ ID NO: 4985 - DNA, 1048 bp, Homo sapiens
tgatctaaaagaggcttcctgatttaacaggatgtgaatttaaagatttacaacctattaaatttttatttgattatcctgcagcctaacatattactgtgtattggctgaggtgcaagggtctcttgagcccagtagttcaaggctgcagtgagctatgatcacaccactgcatccagcctgggtgacagagtgagaccctgtctctaaaaaaaaaaaaaaaaaaacaaaacaaaaaacaaaacaaaaaaaaaacagtactggccattttaactacttggaaaagtgctatttataaaggggcaaaacaactgatagtaatcaccacttctgttccccaagcagctgactactatccctgagtgtaatgaaggcagctgttctgtatctagctttccaaggaaagagggaatcaatgatagatgcagaacagctgccttcattacacccttcacagatagtgaaggaaagagggatggatttctcaggactgcaattcttaataaaaaatcttggtagccaaaagcctaataagattagactgtagcaactatcttgtgcgtcttataatggatgtgaatattctccattagctgccttggcaactactgatgcctccttgaaaaaatattgaacttgtaaacagattccatttaatagatagatgggtttcattataggaattgaggatatcagcactaagctagttagtaaccttagtaaatgatgagacttggtgttaggctgggtaagaggagatatcaccttatgtctctgtaataaattctagagaagctatgtatttttcacctctatcacatgcttgcaggtgacatgaaatccagttgcagaaattgtaaaatatcccattttacttgaagagaacttgaaaattacttattcatctcttagatcttaccttcatcctatatatatatatatatatatatatatatgtatgtatttatatatttaccttgactgatttagaaaatatcatgtttagattattctatctttattgataaaattaagttactgccggacg

SEQ ID NO: 4986 - DNA, 1029 bp, Homo sapiens
aaggaaaaggatattttggataaaccacagtcaatctgctgtcttcataccatgctgtccctcctgagcaagatgaaaggtaaacaaagtttgttgctctcgtcaacaaagtttcgtgtttgaaatgtcacaaaaagatgggagagtggataggatcccttaacaaaaggagtctgtagtgtacaaaacatttcaccgtagagattcttttatgtattaatagaatactcttaatgcatttgacttatgctttaatttatgaaattttatattttgtatcatcataaaaaaataacatgatttgaacaatacatcttaactcagtaaggcaaatggaatggtcttcggggaaggcaatgtttttcttgttattttttgtatgattatcagaatattaatctgttaaaatattcaacagttttcagtaatgatgaaatattccaaataaggatttatattgattcagaacaaagatgactaaaagatcataaataaatggaatataaatgttctgaataaaatagattgttagacttccacttcattgagaaatacaaaaacacatcagtaggtaacttagttttaacattatgtttaacataaatggttagtccaaaaaattgacagggtaagagtttatttttctgttttctcctatccctatagtggccatcgatgagacctgggattctcagtctgtgtccccatggtggcagcagatgcgcacagcctgtattcagtctgagaacaatggagccgctctgttgtctgcgcatgttgggcattctgttgctgcacagatatcaaacaacatgacagagaaaaaagtaagtgggtaaaggtatggctttgatctgtacacatccagtaggctaaggggatgctttccttttctggggtttttcggggggttttttggagcggggagagggatgagaggtgctccccttaatttctttattgagaatgatgccgtggatacttgaatttagcagttgtcacatggcagtgtcctactgtgtttttttc

SEQ ID NO: 4987 - DNA, 1032 bp, Homo sapiens
tgagtcctgggctgagagatatgggtgagtctgcctctgggtccttatgcaagcaactctgagctgggacctcagctaaggaaggtgagagcagcaccacaaggctactttccagcccactgctgagaccagtgctagcgggcagactagcctttctgccaaaacactagtgtgtacagttctttctggaccccatggcaaatggttttggtggcaggatcatgggcaaacagggaagtagccaagccccttgtggggactgggctgtttctgggcttcaatctggaagtcagttcagggggacagatcaaccaccttattgtgagagaatataagtaggttgccttctattccgccatcttggtgacctcaaggtttctgttactcaaaatctattatttagacatcatctggttatatgtcaatatataacatatttatatgtgagataacagttaatattttaatatgtgaattcataatataaatatattatgaataatgtaatgtggcattctttgttgtgactgttagaatatcttattttgtatttactagttatggaggtagttacctttatacactagactcttctcctgttatatgtgtccatatatgtgtttctatgtggtaacttaatttatctctgtattcacttctttatttttcttctttcatcttaatgtttcctgcaatttaaaatatctatattgcttataagtgattctacaattatatgattatgttctgatagtttctttggcatcctctattttatactgatctcctatatacaaacaaaagcttgactgtttggaagttttaatgtttatagaaaacaggaaaaacacactctaggttataaacagagactacctgtagggtgggaaatagaaggaggtaacctagggagaaataagaagcaaagttaagcagagcaggttttttgtttgtttcagaattttattacaagtgatggtgggtagaggagaggttggttggagagaaaagtggaattcatagtgtgaagag

SEQ ID NO: 4988 - DNA, 1035 bp, Homo sapiens
tggtgtcagcaggatgtcatatcttgcaaaaaagagaaagattaagaagaagaatttaaaatagacaaaagatgcctgtgtgggagcatattctaaaatttagttgatggtgaggacattgttttctgtgacatgccttttaatcaaatatagttatactttatattctctaaaggtatagggttgtgggtatctattgaaaacctacataggactgtggttttatttcttttatgtattttatattacaaatgtcagttgtgattaataaattaactattaatccaggtaaaattcatatttctttatataaaaacagattcagcctatttcatttatgcatttcgttattctgttatatgtttctgaactggaatgtgatttgagcattttattttcttttaaatatcagatttggacttccagattctagacgccatggtgaaagcatatgtctgtctccatgtaacacactggcagcagtaacagatgatttcggcagagttattttattggatgtagctagaggaattgcaatacgcatgtggaaaggtacttcttacaaaaatccagaaaaacaattaattcactttttaccccaatagttgagcaatgttatcatccttcagcttctggatgataactctgtttaattcttcatgtttacattttctttttttgacatgaactcagatcagcaaccacttggtccagtagtcagttgatacatcttttaggtttgatcacctcatagccatgtttaacctttgccttttgcactttctttcaattctcactgttattgtcaatttctgagttcagtttcttgcccctgctacatttattccccttcacaaagccattcttgagccaaatgttctccccaaatctataatgccaagtctttcagatttaagatagcaaaacccatcttcactgacttgacttttatatccatatgcttgggtcaatccacctggtgtgtcaataagtatgtcacttaggagtttccttcagctattattaacagacctg

SEQ ID NO: 4989 - DNA, 1236 bp, Homo sapiens
ttgaactcctgacctcacccgcctcagcctcccaaagtgctgagattacaggcgtgagccactgcacccggccaaaatttattcttatgtgaaaaaatgcattgcctttagtgagacatctggaagttagttcagattcagatcatcataggcatatatctttaaaactgggcatgatggctaacacctgtaatcccagcactttgggaggccgaggtgggtggatcacatgaggccagaagttcaagattagcccgacccacatagtgaaaccccgtctctactaaaaatacaaaaattagccaggtgtggtggtgcacacctgtattcccagctacttaggaggctgaggcaggagaattgcctgaacccgggaggtggaggttgcagtgagccaagatcacgccactgcactccagcctgggtgacagagcgagactctgtctcaagaaagcaaaacaaaaacaaaaagaaatggtagcagttttaataaagatttaattatgccctcagccacagtattgtacagttttaagtcactcactgtttgactaatttttctacagacaaatttggtctatataatgaccatataaatcagtcttaaaaatgtaaccttggtcaagtgtggtggcttgcacctgtaatctcagctactcagaaggctgaggtaggaggatctcttgagcccaagagttcaagaccaacctgggcaatatagcgagaccccatcgcttaaaaaaaaaagtaacctttaaactagtaaaatatagataaaagcagatttcttcttgcagccactataagagagcttactgtgttaggtactgagggtatagagatgtaaagacatgcttctctgttgtctgaaagtgtgagtctaggagcctggttagaagaaacacatgagaatggctacaatactacaacatagtaattgtaacagacaaggggaccagctgtagtgggagcagaggaggacacacttattgtttctccagcacaccatacacttttatccctagatctatgtgcatgtgggctagaatgcctcctctgtgtttgttcacttggtcaagttctactcattctatgcaaactggacactgggagagaaagagcaaggagaagaggaaggagagtgactctaaagaggctaaggatatctgacacacaggccatctttctatttactgcatagctcttacatggaatactctgtaataaaaacctatt

SEQ ID NO: 4990 - DNA, 1067 bp, Homo sapiens
caacaatgatagactggattaagaaaatatggcacatatacaccatggaatactatgcagccataaaaaatgatgagttcatgtcctttgtagggacatgaatgaaactggaaaccattctcagcaaactatcgcaaggacaaaaaaccaaacactgcatgttctcactcataggtgggaattgaacaatgagaacacatggacacaggaaggggaacatcacactccggggactgttgtggggtggggggaggggggagggatagcattaggagatatacctaatgctaaatgattaggttaatgggtgcagcgcaccaatatggcacatgtatacatatgtaacaatcctgcacattgtgcacatgtaccctaaaacttaaaatataataaaaaaaaatcagtgaaaatattagtagcactaacttccccttttcttttgggattgagtagaggagccttaatggccccaaaacaaagtttaactttggtgaaaaattaaatggctgataataccgaatataaaataattgtctatttctagtttattaaattaatggacttcttacctacggaaaattgccttttgatatatagattaatgatgagtattttaaatgttctcaagataatgaagcttatggttggctaaatttaaataatttaaaagattctgaaaataggtataaaaatttaaacaaattctgacctagtaaaaaagcatttactagaaaagaaccacatagccaagacatcagaatttttgccaatcataccaacctgctaaaaaagacagagaaaaatttttgattgcaatatgagatgctggatttagactaggtttagaaacaattttatgaagcagtaaacatatcctaattagcctatgttttcaggaagccgtctcaaccatttaggagttaaactttgttttggggccactaagtctcctctactcaatcccagaagaaaaggggaagtcagcgccactactcatattttcactgattataagacttttcttttccatattttaacaactgtaaaattgggatctgaaattattt

SEQ ID NO: 4991 - DNA, 1070 bp, Homo sapiens
taacaggcatacaaggttcctgctttcatggggcttacagtttggggatggtagagggaaaccaacagtaagcagctagagatatcaaggtgattccaatctctgataggtgctgttaaggaagtcatgttgataagatagtaatgtgccaagagaatatgtatgttgtttgagatggaggttcaggagcagcctctctgggtaactaacatttgaactgaaacctgaatgacaggaacaattaggcaggtgaagatctgagaggagaagatccaagcacatgcaaaggtctgagggtaatgatgacctctcatatttgccagatgttgcagccatggttaatgagttcaggttttattctaaatgcagaagagagtcattgaagagttttaatcaggagattggtttgatctgctatgtctcaccaagagcacactggctgtgtggagcatggattgtagagagcaagagtggaagcaggaggccaaactgaatgtccgtcaatatgaactggttaagtaaaatcgggtacatataatgaaagactgtgcagccacaacaaaaaatgatttgttcacttattgaaatggaaaaatatcattgacatactattgagtagtaaaaaacatgttaggatactatatgtgctatagccttatgcaaatgtgtatgaatatatttggggatgtgtattgagacgtgtctgggatttcaggtgagttttcttctgtttttacatactgtttgtatctgtgcaatgagtatatttactttttatgaaattgtaattctttatttactctcagcatctttgagataattattcaccatacacaaaaggttatatttgaaaagaattttaggtctttggcaaaaaggcactctcaaattaattttttatctatttttactgttcttctgcctgatattgctttgggtgttgggtggttatgttacattattcgtgaaattcagtataataaaaagtagataagcttatttatctattcaagaactttttttttttatttcttaaatagaatgaagagttgagtatcttatatccagct

SEQ ID NO: 4992 - DNA, 1136 bp, Homo sapiens
cgggcacggtggctgacacctgtaatcccagcactttgggagcccgaggtgggcggattgcctgagctcaggagtttgagaccagcctgggtaacacggtgaaaccctgtctctactaaaatacaaaaaattagccgggcatggcggcatgcgcctgtagtcccagcaacttggaaggctgaggcaggagaattgcttgaacccaggaggcggaggttgcagtgagctaagatcttgccactacactccagcctgggcgacagagcgagactccgtctcaaaaaaaaaaaaaattgttttgaagaagaaattaataggacctggttattgtgtagagatgtacaatttttttaaaatgagctaaagatgtctctaagatacttatcctgaggaatgccattgtcaaagttggaataggggactacattggcagtaaatgttattaaatgaggttttgcacatgttgagtttgaggcgatggtaggaaataaaatcaagttactgatatcatgtaatgatacaaaactgttgtataggcacagagactagattggacacgatggttgaagtcatagataatgaatgaattctttcaagtaaagagtgtaggaaaataaaactgcaggctgaagacttaagtcttagtaactaataatactcatcgtaaggagataggagaaattgaactattaaaggaaacaaggaacagctggaaatcaaagaagataatctgtgaactgaaaataactttccagagatgtttttcatttttctaaaaattgactggatgacgaagctttttaaaatacgttaaatttggtcatgtctgtaatactcttttttagaactggtggaaaaatataactaacatttaaatatttccttgctatttgctgtacaaagcaagaaaatcatctcaaaatttttatcaagaaggaagtctttgttgttactctgtatgctacgttaaacagctctggatctgacacgtcaatttatatatcaaaaatatcttctatttgcttctttttaatatactcccagatttgtcagagatcacagaagcacatttcctctaattcagctctaggagcaatgagtgtagtacgggtgacagcaggtcattcgtttcagga

SEQ ID NO: 4993 - DNA, 1240 bp, Homo sapiens
tagtaaacagctagtggttaataggtggtaaatgggtagtggttactggatcaggaatcacaggaaggttctgggtcaaggtcttcagttaaggtaggcagcatggaaaatttccattcaaaagagcctttgaaatgtgctccatctgttttacagaaactgttataacagtttagagaggcaattatgatttagcagattaacagggtgctggtcagatggaggccccagagaattgtttgtttacaggctgagaagtggaatatagcacgacctgattggagattcctagaacattaataatctgggatgatactggaaaatgttttgccttatttcattattttcagtagactctcatgccacctgccacacaggagacatgagcatcagactgaccagaggcggaagaagaacacttacaccataaggatatgccctaggttatcctctgaggctgggcaagggtctcctcattaggctgtttcttattaggactttggactttggattgttagaaacactcattttgctgaagatcttcctctctacattaatacaagcttagtctagcctagtgattctcaaccatgggtgatttttgcctcctcagtggatatttagcaatgatttggcatcatctagagacatttttggctttcacagcttgaggggggtgcatctagtgagtagaggccaataattctgctaagcatctttcaatgcacagaacaaaggattttctggccccagatgtcaatagcgctgatattgagagaccttggtttatttagcccatggctcttaatgtaaccctcccagtctgtcttttttgccttttccccattttgttctccaaaacttcttgaccttcagagcatttgatctataagatcattaatttaattttagtagagtttggtgaagtgatttgctgttgtgaaaagtgcagctaagtaattgccaggaaacaaaagttaatttaagttcttcttggatctttggccagagcaacaagttgtctaggcttggtctctgtggcattatttatgcctaaatgcttaagctccatgtagtcagctgcaccttttcctttctcttgtttataactgttaattttagttcaaatctgcgctccttaggcattcctgcagagtagcttctgttaagtgagttttggtttggtgattggggcctctggtcttctaccagggatctggctgggtggtgtggggaaagg

SEQ ID NO: 4994 - DNA, 1094 bp, Homo sapiens
tcataatgtgccacagacttgctttttggctcatctaaaatgtgccttcctaagggtgtgccgctttatggcattataacctaatgagtagaaaagaaggaaaatgtgctatgcaatggggtcagagaagcaagtaggcctgatataaggctttataaatttggaatttattctaaacatgatcagaaaccacattatctgatttctggtttttcaagctcaccttggctgctctgtggaatagatgcagttagttttccttgtatttttttcttaattagctatattattcttttattttcttcttaattagctgtatttctcatactcatgagggtcgtgtgcctctttattttgcagtatttcattttgatgtgccactattgcagctgattctgagtgacgtggacaatgatagcatagttagaatgcataagtgttaacacatttcctttatatctgacctgtaaagcatgtcttcttttttcagcaaggatatactaaatctagggataacctaaatcgagggatctccagggataaatgtaaggatcttttaaacaatgtagttaaaagctgaaagatgcttctactcattctaaaaacacataaaaatactgacatgtagaacatttcttcatttggataaaatcggaatatttacaaatggccctaatggatgagagtagcttggtgttctttgtcttgatagatttgctcatactgtgacttgacaaacacagcaagtgaaaattgttgatagacctcattcacaaccattttgggtgtaccaattatttctagctgttcttattatccatttttgaacccctgtaccttgtcatgggtcatgtgtacatggtgagggagaatgcatttgggtgacagtaaaggtaggcaggtacaatgaagttcagaggttatctagttgttcaagttatcctggttgttcaagagagcctctttgaatttggatcctttccttaaaagacatctttgctaaaggagactggtgggtgggaacaaaaacggcactatggtcagggtaaggactgtgacctctcccttgaacagcagcatcaaccagaactttc

SEQ ID NO: 4995 - DNA, 1068 bp, Homo sapiens
tatttggctttacttctgggttctttattctgttccagtggtctaagtgcctatttttacatcagtaccatgctgtttgggtaactatagccctgtagtataatttgaagtcctgtaatgcgatacctccagatgtgttctttttgcttagtcttgctttggctatgcgggctctttttttgttccatatgaattttaggattttttttctagttctgtgaaaaaatgatgatggtattttgatggaaattgcattgaatgtgtagattgctttgggcagtatgatcattttcacaatatcgattcttcccgtccatgagcatgggatgtgtttccatttgtttgtgtcatctgtgatttctttcagcagcgttttgtagttttccttgtagagatcttctgccttcttggttaagtatattcctaggtgttttatttttttgcggctgttgtaaaagtgattgagttgctgatttggttctcagcttggtcattgttggtgtatagtagtgctactgatttgtgtacattgatttggtaactgtagactttactgaattcacttatcagatccaggggccttttggatgcatctttaggattttttgtacgatcatatcatcagtgaacagcaacacttttacttcctcttttccaatttggatggcctttatttctttctcttgtctgattagtcttgtgaggacttccagtactatgttgaatagaagtggtaaaagttgccttgttctagttctcaggggaaatcctttcaacttttcccattcaatatgatgttggctgtgggtttgtcatatatggcttttattactttaaggtagtcccttctgtgcctgtgttttctgcttttgggatgttgtatcaaagtttgctttctgggtagtaacctaattaatatttgtaaatagactttgggcataagaaaaaactattttctgtaggggacaaaggtattttctgtatagctctatagctttgatctccatagcagcacctcgttgtattgctgtttaacgtgttatgctaatagagactgtgagtggactc

SEQ ID NO: 4996 - DNA, 1062 bp, Homo sapiens
ggcactatattcatttgggctgctttaaccaaatgccgtagactggatagcttaaacaacagaaagttattttcttatagttctggaggctgtaagttcaagattggggtgccagcatggttgggttctggtgaagcctttcttcttggcttgcagacagctgtcttcttgctgtgccctcacaaggcagagaaaaagagacagcaagctctgtgttgtctcttcttataaaggtactactcccatcacaggagccctaccctcatgacctcacgctggggattagggcttcagcatacgaatttgtgtgtgtgtttgaatatggggaggagagatacaatcagtccacagcagccacaaaaaatgcattcagaaaaggaaagggtatgaattttgcccaggatttggagtgtatgtaaattacaccatttggtaaatcagtgcgttctctctctctctctctctctgtttcttttcccctcccccctcttttcttttcaaacacatattgatcacctgttgtggactttggaacactcaggagcttcccactgaactcagaataaaacctgcctaagaggccctgtgaggagggtccctgcctcccttccttcccctctagcccttctcctcacccgcctcttgcccagtcattgtgcctccccacatttggctcccttgagtcactcagaggttccctgagttccctgcctttcccagtgtggtgttccctccctatgttctcctggattccgtcccctctcatacctcagagaggctgtccatgaaccccaatctaattagtcccctctcatagcacccaggaactggacagcgtcttccgttatgacttatcttaatttgtgactgccttctggaatctgtgtttatggttgtcatatgtttcctcctgatggagtggggaggggcagggaaggggcctctgcagcgtgtcactcacctcctcaactcccagaatgtttggggagggtttgatcttaaatacaagagattataacagtgaaaaatgtgttaatgtaactggcatgtctgttaacaaat

SEQ ID NO: 4997 - DNA, 1045 bp, Homo sapiens
cccccttatgactaaagtaataaatatcaatcatagaacttttataaaatacaactatgcaaaaaaaaatatattatctcttactccactgcctgaaggtaagtgttctaaacatgttgatctttctttgcctggacttctgtgtacaaatgtgtgtgtgaattatcattttttaaaaatttacatgatcaatatgtgtgctcctgcatttcacttctgagaaggtaagaacagaaaacacaaacacgtgtaactcatttctttttaatatctgcaggtaacattcataacaactttgaatctttccctataccagagagagtggcccacttggcagggaggccctcgcatttgtgatggacggatgctggcagatgtctagtgagtttagcacttagctctagcttctgttcaactccacagtgcccaggagataagacaaaattggtagaatgtaaaatccttgacagcctctgggttttaggacttagcatgtctttatcatcaagtctgtttacaaagaaaagtcttctgaaggttttccccatggaatagagttatttcaaaacggcatgtggtgaaaagttacatgagcttccagcagccttgtccgctcctgacaggttacagggagaaattgttcttggcagcccaggttagccccttgaagtaagcctgttaggtccctggctctgtcgcagtgttagctgtgtctgccactgatggcagagacagcaggagcgagacactgaagcagagtgcaagtccttggatgatgagagcggcaaggctcagcacccgcctttcctcggacgtgaaggggtctgtgtccttcccttaacatggagccaaatgtctagtgttggcctgaaggagctcaaactagtgcaataaaggggtatagagtctccaactgtgaacctgaaaatctagacaggtcttagttaatttagcaagtttattttgccaaagttaaggacatacacgcctgtgacacagcctcaggaggttctgatgacatgtgcccaaggtggtcggggcacag

SEQ ID NO: 4998 - DNA, 1025 bp, Homo sapiens
agcactcttagtaggaagtaagaggtgcaccccctgggctggatagtgggtggatcaagagccttttctcaggtccatctgctgggtgttgaagaagggattttctcccctcagttcacgttcctcttgctgctaatacagagcagttggttgacaattaaaacggatcgaggctgggtggggtggctcacacctgtaatcccagcactttgggaggctgaggcaggaggatcacttgaggtcaggagtgtgaaatcagcctgggcaacataaggagaccttggttttactaaaaaaaaaaaaagaaaagaaaaaaaattagccatgtgtggtggtgcacagctgtagtcctagctacttgggaggctgaggtgggagggtcacttgagcctgggagatagaggcgtcagtgagccatgattgtaccactgcactccagcctgggcaaccaagtgataccgtttccaaaaaaacaaaataaaataaactggattgagatagaagctgctgccttccaatggcattttagccaataatcagcctgaagagtttttgtataatagagataataatatcatatagggtgattgcacaaagtaaaggacataacatatgtgaggtgtttagaatgggacctccgtaagtgctgctggtttttattgtctttacttagagtgatggcttctttgatgtgtcaattcggctaggctacagttctcatttattcaatcaaacagtaatctaggtcttactctgaaggtattttgcagatgtaactagtgctcttaaccaggtgattttaagtaggggagattactcaggataacctgggtgggcctgactgaattgcgtggaaggtcttaaaaacagggctgagtcttccccaagtaaaagaaggaattctgcttatggaggacaactttggcctgtgcacatgaccttgacctgagatcttccttcctgactacctgccctgggaatatcagacttgcttagccggcctccacaactatgtaagcaatttc

SEQ ID NO: 4999 - DNA, 1104 bp, Homo sapiens
cagtcctttgtgtgttgtaagacttatgaacagcaggtggaacttctaatgagcatgaggcacctctgtgagagctacatggtctccaccttgctgctctctacatggctagaatgaatagataatgtttgaccgtttctaacctatgatttgtttattctaatccttcacatcctaagattttctacagagaactttcttactgttatgaacgtaactttggctgatttacaagctaacattgagaaggaagctatacgaatgtgcttttggagaaggctcatttaatatgtgactgtatataatatgcctgtcaccatcactagggtgtaggaggaagagtagaaaacaagctaaagtctatgctttaattatggtggattagaaacatctttatatataggaagaaatatgtttcgttgggcacagctgagaatatacttatgccatattggtaatacaaataaattttgtatataggaacaaatgtatttcattgggcacagctgagaatatgcttaggacatattgataatacaaataaatctattttcataatcattagtgtgctaaacttaaagcagaatttttaaaatgtagaaatatacttgaaaaatgtgatgagtattaaaactttttattttgcttaactttttaggttgtagatatttccggtatattttaaagcaagatcaccaaatcttagggaagaaaattaagcggatgaagagatctgtgaaaaaatacagtattgtaaatccaagactctgatactgaattttagttatttcacagttgtagctacacagtaagtagcttggtagatagttattgaatgtatttatgtagtgtattaagaagcttatattactacaaaaaacttatttttatatatttttatatttttgtattatttatagctagagaaacaatattactgcctttgctctttgtaactatgtctgttttcttttttgtaatgttaaatgttacatttgttaaggaataattcttcaaatgacaaactaattacagaatatagctctacagcagttattgtttgcaaatactttgcctcttgctattgtgtaataaactgtaact

SEQ ID NO: 5000 - DNA, 1035 bp, Homo sapiens
ggatatggagatggaagagaacaaaaaaggatttgctttcctgctgttgccaatcatgtgttatgccttggccatattgagaatttagcttggaagcatcttccttgtcatctttctgtagactctagttaagtctaaattctgataatatagatttgtttccatcattgaccctctcttttgacatttttcttttccagaaaccaccttgcgtgggttcaagaagagtggaactccaggaaaaactggtggccaggctttcatttcagctacttttgggcaaaaagtgattggaaggaagatacagctttggcctgtgagaaagcttttgtggctggtttactgttaggaaaaggtacagtttttattttcgttttatctagacacagctttggctgattttgaaattatgaagtatggccttcatttagagcttacctaacatggtacctaaaaatattaggtgcttaagacataactgctcaatggaagagtgaatcctgagttgggactatgtgcttagattagaagcagtgatttcatattgattgtgaacggttttcatctcctgacttgagtgttgttagggggccattaagatacatgatacagagttttcacaataattgaccatttggccttgttttatagaaagtttactgagattttcaagtgtcaaaatattctttattgacctcactgttctttaatagcttcatattatactaatatttacttacctgtttctgtaagcgtgaaacatttcctccacttaagagaaagaatacctcctactagcatatgaaaaaaattctcttcaaagaaaagggatattgattttttcttcaaagaaaagaaatattttgggtggtaaaattcttacctgctttctgccactgaaattattaaaaggtggccagtaccgaaatgaaactaccacagagtatgtccagaaatgaagaaaataaatcttacagtgaccactagtaagcagtccattgctagggagcttaaggtgtcctgaagagattctcc

SEQ ID NO: 5001 - DNA, 1027 bp, Homo sapiens
ccatcctcactggtctccttgttcttacttgaatgggccaggcatattcctgactgattgcctttgccttaaccagttcttggaaagctctttcttcagctatcactgcagctaccctccttcaaggccccttttcattgaggcctactttgactatttaaaattgcaattgccttactccaactgcaacctgcactttctgaatggcactcctgatctccttgtcctgctgcattcttttcctctaacagttgacaatttaattatatttcttggttattgtttgtctctctacatagaatgtaaatttcacagggcagggttaaaacagtgcctggcatatactgctaaatttcttcagtaaaagacagtttacccacaaataacttgacatgagtgtctcataggttttactaacacagtcaccattgcatcaattagttatcttctagagcaaaaaaaataaaaaagagaagctgaaaaaaaagtttaaccattcattgaaaatttaatttatggacttaagttacatactcctgtaaaacattgaacatgttacagcctcttgttgtccagattttgttttgtaaaatgaaggaattggatcagtggtttttgagcacttctttggctctctttggatcacctagggctttcattcaaagtataaattcctttactccacccctgtctattgagtcagagtatcttttatttgtatttttttattttttgagatggagtctcactcactttgtcacccaggctggagtgcagtggcacgatcttggctcgctgcaagctccgcctcccgccacgacgcctggctaattttttgtatttttagtagagacggggtttcaccgtgttagccaggatggtctcactctcctgacctcgtgatccacccgcctcggcctcccaaaatcctgggattacaggtgtgagccaccgcgcctggcccagaatacctatttttaactggtgtcccatgtaattactgtgtacactggtggtgagaatagct

SEQ ID NO: 5002 - DNA, 1051 bp, Homo sapiens
tggacaatccagcactctctaaggatggctccagcccctcgaggggagtcagcaccctctgaatagcattttcaggcctctcccaggaagctggggcttggagtgggagtgtccccccaggagagtggcagaggcaggatgattcagggtcagcccaaaccttacagatattccccgaggtggccaacgcaaccatgagcaagagccgaggccttagccaacaagacaatggagggcagctcatatgaagggcaaagcaaaggccaaagtgagagaagtaagcgctgtgacatggagaccagctcaggataggatagatggctcaggaaccaggctgttaaggagagaatactcagcatttctgagaacacggcagttcgaggacccgtgctggtctgggcccgctcccccagcccctgatgggggcctgtgtgctctgcaaagagctgtgccctgtgatggggggtctgtgacctgggagggaatacactcaatctcacatgggttgtggaagcctgtgctccccccacagccagggaagatcatgagctgctttgtgagtgtgagacattacagatacaacagccaattgactcaaacaaaactattgcaggaaagaaaaggctttctgaattatggagtgctgtgggctgagttgtggacccccaaaatttatatgttgaagtcctacccctagtgcctcagaatgttcctttatttggagatagggtctgatagagtttagttatttgtccccccaaatctcatgttgaaatgtagtccccagtgtggaaggtggggcctggtgggaggtgagtggctcgtggaggaggatttctcatgattggttcagccccatcctcatggtgcagtcctcatgacggtgagtgagttctcgtgagatcgggtgggttgaaagtgtgtggcccctccttctccttctcttgcacctgctttggccatgagatctgcctgctccacttgccttccgccctgagtaaaagctccctgaggcctccccagaagctgagtagatgccatagccatgctt

SEQ ID NO: 5003 - DNA, 1042 bp, Homo sapiens
atggaaaaaaatgtaccctgctaacagtaatgaaaagaaaggaagagtaacaactgtgtatttattccagacagaacagactttatagcaaggaaagttatcaatgataaagaagagcattacatagaaacaaaggggtcaattccccaagaatacctaacagtccttaatgtgtatgcatttaacagaacatcaaactacatgaggcaaaacctgatagaactgcagggagaaatagataaatccactattatagatagagattaacacacctttattggaaatggacatatccagcaggcagaaaatcagtgaggacataactgatttcaacaccatcaatcatcaaacaataattgacatacatagactacttcatttaacaacagcagaaaacacattcttctaagtccatatggaacactcaccaaaatagtccactccacattctgagcataaaacacaccttaacaaatttaaaagaatggaaataatacagtgtctgcttgtagatcacagtataattaaacagaaatcaacaccagaaagataataggaaaatctcaaaatgcagacaatgtacttctaaataacatgagtcaaagaagaaatctctggaaaaattttaaaaatatttttaactaaatgaaatgaaaacacaacttgtcaacatttgtggggtgcagtgaaagcagtgcctagatgaaaatttctagcattgagtgcatctgttagaaaagaagaaagatctaaaatcaataatctaacttttcaccttaggaaactagtaaaagaagagcaaattagatacaaagtaagcagaagaaaagaaataagaattagagcaggaatcaatgaagttgaaaataggaactcaatagagacaatcaacaaagtcaaaagctgattatttgaaaagattaataaaatcaataaacctctaaccaggctaactaagcaaaaagagaaagaacataaattgctaatatcagaaatgaaagagtggacatcactacagatcccatggacattaggaggataa

SEQ ID NO: 5004 - DNA, 1073 bp, Homo sapiens
caaaaatttcacaagacttattttaatgacaatgtagcttgaaagcgatgaagaatgtctctagaagagaatgaaggattgaagaattcaccattagaggacatttagcgtgatgaaataaagcatctacgtcagcaggccatactgtgttggggcaaaggtgtcccgtgtagcactcagataagtatacagcgacaatcctgttttctacaagaatcctgtctagtaaataggatcatttattgggcagttgggaaatcagctctctgtcctgttgagtgttttcagcagctgctcctaaaccagtcctcctgccagaaaggaccagtgccgtcacatcgctgtctctgattgtccccggcaccagcaggcccttggggggctcacctgaaggctcgaaggcactgcacacttgtatattgtcagtgaagaactgttagttggttgtcagtgaacaataactttattatatgagtttttgtagcatcttaagaattatacatatgtttgaaatattgaaactaagctacggtaccagtaattagatgtagaatcttgtttgtaggctgaattttaatctgtatttattgtcttttgtatctcagaaattagaaacttgctacagacttacccgtaatatttgtcaagatcatagctgactttaaaaacagttgtaataaactttttgatgctagctgtttactggtttttgtttttgatgtcataaatagaccttgtttaatagtcacaagccgttgggatatcatacccagctgaaaaagaacaaactgcttaacataagtatatgtatcgtaataagagttttttaccagctaagtgattcaatgtaagtggtttttaaaataaaatactgtagagatcatggtgatagaagcctactttacattttacctagagcctctaatagactgttttagtgtcctcattgatttatggggtgaaaacttatataggcaaaatctccacatcattttattaatatgttaataggtttgtgaattgtttccaaacccatttgcttagtggaactactttagtagaagatacaaatg

SEQ ID NO: 5005 - DNA, 1042 bp, Homo sapiens
ttgagattttagtatatacatcttacctatttattaaatttatccctaagtatttcatatttttgatactataaatggtatttaaatttaaaaattttaaatttctaattgtttctaatatattgaaatgcacttgacttttgcatattgatttttttttttttaatcctgcagtcttgctatgtaacctatttatctggtagcttttttgtagattccatagcattttcttcatagatgattatattgtctgtgaaggcagttgaacttcttttttaccaatctggatgctgtttatttctctttcttgttttattgcattggctagaacctctaggacaatgttgaatagatgttgtgagagtggatgtccttgctttgtttctgatgactcaatgtgtcttgaattttttagtgctaaagtatttttaaatgatattccaatgactaaattctaggtttgctgccagtgcctcaataccatgtttaatatgatcaaacacttctgttgtaatataaattacagaacaaggtaattctgaattgttccatttatgtccctgactgttgaaactatttaattttaaacttgcaacttaaaataaaagattattgtatattagtgtgttttacattacatcttaaaaagtcaatgtggtgagtattaatataagaattaatggtctgcttgatattatgaaagaaaaatcgctaaataattttgtcatagttggttcatatgaagcttttacatagacctttgagggcggaatctctgtggtagttttatagtaagctgggattgtgtttatttgtgtttttacttgtaggttaatagtcctaggatggatctgactcttgctgaacttcaggaaatggcatctcgccagcagcaacagattgaagcccagcaacaattgctggcaactaaggtagtatcgtcctttttttttggagatgaatgctcactctgtcgcctaggctggagtgcagtggcacgatcttggctcactgcaacctccgcctcctgagttcaagtgat

SEQ ID NO: 5006 - DNA, 1896 bp, Homo sapiens
ataagtatttggcaaacaacatgaataaaactggcaaaaacagatttaatttgaactgatgtgactgtattctagggtcaccaagggttctagagctactgccccatggtaggggctgggctccaggtctccctcaacccccagtccacacctcacctttggccgggtgacagccagactgttctgttgtacgtttgcacttccaactgagattttgtttggagaaaggaatttaaggtgaataccacattaggcagacagtaccagtaaccatgtgtttctctcttaatttttagatgtttcttaccgtgtatctcagtaacaatgagcagcacttcacagaagttccagttactccagaaacaatatgcagagacgtggtggatctgtgcaaagaacccggcgagagtgattgccatttggctgaagtgtggtgtggctctggtgagagacgctgacagcctcgtgctttagttcttctgtcttctattaatgttggtttgtagacgtggcactgtgtgaatgctcatgtttctccggggagaaactggagaatagcacgtccggcagaaatagtgttcctgatccagctttggtatgatacatgaagtctttttcggttttctttttctccaataaaatggagacaccacaatataaaatacaaaaggtcatctgggctgttgtggtccagtggatggtgctcaacagtgtctttgtatgtgtaagctttacttaattagaaatttgaggcatcctaactggtttgccttctctcaatttctgtaggtttttagaggaagctactcagtgtcgaggaactgtagtggcagacagcagtggtgaactcgtgggcattattgtaagccttgaaatcaatccttctgtatggttctttggagctctaaaatgggatagcctggtttctttttggctccataggaggtggtagatgtgggagtaatttttcatcatttctgccttgttcctacacaggctggatgaactcctgctggtttcctttttcacctctggggatgccagatatccccagagcaagtcacacactgtgttaattgagttcatgccattcatgatagctaacttcagctgagcccccacttcttttcaggcaagtccttttattcatctttggttaacttttctacagttggatgttctagaaggtcttctgcagtctccgaattactttcttttctgtttacataggaaccagattagaacaatcacatgaagaagcccaagggatcttttgaaaatgaaaattagataatttcactttcctgcttaaaactagcgacttctcctccacttagaataaaatccaaacttttaatattaggttgtgaagttctgtagattctttgtctttgctcttatctggtaccattttcttctctgcttcttcctgcagcttttaaaatatttctcgaatatgctaagctcattcccaccttagagtcattggtgatagccattcccactgtttgtattgctctgtctccagatactgtcattgctggttccttctggattgcagctaaaatgttaatctccttctggagaggcttttcctgagcaccctgccaaaagtagccatgaagttagttctcagttacatcatcctgatgtaatcctctgcagaaggcccgtcactctttgtgtgtgtttattagtttattgctccttttatcctgatagccccaaacatatgcactagaatgtaaactatttaagggtagagaccttgtttatcttgttcactgctgtatccccagctcaaggggagtgccttgtacctagtagatgctgtagaaatatttgcagaatgaggaaatgaacttctagctgctcctggtaacctccttgcattta

SEQ ID NO: 5007 - DNA, 1051 bp, Homo sapiens
gaagcgtgaaccctgttgtgaactgtgcacttgagggacctaggttgtaccctccttatgagaatctgatgcctgatgatctgaggtggaacagtttcttcctgaaaccacctcccctgaccctgtctgtggaaaaattatcttccacgaaaccagtgcctgagcctaaaaggttggggaccactgctttaaaaggaggccactgcagttagttgctacattctttaatctcttttaagcgtggaacatttcttcaggtttgacttttgacacttgtgaaggtttcaggccagttactttgtaaaattccttgagtgtggatgtgtctgatgttttccttgtgattagactcaagttatgcatctttggcagattacaaagtgacactgtgcgcttgtcatgtggcatgcgatttcagtttgtcctgttactcatgatgttcactgtgatcacttgaggtagttcttccaggtttctcacactacaaagttactctttactctttttttttcactttgtaatgtatgtgtattttatgggaagttactttgaaactctataaagtccattcctcatcaaagtcaagtattactatttttaatatattatccattattatcattatgatattcaaactgtcccagatttgactctcctttggcctctatatgtttgatgagtccctaggcaatactttgtgaagggcttgatttttgttgtgttcaactcataatttacagtgttgctcacaatatatccggaagttatatatagatgggtcgggttacctacttttctttcttcttaaatttttacttcacctcattctacaaaaatttttaggctacttttaagaatgtggaccagtcacagtggcacatgcctgtaatcctagcatgtttgggaggcctaagtgggaggatcacttgagttcaggagttcgagagcagcctgggcaacatagtgagaccccccacatctctacaaaaagaaaaaaaaatgttacaaggccaggcgtggtggcttatgcctgtaatcccagcactaggcc

SEQ ID NO: 5008 - DNA, 1045 bp, Homo sapiens
cttgaacctagaaggcagaggttgcagtgagccgagattgtgccactacactccagcttgggcaacagagtgagaccctatctcaaaaaaaaaaaaatgttcatcacccttaaaaaatctcatgcctgttagcattcagttttccttttctcatctccagccttaggcaaccactaatctactttccttttttttttttttttttttttttaatgtagagacagggtctcatgttaaccaggttggtctcgcactcctggcctgcagcatgccccctgccttggcctctcaaagtactgaggttttaggcatgtgtcgctactggccatcatctactttctgtctatataaatttgtctattctggatattttatgtaaatagcattatacaatatgagggctcttaaatctggcttctttagcataatgttttcaagatttattcatattatagaatgtatcaatactccattcctttttattatgaaataatatcccgttgtatggatataccacattttgtgtattcaccagttggacatctgggctgtttctgttttttggctattatgaataatgctgctatgaacattcatgtatgcatttttgtatggacatatgttttaatttctcctgggtctatacctaggagtggaattgctggatcatatggtaactccctgtttaacattttgagaaactgctaaactcttttccaaagtggctgcatcatttttatattcccactagtaattttgacattaaaatatatgacagttctgatttattcacattcttactaatacctgttattgtctttttttattatagttattctagtggatgtgaggtggtatttcattctgatttgatttgcatttccctgataactgatagtgttgagcatcttttattgtgcttgttggtcatttgtatgtcttctttggagatatgtctggtcatttttcaattaggttatttgccttgtcattgagtagtaagagttctttgttctagatacaaatctaaaatcagatatgtgat

SEQ ID NO: 5009 - DNA, 1028 bp, Homo sapiens
ttgttatctcctttgcatggggaaatgtattatttttatgtggaagaaaatgggtatttttcctttgtattgagagctgatggaaccagatttatgtctttttagacaggggcaagtgtccgagtggtgaatcagctacttacagagatggatggtctggaagcacgccagcaggtttttattatggcagccactaacaggccaggtaagaaataaaaatattgtaacacagatgaatctaaaaacttacagcatttccgtagaagagattcagataattaaaaataaaagtaaaaactagtagcatttataaacaatataattcacatgcatcctaggaaaggaagattaaatttgggcaatccatttttggttctgtgaaaggaaacttcatagttgaaataaaggcttagaaagcttttgcataagctatagtaaaaagtatagtattactgcttggatcccatgagattgcttttctgtgtcggtgcttagaaagctctttttggctgagaacagttgcagcatacacttttttttttttttttttttgagacagaatctcgctctgtcacccaggctggcatgcagtggcatgaccttggctcactgcaacctctgcctcctgagttcaagtgattctcctgcctcagcctcctgagtagctgggattacaggtgctgccaccatgcccggctattttttgtatttttagtagagatggggtttcgccatgttggccaggctggtcttgaactcctgacctcaggtgatctgcccacctcggcctcccaaagtgctaggattacagacgtgagccactgcacccgaccagcatacacttttgaccacaaaagtattttcagaatttgtgttttgtggtttctctctagcttataggaaacaaaaacgagactcttcactctagtagaagttaaagatagatttttaggattttatgctggagccatgcccctatatctgccctgaataattactgaaaattgttttcaaggttaagcattctt

SEQ ID NO: 5010 - DNA, 1072 bp, Homo sapiens
gcataggtgatatgaaatagttggcactgtaggccgggggcagtggctcatgcctgtaatcccagtattttgggaggctgagtcaggtggatatttgagttcaggagttcgagaccagcctggccaacatggtgaaaccccatctctactaaaaatacaaaaattagccaggtggtagtggtggtatgcctgcaatcctagctactcaggaggctgaggcaggagaatcacttgagcctgggggcgtggaggttgcagtgagccgagatggctccactgcactcctgtctggttgacagagagaccctgtcttaaaacaaaaataataataataattggcactgtaaagatgtttttggattccatcttatttggcagtttcattaagaaaaaaactgctctttcttaatcatctggtttgacattttacaagaaaaatttcttatgcctaagctaaaagtgaaataatccttacatgtagcttttcatattacttagtcctaatgttatagttgcttgtgaattgctatatttcttgacttatcttaatgttttatattttgatttagatttcaacatagagtaagccattatgaaacctgttaagtgcctagttggctcactttgcctcctctgatgctgtatgacaaaatagttattcctttatttagtaagacgacttgtgtaaaaataacaataaaacagtaatttgacttgtgtgtatgtaaaatactgttgaattaatgaaaattactgctggatattttatatgcacgaggcttacaagattagttctaaagtgcaattgaattttggtgattttttttgagctagagaagaacttacgtttcacttaagtcttcattttataaataaggaaatttatagtaggcttaaatagtagctaattttattaagttgaactatatgcagttggctattacaggtcaaaaatggttaaatatcagcaattgtatatggttcattctgatactttctggactttgacacataaaactagtttatgtcacataaaactgtttagtatcatttgacccaaaccacaaagttg

SEQ ID NO: 5011 - DNA, 1032 bp, Homo sapiens
taagggcctctgacagaaccctgaaagattcgaacaattaagggataaagaagcaagatctggtaaaggagaccgaaagtgcttggtcataagatggagaacaccccggaccttctaagcctgaaaaccaagggaagatgagtttttcaaccttgtcagtgtgactaaacagtataaaagatagtgagagtgggacttgggatttggtaattagaaggtcattggtggctttagggaaaatatgtttaataatgatgtttgcaaaagccagaataaaatggttgaaaatttgatggccaataaagattttgagataataaatgtaggatctttacttgaaatgttgcatatgtttcaaataaaggataagatgggcttttcatttatttacttatttttaatcactgttgccttgttaagattaagtaggttttaatatgtcctcgttgaaactttaggtttacctttccctaaattaaatttccttttacctagctaccttggtttaccatttccaaagtcactttgccaacggtattgattgttctcttctattcctatctgaaactttatgtctcccagccccctgatatgccttcttttacaatagtactgaatattttgcttcagcattgcaagtatagtttttgctgaattcgattttccaggaaagtctactatatttgtacactgtttattatatttgcacactgtgtgctatatttgtacactgtgcaggatgttatgacagaaaaatctgaataggactcctgctttccaaggactttgtaatataatatagtgagggtagaagagctcaaatgttacaataatgataaaatctgaatatctgaataggacccctgctttccaagggctttgtaatataatatagtgaaggtagaagagctcaaatattataataatacaaagtactttaagagcaaagaaatactttgggtttggtttcggtcaaatgatagtaaaacagttttatgtgtcataaaactagttttatgtgtcataaaacta

SEQ ID NO: 5012 - DNA, 1118 bp, Homo sapiens
tgaggccaggcatttaagacagaccagcataccaagaccctgtctctaccaaaaaaatttttaatgtaatttttttcaagtatgaggtttatgagataattggaaatgttagtgcttactgaatattttatattaaggaaatactaatttttaagtgtgatatgacattttaaaatcatattttagagatactgaaatatttataaataaaataggacatctaggattttcttcaataaaacaaggaaagtggccaggagtatagatgaagcaagactggtcattaatcgagttgataataattgaaggtcagtgatgggtacatttgaagtttataactgttatatctctttagttataagtttggaactctccttataaactctccatggtataaagcaaaacaaacaaaaaacccctttaaatagtgtgtattattttgcaacttggtttggttgagttttttggtttttgttttgttttgttttttgagagagagacagggtctctggaagtagaggttttgctgtattgtccaggctggtctcaaactcctggcctcaggtgatcctcctatctcagcctcccaaaatgctaggattacatgcgtgagtgactacacctattcttggttgttatttttgttcaatatttatttataatacttatctctgttgatgtatttttagtttattaactttttgtgtggcatttcattgaatgaatgtaaccatactttaaaaatcagttttttttctgatgaatttttaggttgaatattatatatgtatatctttgcatatatttgtgagatttttttccccttagggtatatacccagaaggagaattgctgaatcttagagtatgtgcactttcaaaaatattaggtattggctgggcacagtggctcacacctataatcccagcactttgagaggtcaaggcaggaggattgcttgaggccagtttgagaccagcatgggcaacatagtgagaccctgtctctacaaaaaaaccccataaaattagccagatgcacacctgtagtcccatctccttgggaggctgaggtgggaggatcacgtgagcctgagaggtcgaggctgcagtgagcta

SEQ ID NO: 5013 - DNA, 1027 bp, Homo sapiens
aggccatgatttcaagaccagcttgggcaacatggtaaaaccctgtctctactaaagtaaattacaaaaattagccagatgtagtggtgcatgcctgtaatcccagctactcgggaggctgaggcacaagaatcacttgacccaaagaggcagaggctgcagtaagccaagatcacaccactgcatgccagcttaggcaacagagtaagactctgtctcaaaaaaaaaaactagttttttttatttaagtatgtttattggctatatttctttgtgaattgtctattcatatcctttcctatttttctaatggcatacatgtgattttctttcttatttatatcacttcatatattaagatttgttatttataaatgttgattagtttatcttgactgtaaccatgtttgacaccttgagcttttttggtttgatttttatgtgggcaaatttctgtctttttgtgcttttttccccattggaattatgcttattagaactgtcttccctatgtgtaaagtatgttatccatcatttttagtgtctgtataatattacatccataactaacccttatcaacttttaaaaatattttgaattgtaagaaattgaaataataacatttttaataagtacaacagcaaccaaattatagctcctcagtaaatatcaaatatccatagtgctgtgtgtaaaacttacttttatttatactactaattttccttgcttaatgctttcagtactcttaaaaggcattgctttcagagagctgggtatggaggtagaagagaacaacacagtcattgatctacaattttttcacaatagttttggaaaaatatagccagaaagaaggttctgcatgctggtgtgtgaattctccaggtcaatgcacttccctttcatgtgtgtcctatagtgtttattatttaattagttacatctgcctttgagtagtcctgttcacagcagagaggaggtagcttggataacttgaaaagcatatatagtactaaaacatca

SEQ ID NO: 5014 - DNA, 1025 bp, Homo sapiens
cgtatcttcaggcctcacagtcatgttgaaaataagcctgagaagctgggcgcagtggctcatgcctgtaatcccagcactttgggaggctgaggcaggtggatcacctgaggtcaggagttcaagaccagcctggccaacatggtgaaaccccgactctactaaaaatacaaaaattagccagacgtggtggcatgtgcctgtagtcccagctactcacgaggctaaggtgggaggattgcttgaacccaggaggcagaagttgcagtgagccaagatagcaccactgcactctagctgggtgacagagggagactcaaaaaaaaaaaaaaaccataaaatatgtatctggaaataatttgaacctgcagtataaaatggacatgtaatggatcgccgtttgtatcattatttccaggcaccagtacgcaacccagaccagttcaaagctcttggattggtgactccagctggggtcctccttgctggtcctcctggctgtgggaagactctgctggcgaaggtatcatataagttcaattgcatgtaatttatttcttagtatcagataggataatatgaacttaactttaaatattacagtgaggtaagtcttatgcataatttttatcagaagtttattttagcaaaactgacaactttcttcattaaagtttcctacttttttaaattacaaaggcacatgattgaaaaatgtttatatcaaccataatcctatcaattttaacatgcaattattatattttctgtgtattacattttagctttttagtgagtattattccatagttttagtttttacttgacttagtttcctgctttggtattgttattatttataacttaagtattttcctctatatttcttgtaattattttctaaaattgttttttcataatagaaaataaaaataagcaaaaaggaaaagcattgtgtgtaattctctcactgccacctactactattatttcatttcattgtcaatccttcagatatttttcta

SEQ ID NO: 5015 - DNA, 1073 bp, Homo sapiens
tctgttttattggcatttaatctatagaatacttatcatttatacccacgatgtttatcatttcaaaaatatgagttgttttatgtttagtttattttaataaattcattttacaataatgattatgaaattctggaatggggttggcagactgtggcctacccacccaccacgtgtttttgtaaattaaagttatattggaacacagccatgttcatttgtatacatgttgtctgtttctgctttcgttcttcatggcagaattcacacaggagtctgcagcagagaccgtggcccacaaagcctacggtgtttacagtctaaacctttacagaaaaaggttgtcaacccctatttcagcattggcatttaattatatctcctggttaacttttggttaggtagattacagtggtctgttgacacaactatatccatgtcggtagctgcaaacagctctggaggacagtcatgtgaataataggggacagttatcagtccaagatcggtattaaattttttagttttatgagtcatgaaaattcaatatatatatcatttcatatagcattttatagcttgcacagatggcttctgtatgttatataatttgatccctgtaaccttatataaatgtcattttccccattttataatcaaaggcactaagcttaagtggttgtgatttcctcaagcccatacagcctctactttatagagcaggggcttcaatccagatcttttgttctcagataatttgtttttttcttagacatttgaaactgcaattaattctgtaaaaaataacaaactcattccttttataatattgcatataaattaatattttataaattgaattaattggttacctgttttttagacttatcctttcatcttctccacaaagcaagaaatctgccttttaagtttaagatttgatagtaataggaaaattgccttccctctacttagttgataaaccatcaaggaaccatattaatgaattatactacctccagcataagtgttttaatttcatcaggattcaactgtttcttgaatatttataa

SEQ ID NO: 5016 - DNA, 1050 bp, Homo sapiens
acaagactgaaactctgtctcaaaacaaaaacaaaaacaaactctaactgaaagaatctggaaaagaagcggcattcaaatgttaagatttcttttttctttttttttttttccccatatgggatgcttcacaaatttccatgtcatccttgcacaggggccatgctaatctttgtatcattccaattttagtatatgtgctgccaaggccagcaccaaatgttaagatttaaactgagctttaagggaatgaggagaaggactttcacaatagacagcatctttgagcaaagagattgggaatagttaacagaggtgaaagtgctagggcaggaatgaattttctttacaatgcccctctttaaaaagtaaaacaattattggcatagaattttaagcatggcatatttaaatttattttctttccaggattcaaaagattcttctcttttggagagtgatatgaaacggaaaggcaagctaaagaataaaggaagcaaaaggaagaaagaagatcttcaggaagtagatggagaaattgaagctgtcctgcaaaagaaaggtaaggtgtgagtcttgttggtggcagtggtcatgtttgcagtgagagaagcatcattctgtcccaagctattttgcttgagggaccttctatgtgcagaaatgtttaccaggaaatatttctatatttaatggacctttgtttacttaaagactattcattataattatgagttactactgaatcattaatcttttcatctcctcatttttgtttaccagctaaagccagggggttagaattccagatctccaacgtgaagtttgaagatgtgggaggcaatgatatgacattaaaagttagtgcaaattctgaattttacctcaaatggatatattactaatcagttatgaggaaaaagcctacctctttgtttctaatatgatctgggtgtagaaaaggaaactgggaaggttgagaagggcaaacctgacctgtaccctttagggcattgcaggagaaaagatgcatactattttgaacttttc

SEQ ID NO: 5017 - DNA, 1050 bp, Homo sapiens
cctctgggtttgtgttggcagtggcagccctgccttcttttgagcctcctgaagggtcgttcttcccttttcttgaaggataacttgtgttcacaactggatggttttattggccctgtcctatagaatcctggaagtccaacagccttccttaattttgtccccatctcggtcccttcagtccaagctggcagtgtttctgttgctttaaccccatgtctattcctggcttctgctaagatggctgactggatccataagtcatatgctggtaatcgctttagcaaattgttgtccccccacacccttgatgttctctttagattatgctttttcattttttacaatatggataaactgagaattttccaatcttcaggttctagtttcctttttgttgaacaattccttctttatgtctctctatactgtaaaattttactataagcagcaaggagaaatcaggccacacttcaacactttgcttggaaatgtgagtgaaatatctagattcatcacttacaagttctacttttaaaacagtaaaacacaagtcctctgccacttcgtaacatggactgcctttcttccaatttccaatatcctgcttctcatttctgtctgagacctcaccagaagcatctttaacattcatatttctaatagcattctctctctgtgtgtatataactatagaaccttcctgtacagctcttctcttgtctttctgagctcttaccagaattgccttccgtgtctttttttttttggagatggagtctcactctgtcacccaggctggagtgcagtggcgcaatctcagctcactgcaacctctgcctccctggttcaagcgattctcctgcctcagcctcccgaggggctgggactacgggtgcacgccaccatgcctggctaattttttgtattttagtagcgacagggtttcactgtgttgcccaggctggtcttgaactcctgagctcaggcaatctgcccgcctcattctcccaacatgctaggattataggcatgagccaccacgccctg

SEQ ID NO: 5018 - DNA, 1414 bp, Homo sapiens
agtaaaagtgaggcacattttacaagaacataactcctattaaaacggagtaacaactatgcaaaggtttctatagcagctaggtgagtttgttttccgggtctgtcttaactggcagcttcctgtacatactggtacttatttgctgtaaacgtctgtttcatacatttgccatgcagtgactgtgctcgaaaggtgaaatcaatggtaaagaagcctaggattttatggtatgagaaactgatcgcaggattttctgatccatagctattaattgaaaacttctgatagtgctgtaggctctatagtaggcttaagagtgagtcttatactatgaagccagccacaagatactaacaaatgtataaattgaaaagtaccaatactttttgcacatagatcaaaatagagtggagaatttgggctccaaaaatcaggttagtaggctcatttccatgtgcttaaaaatgtttttgttgttatgcattgattaagggctagagcaaatataaaattaaatgtctttttcctccaaataattggttattaatggtaaaatgttggacttggggattactgagattagtatgtgggtagtaaagaattggagtgggagttagtggggagggatgacaaagcttcagctttggtttttgtatttttttagtcttcataacagctacatttctgttgctcttattggccagataaatgtgttatattaaaccaggtaagtattttaaacagagaacattttatttgcatatatccctacaaattggcccattttattgggtggggggataaaaaagggattccctaactttaaataatcagaatatcctgcaattgaaaggagaaaaaaatccaattttgtcagtattttcttagtctgaaaaaaacagcagtagtaatctggtgaatgttattattaggagtgttctgcctctacagtggcatattccatgacattaatagaaaacccttctttcccacccctccccatcttgacattttcttttttaggatgttggttcctgcaaacaagaactgaccctatcacctctgcctcacagtgggtaaatatatcatacatctcttgaaagggaaaatatccatgtcagtttctttcacagtagaagaatggctgcttttgaatggggaggaaagaagacatttttcttaatatcctttttgtcccatctctaaaatgtataaatattttgatttggttttactttaatttctcattcataatttcgcaactgtccttttgggttgccctccaacacattacttccatttcagaaaccatatctgatttaatataaactgctaacttaagaagaggtgaatttgcatttacacttagacactttctaaaaacagggtgaacttaattgaaatttttcag

SEQ ID NO: 5019 - DNA, 1044 bp, Homo sapiens
tggtctaagacatgatacagacattgttttaatgagtatgatgaaagtttcaagaatttgctttgattttttaatgttagtataattttgtaatgtcataatgctaattttgaaactttctaactggtaatttttttctctccttcccctcttccctcccccgcccgccccccatacatttcatcttgtcttcattcagaggaatgcagtagcatggatagttgatggtgaatttggagcagacgacttctgtttaacttaaaattagtcgtattttaatggcttgggatttggtgcaaacaaacatgattgatagctggacagacatgctcgtcatgaaaaaagaaccatttctgaagcccgattggggccaaacatttacaccttgcttcatagtaaccagttgagatgaagcacgtcgttagaacgttgttggacaccatgttgaattattcccccatcggttgtgaagaactgtgctacattcaggcttacccattgaactcagtatatatatttttttccttcctgtcttttgtctggcaggataccattcttgttgctcttctgtgtaatgaagtttaaatgcttgtttggaaaactttatttaacagtttagaaggcttgatagaaagagtgcattagtctgaagagtatacattggataggaaagaatttccttcttttgtttctccaaatctttccgccttatttagcttgagatctttgcagcttggttcatggattctagccttgcccgttgcgcagtatatactgatccagatgataaaccagtgaactatgtcaaaagcactctcaatattacatttgacaaaaagttttgtacttttcacatagcttgttgccccgtaaaagggttaacagcacaattttttaaaaataaattaagaagtatttataggattaaagtgacttcatttgtatacatttggaatctaaaccagcttaaaaacagtttcctcaatgacttagatacacagtataactgatgctcttctggaataccacatgagacatggtcag

SEQ ID NO: 5020 - DNA, 1055 bp, Homo sapiens
agtaagctcttgagcagggctgcctggatttgaatcccaactttaccatttactagctgttaaccataagcagaccacttaaccataacctatgtttcaatcaccattaagaggataagcaggcggggcgcagtagctcatgcctgtaatcccagcactttgggaggctgagatgggcggatcacgaggtcaggagatggagaccatcgtggctaaaccccatctctactaaaaatacaaaaaattagccgggcatggtcacacacacctgtaatcccagctactcgggaggctgaggcaggagaatcgcttgaacccgggaggtggaggttgcagtcagccgagatattgccactgcgctccagcctgggcaacagagtgagactccgtctcaaagaaaaaaaaaaaaaggataagcagaatacccattttatggggtagtgatgaagattaaataatatgcattaagtacttgatacctagtactttgtaagcacccaataaaggtttagctgtcatcttcatttttgcttcagtattcaatttggatacattgcttttctgtcacttcccatttccatagaatttatcactatctctatcctggatttgtttatgttcaaaggccttgatttataattcttcattactcatgtattgacagaatattgcagatagtttttttgtgtgtgacttgatgagagctgatcacctttaacaggaaaaaagtgtatatttgatttaaacattttttcataaggtaacatgttaaactattcatggtatatttattttccctttaagttctagtaaagagtcctgtgtgtagtgaatgataaatttaagatcagttagttggttttattaatgtaaaacttttttctgaattactatatgttcagatcacaaggtttacatctggcacaaacgtagtgaactgccaattgcggagctgacagggcacacacgtacagtaaactgtgtgagctggaacccacagattccatccatgatggccagcgcctcagatgatggcactgttagaatatggggac

SEQ ID NO: 5021 - DNA, 1042 bp, Homo sapiens
ctgtgtctcatattacagactcacatggtcccagtatgcacgtccacattttttttgttgttttttaagagacagggtcttgctctctgccacccatgctagagtacattggtgtgatcatggctcactgcagcttcaaacttctgggctcaaatgatcctcccgccttggcctcccaacgtgctgggattataggcatgagctaccacacccgaccccagatcaattttttaaactaaaacaagataataaatcatttaatttagctaaaacaggttatcagtttcttttattaagctcgtttggaacacatggattttggtgttatattatctcaatatggttatgaattgttcttaattccctgcgtgcaagatgatcatgtatgtttctgctgagtttgctgtcctatactgtgttaagccatcaagatacaggattatctaacttataaaatgggaagggttgttcctctcagaactttggatattcaatgagataatgactataagagctttgatctgtagagcacattacaaatttggtaaatttttgaaaaatgtcattaacagattcctccagtctgtatgaagctgtaaaatgttttagaatctttttccatttcacaactcctaaatattaggacaaattccagtatagtgaattttaaaggaacgtttaaattgtttttgaataaaagtaagaccttacttggaacttagggactgtttctttctttgtgttatttatgcatggtgagttattgaagggaagatagagctacaaagtgtctctctgctttcccttaagtatggttgtaatgaaatttgaactatattcaaattttcatggttaaaaacacttctagaacaattaggttgagatcagtctcaggaaaaaaaaaaaacctgttactaaaagatattgtgaagggagtcttttggttctttatttgctttctgagtgctgttgagtaatgaagttaatagtagttttttcttactcaggacttagatggtaatctccttgactcctgggaagg

SEQ ID NO: 5022 - DNA, 1024 bp, Homo sapiens
ggctcaaagctaaactcaataaatcttaagactaaagtctaaaacttactgtttcttcccacctttagtcaaattcttacttcctctatttcttgtaaacatccatccctatcccctaaaccagaaatctggaggttgtctttgaagattttttgttattttctgtcatgtcatttttatctccacaatatctttttttctttttataacagggatctccctatgttgtccaggtcggtcttgaactcctggactcaagcagtcctccagcctcagcctctcaaagtatgggcatgagccatagtgtccagcccaaaatatcttttgattctgacctcttttagtccttaacatcttacgttagggcctcattttttgggaactgactgtgaactatgtatggctcattatggttccattgtccctttatggttgccttatcctgtgtctttctgattcatcttccacattgttatcctagttctcttcctaaagccaaatatcacactgtatattccctagcttacaaattttaagtggcttttcacacacagggaaaatgtaaccccttagcctacaacaaacatgtcaactcttgcagccttgtcacttgccacgtctacatttgcacttcacagttcagcttgcatagcatacaatatgggcttttaagtgaggcagcccagattcaaatccccattgcactacaaacaggcatgtttctaacctttctaaactttcgtttctttccctataatatgagagggggtaatattctagatttgtgagaattaaatgaagtattgtttatgaatagtgctagtagtggttagcattaataagtggtagctttgctggtaggattgtaaaatggtgcaaccacttggaaaacagtttggcagtttctcaaaatgttaaacagagttagcatacgacccagaaattccactcctatgtatatacccaagagaaatggaaacatatgtctacacaaaaactcatacatattcataacagcattatt

SEQ ID NO: 5023 - DNA, 1032 bp, Homo sapiens
catttccactgtcacagaaagttctgttggacagttgatatagaggttggaaaagaatgatttttttttaaatgagtgcttaatgaaaatagtcatttaagttggtaaaccggatcataaatcacaaaatgctttgcccttgatatataatattagctgccatttatgaggtactagctaagtgtcagattcagtctaaatggtttatagtcattttctcttcctcttatttcatccttgggtaaggaattctgtaaggcagataccttaatctttgtttgatagttggaaaaattgagatttagagaggttaatttaatatctcagaatcatagctaagtgactgagccaagatttaaatctaagtctgtcagactactgctcccattcttaaggctttgctcttaactactgcactccttgccatatattgcacttctcctgtgcatccccccaaatattattaatcacatttgagtatctcttacattccagaaattttaaatgtatttctaattcttacaagaattctaagaaccctgttaggtagatactaatctccttttgtagatgtgggaactcaggctaagagttgttaaataacttgccaaagacattaaagcttgtgagtgagaaggacctaaactcattatctggagcctattctgattttggttttggtttgtttgttttttgaaatgatctcactccatcacccaggctggagtgcagtggtgcagtcataactcactgcagcctcttaactcccaggctcaagcaatacttccccctcagcctccccagtagcaagtaaaaaaaaatgtagctgggcctggtgtcacaggtctgtggtcccagctactcaggaagctgaggtgggagagtctcttgaccccaggcggtcagggctacagtgatctatgattgtgctactgtacaacagtacagagcctgggcaacagagagaccctgtctcaaaaaaaaaaaaaagatttacaaatgcattcacttcttatttttaaagttagtgat

SEQ ID NO: 5024 - DNA, 1713 bp, Homo sapiens
agccaaaaggccaagaggcgatttttagagcagtttgatgggaactagaacttaacctattgcaacatttgccaaaattttgctatttgttaagtggagattttacttacacctggtctcctggtacacaataatatctaatattcttttcattgttgtcttctttttcttcattttgttgttgttattcctcacttatcctccctgcccctagaaaatccacatataaagtaaacccctcccaccaaatatatccaattttatgagcagcatagctattgctgctgacaaatattcgtaaagctcacgtatcgcataacgcagaacttctctatttaaggaatagatactattggggtaggaacaagtacagcagaagatgagcaaatgtcttaaataaaagtttacagtttattattatttctcttttttaaaatatcttctattaaagcctatttaccaccatcagtgatgcttcccccacggcgtttacagactctcctgcggcaggcggtggaactacaaagggatcggtgcctatatcacaataccaaacttgataataatctagattctgtgtctctgcttatagaccatgtttgtagtaggtaagaggaaaacttcctatattctgaaacagcctaacattttacaaaattttagttttcttttttagagtcttatcctgtagctatataacagttcatgtctgatttagcatttgttcacgagtaaagctggaactatgaaaattgaaaattatgagaaatttctgtatgtttacttagtaaccataccttgagaactgaagttgggaagccagtttttcgttatctataggtttggttacttgtttcctgtgtctgacaatttaactatgtcccaaattatttactgcacataaagatcatggtaatacttttttcttaatgaaagttctgctttttagtagaagacaggctctaaaaatggctagaacaacagctattaacttatggtttgggttttttttaccatgtgtacccatgtccataatttaacttgtaagaattcaggcttctctttcgacattaggagtattttgagtaaaaatatacctactattttaatggtctctaaaattaaagtatagctttattttgttcttgatgtttttgttggtttcttttttagacacagcctctctgttgcccaggatagagtgcagtggcatgatcataggctactatatagccttaggctcaagtgatccactcacctcagccttctgagtagctaggactatataggcatgcactaccatgcctggctaattcttaagtttttttgtagagatggggtctcttgccccagctggtcttgaacttctggtctcaagcaatcgatacttctgccttggcctcccaaagcactgggattacaggcgtgagcctccatgctgggcctaaagcatagctttaattttaagatatcgaataacaaattgtgaaatatttcagacttcaagaatgaaataatttgaatctggtgaaccaaacaaaaaggagaatagagaatagctgcaatgcatgtgctcagttgcttttaccagtgatatcaaagaactaatgaaagtaacataaataaggacaaaaacatattaagtatgaggactttggaataacgaggaacttctgaataaccgtaaaaattgtctatatatgcatatctcta

SEQ ID NO: 5025 - DNA, 1875 bp, Homo sapiens
aacttttaacattatattgataaatgaaaatatatgaggtcttcatttcatagttgcatttttttcagaagctaaaatggtgcgaatatccagaataacttcaaatataaaattcttttatttttagattttttttttttttgcattgtttagtttttggtttctgtgacctgatgaatgacaaagttttttcatttaacatagaaaggttaacttcaggctgtatgtacagtaatgtacttttcagagcatcttggtaattaatgtatttctgaaacattcattagtcattctaaatttatatgtaaaatttgataagtgtaattttcccagagttacaggagtgtctcagtttgaatttttttctgttccttagccgtatatttaagatgagatttgtatcaagcaaaagaaatgtatcttataaatttaaatacatgcctaacttatatgagagggtttattattgcttactttctctagaaaccacttttataagcttacagtttatatctctcttctaaatactccttgatagaaaatcttgtagagcagtttattatactgttaattctgcaaataaatggtaatttctccacagcatttcgtgacagcagtgtatttttttatggttttaaagtaagcattttgggccgggtgcggtgtctcatgcctgtaatcccagcactttgggaggccaaggtgggcagatcacttgaggtcaggagttcaagaccagcctggccaacatggcaaaaccctgtctctactaaaaatacaaaaattagctgggtgtggtggcgggtgcctgtaatcccagctacttaggaggctgaggcaggagaatcgcgtgaacccaggaggcagaggttgtagtaagccaagatcacgccactgcactctagcctgggccacagtgagactctgtctcaaaaaaaaaagaagaaaagcatcttacgaagaagaaaaattgtactttaagttttaattttaagtggacttgagatctttaccgctgtattccttggagtctctaaatatgactaacatttcctacctactgatgtctctgtttacattaattggcttgctcaagctccacaagtagcaactatgatgaaaaggtccctccaacctgtggtccttaattaggtttaaggtttaaaagaagtttcaaaatgatgtttataaatatcccttttctcttgtaaaaaactgctaagattgtgaccacgtggtttcaagttaaaagtaaaataataaagtagcatttaaaagtattaaagtcaaaaacacagttcaggaaaaaactaaatgtgaaagtgtctcacagctggaaagtggtttattggtttaggggagaaaagagcgaataataatttcctgtgcttcacttttaaatgcatcagtgatcagattgtcagaaatacacaagtacaaatattgaatctttttaaaaacctttaagttcaaccatctaacgtagacatcccttaatagccgcctagaagagagtgagtgcatcaagcttatgcttgtccacgttagttgtaggaaattcaatactttgcacaccaacttgtagtacatttgttggacagctcttaacttttgataagccaaaatatacttttctccttctcctgagtgtgtctagttctgatttctggtctacttattccctctttcacattgtgacttaaatagttcatttgctatttttttctctaatcttttcaaaacttgttgcataaaaccccccagtgccctagttataaagtcatacttcttaaaaagcaaatttcaagtacttggaatagttctaaatttttatacaagaactacaattgtaggagattgctttgagaggagaat

SEQ ID NO: 5026 - DNA, 1033 bp, Homo sapiens
ggtcaggctggtctcgaactcctgacctcaggtgatccacccgcctcagcctcgcagagtgctgggattataggcgtgagccaccgtgccgggccaaatcagcattttttagtttgggttcaaatatacttcgccatttctgggcaatttggatgggtatacgagaccaataatagaaaactttttttatgtctagaaatatttggttattttttaatataatggaaatatgcttaagaaaaattggcatctataattaactagtatattttaaagtcaaataggagttttgagtgccaagtttagatataatttatttccccttttctctgagaaatcatgatttaattgataagatttggttatgaccttactccagagttagaaccattactgaattagctaggaggccgcccttgagaaccagactttctaagtatcgtaatttctgggtttttctttcatgttgagttcagtttaataatatgggagcaaaggaaggaataaagcaattcagtattgggtggactaggggagcaacagcagaatttacgacgtgaaactatcattcaagctatcctagtcacttaacaatttcaaatttattagatattaaaatggagaaggagatcttgctgggcccagagatggtaaaaaatcattagagaccagaaataatctcttaagagatctagttgggagttggggaaagacataaaggagagtttattttcctaatctttttttgtctttatttcttcaagattttttaaaaaatataaacattagtagagccctgtccccatctcagcaagctttaattttgtctgatttttacaatgttttcagtaaatatttaacattatttgttaattaaagggtctttgctttcttgaggttatatttacatttttgtgctttaaattttgggaggtaaaatacagttttactccccacccttatcgtatgtgtcaaatacttcaactgattttttggagaataaacattttctttcaaacagatctctagctgt

SEQ ID NO: 5027 - DNA, 1070 bp, Homo sapiens
tcatttgttgtcaaaagcagtttcctgtctgggggtggggagagaaagaaggcaaataggaagtgaagtagagaaaccagctgtttgttaaatattagtaaatgactattacattttgatttttttaaaattgagtcaaacattaatcttttctgcctttttctataaaaataaggccttgtgtttttttcttttgaaatcttattacaaaagagttttcaaactcagtataattctacacaataatataatcctagagaaatgggcttcaggtgaattaaaggtgcaaacaagcaagaataaatgcaaattcatttaaattgatgatgtagtgtattatttttattctttcattaaatacttaaaatattaaaaattttaaactactgttgactaagatgattggtaataagttaacttataaaataattctgtagtaaaattgaaaaataaaaacagaagttaaaatagttaaacatctatattcaaagggattggaaatttttcgttaactaaagtttcctcagttggtgtgtttggggtttaaaaaaaaaatacccaagtacattttattgagcagttctgcataaatttttgcttctgactgaatgagctaaaataaaaacagttagatggccaaaagaagaattaaggttgctttcccattgggcaagttagcactacttgtgtgttgacaataaagaacttgcctgtggactggtttaaaatgtgtgtgatttcttggaggttgtttaagcttcgcccaaattatatctgtaatttagtagtaaaaaatttaataggcttacttcctatttttttcttatttgtttatagtaatttgagagttctgtattggatttcgattatgactatctcattagaaaccttcattagaggcagcatgtaaactgaagaaaggtagttatagataataaggaggaatcctttctttttacagcctgttcagtctgtagaacattctaggatctaataaaagatgaagattaaatctctggctgagcctcatgccatcaaactgtttaggtatttataaaaagaaaagggtt

SEQ ID NO: 5028 - DNA, 1891 bp, Homo sapiens
tggcttagggctcaagtaagtatcccttaccgccagctggtgatggacagaccgagggacggaggctccaggggggtaggggaaggggcggaggggggaggggggcttgaaagagctcggtcaaagagaatgagtgctgggcacgcaggacccagtacacaggaggacgcggctcagggcgaccggggaggaggagcggacctgaaaggaaataggggaaaatcaatcagtctgacaaattgtgagacgagacaggcgttgaggggttaggaagggttaggagaaacccaaagaatgacttctccccacgcaccttcagagcttaattgtctgtcaataaagacagatgcgggagtgtgtttctgtatgtgttgggggaggggtggattagagctggtggaaataatgaaccttggaggatttgtttttcaagtgtatcttggaggcatctttgtgggacacctccccacccccaaccgtggcagacaacaacccaagcaaactaccaatcaggaaagacaatcacctacaagtgtttatgggaacggaggggctgggatcatttggaaagaggttgttgaataaatctgatgcgaataatgaagatacagtgttgatgtcgtttaaaggcccttgtgtgtgtgtacaagaggcctaaccctaactagtctgaaatctcagtttaataccaagaagatgatcgcctctgaaaaggggacatctgatctggtgaaccatttgttttcaaatacaatttaggtggccttgtatacctaacatagggtgaaggtagacagcgaccttggacaaaaaccaccgttttgtatacacacaaagaaaaactaagggggtggaaggtaggattggtgggagtgcctgatgaaggaggtgcaagagacggagtcagaatgaaatgaaggggggaggacgtgcagcagcagtcagtttcctacattcagagtgtagattaagctctcaggctagccgatgtgtacttttgcatttatggatttcttggggagtggggaggagaacagaactttttaaaagtggcacaagtatttcggttttcaggcagatcattgcactgtttagctaaaaattaagttttaaagctgaataagaaagcattgaaacataagcacaaaaaatagactgataaatgaaggttcttagataccagaatacatgagggaagaaaatacagttgatgaatcttttaagtgctcaaagacaaatatgtggtaggaagaattcactttattccctagggaaaaggattagtatgaaaacagattttgtaaatgctaacagaacatattactgagacaagaagcaagctgacagcagcaggaggaaataactcgtgactgtttggaacctacaccatagtaaatttgctatttttagtatagagagaaagggaatgatttttgatgctggatttgttttaattttaaagattgacctagtagaatttctatgcaatataatacctggatatataagctcttaactgatacggtcatctctgttaaccttgtgtgaagctaataatttttatctttcaaaatgtaacgtagtatgttgattctggtttttcatttatttgactagttggttacagcacatttttagaaattttatactttatgcattaaattgaggcattaaatggcaaactaggaagaacttacattgattctggtttcaagaaaggtttttaacttgactaggaaaaaatgtaggtgtcagttttaaataaagtttgtttaaccaggcacatgaaagctatttttttcttcatcatgaggctagcttaaaaactttgcatctgttttcatggacattagtttatttgaaggattaaaaccctaaaattggtcaggtc

SEQ ID NO: 5029 - DNA, 1125 bp, Homo sapiens
tgtttacttagagaagccaggggaagtattccaaagatctattctacatgtgtatatttagtttattgtatataattttataaaccacttttaccaaaaagttcataaaggcatgccctgatatcctgccaggtgctgtggtttttactgttaggagagtcaaatttgctgtattccgggttgtgctgacctgtactagagcccaaccacagggacattgcacagtcaggtctcatgtacttagaataaaaagcagctgcaagattcccctctgtgttgaagttttcatgtacaaatgaaatagactgcacctgcccagtctggctgaacacacaaatattttataaagggtgttgactacatgtgaatgtcttgaaacatgtaagtctgattagagtcaaaaattaaaatggtttgatatggacatttatttttcattcttctcacaaagcaatgcaacccgcattgtgatccagtgactaggaggtttcttcgttgataaatacactgatgttaaaaagtttgttggtaaaccggtagttgccaaaattcttgacctctcaggtgtctggtaaactgggcattcaaaagcatagagttctgaatctgtctggttggaagcatttggtgttttggtagaaatctttaaaaaaaaaaaaaatccagtagtcaaattgcatagttcaagtgaatcagtagctcacattttctgtatgctaggcttgagggatttgttatgaattagatacatttaaggttaaatggttaatgtaacagcatgtggaaattatacctggagaatttaaagagtattatggctttatagtacatattattgagaacatgggatgtaagtatagcatctactttagattttagtaatattttgggagatttaaaatctttgttgtctgagtatattatcacatctcccttgcaaaattgtagggaatgggaataagagtggtttgtatattactgaagcaacgctcagaggtttaggacttcaggataatagcagggtgattacctttgttggcaaaaagtatatgtcgggaaaatcacagcacatctccagaggcagcgagtcttccagtattttctgttcacgattccatcttgccc

SEQ ID NO: 5030 - DNA, 2225 bp, Homo sapiens
gaatggattcatcagtctttgagtagcttctaatttagatacgaccttctgccactttccagtgggattttacagacttgtttaattattctcatcattattagagaaaatgaagtaccttgtggttccatttttagagaatttgggggaaagcaggaaaaaatacattgtagtgataataaaaatatctaatactgtgtactattattatccacaggttttaaccacattctgccttatttctacataatttatttcaccatgttgcttgtccaccgagaagctcgtgacgagtaccactgtaagaagaaatacggcgtggcttgggaaaagtactgtcagcgtgtgccctaccgtatatttccatacatctactaatgctcttctggcttttctacaaaatactcctgcaattccagctgccatttgcaaaaacaaggaaaaaaatccgaaactttcttttgttgcactgacagggtctgtacttttttttttctttttgagtcaggactatggagccgagtagttgatcttttaatatagccgtgtttacttgtattaacttacagttaacataggaaaaatacaagtaaggatgtgagaatttgcattttaatgggaaattttcaacccttaatctgaaaacagaagacagtcttaatataaatgtactgtgaagaatgctattgatgtttatggtttctgattacttttcaaattttgatgtttttttgccagttggcttttcttaaatgaaaacactgttccatttaaagtacatttatgttttattcagtaagagaatagaattttcatttgtttttctttaaatcctttactaattatataatttgaaagcaaaaagaagggcctatattaaatgctgaaagtgaaaagtgatgacattattagcagacactgcttaaaggagaccatttgtagcagttggcttaacctcaacttctaaaactacattgaaaatgtaaatacatagcttagttttttgtaatatatggtgacttcagatttttttgtacagtattttgaatgtgagatgattgtcaggactaactgtctttttaacaaaacattttcagtattttaaataaaattttgtaaagtaatgtgaattaaaaattttggaacaattagaattcattcactattgtatagaagatgctgttaaaacataggaagggtatttttcttgatccaaagtttgtgaatttggctttgctacctcaattgcaggtgtttgtttgcctttataaactgttgcaaatagaaaaaaaatagaataagtatatatttttggagtaacatcaatatttaaacatttttacacagatcggtgtttgaaaatttgccatttcaggctaatatttttatatatttttgactttttaaaagttcatcagtgtttttgctactgttaagcttatgcagtttatactgtattttttatgtatcctttatatttaccaaacctgactccctgtaaaggagtgctgtcttaaaaacaactgaaggggttaaagtcgtttcttttagtttaatagatgtgcataaggtagctttagcaattaaattctagtgaagttgatatagtctcatttttaattgtcctgtaatggaacagtagcaaattcactaaacttttgtgttcagagttaaattgttctcagtactttcaatgtaggggaatgtaataaacatagtgtgtatgtttgggttttaattacacattttatatatgagccatttagatatgcagtgttaattctatactgcatttgaagtgtatgtaacttagcttatgttaatgcagtcatgaagttggtttgctccagcatccggtagtctttaaacattcttttagtgaaattgtcattgttttatcagtgctaatgtgtgcaagcagtttttttattttgcttttctcctggcatcagaaagtggtggcgttttctgtactggattgcaccaaggaagcttttggggaggaaggaaggacattaaattctttccctggtaatgaaaagagccctttatcaatacagtgctgcaatttctggatatcagctacactttgtttttaagtttgtttttgacatgtttatttggcaaattttataatgaagttttaagttgaaaataaaatgtagcaacattttgatcactttggagccttttttttttccctttcttgcttgaaactgagattt

SEQ ID NO: 5031 - DNA, 1026 bp, Homo sapiens
attaatctgtccatgagggcagaaccctcatgacctaatcatctcttaaaggtgctacctctccacactgttgcattgaggattacgtttccaacacgtgaactttggagaacacattcaaaccaaagcaggaagtaaagttattctcttactagtttattgaggatcgactatataatagttaaatgtcagtgatagattgatttttgacattctgaaatttggataaaattaggaacttatagacttaaagtgggattcagcatgtatttaaagtgcaggatgttttggtgctgattctaagctagtgtttgataataaaatgtttgtgccatggccagtaggtataactaacagatgatatagcttgtaattttgattacactgaactctagtattgattttattgtaatgtaggctatcttagattttatctctttcatggatgtaactatatttgttttgccttcagagcgtttcctaggtggatgattaaagtagtgtgatagatttcggacgggttaccatctttttacatagtgggatttagaggttttgagttgttcttaagaatcaggccaggtgcggtggctcatgcctgtaatcccagcactttgggaggctgaagcaggaggatctcttgagcctaggagtctgctttggaaatttcctcagagcatagaaatcatttttaagagaaattacagatgctattaagcattagagtataactaagttattaacataggaaaatattttaaaattgcagtttgtggttatgtaatcttccgaggtgcaaattctcagaaaaatgcattccggaaaaatcccagtgatccaaagcttgcacgtaagtattgatttatgtttatattatatatattacatgaaggttttatttttctttttgtctcgacatcattaaaaatgtacttttatttttatatagatttaaaaaccattcatacttcaacgggaaaaaatcttctagtttctggatggtggggctttgttcgccaccccaat

SEQ ID NO: 5032 - DNA, 1049 bp, Homo sapiens
gtgagccgagactgtgccactgcactgtagcctgggccacagagcgaggctccatctcaaaacaaaacaaacaaaaaacaagagaaacgagaggttacaaattggttgatgctgacctgaagtatttcaatataaaaaaatgtcgcctatctaaaaaaaatggagtgtaaagtcctttgggggggcccccatgattttggttaacttttttaagaaacctgggcccccggctcccccaaaggctggagcaactgccttttcagtcgggcaggcatctcctggttccgctcgtctgtgccgtcctgtctgcctctcaccaccagagccctgctcagggtcttgcaggcagtggaattgtgagcctggatagtgggcggcagtgccgttgtaaagcctcctgactgggtttggaatgctgtttgggtaaacacttttcctttctcaggaaatgctgtctatgatttcttcattggccgtgaattaaaccctcgaattggtacttttgatctcaaatacttttgtgaattgcgccccggattgattggatgggtatgtctggttttttttcttctaaatttcaattcaataggtctaattaactgctagaaagaaatgtagaccattcaaaaataagcagtgggtggtatatttttagggataattatggctttccataaatctatcaaaatactttcttgtaagtattttccagaggtttaagatgccctgttacaggttatgacaaattaaataacttttctttgctttatttttattatatcagtttatatttatgtaggaaagtgatagtgtggatgaattaatgtaagaaaaaatgcattttcctcctttttaaattttacctagttttaggcttggagttgcagatagagagcaaagagttcccttccacccttcattctgtttctcacaacattaaccttggaggaaaccgtagtgtagtgatgaagaacagcagattaacatagtgacagcattggttaccaagtccacaggcctcagtcgagttcaccagtttttccgctgtt

SEQ ID NO: 5033 - DNA, 1030 bp, Homo sapiens
ctcatataaataacagctacctcttttttgcttttgaccgtttatccaaatggatttgatgactttttaggatcacagctctttgaggcactcagctcctttgaaagcaaaactatttctttagccaaaagaaaaaaattggatcttccagtgagcctttctgtgtggctgcaggactagcccggaacgagagttctgtggagcgtcacagggcgggtgctttttaacttggcattgcacgtgaatgtccccgcctgctgtccctaccccccaggtactcgcagtcccctgcctagcctcgggcatttgtgttgtggcatcttttctgcgggtggcatgttaagatctctgttctggatgatagagttttactagaatcttttgaaaccattattggcaacttggttaagtataaatatttataattttgtaactaccaacctggctcggtgcctgacccctggtaggtgcataataccctccccttaggtaatggcattagactttaaaatatgtgtttggcccagctctgttaataattagccatttgactttgtgcctgagagtttggattgtgggaattttcaggttgcacttcttgtctgttttcccttaattaaaagcaaataatgaccatttgaactgaaaaagaatcaatatgttaaactatttggaaagttctacaagagataatggtatgtatattgaaaattatacctcagacattgcttatttgcatatttgtgtgtatttagtctgaataatgaaattaagactttaaaaatgaacattgcattgtttcatagtggcgtaagtttcatgtgagccttgggttaatattaattttccacttccttttttttttttttttaaaggattctatgcttttatcctgacatctgcagtcatcggaacatctctcttccagggcgtagagtttcattacgtgtacagtcattttcttcagtttgcacttgcggccactgttttttgtgtggtcttgagtgtgtatctctacatgcgctctttg

SEQ ID NO: 5034 - DNA, 1063 bp, Homo sapiens
agttgtgagcttgctgggcagctcaataaatggatagaccttgctccctgtgggtccggcatctcgcactgtaagagcatgtgctgagtgcttcagtccagctttgtcatttgaagactttggcaaagtacagatctattttgtagtcatccttgaatgattttccatttgacaagacggagtagagtgttttccttttcttgagaattacattatgtattgtaatggttgaactttttatcctttcaattcttcattttttaactttggatactttgtttagagacttacgcagcatctactctgtctgcagtcactccactgggttctaaaggggaagccaaagatagtttagacaccttctgccttttagtgccagtcatgtgataaaacgtctcccccagctccagagtctgacccctggtgggtgcttaatacttatcattggtattgttagactttttgttgcttttaccaaattctttgctgatggagcaagttttagaacctttggcaccctccctccctctggtggttcacttaccacaccagggaaggtgagtctggggtgaggtgggttgttgactttgccgccaggtcctttgatttcagtgttttgtgtgtttctctgtaggtaccaattcttttctaagtagtcttgtgttatattttcacttccctctgaggggtgtggtacattcagagactgagcacagcacttggacatggagctcttggagccagtgggggagtggctggccaagttgcttgatcctttttaaaaatttcctcatctaattactctggttcaagtattgagatttcttttcgagattttacgattattaactaaggaggttcctaagacattttggatgattatttttaatccacataggctagagagcaaaagactgctttatctaaccattcttttttaaaattacattttatgaaaggtaaatgaatattttcaaaagtcagaatttagaagttattgtttggagtatttgtggaaaatgtggattcagataatttgagacaactattttactttacaaaa

SEQ ID NO: 5035 - DNA, 1011 bp, Homo sapiens
acttgggtcatagtagagtggataaacagggtagagcccaattgaaaaggaccccacaaatggaagacaatggaatcatactgttactttgtaagagtatggtagccattggtagatgtttgagctagggatccactagatataaaggtatttaagcacatttagtcttgaggtggtggtacacaggagtgtggcagggagcgtggctgttgcagttgcttggtcctacactaggaagtcattactgaatttgtatttaagataaattcctgaaggtggaattgcgtcattaaagggcttgccactagggtttttgaaacatattactaaatttccatgttacaagatatcttccttcttgggcgtgttgaaaattaagtgatactagaatatatatatgtgtgtgtgtatatatgtatatatgatggtgatgtgcttagtaaatttgtaaattttttttcttttaaggttgtagaaggaacgcctcttattgatggaagaagactcaagtatagattaaatggtgattttctttttttaagactcaaattgatgatttgatagcttaaacttctaagtgttaaactctttgttaaagctgattagaccagagtagtaagtgataaattatttcttagtagttggaagagcaactgtttatacctgtagccaacttgtataaattatgccattaaagtaacatagcctcttagtcactcttgtccactctccagttttattttcttaatagtgctcatcactgttagaaatcattgcacttgtctaggattttatcacctgaggtgttacacggatgtgggcatccaggccactcctgctgcgtgagctgctcttgtccttgctcatgtcctctgggttgtcccttgaatattcgtcacacacacttcctgggcctttgcctggagaacttacccccaaacgtctgacacctgcatcttcacctccatctgtcttctgctgagagaagccttcaggtccctttctctcccc

SEQ ID NO: 5036 - DNA, 1130 bp, Homo sapiens
gggttatagtcatgttaattgtacatccttgattttcccagtctggtttatagtttgctgtttttaataaaggcaatttgttaaaaatacaattaaatgcatttttaaagccattgtaaattgatacgcaaatttacaaatgagaaaatgtgttctttgtgagattgtgcctcattttttgattagcgagaactgtgatcacggtaggtgggtaacattttacatagtgtgaacttatggcgcctatatacattgttataattaatctttagtgtcacatagataacgcagtggctaaatcatcctctcaaatgattccaaatgagattgaatgtagcctttctggccctaaaatcctgaccagtcaattctggaaagttgtattttagtgatcagcctgtggaaaaagacgaatacataaatgtgtatgtattgactcaaatttttttctttaaaactattcaggttaattatagaaaatgccaagtaggaaatttgccgatggtgaagtggtaagaggtcgatggcctgggagttcactttattatgaagtagaaattctgagccacgacagcacctcccagctttacactgtgaagtataaagatggaacagagcttgaattgaaagagaatgatattaaggtaagagctcctttggtttatcagagtgtgtttacagtaagtgggaaataactctaagtatggtttctaagctcaggatagtcagttcagctcggtttgaaggcagaggattgagctcttgctttgggtcacatactgtttttggctctgggaatgtatgaatgaggcatagtccttgttcccaagaagctcacacttactgggaaagacagccatttgcatctgttggtcccctgggtttactacgttctgtgtctggagtttgctgtgggtggtgttgagtgtatcaagggtagagaagagccctgggcttcaggggaggctttcagaggcagtgacacctagccaagtgctgagaacaaacaggaaaaacagcagttgatggggctgtttctgcagagagggcagtatgccaaagtcaggggtctgggggacacagtcagccaagtgctggaagggggtggtaggggagggctaagcaggagc

SEQ ID NO: 5037 - DNA, 1053 bp, Homo sapiens
ttgttgcccaggctggagtacagtggcgcaacctaggctcactgcaagctccgcctcctgggttcacgccgttctcctgcctcagcctcccgaatagctgggactacaggcgcccgccaccacgcctggctaattttttgtatttttagtagagacggggtttcactgtgttagccaggatggtctcgatctcctgacctcgtgatccgcccgcctctgcctcccaaagtgctgggattacaggcgtgagccaccacgcccagccagaatatttatatttttattattggtttgtgagagttcttcatatatgctagagacaagtctcttaggcgtatgatttacaaaacttttctccattctgtgggttgttttttcactggcttaatagtgtcttttaaaacaccaaagtttttaatttgaacgaagcccaatttatccatgtttttcctttggttgcttgtacttttggtgtcatgttttaaaaaccattgcctaccttgatgtcaaaatttacgtctataatgttgagaaaagagaactcttagatgctattggtggggaaataaattagtttagccattgtggaaaacagtatgggagtttcttaacaactaaaaatagaattaccgtacaatccagcaatcccaccactgggtatttattcaaagaaaaggaaatcaatatattaaaggaatacctgcaccacccttgtctattcacaatagccaagatacggaatcaagctgaaagtccatcaacagatgaatgaattaaaaactgtggtatatatatacacaatggagtattagccataaaaagaataaaattctgttatttgcagcaacatggagggacctagagatcattgtgttagtgaaataaaccagacacagaactacaaatgtcctctcagtcatatgtgggagctaaagaagttgatctcatgtctcgtgcaggtagagagtagaatgatagttaccagaggctgagaaacgggtgggatgaagagaggttgagctgctgggtacaaacatacagttagacagaagg

SEQ ID NO: 5038 - DNA, 1085 bp, Homo sapiens
cagcttagggctattatgggtagtcctgctatgaatattctagcatgtgtctttggtgaacatatggatgtgtttcttctgggtgtgtgactaggaatagcgttggtgggtcacagcgtatgcctgcgttcagcttcagtagatcctgacccacttctaaacgtgcctagcagtgctggagccatttatgggcatgtcagctggcggggctgcgagcctccctccgtcgtagctcccttctgtgaatggccccacgggcagcacagggaacaatccaacgaaagaaccgaacctgccttggacagctaactaactgcggtctcattctgtttccctgaaacgtggaattaagtttcgaatacaactttccttccctcttaacaacgatattattcatgtctacatttattgcaagcatttacctagaagataaggcctatttcctccaataaggtgagtttatactcaatgaaattaattttttcgttcatttagcattgcttcctaacaagttgtcaattgatggaccagacatttctttcctgagctgcagattataaaggggtctcactctcagggcacaagaagcaagagcacatacccaaaggccaaggaagtggctgccttctttgtttttccctaaatgatgtcctctagagaaattcccacagccccattatgagacgggaatttgcttgattaaaggagatgattccactttctgtctagtaatctggggcatgaagtggatggttagatacaaatctccagtgttaagtaccagtaatttttgtcagtatgaaaaaagtggctgggtgcagtggctcatgcctgtaatcccagcactttgggaggccaaggtggacggatcacctgaggtcaggagtttcagactagcctggccaacatggagaaaacccatggacggatcacctgaggtcaggagtttgagactatcctggccaacatggtgaaaccccatctctgctaaaaatacaaaaattatcagggcgtggtggtgggcgcttgtaatcccagctactcaggaggctgaggcaggagaatcgcttgagcccgggaggcgg

SEQ ID NO: 5039 - DNA, 1052 bp, Homo sapiens
caagttgatagaccaaaagtatatagtagaacagcacagtagaaaaaatttaaaagtgaatttcttatggtccaaaaggatggatagtcacagtccataacctttcataatatatgctggaattggaatctcttgtcatcttgctttgctctgaattttagaactagaagtgtgcatgtatgtcaaaagattatgcagagctattttctttgctaacaatgtaaacatttgcaccccatgaatgggactttataatctggaagtgagcctaaggttgcgtatactgaagtcatgttttaaaagttaaggttgacttaaacatatacaaggctgtattttaattgtaactagaaatcatttactatgcatacagaacctcatgtatcttatcatggaatttgtgaattaatgggccttgccgaattcaagggtaagggaaactggtaacaacttgttttaaatcaacatactataagctcctgcttgcttgactcaagttgtttgaaaatctgaattaaacaggatctcattgtcaggaaacatcttctaagcttgacatctacgtttaagaagggaacgtggaagagaaggtgagacatgaaactaaaacagctgggagggtaggatcagactgcacctgatttttggaccaaagtttcatataggaataaataaaaaggaggaccacttgtgagccaacctaggaaggacttgccagaaagtagcagctcctgctgcaaaatacagtgccttcaaaatgattctctgtgtgaattgcatgcaatttcatgtaaccataaagtgtaacctgtatgtgcatgacatgtgtctagaatgtgtaaagttaggattcagcaggaaggggcctggccctgtcactgtggtggatcagtggacctgctgaagtcactggactcatgtgacttaggtttgcagcatcagacccctgtgtttgcattaagtggccacatcgttgaaatcggatcaatctctccctcagctttctttcctactttgcagctttgctggttttaactgcttcattcttctgc

SEQ ID NO: 5040 - DNA, 1811 bp, Homo sapiens
ggtcattggactgggactgactttaccagttttcaggctgtggggctagtcagtcattctctctgagccttctacctctaaagttgagttctttttttaaattctttttgttttgtttttattttttccttgccactatacaagcaaggatagataaagctttttattattattgttattattattatttcgagacagtctcgctctgtcatccaggctggagtgcagtggtgtgatttcagctcactgcaacctctgcctcccgggttcaagcgattctcctacctcagcctccttagtagctgggactacaggcatgcgccaccacacccggctaatttttgtatttttagtagagacagggtttcaccgtattggccaggctggtctcgaactcctgacctcaggtgatccacccaccttggcctcccaaagtgttgggattacaggcataagcgaccgtgcccatccccgataaagttgagttctgaatttcctctttcactgtattctcggcagctactggttggtttattctttttttttaatcttttttggtttattcttcttttgatctttgaagagaaggagaaaaaagatctgagtttggctctcccatcttaagtgcagcttttagttgttttatagtcatagacgctattgcactggacagcatgcatcctggatgtaaacaatgcggaaaaatcaatggagtgaccatcttggggtcagtggtgttgcataaagcaccagtggtgtgctgttctgtgtcagtttcctctgcgccacgtgctttcacagtttgaattaccagcatctctgtggtggcttcagtacattctccattgtgcttcaacctggaagcacattctgccgttcagaaagactgattccaatcatgtaatgggaccacacgagatccatgctccaattatatgaatagcagaaggtccatttgactcttgtagttcaagagctgtttctaagtaaacagactttccagagctcgatgaagtgaagaagcccttctttcaattcctgggcagaattcagtggttttcatatcatctgaacctgctgtgctgctgtttattctatcactgtcagccttgaaaggaaaaaaggaataatcttaccctcctgcccttcttattttatatcttccatcttatccatctatatccatgtagtcattccttccgagttccctggttttaatccaaaagactctgtttaacagcaatgtcttggcagaccaggtgccgcttccgtgccatttgagggctctgagtctttgcttcgtcttaggaagataaagataatttggcagaaagtcagagatggaaatagcagtttgggatgataaaagatgggtcctgttttgctgacattcttttactttggttcttggtgcgtgtcctttgggattcatttcttgctagcatgaataggacatgcttttcgttaggtgcttttcttttttggagaacatgaagtgtttctaacaaaactgaatgagctagaaagaattctattttgagacatctgtagttgatgcaaagtatttctgtaatcctcaatgacagtacttacatatttgcatagaattttttttttaatttttgaggaaacctctctggagtctgtatttataggagcatcctgaaagtccctattatgtagctggtgggagcgagagagggacagccacactcgtgctgtgagcagagcacaacttcaggcagagtgaatgccttctgagttctcattggaagctttctgttgctcagcctctggcagatttcagaacc

SEQ ID NO: 5041 - DNA, 1939 bp, Homo sapiens
caacttttatgtctcttgtaaatttatatatactttcagtgccattgtgaagaattggccttttaattctaagtagtattaccctatgaagcacagtgtgcaaaggtatgctacaaggtctctttaattcctgtgtggccattataattttataacaccattaccctttaaattctaccgattataagcagcgtaaaagtaactatataaagcaaacatcgcaaaggaactctgcaggagctcttaattcctttatgtagctatcataaaattcactttcctgaagacatttactctcattcacttccaaactccaaacctttttctggtagcaccacttttgtttttaatagaaagatgagttcatatctgtacatctctccaaagctctaaggaatgagaaaaggatcctagtatattgaaattactgatgtttaatacctctgccttttcactaaaagccatttaatatttttaaagtcaaaacttgacatacaggtatttataaggaatctccatgactctgaaggaatgaaattgatgtaggtagctttggctatgtaaagacatagtagaggacaattacttaaagaagagttttcttttgaggatttgtagatttgactaagcagctgaagtcagtaacccctcaagaaagtccgtttatagaagccaagaactgttggaggtctgtgatgcaggtttttctgttcccaacatcaaaagctgtggattatttggtgtgttcccctttatgttatctctcgataatttttgagacatcaagattttttaaaatatcaatactggaaagatgaaaccttcaaattaaaacctaaaattgattagaaagaaaagtaaaatattaatgcagtaaatttaggatggttacagatactcaccatcaacataaataaatggagttctaggataaattatttgtggaatactaatggtcaagtcacataagagtaaaatcttttggtgaggagacacatttgacaactgctaaagaattaactaaatttgtctttctaaatagttttctttataaagtaacagaaacattgtaaaaggataaatgactgtcataatgacttaggatgttgtaagaatgtctgccacatttattggttatttctgttgaaatctgaaggaatcgatacatctgaaaattgagaaagggaaataggactgtccccgttacagatactctgtgatgcacacaaccttctaaacggaagtgttagtatcatttaaagcacatagtaggccttgagtatttgcagattaacatgcagaaaaaatcaaagatgaagccccaattaagtgtttgaaccaaagaatcacagtcactgagctgcacccccgttctgtgaagcatgttaaatactcataaagagcagagagcagggcccgtagacgcttctggtgtaggacacaggaattctaggcagagggagaaaattaggggccccagttggtggctgagagtaaaaagaatataccatttgagtagtgctgttctttttcctcagtttttaaagacatataattcctagtagttaggacatctaaatagctcggtaaactggtcagaggcgggaggattgcttgaggccagaagttttgagatcagcctgggtaacagggagactcatttctacaaaaaaatttaaaaatttaggccaggcatggtggtgcacacctgtaatcccagctactcaggagactgaagcgggaggatcacctgagcccagggaggacgcggctgcagtgagccgttatcatgccactgtactccagcctgggtgacagagcgagaacctgtctctaaaaaaaaaaaaaaaaaattctaagagaatatagcttttcatagaaattattagaaaagcttacatatttcattagagagcccagtttgttagactacatttat

SEQ ID NO: 5042 - DNA, 1050 bp, Homo sapiens
aaatgtaaacactatattgtagatttactgtaggttttcaaccttttttagatttatgcatgtggacatttttataatgtaattacaatcaccacaaggttagcttttttaattgcagacagtaatgcatgtcacactaatatgtagtggccttttcaaggcctagtcccagggaaaacattttgtagagtataggggagtgggaggaaggggaggaataattttttatttaaagttgatttctgcactatctttttctcagttacctgcatgaataaataatgagaaatattttgtgactttaattggtaaatatgttacaaaaccaagtacttaatcttttacatcatgtcttcagctatttgtattttaaccagtaatttcaatggtctgaaacatgattctgagcttcacataatatcttaactgtggaactcaaaagtttgatcactgaatttggcagttattattacctaggtacccccgctgttacacaggtgtttagatacgtgttcctgaatgaagctgcttttgaattttgttatgttgaaatgcaagaaataacaatgatggcagcaattaaggtcacagaaatcattaggtaaaggaaaaccaatgaggagttctgcagttttcttttaataagtaaagtgagacttgggtggtgggaagaaggaaggtgggaagaaggaattagacactctgcctgccactctgcgtgtgtgtgctctcgcgcacgtgctgtctatatggaagccactcccttttctttcctttgaaactggtaaggttaaaataggggagaaatcctacatgttggaatgatagctttttggaaaatttaagaaactctccaggctctccatcttgatttatgcttgagttgttatgtgccatatttgctttgaactctgattatcagaagttttactaaaactttgaaataattcactttcatctgctttctagattttgtacatctcagtccataaagcaaagcttgttgatagtgtagttttctaaacgctgcaaatttgcagcctttaccac

SEQ ID NO: 5043 - DNA, 1051 bp, Homo sapiens
aggaaatacccagctgattagttgagggcaatgacttccatagtcctgcccttttaggattagggttttggggaggaggtttctccttcatataatggaaattatttttataaatagggattaaacaatatccctaagtttcaggtgttgtcttttcttagatggaaaaccacatgaacagatctttctctaggttacctctactcacctatcccagtgtcctcttgtttttgagcccacataatcagtgttttcattttgtatacaaaaggagaaaataaatatatagaaattagtatcatctttctaatattaaagatgtgtgcaatgaaagatgcaaagttaatcttcttattactgtgagtttgagcacaatccttaaagtttcttaggaatgaatcactcatttatcttactttatcattatatttattttcaatacttgttcttttccatccagcaatcaggcaggaactgagcaagtcaaatactgcatagaggaacagactaaggagagataggactttaatctggaggaaaaatatcctacaaacaacaactgttcacaacagcaaacccctacatttatgagctgtaagaagaaaatggagacaaacagaaggagggaaaaaccaacctactctgaaagccttcagacattatgactctggtgataagctctttccctctccgtttgctgcttttttctggcctttacaacagaatggaagagaatcatttaagagttcctgtaacagttatgcagaaaatactaaaacccatcaggcaagatcaccacgcattgaaatattttcatatcaagataaagtcgcacattttccacaatacattgctaaaataaagaggagaaaggcttaggaagtttttttgcagagagtgctggtaaagaattgagcaagtttgctattgtattgtaatgtttctctcaggtttgttcttcctatcatgtttgatattccatgaataattgagatcagccctatgtaagttaagatcataatatgtggaacaaatggaattgtaagtgctt

SEQ ID NO: 5044 - DNA, 1052 bp, Homo sapiens
gtccaggagtttgagactagcctaggcaatgtggttaaaccctgtctctacaaaacatacaaaaattagctgggcatggttgcatgtgcctgtgggaggctgaggtgggaagaagacttgaggccaggaggtcaaggctgcggtgagctgagatcatgcacactgcagcctgggtgacagaatgagaccctgtgtccaaaaatacatatattttttaaatgtagtaaatctgctcagttatcttgctgctttcacacatagtaccccctgggataatgttattgataaacttttttggtaaaagttaagaaaaaaagtggtgattacatctttccttcagtatgaaaagttcccccctttagttaattatcatggtggtggtggtggtgatggattgcatgttagcatgaattaaatttttaaaaatttgcatgtttccacaattgtttattacataacaataatttttgcattgcctagtaaatatggatatattcataacatacttgcccaattaaatagcaggctgtagttcatgtgaatttcagaggtattcattatataacttgagaaaataactagctaaatgggccacttaaatgggaaatgtaaaagaaaagcagagtatgaattatagtttaattctagagaacaggaataggtagcatgagtgaatatatgaaataacatcctaaactttaagaatatttgccagaagtgactctgcattttatggatctaagtaaatcttaagtgaccttggaatttagtagtcttccctagcaaagtaagaaggtgtagcctcacaagaggaaaggaaatatttcatataaatattattccctacagtgcctagctcagtgcttattgaatgaaattttctggaagttatttttccccctattcatataagcagatacctaataaagtaaaattggacgacttgcttcctaacagtcttttaagcagtaatacgttttgatagtaaagcagattaacaggctgggcgtggtggctcacacctacacccagcaatttgggaggctgaagtg

SEQ ID NO: 5045 - DNA, 1042 bp, Homo sapiens
atcatgcttcattgatctgcatttcacagtgaactaaaagctaagcctacgttgatggcagaagtcatgtcttagaagggacatggacgaggttctccaaatggaatacattctttgatgtatttggtccatttagtaaaggaaaagttgttctttgaaagatttttttatttttcctaattccagggtagggaaaaaaagatttttttttcagacttggaaatttaataagtgctctaaaggtcaccattttgaaaataattttatatagatgagttgaatcttgattcttaatatccagtagtgcaccataatcatgttccaattctgttaggtggttttccttccctttcccaaaatagaaattctggaactcctgattatttcctgaccactcatatatcttttgatagatttgatccaactactgatatataggttttaaaatttcaccaaaagctgttttaaaccataaaggatttttaaaatatgtttaaaagagtaagaactatattgcttttcttcctaagttatctctcctgttccttcggaaagcaagtgtattaagtatgtcttatccttgcattgtagtgaaggtccccatttctctttggaatagctttgtcaaaattacgttagtggtaagatggattaatgtcccataatatgcatgagatattgcatattgctgtatttgttaagtgaatatgtcagagtaaaagcaagactgtttggttaaaaatgctttaaactatgactggattataacgtttgggaagttggtgcattcatctgtggttattaagaccttacagatcttgtattcaagatgggaaaactagtcctttacatgcctcctgagaagagttaattttgtatacttttatatacttactgtgcctacaacctatataaaaagtagccattgtgtaatgatttttaaaattttctgtaactggtatcttcacataactaaaagtaatcttaaaatatcttttattggggaaaaattggttattttaaggttaatagactcaattct

SEQ ID NO: 5046 - DNA, 1597 bp, Homo sapiens
tttaagaatcaaggaagtacaatagaatttcaggattctgatatttattttgagttgttcctatttttttccccaagagggactatttggatttagattaaatgttgaaatacatgaacatattataagttatacttactgtttttatcattggcactaaaaaataatttaaaacagtgtcggtaatactattccattttaattaattgaactatcctaattttaaaattatcctactttattcttactgtcctttctttgttagagaaactccttactatcctaaggttatagaatcataatattttagacttaacaatgtaagttttccttggaaacttactgtactagcttataatttcttctcattttaaggtctggcattgtgcaaattagagtccttacagatttcaattaaagtttagaatttaaatttttatttatattactactatgtaaacaggtataatgagatttagtattttgttatttgttttataataactctggaagcatttatttatttaatagcttttgttttttatttttaaagaaccaacaagaaaaccttgggaaagaacaaatacaatgaatggcagcaagtcacctgttatctccaggtatcaatttttttctctaagttttatattttatttgtataaaaaaaaattaatgcattcttagtgtagaaaaaaattgaatggtaagaaattatacagaggagcccataaaactctcgtgatcctcctagtattggacaaccaccaagcctcattatatattactcatctacattactagtgattgataaattctaccctacatttattaaccagatgatctgagattttaagatagctttctttttcccaatttgtattttgaaaaattcaaaactacagaaaaattaaaaggatagtacagtgaatatgcgtatacccatttcctaggtttaacagttgtcaacattttgccccacttgtcttaaatatctacctatccacacttttttcccctctgattagtttgaaagcaattcacaaataagaactgtttcaccctaaatacttcagtgttttttggaagaaccaggacatctgctatgtaaccacaataccattattactctcaagaaatttaacattaagcaataatattatctactatagtatatagtcacatttccccattagttccaatgacatagattttatgtatatatatttatgtatatatataatttttggagccttttttaaacctgaatatcagctggagagaaaagagagcaaaataaaacatacatctttgaatttgtaaagtagaaacatgtatttccctatctcatttgaaacttgtaagtgtaatcaagttagaaaagatagtatccagaaacaaggctagttaatacttgtttctacaagtacatgtgggcatatttaggcaaatttgttcttcctttagctaggcatactttattttcatgactaaatttatatcacagctcctgaacatagatgaaaccttttcttggtttatgagacagtttaaaggacttgtatttttcccagaaaaaaaaaaagtatgtatttagaaa

SEQ ID NO: 5047 - DNA, 1066 bp, Homo sapiens
tctgttattaaataaattcttgttcactccctttgtgattttataacatttgaacatttctcttcttgccccccattttgtgggataaaaacaactctacttcaaatcctatggtatttaattatttccgagcgttattttgaggttttactttgtactagtaaattcctttacttcagtgattctcagccttggctatccattgaatttaaatgtgaagtattttttaaaatgctgaagctgggacttactcctccttcatgtttttaatacagccactttgactgtaaacaattaaatgtatgtgttcactgttactgaatttactgtctcaacacttaaggttaatgtggattattttgggtctgatatttcaagtagtactaactgccatcctatatactagtttgttttttcagggacgcttacctctcttccaaattttataagtatttattttgcttatttaccaaatccccatgaaaaaaaaaagtcttaattagatgatctgttgcatagttctattactaaagctctaacctaaagtaagtagttatatatacttggaccttacatttcagtatctttcaaaaactgatctagacttttacaactatgataaattggactcattaagtaaatacatgagtcagtttaatttagcatggcattctgcgtaccttcccacataaaataatatcactcagctctattgttgatggtcttacttaacatttctctctctcaggcattgtcttgggaccacttgcacctccacctcctccaccactcccaccagggcctgcacaggcttcagtagccctccctcctcccccagggccccctccacctcctccactcccatccaccgggcctccaccgccccctcctccccctcctctccctaatcaagtaccccctcctcctccaccacctcctgccccacccctccctgcatctggattctttttggcatccatgtcagaagacaatcgccctttaactggacttgcagctgcaattgccggagcaaaacttaggaaagtgtcacgggtaaatacctttc

SEQ ID NO: 5048 - DNA, 1439 bp, Homo sapiens
ttaaaattaacattcattataggatttaagaatattccttatggcctaattaaaaagtcttaatgtggtttgattaaacagtggttggttggttggtttattaagttaatttatgtatttttagctacctaattattttctggagttatggccaacaaaacaaaacttttccacaagttagcattgaataggagcattgaacccttcatattaaatgttttgccagctttactagttttgctatttgttgtttttaaaaaaacaactaaatttattcttctgtttatggtcctattcatgtgattttaatgtcctttttcttgtagactaaataaaaattaagactaatactagctttttcttgtaaaagaaattagtcaattaaatttattaatccacttattagataaaaggaaacttatttcatccccttctgaatctcaaaatgtatttacaagttaaaatattcttgggtgaaaatagttatttgcgtttgtgcctaattctctgatactaactgtagtctacatttatacattgtgtctgaatgctggttttgtggcttcactagctccctttttctctctccttttttatcctgtcttttgctgctgctttccaccttctgtccagctccatcttcagacagctccctgtataacgctccacttcctgagtattccagttgccagcctccttcagcacctcctccatcatacgctaaagtcatctcagctccagtgtcagatgccactcctgattatgctgtagtgactgctttgccacctacttccacaccccctacaccaccactgcgacactcagcgacacgttttgcaacatctttaggttcagccttccaccctgttcttccccattacgctacagttcctcgtcctctgaacaaaaactctcgaccttcttctcctgtgaacacaccctcttctcagcctccagctacgaagccctgtgcctggtctacttccaatttttcgcccctccctccatctcctccaataatgattagcagccccccaggcaaagctactggtccaaggcctgtcctccctgtttgtgtttcttctcctgtgccccaaatgcctccatcaccgacagcacccaatgggctggttgactctgtaacatatccagtgtctccaccgcctacctcagggccagcagctcctccgccgccgcctccactgccttccctcgcatcactctcacactgtggatctcaagcttctcctcctccaagcacccctattgcctcaactccctcatccaagcctagtgttctcccttctccctctgcagctgcccctgcctctgttgagactcctctaaactctgtgctgggagactcttctgcttctgagccaggcttgcaggcagcctctcagccggccgagactccatcccaacagggtaaggctttc

SEQ ID NO: 5049 - DNA, 1195 bp, Homo sapiens
cactacacctggcccattcagtaaatatttattgagctattgctgtggccagtcattgtattttctgaaatattatttgtacaattaaatttgatattaaggatattacaattacaaatgttttcactaaataattaaaataatgacttggttattaaagtggtatgttatttggaaaattcatttacttgcaacactactcatgaaaagtacagaataaaatgaaatgttagtgcaatgtgctgaagcattcagccaatatgatgctaataggagaaatgattttcatttgtatgaaacagtctctatccaaggtagccttcatgtgggaggagagatgtttgcatgctctacattgcttttatttgactcagaaatagtttacataggtgaaaagaatcgctttttcatgatgagtagccatagatgcatgtttttacttttttttttttttttccagacaactacaagaacagcaacggcaaaaggagctggagcgggaaaggctggagcgagaaagaatggaaagagaaaggttggagagagagaggttagaaagggaaaggctggagagggagcgactggaacaagaacagctggagagagagagacaagaacgggaacggcaggaacgcctggagcggcaggaacgcctggagcggcaggaacgcctggagcggcaggaacgcctggatcgggagaggcaagaaagacaagaacgagagaggctggagagactggaacgggagaggcaagaaagggagcgacaagagcagttagaaagggaacagctggaatgggagagagagcgcagaatatcaagtgctggtaagaagtttacaaactcttctgtgttcttgtatctgagcttggatgatgtctcttgtgcagtcatgtgttaaaatatttcacatttgagatgtttgggattaagccatacaatttgaaattatgaataaatatgcagcaattactactttaacattttctttttatttctctctgtattgcttttattgcttggagacttaaagaaagctcttggaaatttttattctgccattctaattcttctaacaccctataaaatggctataaagtgtaagtgtgtttttatgggaaattttttatactggatgaacttcaaatatatttccctcatgagatcacttaaattgtctcaaatactatagta

SEQ ID NO: 5050 - DNA, 1175 bp, Homo sapiens
ttttacagaaaattattgatgtaaagttttggatgtcactaaagtaatagtaaaaaaaaaaatttacttttgtttgtctcatctcaattttgagtgtcactttgatttcatataaacccttccccttttcatagatcatcaccttctcattgagttttttctcctaaagagaatttacttcattgacacttaagctaaaatttaatgtaaatagcctaaataaatggctgtttgatctggccacacatttttaataagacattttgtcaagtatgtatatatatattgagaaaaaaaatagtaacatgtggcttggtaaaaaatgaatagctgacttttagcaaaccaaagatattcttattttgtatcagtgaatataaaactctttattgcagtgtgccgtttataatggctttggtctctttccaactagtaggaatgagttaatcttaagcacttccaagcttaaatttttttcagattcaattctcctaaatgagaatatagatcttgtgaaattaacactaatagccacagatcttggcttcctctaccttatcttcattgactttaaaaatatataaccctaaaatgctggttgcactctttgaccgtataacttaggaaataactaagttataagtgcatcatttgatctatggctgcttacagggtttttccaccaaaaaacgattgcataaatttttttaagagcctatgttaaagaggatgcgtttttattaaattacagagcttccaggatgaggatctagataggacgtatgtataaatacattttgaacatttcaaagcaccttttagtttatgtgaagttcttcagatggccccgttgtccttcgaagcttctaacaccaaggtgtctgttgcagcccagagcaaggttactgctacccaggacagcactaatttgcgatgtattttctgtggtaagcaacattatgtttacattactttttcaagctgtggtacatgctacttgcgcatttccataacttttgttttcttaggccatagtctggtttgtgatatttgggatatatagcaagctattgtttttatgttgtgatatttgttgtggttcatgtaggtgatttggtcagctttgagttggcttgttagcgagcattagaattagttagaattaggatcttaaa

SEQ ID NO: 5051 - DNA, 1049 bp, Homo sapiens
gaaagagttaatggtatcagtattaagcaggaagttctgttaggcttatgcatatgatggcatgaataatttagcatcttcaggaaatgcaaactgcagtagaatttaagcaacctatcagaatttagatcaatattttacatgatagtatgaaattaaagtcagtggaaagaagatgcttaaagataccaagtgaagaatgttaatagtttaaactgtgagaaagactgggaattttttattggaaatgttttgtcttacgcagcaataatggtttacctgcattctgacacttgtcagatgactttttgccaacatgattggtaatgggatgtggcagtatctttgctgtcaaagaagagataatttctcaggtttttcttgtaagttttaaaaattgtccttatgggtttttttttctctttaaatatggaataaaggaactgaagggtaaaacctgaagactagtcatgtttctttaataaaggttttatagaagtagccatttgcaaacgtcggtaagacagatttttaaaaaaacagtttaaacttataattattgaaaatattctaaattgtttatctcctgtggaatgatctcattagcttggtagacattttatgtgtacgcctgtggtctttctatatcttatgtcattactgtaaataaatattgtgcatgcaactttaatagattgggtggttggaagtacttagcaaaggtgacatttatcaatcttattttgtgtttgcaaaaaaaatacagtgtatgtaatattttcaaagcaagacaattggattatgttaaataatttctaaaaatgatgaaaaattctcttttatttaagacattaccatttttagatgtgtgttatttaattataaattggtttggttctgatttttctaaaacttttagttagcatgagttgtatgttttaaataataacagtcttaggggagatctaaaacactgtcttgtttgcctttatgtgggctttcctaagccccagtgcattttaaccactaattgtttcttggttaatacc

SEQ ID NO: 5052 - DNA, 1041 bp, Homo sapiens
agcttatcccctcatacatgtgtgtttatcatttatatatatgtactttgttgttgacaagttgagtacattataagacgttaaaaaacagtaaaatggatgagaaaaattaatgaatggaagtgctactatttttttccctgccccaactgatgtatgttaagcttctgggatacttgttgccccaccctgaacatgactaagcaagggatcatggaacaagaacagtagcaatggagagagtttggagagagaaattaggaggttgcattaacaggacttgaaaattggttaaataggagtaaaagaaaaggtagtggatttctggtttgtgtaactgaacagataagagctctgattaaagagtcaaccaacactctgatagatgctaattgtgttaaagtagcattctgccagaatgtggtggtttctctgagcatatactcaataatgcccttagtaacaaatggtaggagggcatttgatgggcaagtcttgatctgtgttcaggaagaggaagcagagcaatgaacctgaggacacaggttactcttgcctttggaggcattagggtatgacagcattggtaaatgataggcccctcaacttccagttgcctcttcaagtgtctttagctagaggcagggccattcatttcacgactaaaaataaacggcttacaaaacatggtggactgaggaacatattaagactattgccagtgcagacaaataatttttcagcaagttatcaactgatagaagtgattttcatattggcttagaagggaataaaatgcattcgggtcataagttgggagaggattgcaagaaataaaggatgggaaaaaaacccaatcatatatacagttttgccttaaggttgagtgaaaaaaaaaaggcgggggggaagatgtttatgatggtacattttcatgtgtagctatatatgcacgatgctccatttcctgagatatagaaaagtttttttatcacattttaaaacaaaatttgaaataatatttttgaaaatgtttcaaaa

SEQ ID NO: 5053 - DNA, 1049 bp, Homo sapiens
tttttttgtttttgagactgagtctcactctgtcgcccgggctggagtacagtggcgcgatcttggctcactgcaacctccgcctcccgggttcaagcaattctcctgcctcagcctcctgagtagctgggattacaggcacatgccaccaacgcctggctaattttttgtatttttagtagagacggagtttcaccgtgttagccaggatggtcttgatctcctgaccacgtgatccgcacgccttggcctcccaaagtgctgggattacaggcatgagccaccgtgcccggccaattttagaacatttttaaccacaccagaaagaaaccctctacccttaagtcattgtccctttaccccaattcctccatacctcccagcatctggcaactactaacataatttctatcactgaagatttgccagttcttgacgttttatataaatggaatcataaaatatgtggggttttttttgtgactggctttcaattagtgtactgttttcagggctcatacatcttgtagcatttatcatgcatggcattttgaaaagcaaatcttagttaaaaaacatgtatttatgtatctaggcatgctttcttagttttagttactggctcttattttaattgtgtgagtgtggtgtatagtgaaaagtaatggctaaatcttaagaatttttaaagcaaagattaaaatcaaagcaagaagccttcctcagattctttagttttttttttttttttaaataaacgttttaaaacttggtaaattatgtaaaggagaactgtgtagcattttcaatgccagattgaatgtaaacagggatgaattcttgaccaaattgtggaaatgtctgaggtttattctcttggtccaggctcagttttcttgcccagaattgccctatcttcactgccttcattttttccccacccctaagtatgttactgtagttatcagaaacctcatgcctttgtatttctcttaattctttttttctcctataaaagtgggagaaaacagacatggtctttgaaagtc

SEQ ID NO: 5054 - DNA, 1025 bp, Homo sapiens
ttcttgttcactaactgtctgggaaagctgctttagcttatgaagcctcatttttcatgagcgcagcttttagtcttacgttgtgggacttaagacatcttgtcctgccccaaggtgggaatgattaaatggctaaaaagaggcagatactatttttgtgataaatatgggtttcatgtctcatagcaagttattttagcctggagtttgttgtcatacagacactatattctgtctgcctttcattcccttttctctacttccttgtttctctggcagttaggcaccttataatctattgtctgatgcatgtccagctagtgacttcagttcttccaggcttattttacaataggcttgatctttattcagtggtgctacaatgacctgaggatgtcatctgtgattatttgcatgctttcttacatgaggatagtaatttgcatgtaattactttatctttattcatgaatttttatcctttattgctcataaattgaagaagcattttgctggatgttaaatagtcaaaaattgtgatacctctgtgtggaacattttcctcttaaaacaagaataaagagaggctttaatagtctgtcttgttttccactgatgataagagatgaattgcaggaaccacttccactctgatgagaccattcacaacacacagcagcagccaaacctgttccacgatttttacagcttaatctcggctgtgctttcgtgcatttggaagcgtgatggtgccctgtcaggtcgcccatgtgcatattttggggcattgcctctgagttaacattgggcattcctgttttcataatctaggtaaggtagaaaaattctaaggagtcttttgaagatggtgttgaatagcagtatctttgaagttagttggtatttcatatatgaaaaatattgtgacattatttcattaatacataaaaaattcctaaggggtagatgctgttctaatctaagagaagaaatgctgtagttaactggaattatttgtattcctg

SEQ ID NO: 5055 - DNA, 1043 bp, Homo sapiens
ggaaatgcaaactaaaactgcagtgataaagcattcatacccaccagaattgctaaaataaagactgacagtaccagttgtaatgttgcatagtatgtagaagtagcacaagctcttgtatactcttgtggaaatgtaaattactagaaccaatttggaaagctacttggaattttctactagagctgaacatacacatgtcctgtgatatttccactcctgggtatatgcccaacaaaaatgaatgcttgtttgtaccaaaagacatgcagtagaaagttcataacatcgcaatttttaatagcccaaactgcaaataatccaattgttcattaatgggagaatggttaaataaatatgatttatacaaacgactaccatagagcagtgaaaatgaacaaaccacagctgcatgcaacaagtggatggctcttacaattttgaggataagagagcagatacgtttaatacatgttgtataactccatttatataaaatccaaaaacctacaaaactcgattaataataggaaataaatctaatgaaagatacttaagacccctatatagatactcaagaccctcctcagaatgatatgttagtttttggatttcatataaatgtagtaatttatgatgttagaagtgtggctagtaccttttgggaggtgggaggagttaagaagaggggcttctggtgttgctgtttgatttcttaatcagggtactgacttcatgtgaacattcagagagatacactcttaggttgtgtatacttttttgtatttgtaaaacttcagcaaacaagttaaaatatatttaatgaggaaaatttttttttgttttgctgatttactttttttttttttgagacagagtctcgctctatcgcccaggctggagtgcagtggtgtgatcttggctccctgctaactctgcctcctggattcacgccattttcttgcctcagcctcccgagtagctgggactacaggcacccgccactgcgcctggctaattttttgtatttttagtagagatgg

SEQ ID NO: 5056 - DNA, 1030 bp, Homo sapiens
agtttagtgaatgaattagatactcaaatttagaagaaaccatttcttgtgttgcttatctaagtgttcttcgtggatcctgctctccttttggtcttttaattatactttattttttttggtttgtcttcaccattagactgtacacataaagacaggaagcctctgtcttgtccattattgtttccagcacccaataacagcactgatcgttgactgactcctaggtttgtgtggctatgtggaacacttagcatattttaaatattgcaagtttgaatattttattttattttttacagtgaacagagtatctgtcaggcaagagctgctgtgatggtttatgatgatgccaataagaagtgggtgccagctggtggctcaactggattcagcagagttcatatctatcaccatacaggcaacaacacattcagagtggtgggcaggaagattcaggaccatcaggtaaggctttactacaattgttgttaaaaatgatttagtattacaaaaggacttggcatattccgtaaaataaagtagttttaaaactgtaatcaaaatagtctctctctgggaaaaactgaatataaaattgtctctccaccctttctaccttttatgaagcctgaacttaaacgaagatttagaacaagttgtacaaaaatagaaatacaagttcttttatgatgaattttcattagattttctggccttcaattagtttttgaaatctaaagcaaattaaggacaaacaaacaaaactctacttaagtggcagattgtatgtttatggaattaatttcctgccaatgtttgggatatggggttagaggagggagttgaaagtatagatagtttcagaaaatactgttaaattcacatgtgatagaaaaatagtaggtattgaggttgctggaatagtttggcttttgcagttcatgtctggggcgacagctaagcttttactaattcctcgctctggatttcttagaaagtagctggattatctgattacttgatttct

SEQ ID NO: 5057 - DNA, 1050 bp, Homo sapiens
taagactacaggcatgtgccattgtgcccagctgatttttaagttttttcatttctgtagaggtgggggtcttgctatgttgcccaggctgcacagctgattctcaacctctgggagcagaacagtgcagagtgatgagttgaggagctctgagcatttagagtgctagtggtatggtttgtggatgggaaggggaggagtggagagattgtccatttgggcattggaggtcagaaaaggaagctttcactgtcgtatttcagggctcttactccaagtttacagatgtttactttttatacttagtatctctcaccacttttcaggccacttctctcacaaatctttaattgggagagagacagtgccagtccttcctgggtttaacatctgatattggtagagatgatatgcacaatatattgtgagagcacaggaaataagttcttgttttgggggagtgtaaagctttcaagaagaggtgagtttctgaattctcaaggacagatcagaattagaaggtatctgggaagatgaaaatggggcagataggtcaggaagaggggaaggcgtgttattgctgtagttttagactattttgaacaccagtgtgctcccagcactaggatggtagaataatgtctggcacacattacatgcttaataagtattttaaagaaaaaataaatgttgaggaagacagaggcccaattatagtggaccctgtacgtgatgctgtgaagccagagtttatcctgaaatgagtctttgaggtatcttaaccagaagagtggcatgatcagattttatttataaaaatatccctctggaagcattgagagggaagaataagattgcagtgagagatacaggtaaggagatttttgaaataagccagttgaggaactagggagggcccaaattaaagcttttgagcattgagcattgtgaacaaagggtactgatgcattgtaggagtcttttggaaatagaattgacagggcttggtgactgtgtgtgtggagcagtgagggtcacggaggattctgg

SEQ ID NO: 5058 - DNA, 1035 bp, Homo sapiens
gacacagacttgctctattgccaggctggagtgcagtggcacgacctcggctcactgcaacctccgcctcccatgttcaggcgattctgcctcagcctcctgagtagctgggactacaggcatgcgccaccaagcccagctaatttttgtatttttagtcgagacggcgtttcaccgtgttggccaggctggtctcaatctcctgacttcgtgatccgtccaccttggcctcccaaagtgttgggattacaggcgtgagccactatgcccggccccaacttttctttcaaagtttgttgaaccattttatactctcaccattgctgtgtgggagttagggttaaaccatgttttagccatcctgctggttatgtagtggcatcttattgtgattttaactggcgtttccctgatgattaatgatttaacacaaatttactgagcatttatatatcatgttttgtgacatctgttcaacttatttgcccaatgttttattggttgttggagtttcagaaatgttggattcatgtcagatttatgtttcgtagatttttttcttcatctgtgccttgcctatgtatgcattctctcccttttcccctcctccctctctttcttcctgtaacagctttattgagaaaaaatttatatactctatgcattttcttaaaagtgtctttttatgggagaaaattttaatttgccttttttccctgtaattattgagaagagcttttgccttcctgtgatgatttttctcctaggtttccttctccaagtttatgggtctagcttttaggtttaaatcgatatatcttgaataatttttttgtatggtgtgaggtatgcattgagattttttttctgcatgcatatccagttgttccagcaccacttattgaaaagattatcttttctccactgacgtctttttaaaaaattagttgtctttatatgtgttgatttctggactctgtcctgtttcattgatatatttgtctatttttgaggccactaccataccctcttaat

SEQ ID NO: 5059 - DNA, 1050 bp, Homo sapiens
tttttttttttttttttttttttttgagacggagtctgtctctgtcgcccaggctggagtgcagtgacgcgatctcggctcactgcagcctccgcctcccgggttcaggcagttctcctgcctcagcctcccaagtagctgggactacaggcgcctgccatcatgcctggctaatttttgtatttttagtagagacagggtttcaccatgttggccaggatggtcttgatctcctgacctcgtgatccgcccaccttggactcccaaagttctgggattccgggcatgagccaccacacccgactgttttttttttttttttaaacgtagtttcgctcttgtcgcccaggctggagtgcaatggcgcagtctcggctcactgcaacctccacctccggggttcaagcgattctcctgcctcagcctcctgagtagctgggattacaggcatcaccaccacgcccttctaatttttgtatttttagtaaagacagggtttcaccatgttagccagactggtctcgaactcctgacctcagatgatccccctgccttggcctcccaaagggctgggattacaggcatgagccaccgcgcctggcctgaagctttgttgaggtatagaatgtgtgagaaaaaaatgtatagtccatgtgccaatgattctgataacacaaaatatgcttagcaacaattctataataaaatcatcattgtcatctggtcttaacttaaaaagtgttatagcattaataagctgtctttaatagttcacctgaaaataagaccaatgaagccaatggaaaagtaaatgtattttataaaagattctaattgaactattcctaactagattctcctttgcagaaattgtaggatattatattttctaggtaatatttagatgcttattcttgctcaggaagtagattatggggcttctaggtggagaggctggcggtagaaaggctgttttggaggctgttgtaatctaggaaagaaagaatgcattaatgtagtggcacagtggaacagagtggaggaggtgtt

SEQ ID NO: 5060 - DNA, 1026 bp, Homo sapiens
cctcaggtgatctccccaccgcagcctcccaaagtgcaaggattacaggtgtgagccaccgcacccagccagcaatcacattttaacttgagatttggaggggacaaacatccaaaccatttaagtcacagcactttactccgcagtgtgaataacacaggcattctcctacataatcacagtacagttatcatactctggaaattgaatatcatctaatatactttccatacccagattttcttagatttcccaatgatatttcttactgtcctccctttagccttcctctttctccattcaggattctaccattacatttcattttcatgtctcttcagtctctctttagctttgtttttctttcttgatgttgccacttttaggaggccaggccagttgttttgtgaaagatctgttctctttgatatgtttcattttggatttgtttcattgtttttgcatgaatggattcaggctaaacatttttgggcaggactgtttattgtattacctagtgatgtgttcttttcagtccatcatctggaggcacctgatggcagttttcccaatattgcgaaattaagtttgattattttgttaaggtagtgtccaccagatctctccattttaaagacatccttttctctaattactcagtggactgtagagtgatgctttgaaactgaataactaacactccctaactcagtgatttagcacccgttgattttttttttttgcctgaatcaaatattattatagtagttttaaatggtgattttccatttctattcttttgttagctgccattcttctataattttgtctttatattttactgggtgttaagattgctattccagctttcctttgtcttttacaccttttcccattcttttatttttttccatccctttttgtcctgttttccaatagatggatagaattttctttctctggtttaaaggttatacatttgtgtgtgtgtgtgtattcttagccatttgcccttaaaacatagag

SEQ ID NO: 5061 - DNA, 1047 bp, Homo sapiens
atttctcttcttttggatcttctttgtctttttcttgatgaatcttactagaattttatctaggctattaatatttaccaagaaacagcttttggttttgttatcttcttaattgttcatttggactagattttcattgatttctgtcctttattatttctttcctttttatttatttggcttttctttgttaggcttttcttttttttcaccttcttatttctggtaaatgtttaaagccatatattttcctcaagttcttccttggctctaacatatattttctaaatgtttcctgatttttattgatttcctttttaacgtaagggttattaagttatattttttttagtttccaaatttgaatatttataaaaattattgattcctgagttcattgtattatatcagaacataatctgtatgcccttgtgcctaccacatggtttagtaatataaatgtttagggtatgtgagaaaaaaaatgtatccccgtccattgggatgtatttctttgacctaaggaagtgtaggtcattgcttttaggactttcttttttaatataagtattttgtaattggaaccttctcttttttttttttttggcggggagatggagtctcactctgtcacccaggctggcgtgcagtggcgccatcttggctcactgcaagccccgcctcccaggttcacgccattctcttgcctcagcctcccaagtagctgggactacatgcgtccgccaccacacccggctaattttttgtatttttagtagacacggggtttcactgttagccaggatggtctcaatctcctgacatcgtgatccgcccacctcggcctcccaaactgctgggattacaggcgtgagccaccgtgcctggccgtaattggaaccttctgtttgtactgttgagaacttgaatttttttgcttatattttgtctgcttgatctatcagtagtctgaacagagttgattaagagtaattgttgatttttctctgacagttctgttaattgttgaatatattttaagacctg

SEQ ID NO: 5062 - DNA, 1044 bp, Homo sapiens
accacagacccagtggcttaaacagtactttcctcacaattctgaaggctagaaggtcaaggtgttggcagggttggttccttctgaagcctctttcttggcttgcagatggctctccttctctgtccacagtgatcttccctctgtgtgtgtctgtcctaatcttcttataagggcaccattcatattggattagggcccacctgtatactcagtttacctcagttacctctttaaggccctgtcttcaaatacagtcacattctgaggtaatgggggtaaggattttcacatgtgaatttggtgggtgttggaggggcacagctcagcacataacaaatatttttattatctcatgcatttaaaggagtatcatttctgatacacttcagaaaggaatgtattagtgtgatgaagtggaaataactcggacattgtagtcagataggtaggcctggtttgaactctagccttgcctcttaatagttccctaaatttttgtaacttctctgagacttgcttccaaatctatgaactgggagtaactgtacatcacagaatgatggtaagaaattaaggacgatgtatgttaaaagtgcctgacatcgagttgacttctaaatattatgttcttactggtcttttctctcccccactccccaaagtagtgttttgtatccttcccccttatttaatatcagaaggtgtcaatttcgagtgtagatatgtatcattttaaaattgcttagtctttctattcacaagtggttgaatatcagcagtttcttaagattcaatctacaattgtatttacccagtcgcttgtcagaatttccaatcatcatgtagttcagtttaacattttacatgctttaagtgaaacctacagaagtgtaatctgctgagtcagtggatattcacgtttcaaaggttcttgatgcataaggacaagagcctttgcttttttatcagcaaggtatgaggatgcccttttcccactctaacattactgttttctcctaagtatcaaagtctaaaaggata

SEQ ID NO: 5063 - DNA, 1020 bp, Homo sapiens
aggaaaaggtgagctattgtggtgaggccttcacaggtctgtgtgcctggcactctcagctgcattattcaggaccttgggctgtacgtagttattttattggatttgtgtgagaagggctagttttgtgattggttaagtttattgaaaataatttttttttttttttttttttttttttgagacagagtcttgcactgtcgtccaggatggagtgtagtggtgttatgttggctcactgcaatccctgcctcctgggttcaagggattctcctacctcagcctctcaagtagctgggactacaggtgcactccaccacgtccagctagtttctgcatttttagtagagatgaggttttgccatgttgactaaggctggtctcctggcctcaactgatctgcctgccttggcctcccaaagtgttagaattataggcgtgaaccgctgcatctggccaaaagttgacttattttgaatggactacattatagcttaactagattgtacgagtgcttatcaactaatatgttaaaatatggtaattcctttttttttttttttgagatggagtcttgctctgtgttgcccaggctggagtgcagtggtgcgttctcagctcactgcaacctctgcctcctgggttcaagcaattctgcctcagcctcccgagtagctgggattacaggtgcctgccaccacgcatggctaatttttatatttttagtagaaatggggttttgctgtgttggccaggctggtctcgaactcctgaactcagatgatccacctgcctcggccttccaaagtgctgggattacaggcatgagccactgcacctggccaaaatatggtaattctaataggtcacattcaggtgtattttttttaatggtctaatataacattaaaagtatttgtgaaaaattccattttggtattttaagcataatctatccaaaaggaacattaaaaaataataataaaaggggaatgtgaggtttaggtttttaagatgttc

SEQ ID NO: 5064 - DNA, 1050 bp, Homo sapiens
tttaaactaaccttttttgactgtttcaattttagatttatcttttgacttgccatgatggaagatagtggtttagctgttttacattctcctccccacgatgcatactttccatcttctctatatggttatataaccaattttggttaatcaaagtttatataactattcacattggagccatgctgtgtactattttaatatggttactttttttttttgaaacagctttttgttttagctggatttaatgaatctttgtgtttatttgttttccatgcattcatcacttactcagctcagactatactactaaagtttaactctccttttaatataataaacacatcaggtaatctttcagtttcttttttttttattttggatacctctaactttgtgttccagttgaactgattgccttcttggcttgcttcctggagtgggatttttaccattttcatgggaattctttcagccttattctgttgcttttcattgtagctcccttagaaataaagcatgggaagcaaattctttgagacttagaatatttaagaatatctattagagcctactcttgatagataacttggctgtatttacaagtcaaggttggaaattatttttcttcaaaattttgaaggcattactcaagtgacttgtttctagagttgctctgaaaagtctgatgtcattttgattccaagacccccctccttttttttttttttttttttttttttgagacagagtctcgctctgtcgcccaggatggagtgcaatggtgtgatctctgctcactgcaacctccgcctcccgggttcaagcgattttcctgcctcagcctcctgagtggttgggattacaggtgcctgccatcacacctggccaatttttgtattgttagtagagacggggtttcgccatgttgatgaggctggtctcgagctcctgacctcaggtaatctgcccgcctctgccttccaaagtgctcagattacaggcgtgagccacggtgcctggcctccaagacccttataagaaagc

SEQ ID NO: 5065 - DNA, 1191 bp, Homo sapiens
accagagatcgcgccactgcaccccagcctgggcaacagagcaagactctgtctcaataaataaataaatacgtaaataaataaataaatttttttttttggtagagacaaggttgcccaggctggtctagaactcccaggctcatacagtccttccacctttggctcccaaagtgctgggattacagggactattatcttttttcaacttgaaatttttattgaaatataagatgtacagaaaagggcacatagcaccaactcagtacacatgtgtaaccatcactttatgccctcttctagtcacagtctttcaccaaagagtaaccccacctgacccagaacagcgtcaattagttttgcctgcttttgtactcatgtgaatagaatcacatagaacatattctgtatctgcctttttcggcctaacgttagatctgtgccgttcatctgtatcattcattttattctattgtgtgaaatactagtttattcattctaaggttgatggacatttggattggttgcagtttttggatcttataatgtcgtgaatattctgctatttgttttttcttgagcgtgtatgtgggccaaatacagcttttggagtggttgatcgtactagcgttaaaatgtcgccattggtgtaaataattcctctactttgttggctgtttcttttttttcttttaattttagttctgtttaggcatggagaagttgtaagtggttttcttttgttcatttatttggttagttttaagtttggattgtgaccccttcatccagagttttaaaattggaagtcagctctcttgagtcacataatcttggtatgaagtttaagatgaatgaaatgcaagcatacttgggaaaaaaaagaattttttttactggggacctatcgttcttttcttaccaaatgttaagagtatcccccaatatttttatagtaattataaaatcacaaatttattataaccccacagtaggtcctagagactaactggaacagaaagcaatattgttttaattgtttgatctttgagctctagtaaacttctctatcttttcttattttcttttaaaattacaaaataatgcgtacatattataaaacatttgaaagttacataagaaaatcaaaataatgtcactacttgagagaaaatcacgttagtacataca

SEQ ID NO: 5066 - DNA, 1080 bp, Homo sapiens
gcagcgattgggggtacatcccaggtacaggagatcagaaactcttgctcttaggacccttccagaccttccccatgtgtctcttcgtctggctattcatttgtatcctttaaaatattagtattggctgggcacagtggctcacacctgtaatcccagcactttgggaggccgaggtgggtggatcacctgaggtcaggagttcgagaccatccttgccaacatggggaaaccccgtctctactaaaaatacaaaaattagctgtgcatggtggtgggcgcctgtaatcccagctacttaggaggctgaggcaggagaatcacttgaacccagtaggtggaggttgcagtgagccgagattgtgccattgcactccagcctgggcgacagaatgagactccatctcaaaaaaaaaaaaaaatctttctaataaatgggtaaacataagtaaagtgttttcctgagttctgtgagctgctctagcaaattaaactctggggagagcttatgggaaccctgatttagagctattgggccagaagcacaggtcacaacctggggcatgagattggcattagaagttggggtggtcttctgggactgatcccttaacctatgggatgtgatgttatttccacatagtgtcagaattgagttaaatcataactcacttagtgtctgccagagaatctggtgtcaggagtgtgttgtgtgagagtagaaaaaacactgtttttttccccatctttaataataaaatatgctataaggtgtagtagagcattatcccttattaggaagagtttataattagttatttttgttgttatggctgaaccagacctttgctttgttctcagaaaatatctagcaaagttacacattttctttggttcaataagtgttgtttgttgatctagttgtatatttaaaaatagtgttaaaaataaaatatgtgcttattacacataaaattgacaaactgaaaaagtagaaggaacaagttaatcaacaaatatttattatcttcacaaatatttattattaccaccaggcactgttctctgccctggggaaat

SEQ ID NO: 5067 - DNA, 1003 bp, Homo sapiens
cggggcggccgggcagagacgctcctcacctcccagacggggtggcggtcgggcagagacactcctcagttcccagacggggtcgcggctgggcagaggcgctcctcacatcccagacggggtggcggggcagaggcgctccccacatctcagacgccgggcggccgggcagagacgctcctcacttcccagacgggctggcagccgggaagaggcgctcctcacttcccagactgggcggccgggaagaggggctcctcacatcccagacaatgggcggccaggcagagacgctcctcacttcccagatggggtggcggccaggcagaggctgcaatctcggcactttgggaggccaaggcaggcggctgggaggtggaggttgtagcgagccgagatcacgccactgcactccagcctgggcaccattgagcactgagtgagggagactccgtctgcaatcccggcacctcgggaggccgaggcaggcagatcactcgcggtcaggagctggagaccagtcgggccaacacggcgaaaccccgtctccaccgaaaaaatacaaaaaccagtcaggcgtggcggcgcgcgcctgcaatcccaggcactccgcaggctgaggcaggagaatcaggcagggaggttgcagtgagccgagatggcggcagcacagtccagcctccgctcggcatcagagggagaccgtggagagagagggagagggagagggagagggagaccggggagagggcatcagagggagaccgtggagggagagggagaccggggagagggagagggagaaaagtattactcttaaggatttgtgtatggagaagggtattgaggttgtggaatagaggtaggattggtgttggaggaagggttacttaccttatggaatcggaaatttgagacaggtttctgagtgaaaataggtaaatgtggtattgtaatataataagaaatacatatttggtctctgttcctggttcctggcaca

SEQ ID NO: 5068 - DNA, 1826 bp, Homo sapiens
tgacctcaagtgatctgcccgccttggcctcccaaagtgctgggattacaggcgtgacccaccgtgattggcaagggtggtgttttgctaactgtaggttagtttttctaactgtaggtttttaacaggatttatcacaaatgaaagacaatagaaaatattcaggaaacattgcacatggtaatggcaagtgtttcatgaaacatttagtgtctgtgcatttgtgtgtgtgtgtgtgtgtactgggttgtatatgcagtgtatttatttatcacaggccttaaacatttgagtaatgctgatttgggagatgaattgatgtaggcttggcatcttggggatagaaggtaagccattgtaggggtcctcggacttctttaaccttttgccctcctattgtgggccagaaagtaggccttctctctctccactggtgccatcaaactcctctgaactctggctcatgtctttcctttacctgcatgtaacgcaatgtaatttagtatagagtagaatcctttggaatttttttaaaggtgattcctggtagttgctggtataaaggtggttaaaaacagaaaacctaaagcacagagatagtgttctcatttaagtgttttaagtagaacatgaaactttctaagttgagtttttgtagagtgatcactgagaattcatctatatttcagaggaaaacaagaaagactggtaggtaggcacttgatagatttgtggaatgggtggagacagttctgagcacctgtctaggatcagtgaactacgtattagtgaatatgaagcagaagttgatagtaggaacagagaggtgattatcttcccctttttttctgtgctgtactatcttggagaggtgaggagaaaaaggttccaaattggccactagatgattgaaagaagtccctgtggccaattttgtatctggatgaccattcttttttaagtgagatgcgtgaacctttcatataaagagctgctggcaggatattgttttattaggttttagggatattggcccatggttcactttttctttctccccagtttttggaaaagttgattgctagtaaggctgattgctttcagggaattgtcattttcctccgggggatgtttggatgagaatggagaccagtttggcaagggcaacagctgttgaacaatctgtttgggattaggtgcaagttggtatgtagtggaaatctgcctcctggttcctgaaattatgttcctttgcctcaaggataaatgttttcctgctcattccagttacattcacttagttctggctggtaatgcttctgactgataactttcctcttttaagagagcttccttgaaagaataattgatagctacgatgaacaattaaaaatgttatgccttcccttaagattttgctcaggatttaatcataggttggtggtaacagaacctttcagttcaaaattagctgtatattatctaaccattttggtaaggggagagacttaaggtgctttctgatggtttagatggcagtatcacatgagatttattcatattgtgtgttggaatgtaaattctaatgacctttggaagcattagtagtaaaatttacttagctggctattcctaagcttactagtgagttggagttgcatgcgtgaatcatacctctgaccagttgtgatgatacaaattaagttgagtttaaggaagagactaaattaattgccatcctgtcaccacactgtccacttagcactgtacagctaagatcctttcagttttttaaaaaatacttttttaataccacagatataaga

SEQ ID NO: 5069 - DNA, 1050 bp, Homo sapiens
ggtggctcacgcctgtaatcccagcactttgggaggccgaggcgggcggatcacgaggtcaggagatcgagaccatcccggctaaaacggtgaaaccccgtctctactaaaaatacaaaaaattagccgggcgtagtggcgggcgcctgtagtcccagctacttgggaggctgaggcaggagaatggcgtgaacccgggaggcggagcttgcagtgagccgagatcccgccactgcactccagcctgggcgacagagcgagactgcgtctcaaaaaaaaaaaaaagagagatagatttaaagaagtaattcccatggccatactgagtcagaagggtgataagtataatgagaatggttggtgtgaaaggtcacaccaaggttctggaatttggtaataggatgatagcattgtcactcttaaaaagatgattaggcaagtggacatgggtgaagattttcccaaggagatttgttttaattcgggacacattttatcaaatgatagtatatcaccataaggaaggaggctttcaaagactacaaaggactatctccacacttttttttctttttttttgatggagtctagctctgttacccaggctggagtgcagtggtgagatggcggctgactgcagtctctgcctcccaggttcaaacgattctcttgcctcagcctcctgagtagctgggaatacaggcgcccgccaccatgcccagctaatttttgtatttttagtagatacggggtttcaccatgttggctaggctggtcttgaactcctgaccttgggtgatccgcccaccttggcctcccaaagtgctgggattacaggtgtgagccactgcacccggccctatctccacatttaaggagcttatgatctgattgaagtgaacataccttcagaaaataagatagatctgatagaaagtagcaggctgagattgaggctccagatttggtaattgtgtgaaaacaagaatgaatcaagtatcccaagttgcatggaaaagtagtgggtttgtattagaggcctgggacatt

SEQ ID NO: 5070 - DNA, 1077 bp, Homo sapiens
tgcactccagcctgggcgacagagcaagactccgtctcaaaaaaaaaaaaaaaacccaacaaaaaaacactacttgtcgggtactatgttcacaacttggggggcaggaagcccaaacctcagcatcatgcagtgtacctgtgtaacaaacctgcatacccctgaatctaaaaaaaagaaaaatttgttaatggaagtattatcatatttttgaatatacaagtgaaattatgagtctttgctgataaagacttaatttctttttttcttttctcagtcaccaggttagtactggtgagctcaacaacataaatgagatagcctgtaatctaacagccttagaggaagcatttttaccaatattaagccaaacagaaaaattgggaaatataatttagaaaaacaagggaatgaatttactttgctaattatagacaaaattaaaaccacctttgttttatttttctctaagcctgttttttcagagatctcttaaatccgtagtaagaactctagtgtcttgaaaaattctatctgcctttcttttgcattttagcataatccagaaccttttctgtaataaaaagttcccctacttttaaagccttaacttgcaagtttttctgtttcaagttgagaaggttctgtaaactgggccatggtgggggtgctggagtggaggatttctctttatgtcttatccctgtgcccctcactgcttctagttttttccttttgaaatccatccttcgagttacttcctggtgcaaattactctctgtgatcccctatcccctagctcttataagctgcccttacatgcttaaggcttgtggttatgtcattctgccatagtgctatggtctgaatatgtgtatgctcccaagattcttaggttgaaacctacccccaaggtgatggtattaagagggtaggggctttgagaggtggttaggtcaggggagcttgctccttttgcccttctgccatatgaggacaaatagaaggtgccatccatgaacagcatgccctcaccaaacaccatatctgttggcaatttgatcttggacttcccca

SEQ ID NO: 5071 - DNA, 1060 bp, Homo sapiens
atattttcatacaagtttatacttaggtgtttcagtaacatttttcccaaagtttcagacataaaaataacgcagggggctaaattataaataatatcaatttaagacacattgtattaaaactgtctttctcattttgtaaactgtagagcccataatttttcttttgataggccagaagaaagtttacctatttccttcccaatgactgagaacaaaaattctcactagaggattttatttgtgtgtttttctcatatgatatgtacttgtgtcgtgaaataccattcctctttctcagtttagtgtctcatatgtcagctgacaatgatttgaactgtattgcatggtgatacaacttgtccactcagctcattttcactagtatcagtgcctttgtagtgtatttatttgaacgctattgtggttttgcctttataaaaataactagagaatagaagaaaggaaatgttaatgctaacacagttgagataaagatggaagtcacttggttttccaaaagtggtaattctttggtgttgtagtctgttcttgctgctataacacaacatcttagactgggtaatttataaacacaaatttatttctcacagttttggagcctgggaagcccaatattaagttgccaagagattcagtgtttggttgaatgctgctctctgcttcatagatggcgccttgttgctgcattctcacatggtagaaggcacaaaggcaggagggcctagctcttttttaagggcataaatgccattcacgaggttggaggccttgtgacctattcacctcccaaaggccccaccttgcaatatcatcaccttggtgattagtttcaacatagggattttggagagacacatacattcaaactgtagcatttaacctcagtagaacgatacccagtttgtacttaagctgactgtttatcagacaagatttttttgttggcactgatagaaactcaagttagttctcctggtagaggcaaagtgagagttgctggagctagggcagcttgaggacctcaaagatgagaaca

SEQ ID NO: 5072 - DNA, 2253 bp, Homo sapiens
gcgatctcagctcaccgcaacctccgccttccaagttcaagtgattctcttgcctcagcttcccaagtagctgggactacaggcgtgtgccaccacgtccagccaatttttttttttttttatagtagagacagtttcactatatgttggtcaggctggtctcaaactcctgacctcaggtgatccatgcgcctcccaaagtgctgggattacaggcatgagccaaagtccctggcctttgtacagatttgttttgcatacttctcagccttggtggggttaattgtggcttggcaaatcaagaaaaggagttctgtgctgttttcagactgcagaatcttgttgctatgcaacaaaaattgtcagtcagtatagggtatagtaaattggtattctctgtcccttttcaccacatgctcattttgtaatctgagagaagtggtttggggctagtttgcaaggttttattttaaaacaagcatttaaaaaattttgttgctatttgtaattggttatatttaaggtcggtgaagtctttctgtacttactagaagatacaataaaatgctagtgttcaaagggtttatagatctgtttccaagttgtttcaggttagagcagtgtatttttgttttgttgctgtaacaggggtaatattgccaacttccaaagagtaaattttagcttgagaattcaagttgtataatttgaacatcagaagtttattgtaagcacatcatattatttttaaatttatttatgaaaaacatgaacccaaaaaacccttttattgataaagttttttaaataggaaccctaaacttgtatgaagtctcatgtatgataatttattttctgccaggagaaattaaaatgcctttatagcaaatgggtgatggctaatagccttctaaaaattgtgataaaatatatataacacaaaatttacaattttaaccatttcgagtgtttcacatagttgtgcaaatatcaactgttcatctcctggataacaaccttttgcatcccatttagtaacttagtccagactgtcttctaaatcctttaattcgtttaatcttcgtaagaaccctatatgtacgagaagtacttttgttccaaatgagaagagtgaggcacaaaaaggaacacaaaagtagtaattagtggagccggaattcaaacaccaacagtccaactcttctgtgctctcaactattatgctatgttaccctcttttggaattactttcttttttgtttagtggttaagagcattgatttaaaaaaaaaattactttctgtagcttttccaagtaaagttaatacagtttaacagcattttggactgttaacaaatttagtttggctataaatccctgcaatcttctagacattttttttctaaatatttcaaaaggatgcagtttatgttattttatattgtgttatttgtatatgaaattatacatattatggttaattatatagaaaggacttactttcctttttcagtttgtttctggaccatttttcatgccattccttccaatagagaatgcaaatcattttctggtcatttaatgtaaataggaaggtacacttgctgttagagaattttaatatgatgccatccaaagactaaagccagttggcattggatcatccacttagtattctctaaatttatgatcttctttttcacgaataatctggagttaattgtagtattggcagtttagaataaagagcaatagggaggagtaaaaagggagaaaaacattgcaaggagtcattaacttccaattgatgaatagggatgagtttttgcagactctgctttttttctgccatgtaatatctctactaccattcttaagcatccttaaggagcttactttcctttgattttttttccccaccttctacttttttttttttttctgggacagtgtctcactctgttgcccaggctggagtgcagtggcatgatctcggctcactgcaacctccgcttcccagattcaagcaattctcctacctcagcctcccgagtagctgggattacaggtgcactccactaccacctggctgatttttgcatttttagtagaggtggggtttcaccatgttggccaggctggtcacgaattcctgacctcaaatgatccacctgccttggcctcccaaagtgctgggattataggcgtgagccacagcgcccagcctttccctgccttcttttctttcttcc

SEQ ID NO: 5073 - DNA, 1049 bp, Homo sapiens
atataatgtgcttttaaatcacattttttcagtcaacatatacagtattaaaagtagagcaattattcatgaagttaaaaggtcttttcatctttggaaatgttgagaaccactttttttttttttttttgagacggagtctcgctgtgtcacccaggttggagtgccatggcgtgatcttggctctctgcagcctccgcctcctaggttcaagagattctcctgcctcagtctcctgagtagctgagattacaggcgcctgccactatgcccaactaatttttgtattttcagtagagatgggatttctccacttggccaggctggtcttgaattcctgacctcaggtgatctgcccgctttggcctcccaaagtgctgggattacaggtgtgagcccctgcacccagctgagaaccactgttctacatagatgttttctctatttaatctgtttcttaggcggagattggcagccatttaacattctcaaaataaaggaggaaacctctaaacaatgaaagtatttaaagctaccgcaagaataactgcaatcttgttttttgttctctaggtgaagtagaattttgtgaaaaaacaaaaatgttttgtgaattgttactagttacctacaaaggcaatccataaaaatagtacaaacaaattgtgagtaggagaaaaacttaaactgttaagacattatagtcttttcttataaattataatttttagaaaataaactgaagggatcaaatgatgtctttaaaattaggaaacaaaatctgtgggtatgctattacctaggattaaaaaaacaaaacaaaacaaaacaactaactcttgctagatgatgctttcaaaagaaatgtagtccaaaaatgagcactggcactttttgctggtacatggagaaactttgagagtgaaggcatattaatactttcaagttgtaaataggctggaatttgggcttgtgattttatagttttagaatttatatcattagacttttaatattggatattagtttatgccttttttttttttttt

SEQ ID NO: 5074 - DNA, 1050 bp, Homo sapiens
gactttcccaaaccttaatttctttttttgcaaaatgggattaataattcattgccttgttttgaaatttgctataatgtagttagagtttttatggattgggcatattctgtttattgttttctttgtattgtaccatgagattaaaacaaaaaataaagttcaagcttctgaatgttgttttgccctttttgcttgcttgctttttcttgttttgagacaaggcctgactgttacacaggctgaaatgcagtggcgcgatcatagctcactgcaacctggaactcctgggctcaagccatccttgcacctcggcttcctaagtagctgggactataggcacctgccatcacacccactgttgccttttttaacttaatatgaaagtttctgttttttaggcactctgaaagcaaatagccagttaaattcttagagtacctgtattttaaaatgatgtttataatttaagatgaatatttaaattaaaaaccagcacccagacatagaatggttatttgcattacttagaactaagttctccccctagatctgtcaccctaccttcccttcataatgtgtggttcccgtgtggtcagccatcctgtctaaactttctcctgaaaaaaaggccatgcacggtggctcacgcctgtaatcccagcactttgggaggctgaggcgggtggatcatttgaggccaggagttctagaccagcctggctaactggtgaaaccccgtctctactaaaaatacaaaaattagctgggcgtgatggcgcatgcctataatcccagctactcgggaggctgaggcatgagaatagttagaacccgggagacagaggttgcagtgagcagagattgcaccacttcactccagcctgggcgacagagtgagaccctgtctcacaaccaagcaacaacaacagaaaacaaaaaaaaaatctactgaagaaaccttcccctgcaccctggagcacacagaagagatgtcttaacttggcattcagggccctcgagaaacagttcagcagtgcctttcaatac

SEQ ID NO: 5075 - DNA, 1058 bp, Homo sapiens
atggccgaatcacttcttagtactgttacagttaaatttcaacatgagtttcaagattcaaaccatagcagctctcttaaggtatcatttacatacagctaaatgcataaatcatgtatacatatagcttggtacatttttactatgtatacatacctgtgtagccaccaaccaggtctggatatagaacacacttaggccattaagttccctcatgccccttcccagtcagtatctttccaaatactcatttttttcagttgctttgtaaagagttttcatcattttcagtgacttcataaaggcctacatcttttggaatgtttgcactttcactttgtagatgatatgcattgtgttgctttgtaattgaaataacctgtcaatcattgagagactgacagggcaaaggtgaaatggcctgacatagaggctaatgctgctttgggagggatgtttaatggggactgatattataaatgtttagttcattagcggatatttttgtgttaagaatacttttgcttccctggcaacttctgtgtctgataatgaactttgattttaagacccttgtacctattttgttctgtattacatttttacatatatgtcgttatagattctctaatttattgcattggtctattattcctatgcaatctgttagctgtgagccgttagatctttatgaaatttagatttgatcagctcagccttgagtctgaactacttcagtgccttcccattgctcttggaattaagaccaagctccactaagctcctcctcattatggcctaagtcctgcacaattttactttctcagtgattccaaagtaagtaaaatgacccaataagaaaaatcctcaacaataacttacaaaaaagtaaaaatgtgcataggtatgacccattgccttagacttacagtttagtgggggaggagacattaattttcaagagctggcagagcatagtggctcatgcctataatcccagcagtttgggaggccgaggtgggtggatcagttgagcccaagagttcaagaccagctta

SEQ ID NO: 5076 - DNA, 1047 bp, Homo sapiens
actgttatctcttacctgaactattagtgtttcctcatttccattcatgtcccctgttcttcatgcatcactcagaatactcttaaagtggaaatcagatattgttatttcccatgtaaagccttcagcggcatcttagactaaaacccaaatttgtcataaaaccaaaattattaaggtcttgcgtgacctggctctgcattccaagttcccagcacaggcctctgtgagtatgcataagtatttgagtgaataataaacaaaatgactaaagggagttgtatcagtttttgatacacgttaccagataagcaagagtagatgagatttctagttaccccacattctggccagctcaggccattatcggtcttttaatctttgccaatgtgataggtaaaaggtgttacctcattggtttaatttgtatttctttgattacctgtagggtctctttgtttgtttattggacagctttatttttgtgtggatgtctgttcatgtgctttttctgttttcccaatgagatgtgtagtttttcttctaatgatttataataatgaggatattaactcttcatagtgcatatacatatatcgtatccgatattactgctgtttaacaaagcatctcaaagcctagtaaagctgttacccgggctggagtgcagtggtacaatcatagcttactgcaacctcgaactcctgggctcaagtgatcctcccacctcagcttcctgagtagctgagactgcagatgtgctacggattggctgggcagctcttcttacctggactcattcgtgtgttttccttcacttaggttcatctggtgtgtctatcccatccctctgcctcatcgctcacttaacaatagcagcctcctcatgacaacatgccctagtatgaaagctcttaccagacctcagcttgcatcctgtttgcttatgtttctttggccaaaacaagtcatatggtcaagcccaaagtcagtgggggaggtgattacacaaggacagatcaagaggtgcgattcattggtggtcat

SEQ ID NO: 5077 - DNA, 1050 bp, Homo sapiens
cttagaggtcctcagtcttctgtcctttttggtatctgttacatttgcaacttggcagcgggggagctttatgaagaaccaagaacttaagtaaaataaaatgaatagctcttgaggtcaaatctcaagggagtccaaattgctccttttacagttcagtgaagggatctttttatgcagtcttaataattattatatactggttatttgaatatctgctttgttctgcagtctttctcctcctcccccaaattctcatgttagactgatattgcaagcaaaattgtgaccgttcagtttttaacaatttaagatttatgtatcttaagttttcatttaaaacttttacttacagtctacttaattgtggtctttgcacaatttttttagaattatttttagaaaaataaatcaattactgttgtccatatgtctggtcagtatttttttaaattacttttttccttccattgtaaagtagtacagattttgaacagattttagaaggtatggaaagtataaaacatttatttatgaaatgttaaatccaagccatctagtattttaatattttaatgtgtagatttctaaactttttgtagtgcatttgcagcattgcagatcattgtgcgtgtgcatatgattatatataaaagtaagattatactatttaaaaatggaattatactatatttgtattgtgtattttgtagcttgtccctttccatatatataatatctatactttttacattttattatttttattttttaaatagggtcttaaactgtcacccaggctggagtgcagtggtgcaatcatagcttactgcagcctcgaactcctgggctcaagcgatcctcccatctcagcctcctgagtagctgagactacagatgtgcgccaccacaccctctaattgttaagatttttgtgcagagacaaggtctcgctatgttgcccaggctggtcttgaactcctggcctcaagtcatcctcccacttcagcctcccaaagcactcggattacaggcatgagctgctgtgtc

SEQ ID NO: 5078 - DNA, 1034 bp, Homo sapiens
ttgtaaatattttcaagtaacaagcatatgcatctctattggtttaatttatttttaccccatttagtgcttgctttgttttgattctttttttgtttttgttttttgagatggagtctcactcttgcccaggctggagtgcagtggcatgatctccactcactgcagcttccgcctcctgggttcaagcaattctctagcctcagcctcccgagtagctgagactacaggcgcgtgccaccacgcccagctaattttttgtatttttagtagagatggggtttcaacatgttagccaggatggtcttgatctcctgacctcgtgatgcgcccacctcagcctcccaaagtgctgggattataggcgtgagtcaccgcccccagccctgctttgttttgattcttatcagtgcttcaaataccaatcactgggtagtgtatgatactcttgaagtattagtgtgggctgccataacaaaataccatagactgggtggcttaaacaacagaaaattattttttatttttatttattaatttttttgagacagtctcactgtgtcgcccaggctggattgcagcggctcgatctcaggttactgcaagctctgcctcccgggttcacaccattctcctgcctcagcctcctgagcaggtgggaccacaggcgcctgccaccacgcctggctaatttttttgtattttttagttgagatggggtttcactgtgttagccaggatggtcttgatctcctgacctcgtgggattacaggtgggagccacagcgcccggcctagacatttattttaaggttctggaggctggaagtcagagatcaggttgccagtatggatgggttttggtgagggttctcttcctggcttgcagaagatatccttctctctgtgtcctcacatggtagggtgggtatgggaatcctggggtcggggagatgaggggggatttctctctcctcctcatttcataaggccattaatcctattgaattagggccctgtgcttataacttaat

SEQ ID NO: 5079 - DNA, 1063 bp, Homo sapiens
cagcctcccaagtagctgggattacaggcgggtatcaccacgcccggctaattttttgtatttttagtagagacggggtttcaccatgttagccaggatggtctccaactccggacctcgtgatccaccagcttcggcctcccaaagtgctgggattacaggcgtgagccacggtgcctggccgaaagtgggttatttttaaataaaaacaggaatagttgtctaattcaaagattgtgaactaaaaaaaagttaccgttttgggtattcagtgaagtttaatcactgtcatgtatagatgtcagtctgtcacaggtaaattatgtcttcacttgaaaattccttttctaataaaaagtaacttctgtttttcaagctcttttcttgctctgttccttatgaagtgtagagagagaggaaccacgctgatgttttccagtaacgtaaatatagaacttggtacacaggtctgaaaagtttatttaagcagtctacagtaattcttcgtaggctaattttgaataagagcaggaaagagggtcagcttttcactttggaaggtactggattatttggcaggtggttaggtagtacttagatttgcttagatacctgtaaaagtgagattggtatgggataaaacgttcttgtgctgcttgcaaaagtctttggaatattctttgggatattttggtgcttaggaagtgcttttcaggttatattaatatatgcttagtcttcatgctttcaagtcctgtgggacgttaatgttagtcttttaagttgagtcctttttggttatattaagaggtagttctgatgtttcaaaggccatccagaaataggaatgcctgaacaggaatttccaattaagtcggtcagaatcctgaacagaggatatgatgaatatattacggtataactattagtggtatctgtcagatgactttaattttaggaatagcatgatcactgtgtataatcttatacagaagagaactgaataatagtttatgttcctgaaacggtcataggcatttgagtaaaatgcagtatatagatt

SEQ ID NO: 5080 - DNA, 1372 bp, Homo sapiens
cggcgcggcgagcgcgggcctgtggagcggcggccgggcgcgcggccccggcgggcacccctcagagggcggccgaggaagctccgggaggaggagcaggaccacgaggaggtgggaggcggcggccgcctggggaccagctccgcgcctcggcctctccgccccctccccagcctttctctcgccctcttctcccacactcccggccggcgcctcggctttgtgcgaggagatggtgtagccccctggccgccgaaggaggagccggacacttgtctcccgtctccgagctgctccccacccctggaggagagacccccccctcggctcggcgccttctgcgtctcccggctggtggggaagcctctgcgccgccggcaccatgaggtgaggggcgcgcggggcgggggccgggcgggccattgtgccgcgggagccgcgacccccgttctcctcggaccccgccttccctctcccggcccggcgcgtctcccctggtctccggtctgttcctcccccctccgccttttgtcccttccaatttctctttctttcttggaaacctccccaacccgtgtggtttgggggtctcgcttcatcgttctctcatttttcctcaaatgctcttctttcacccaggatttcccttcctaaatttaatttgcgcctggctccctcccccaagcctttgcaagcgaaacccgggagatggggaggggttcgagaatcgaagcgtgcgtgttgctgggaaacaggtattttttcgtatatatgtaaaaatttcatgcacttttgcctccgaactctcgtgtttaattaaaaaaggaagaaaagtttgaaaggtctgaaatctctgcgggtaataaagtgcctctggtaggggtaggtgaaggagctgtgaaaggtgaaatttcacgatggtgggggaagggaaagaattgattaggttcacgtggtgggggcagtaaaagactgggataagtaagttggtaggggtgtgtaagcgggggcggggaagggatctgtttggaaaagccttttctcccctttctctgtagcagcctgtgttgcattgcagcagctgctttttccctttgctctgtactcaataaaacaggagctaaattatttttgcggccccgaagaattgaatgtactgtcgtaaaatatttttttaattgatacgatgaaacatatggtatgatatttttctttattgtttctcaaattgtgtaggagaataaaccgtgatgtggtgtgtcattcattggagattttttttccagcctttcctaaacctgttctgtgtccataaccttctcttttcggattggtgcaagacttcgtgtgaaatgggacttggtagactgaa

SEQ ID NO: 5081 - DNA, 1050 bp, Homo sapiens
ttcctgacagccgtggccaggacagagccgacctcatctgcagggttctttctggtggctgcctcccaggtgtcaggctctcttatcggtgtctgtccttggacaagttccaaacaagggagggcctcagaaggactcattacccagcgacacacctgtggctatgctggccaagcagggaacatgcaggacaggtggatgatgtcaagccctcacagccagggtctcaggaggagtatggcagggctctgtgcctggggtcagtggctggagcctgggattgggaggaaatgagactcaaaatgagactcacacagatatgttgagcatcccaggggtcccagggcagcgttctaagcccccctatataggtagacttgtttcttctacaaagtgagaaatcctcctaggatccagggctaggaagtttagtttcctctgagaactgctctcttgtgcttccttctgtgatcatgagaactgtataactgtgctttctcttttgccctggctgctaggaaattctgcaggtgtcatattttcggtcttaatgtcctaaatggatgtcggtgtttcttcatatgtcctttatggccactgtctgtgtcctgttgggagaagggcaggaggggagggatgcagtgtggaagctcatgcctgtccaggccaagcacaaatccatttgctgacagccctacgtgcctcggattctgaacggcttggcctcggagaggacagcactgtctccgcagcagcagcagcagcagacctatggtgccatccacaacatcagcgggactatccctggacagtgcttggcgcagagcgccacgggcagtgtggctgctgccccccaggaggcctgaggctgggtgagctgctggctgggccaggctcaggggagcctgtggggtgagaagacaggtgaagcggcctgactcccaagttcatgacttcttcccatctgttttaggtctcactgctctgaaaagacacaaccagaatggcctggggctcaggcccttggctgagtgggaatgcgttgggact

SEQ ID NO: 5082 - DNA, 1056 bp, Homo sapiens
ccacccgcctcggcctcccaaagtgctgggattacaggcgtgagactctgtctcaaaaaaaaaaaaaaaaaaaaccagcttgaaaattttgtggccaggcacagtggctcacgcctgtaatcctagcattttgggaggccgaggtgggcagattgcttgagcccaggagttccagcctgggcagtctggcgaaaccccatctctacaaaagagaaaagaaaatgaaacttatcaaggaccttccacttagggaaggcctcatcatggctttatttatctcaaggaaggaagtttctgttaaagcagactgtgacaggtcatgccgtagtaagtggcatcgttgagaacaaaagtcaatctcgagctttggcctgtttttagagcaaaagaaaatgaaagcatgtgtagtgacaatatggaatgctggaaataaactcttagggggttcctttgtttttcagtctagattttttcttccggtggctctttgacaaaacttcctcggaggcctccatcaggttggagtgagtattgccaagttgagttctggagccatggccctgggtgaaagtcccacaggggctggggctgcagtgggatgggtgggggcggtcgtagcctatgcttctgaacaggcatcttcctccccagacagcagggcttggggcctcacctccaccctgccaggtttctggtagacactgtgggagctgacccactttgtgctatgcttgcagaaatgtggttaattttttaggccagaactcaattagcagctgtctcattcattgaaacttactgagcacagagtcacatggggagaaggaattgctgggtctcagtggtgccagggagtggggaaaggagaataataattaaagatggcagccaggatgcctctgggctctggggattatttttgccagaatagaattaaatttattactgatgtatccttgttagtattttaaacttataccatgccacttaatagtaatagctattgtttaagaaggcactatgctaaatgctttatgcatctttttctcactgtat

SEQ ID NO: 5083 - DNA, 1276 bp, Homo sapiens
tcccagcacttcgagaggctgaggcaggcggattgcctgagctcaggatttcaagaccaccctgggtaacatggtgaaaccctgtctctactaaaaatacaaaaaaattagctgggtgtggtggtacacgcctatagtcccagctacatgggaggctgagcaggagaattgcttgaacctgggaggcagaggttgcagtgagccgagatcacaccactgcactctagcctgggtgactgagcaagactctgtctccaaaaaaaaaaaaacagaaaaagaaaaaataaatgccatgctggagccttgtttggcctgcttgggtgctcatgccatctctttgggtaggttctggcccccagactttagctggggagccacatctgagagaataattgttccctctgagctcttggggacctaagatttggtctttctgtagttgaaggtcagtgcagagaacttgcccccaggctagtctcttggtctgcctaaatctgaccttctgacccacctaagccacgagcactgggagacaagcctcgagacctgtatcccctctcccgctgcaggaagaacctctctatccagggcctccgctggtggctacagtggctgggcatcaacttcaccctcttcctggggctatttttcctgaccacaccctccatcatcctgtccaccatggacaagtttaatgtcaccaaacccatccatgcgctgaatgtgagtaactgttctgcaaggcccctcccaggatagctggtgagaagagggcttggtgggtggggaaggagtggggacaggagtggggtgtgtgcggggaactaaaccagtgggtcatgttgctcagctcacatccttgcttttaagccctgagcaggcatggccacatttattacaaagtccttatagtaatgccatacacacacacacacacacacacacacacacacacacacacacacacacattatatgtatatatacacacacatgcatacatatatattttaatagactatctaaatactgaatggtagggatcatttgagttgaatgtggtatattcaggttggtagactatcaagcatccattcaaaattgtatagattttgtggcacccatgcagggctcctgacagaagcagggatgtaccagtgaggcatgtctatcatggacactacggggaggggccaggaaggaaggaaaaaagcttcgttgattggggtggcaggatcacaaattatttcttttacattttggttgctaatgacctt

SEQ ID NO: 5084 - DNA, 1083 bp, Homo sapiens
caggtctccatctgagggggagacaggaaacaggtgggggcctggggcctgggcatattcccaactttattctttttttttttttcttttttgagatggagtctcactgtgtcacccaggctgaagttgcagtagtgggatctcgactcactgcaacctccacctcccaggttcaagcaattctcctgcctcagcctcctgagttgctgggattataggcatgtgccaccacacttggctaatttttttttttttttagtattttttagtagagacagtttcaccgtgttggccaggctggtctcgaactcctgacctcaggtgatccacctgcctcagcctcccaaagtgctgggattacaggtgtgagccactgcgcccagccctaactttattctgaatgtgatttcttagaagcaggacagggctgtgagatgactgtatttacgtacctttcccacacacgtaacttgggcacaaatgtttctagcaacatcagatggagtgctggtattcctttacctcgagtatggtacaggggctaagacgggctctggaatttatatcatgtgagatcctgaaagttatgcaaatttcctgtgcctttatttcctcatatgtgaacaaaaatgtggggatagcgatcgaaccatctcataagagtgtggtgaggatgatatgagacacttcatgcagagccccgaggcctgttccactgctcattaagattcctctgtgtcttggccagtgatgaccagatcctggaatggtgtggggaggacgccatccactacctgtccttccagaggcacatcatcttcctgttggtggtggtcagctttttgtccctgtgtgtcatcctgcctgtcaacctctcaggggacttgctgggtaatgaccctcctcacccttgtctatgttgtaatggggcagagtggcagtcctagggaaagggctcactgtggtagaccagaaccccaggagtcatgccccacttcagatgtaagatggtctcagggtgactctgaacatttctatctgattaaagatctggagcaaacctaggctaaaactggggcccca

SEQ ID NO: 5085 - DNA, 1094 bp, Homo sapiens
tctttcacagagtgagttatattttgtcccagccatcgagggctggtagctttggttctgagctccaagaggcagcaaaatactggatgtgatctttttgacttgtttggcttttttttttttctaagaattatctgtcattttttttctttttgtgtctctagcgagtccagatttcagagattgtcatcgacttcctcctcaggtcaacaagactttgaaaatgagctggttggtatctaaggcccagttgtggtcatggccagggggtggggactggcagtcatggttttggggagggagcagggcggatcttgagcggcaagtgctggagaaagtgcttttctgcatcgacgaaggcacctgaacttgggaaataccacaggagggatggcagctggatgacccgggaccttgagactggatgaatttgcaggcaggaaggggtacggaatcccttgggcttccccagcacttctctctcttacacctatggctttgtatgacagttaattatggacttgctggctggattatgagccagatgtgggcaggagccctgccctctccagccctgtttcccagcgcctgatgcatagtaggtgtttagtcattgttgaatgaattattgaacaaatatttgtctttcctagctggataacagcccagctttaggggtattaagtttaagagatgtgaaggacaataaaacctgcagacaccctttccccctaacacccactccagcggaccgtccaatccattaggcttgtttcctctcttttgcctcacctcttggtcagtgattgtaaacaatcaaacagcagcccacatcactttgcccagagctgccctgagctttcatcagcttttgatctaagttttgtgatttgaccacgaagttgtcaggagattttagcaagagttccaggcatgtggtgtatattgtgaagtactgggctcatgcttgctgaatatgggataaaagcactgttttttatacaacaggaggttaaatggttatttaatgtcaaagacaatggttacatctgcctctcaaagacacaaatgttggaagctaatccctgttctct

SEQ ID NO: 5086 - DNA, 1115 bp, Homo sapiens
gtgctaggcattcacatacatctaggatgactgaatattgccaggggttctcagccaggcagtgccacttcaaccacagtgcctagctgctggtttggcctcctctatacagctgccagctgggtgctcccctccccctgccttctcctcagcctggcagcactgtcccatggtgtctgtgttcccagctgcctgctcagagcgtgcctgtttgtgaaaatgcagaggagctgtcccatggagagccagagggacggagctgtttcagggggatctggactttatgtgtctaatgggcagggacaggctgggactgagctgaaaggtctgagagagattgtgggtccccagagctctaccctaacctgggtgctcatcggagagggcagacaggactggccacctgaccttacctccgtctcaggctgatagtatttgctagccacctccctgagttcatatcaaactttgtcaaaccaccctgggaagcctatttggcaagagacaagtaacttagaggcatgactggggctggagggagggggaagaggagccgcaggtgtttccctccgcagaggcctctctcctctgcagcactggcgagggtatgccactcccagcaccaccacagcaccctcccctttccagggacaatgctctctctgtgagcattttatggggatgttttttctttccacttcacatttcaagccttccttgttcatgctgctgtgttcccttttcctgattctagctcttggggaaccctggggagcctccccagtagcattggcccttggggcccaggtgaagtcctttgcttggggccctaccgtgagcccacaacctccagggtttctgtgggagagggctgctcccctagacccagcaggtccctgagccattggcaaagaggagagaggctggggccacaggtggtgctggccgaggaaggaggagtagggtcgcacagaggagcactgatggatggagaaccagttctgggagtttggggagagatcaaggcaggagggagcccactgggcagaacctaaaggtccatatgggcagcatgcatacacaggtgtgtgctggagggtttccatccagacccc

SEQ ID NO: 5087 - DNA, 1025 bp, Homo sapiens
ttggcaggggttcagctgctccctgggaggccttggcatagccaggctgctccagcactgtgagctgggagtctcctcttgcagaagatgggtgtgaacctgacacgcagcaacaaggagacggtgaagcacagcgacgtcctgtttctggctgtgaagccacatatcatccccttcatcctggatgagattggggccgacgtgcaagccagacacatcgtggtctcctgtgcggctggtgtcaccatcagctctgtggagaaggtgcccatctcagccctgatgccccttgtgtgaggggagggttgacccacgaatggcagctaatgggtgggtgctggtgggagccgtgccctggccactcattcggctctctccctcaccctagaagctgatggcattccagccagcccccaaagtgattcgctgcatgaccaacacacctgtggtagtgcaggaaggcgctacagtgtacgccacgggcacccatgccctggtggaggatgggcagctcctggagcagctcatgagcagcgtgggcttctgcactgaggtggaagaggacctcatcgatgccgtcacggggctcagtggcagcgggcctgcctatgtgaggccctcatttgctcgctcagccttctaggaacccaggcagcaagatgggctggcaggcaggcttggactgggggtggcgcccacctcttgggcacagctggctggtacaggatgctgacccttggagctagttctagtcatcagaaagcagacctaaggaaaggcccttcagtgcctatggcctggggcttagtgagtgtctccacaggcattcatggctctggacgcattggctgatggtggggtgaagatgggtttgccacggcgcctggcaatccaactcggggcccaggctttgctggtcagtatctttcccccgcatgttcaggaccagggtgtagaatgggggttcttgtgcatcactgaactgaggtgggagttggttgggaagctggggtagcagttgggca

SEQ ID NO: 5088 - DNA, 1050 bp, Homo sapiens
ctatggttatgtgacgtgtattttgtccactcatcacacagccttgttagccccagcctagagaagtatgtcatatccaaacccaggccaaaggatgattgggaaggaaaattgattcttctggtcagtcgttgtgaccaagcattcacacgtgtgtcctgttgagggcctgggttcttagggcctgttacgtagaagtgttcactattaatttgatggtctcatttgtccgtgcatatttgtgaaaacctaccagggacttccagagttacacgtgagcttttactgaactttcaagtaagtaagcttttaccagctataagatattaaacctgttcagttgtcaaaagaatttagtggtttccctgaatctaattttaatgttggcacttgatctagaactctgttctttccgcacctcatccgtgctttcctcggctatttcctctgcttactatttataagcttaacaaatgttaacactgcagtctagaccaaaattttaagagacttggatcgattccgtgaagaagcaatgtgtgtttgcaaataatacggtttttcactttccatgttttccttcctgctctgtaatccagtctaaaaactgtaagcacaactgtttttgaccatgaaaataattgcattctaattcctttgaaaataattcttatttcatgagtacagtgttcttttctccccctcccccacccccgacggagtttgactcccgttgcccgggctggagtgcaatggcgtgatctcggcccactgcaacctccgcctcgctgagttcaagcggttctcctgcctcagcctcccaaatagctgggattgcagtcgcccgccaccatgcctggctaatttttgtatttttagtagagacggggtttcaccacgttggccaggtcttgaactcctgacctcgggtgatccgcccacctcagcctcacaaagtgctgggattacaggcttgagccactcctcccggcctatgagtacagttttcaaacttgctgacaattgatccaaagtgaaaccagaaaaaat

SEQ ID NO: 5089 - DNA, 1061 bp, Homo sapiens
tcactctgtcgccgaggctggagtgcagtggcactgtgtcagctcactgcaacctccgtctcctgggttcaagcaattctcctgcctcagcctcccgagtagctgggtttacaggcgtccaccaccacacctggctagtttttatatttttagtagagacggggtttcaccatgttggccaggctggtcttgaactcctgacctcaggtgatctgcctacctcggcctcccaaggtgctgggattacaggcatgagccaccgcgcctggccttttccattgctattattattattcgagacagagtctcactctgtggtccaggctggaatgcagtggtgtgatcgctgctcactgcaacctccgcctcccaggttcaagcaattctcctgcctcagcctcccaagtagctggaattacaggcatgtgccaccatgcccagctaatttttttgtattttcaatagagacagggttttgccatgttggccaggctggtctcaaactcctgacctcaagtgatctgcccgccttggccaaccaaagtgctgggattattggcatgagccaccacacctgccctccattattattatttcagttatggtgatctgtaatcagtgatctttgatgttactattgtaattgtcttgggcagccacaagctgcacctgtataagatggcaaacttaactccataaatgtcctgtgtgttctgatgtccacggatcagctgttccctcatttctctttctctccttgcgcctccaattccctaagacacaatattgaaatccaggccaattaatagccccacagtgacctctaagtgttcaagttaaaggaagagttgcacgtttctcactttaaatcgaaagctagaaatgattttgcttagtgaggaaggcatgttgaaagccaagataggccaaaagttagggctcttacaccgaacagttaaccaagttgtgaaggcaaagggaaagttcttgaaggaaattaaaagtgctactccagtgagtacctgaatgttaagaaacagaacagccctcttgctgatatg

SEQ ID NO: 5090 - DNA, 1028 bp, Homo sapiens
cccaagttcaagcgattctcctacctcagcctcccgagtagctgggattacaggcacatgccaccatgcccagctaattttgtatttttagtagagacagggtttcacatgttggccaggctggtctccaactcctgacctcaggtgatccacccacctagacctcccaaagtgccaggattacaggcgtgagccaccgagcccggcccagtttaaaatattttctaatttcctttgtgatttcttccttgttacatgggttatttagaagtgtattaggctccatgtatttgaggatttcccaagtctttttctgttgttgatttctaatttaatttcattatttcatttttttttttatttaccaaggcttgttttatgtcccagaatggtgtcttttagtggatgttccatgttcacttgagtagaatgtgtagtctgctgtcattgggtggaatgttctgtaaatgtcagccaagttaagttggttggtagtgatggtaaggtttgcttgttctgtcagttaccaaaagaggagttttgaattattcaactaaattgtagatttgttcctcccccgcaccccccacttttttttggccatttttgctttatttatttcgaagttttctgttggtgtatacacgtttatgattgtatggcttcttgatgaactgacctctttattattatgtaacatatctcttcatgtctagttatattccttgttctgaagtccatttcatctggtattagtgttgccactcgtgctttcttttgattaaagttcacatgatatatcttattccatctttttatttttttattttattttattttattttatttttattttcttgagacagggttttgctctgtcccccgggctgggggacagcttagagcccaggaggtcaaggctgcggtgagttataaccggtggtgcagttataactcaccgcagccttgacctcctaggttctaagctgttcttctgccttagcctctcatgtagttgagactacagg

SEQ ID NO: 5091 - DNA, 1035 bp, Homo sapiens
cattagtacagtatttcaacatttgggtaggagaaaaagaaatgtttcaaacatcttttttgttttaaaaggctctagttgaaaaacaactctttctggccaattatttagttttactattaattaccttagtgagttaaaatagatttaaatttttccacacttttaaatgcaaaggctagcactgatttttcttattgaaaatgactaggttataaagttgtttctctacactaccatgtatgtagtgtgttccattaaatatgtggaccccacacactttaatggatctccagaggcagagccctcgcttgctcagggtggatgattgcagagcacttgtggggaagtgcgcgatcagtgtgatgtggagtcccagaatgaggttgctacatccagatgaccccactgataggcagggtgactggcataatttttttcttttgaaatctggggagacagatgaggtgaccatcttggttatttttgctgtgtgggataccataaagccagactgaagacgcattaaggagagcagttgaggtaagcacatcttggaaagtatgctaccgagtcttgaccatctatcttttggagcaggagaagcaaccggttcaaaataataaataattgctaataattcattagggcttaaagttcaacagtcaggggccgggcgcggtggctcacgcctgtaatcccaacactttgggaggccgaggcgggcagatcacgaggtcaggagattgagaccatcctggctaacacggtgaaaccccatctctactaaaaatacaaaaaattagccaggcgtggtggcgggcacctgtagtcccagctactcgggaggctgaagcaggagaatggtgtgaacctgggaggcggagcttgcagtgagccaagatcacgccactacactccagcctggctgactgagcgagactctgtctcaaaaaaataaaaataaaagttcaacagtcagtagctgtgcatgggggtgcacacctgtagtcccagctactcgggaggctgagg

SEQ ID NO: 5092 - DNA, 1049 bp, Homo sapiens
agaggattgcttgagtccaggaattcgaggctgtagtgagctatatgatcacaccactgcattccagcccgagcgacagagctaggccctccctctaaaaaaaaaaaaaaaaaattaaaaaaaataaaaagcagttagagagcaggactgtagcagattagccagggggcactactgttttctcatgtgaccttcaacaacatcagaacctgttctgtcctttctgttgcatcacagggactcattaaagtcagactgtctgcagatgtctgggaaggaaagttttttgtatgcatacaaattactgtacttacaaagagctttgtgaggccaggcacggtggcccctgcctgtaatctcagcactttgggaggccaaagcggatggattgctagagctcaggagttcaagaccagcctgggcaacatgatgaaaccctgtctctaccaaaaatacaaaaaactagctgggtgtgatggtgtgcacctgtagtcccagctacttgggaggctgaggtgggaaaattgcttgagcccaggaggtagaggttgcagtgagctgagatcaagtcacttcactccagcctgggccacagagccagaccccatctcaaaaaaaaaaaaaaaaaaaaaaaaaaaaagatggctgggcgcagtggctgacacctgtaatcccagcactttgggagcctgaggtgggtgaatcacctgaggtcaggagttcaagaccagcctggccaacatggtgaaaccccatctctactaaaagtacaaaaattagccaggcatggtggcacatgcctgtaatcccagctacttgggagactgaggcaggagaatcgcttgaacccgggaggtggagattgcagtgagctgagatcgtgccattgcactccagcctgggcgacagagccagactccgtctcaaaaaaaaaaaaaaatgaaagagctttgtgaataagaattctctgttcagaagttggttgaggtaatgtatttctcctggcttgcctattagagagcttctaaaaggtggttactgcctagtct

SEQ ID NO: 5093 - DNA, 1106 bp, Homo sapiens
aatacctccttaaacttaacgtagcttagtttaacttacttaattttcacttataaagcagttaccacctgtcaaaaaatctgagtgaagaaaagtgttacattatagttgctcagcatttcttactgcatgaaataatctttgttgtttttgccaaactctttaaattccttgaaaatgtgtattcttactaaacaaccttttctcctgagtctttggcatcagttagaagttaaaaagcactgcaagttttttgtaatcctgaagaggaggaaaagatgccaaaccagagtttattcaagataataagtggtatttttgagagatttattctctctcctctgaagcctgtttctactttagtttcacttccattttcctgcttctttgataggcagtgagatgatttttaatagcacatacactctgtcctgtttataggttgctatcatttaatgagaagaaagtcaaataggacaaaaccgcaaatctttgaaacaaaactagaaagccataatggaggctgggcatagtggctcatgcctttaatcccagcacctggggaagccaaggccataatggttgcttgaggccaggaatttgagaccagcctgggcaacatagggagaccccatctcttaaaaaagaaaaaaaaaattagctgggcatggtggtgcacgcctgtagtcccagttacttgggaggctgaggcgagaggatcactcgagctcaggagtttgaggctatagtgagctgtgatggcgccactacattccagcctgggtgacagagtgagaccctgtctcgaggaaaaaaaaagccataggccaggtgtggtggcacatgcctgtaatcccagcactttgggaggctgaggtgggtggatcacttgaggttgggagttcgagaacagcctgaccaatatggagaaaccccatctctattaaaaatacaaaattagcctggcatgttggtacacatctgtaatctcagctactcgtgaggctgaagcaggagaatcacttgaacccaggagggggaggtttcggtgagccaagattgtgccattgcactccagcctgggcaacaaaagagaaactccgtct

SEQ ID NO: 5094 - DNA, 1041 bp, Homo sapiens
atcccagcactttgggaggccgaggcgggcggatcacttgattgaggtcaggggtttgaaacgagcctggccaacatggtgaaaccgtctttactaaaaatataaagattagccaggcgtggtagcaggtgcctgtaatcccagctacttgggaggctgaggcaggagaatcgcttgaacctaggaagtggaggttgcagtgagctgagatcacgccactgcactccagcatgggtgacagagtgaaactccgtctcaaaaaaaaaaaaaagaagaagcatgtggtttatctataaaagaatatgagtatctctaaactaagcatgccaagatattttcagtatttcctctattaagacaggctttaaattaaatgctgtggacccttaatttttcactggctttatttatacttaccagggccacctgtaacatcttccagctattcttctgcctcttactgttttttatgtatttaggtacagaagccatagccaacagttaaatacctcatctatgtcagagatgacaatccatcatcttaaagcatcgtggtaaattagtgtagctctagagccaaactgcctggatttgcatcaggctgtagcatctgctagcagtatagtcttgggcaagttactgaaccctctgtcagagggttgttgtgaggactaaatgggttagtatgtgtgagtactttcaacactgcatggcacatagtaagggcacaataaatgttaataattatgatggtggtcatgatgatgatgatcatatgcttatcttccatcccgaattttcctggaaaatcctaagtaaaaaattagaggccaggcttattttcttaaatctttcttctggacccagaacacatactaattggtgtacattactagcttagttgtttttaagagttacagactgtaaaagtaagtaataaggacattttattttgtcatgaacaatctcctgtagccagactagtatatatatttttaatgtttttaggcagcagataatggcagctttaaactcccagac

SEQ ID NO: 5095 - DNA, 1091 bp, Homo sapiens
ttctctgttgtagttgtgaattagaattatagttacaccttatttttctagtggctatattttcatcaattttgactatctaaaattttaggtgatgaaaatgatgctacaaaaccaatttttcttcaggttatgttatactttttttttttttttttttttttttttaagatggagtcttgctctgttgctattgctcaggccggagtgcagtgacacaatcctctgcctcctgggttcaagcagttctcctgcctcagcctcccgagtagctgggagagggattacaggtgcctgccaccaacccagctaatttttgtgtttttagtagagatgaggttttactatgttggccaggctggtctcaaactcctgacctcaggtgatccacccgcctggtcctcccaaagtgctgggattacaggcatgagccaccttgcccagccgatgttattctttaaaaacaattgattctctggtttcctaccttaacctggattagaaataacagattagaagagaaaatagcttgataattagggacataatagaaagcatgaaaaatagacacgagaattataaaagcatggcagtcaggggtcatttaatatgaaggtaaacttctccattacaatagtatgatgtacaatttttatgtttacagctgtaacccctgagttatcaagagatggaacattagatatgatttattcctatttaagataataggaaattgcttgattacattttcagaagatatttatccaaagaaatttttttttttaatctaaaggaaaggttttgattcttatgagaaaagaatgagatttctttaactggaaaattgatttatgtcctacagtccattgtgtagtgatgttggatcaatcaggtatcgctagggtgtctgtagaagtatctatatattgctttttaagttcttattttaatgatatatatgcatatttctcttaagcattgtcaaaagttactactcaacatatagagctgcgttttcgttttaaaaatatacttttgtcatgggataaagtccacatagaattattttaaagtgtttaagagtagacttc

SEQ ID NO: 5096 - DNA, 1049 bp, Homo sapiens
cactctgggaggctgaggcaggcggatctacgagttcaggagatggagaccatcctggctaatgcggtgaaacccgtctctacttaaaaaaaaaaaaaaagccaagagtggtggtggccacctgtagtcccagctacttgggaggctgaggcaggagaatggcgtaaacctgggaggtggagcttgcagtgagctgagatcacaccactgcactccagcatcaactgggaccacttgaacccgtcccggttcaagcgacaaaagcaagactccgtctaaaaaaaaaaaaaaaaaaaacagctacatgggaatttgttcctctgccgcattgtgcagtgactggtttcacccagtactttgatgtgagaataagcactttcctcatatcaggaatattgtgggtgtttcctgttactcacggctgaatgtaatcttcggtacattaccaattatgtttgattgtatgtgattaaaaataatgtgcacattttttcctcaaagttgctggacatgtttcttcgaaagcagttaataaacaatttctaacaatttatctactaacaaatactgtttttttaaatttactgagaagaaatattaaaatatctcattgacagtcatggatcagataaactttataattagccttataattttgctgattatttgacattgtgagtcagtattcacaaaagttgaggcatttttttcttcatgtatattttacttttcatattcatatagtcacagtttttatgataataatttctcattcactcataataccaaaagttaaatcgtgcttttctgagtgccctcttgccaaagaccaccaggatcacaactattgttaaagaaggtgtaaaaaattgtagtaataaatatgaccacaagcaaagcaaacaaaaaccacacacacactgttaccgttctgtaggttagagataggtcctgttggggtaaaatcaaggtgtcagcagggctttgtttcttctggagagcacctgaaagcttttttttttttttttttttgagacggagtctcgctc

SEQ ID NO: 5097 - DNA, 1068 bp, Homo sapiens
tgagccaagtaatgctgcctttgttttgttttttgtttttgagatagagtctcactctgtcgcccaggctggagtgcagtggtgccatctcggggctcactgcaagctccacctcccggattcactccattctcctgcctcagcctcccgagtagctgggactacaggtgcccaccaccacgcccggctaattttttgtatttttcgtagagacgaggtttcaccgtgttagccaggatggtctcgatttcctgacctcgtgatcctcctgcgtcagcctcccaaagtgctgggattacaggtgtgagccactgtgcccagcctggtttttttttttttttttttttttaggcagagtttgattcttgttgctcaggctagagtgcaatggcgcgatctcagctcactgcaacctctgcctcgagggttcaagtgattctcctgcctctgcctcccgagtagctgagattacaggcatgtgccaccacgcccaggtacttttgtatttctagtagagacggggtttctccatgctggtctcgaactgccgacctcaggtgatctgcccaccttggcctcccaaagtgttgggattataggcgtgagccaccgtgcccggcacctttgttttaatgtgtggatttttctggtggaacacatggtgttttgtcagtcttgctgggacttttaatcgctattctatggttttataccagtatctcacgagaattagaaataacattacattttcggccgggtgtggtagcttttgcctgtaatcccagcactttgggaggccgaggcgggtggatcacaaggtcaggagatcgagaccaccctggctaacacggtgaaacctcatctgtactaaaaataaaaaaataaaaaaattagctgggcgtggtggcaggcgcctatagtcccagctacttgggaggctgaggcaggagaatcacttgaaccctcaaggcggagcttgcagtgagccaagatttcgtccctgccctccagcctgggcaacagagcaagactccatctcaaaaaaataaataaataaaggaaagaaca

SEQ ID NO: 5098 - DNA, 1051 bp, Homo sapiens
tggttcattagttacatcacccccttttcttttttttttttgaaacagagtctcgctctgtcgcccaggctggagtgcagtggcgcgatctcagttcactgcaagctccacctcgcgggttcatgccattctcctgcctcagcctcccgagtagctgggactgcaggcacctgccaccacacccagctaattttttgtatttttagtagagacggggtttcaccgtgttagccaggatggtctcgatctcctgacctcgtgatccacccgcctcagcctcccaaagtgctgggattacaggcgtgagccaccgcacccggcctatatcaccccattttgtaatgcattagccatctcccaatttcatacattttgatgtatactgtatatgtaaaccctttgtacatctttaattcattaaaatgttgaacacaaaagatgaagatagagacttttgacaccctcaaattcgctgtaagagatagagcttttaatgattttgattttgattaactagttctgagtctgcaaaagtatacacttttccccgagaagaggcttgatcaaatacttagttataatttatgttacactatatcctcagtaacccccaattcccaacaaggaaatgaaattaaattcagcatgtcctgcattatccctgcattcttatagaaaatctttcggatgatccagtggttttaacttcacaaaaactgaggtttacgaataggaagcaattcaggaagcaccaatggtaaactaaaagtaggatgtcctggatatgattccaggcctatgtggaaattatcccttccctactcccactgtggcattccctcccctctttctcttttactgcttcagatctatagtagcagaggaattctaactgatgcaaactggcttcagatcccacaaggttaccacttactggctgcggtacatgggcctcatatgtaaaatggagacaataagcaataatatcttctttctcatggggttattgtgaggattcaatgaaatcctttaaaaacacttagaacattag

SEQ ID NO: 5099 - DNA, 1038 bp, Homo sapiens
tggcactgggaatctctggaatgaaatgttataagggtataggtgtggatacagttaggtatctacagctgcaaaagtagatacctaagtgaataaagaacaatcctcttttaggattatagaattttttttatccaaaaattactgaatttttaagaccaaaaatgtcaggtgatttcagcgtaagatcatactgctctctttagcagtacaggtattaaaacttgggtttatttcccagtttaactcatttaagcataacatgaaattagtattatcagatacacaagccatccgaaaatgaaaaggattagctatagcatattgccattacatatcttaaacatagaaatgtatgtgcgtgcttctttcctactggactctaattcttggtttccatcagttctacttctgccctttatattcgatgccttttcagtgctcttccaccccacttctgtttttctctggtcaccttatcatctcttctatctttatgtataaatgaattatttccctttaatatcactagttaggactgttttcttctaagttccatgctttaaagcactgggcttgcctttgcccagttaatcttatctgctttcaaatagagacctattttgggttgtttcgcaaaccaaggagatgtaggcttcagtgtaaaacgaatttgtattcccagagaccgttttgatgttggcttggcttcttagcatatgagaactctgtagaagtaatctagttggcttgatatgttttattatttgttttatttatgtaaaaatagtttccctataaaaattcaaatattatgaaatgatttaatgagtcaaactgtagttctttataatgccttctccataaatagtattaagttagcatatgttataaatatgtttatttatatgtttaccatatggatttctttttctgtgcatatactaaaaattattttcatgcaaaatggaattaaattatgatatattggcttatcttttaaaatgattgtattgtaccataatttaaacaacttcc

SEQ ID NO: 5100 - DNA, 1030 bp, Homo sapiens
acaggagactggcgtgaacctgggaggcggagcttgcagtgagccgagttcgtgccactgcactccggcctgggtgacagagcaagacactgtctcaaaaaaaaaaaaaaaaaaaaaaaaaaaaaaaaaactcatttggccgtgatcttaaattcttttatacatcattggattcaatttgctaatattttattgaggatttttgcatctgtgtttatgaaagatactgatctatagtttttttcttttcatgtttggacaggggatctatgttgcccaggctaggcgcagactcctgggttcaagtgatcctcccacttcagcctcccagtagctaggactatgagtacattccattgtgcctggcttatagttttctttcactgtgtctttgtcagattttggtattaaggtaatgctaaccttggagaagagttaggaagtatttcctctgcttctatcctctaaaacataacagaggttgggtataatttcttcctcaaatgtttagtagaattccttagtgaacccatctgggcctggtgctatctgttttggaaggttaattattgactcaatttatttagtagatataagcctattcagagccttccatttttttcttgtgcaaatttagaaatttcaaggagtttatctttttaaagtccataggatctgtagtgatgcccctttttcatttctgaaattaataatttgtgtcctctctcttttttcttagcctagctagaggcttatcagtatcattgatctttttaaacaaccagcttttggttttgttgatttttttctattttctgttttcaattttattgatttctgctctagtttatattattctgattactttgtatttaatttcctattttttttttttagtttcctaaggtggaagcttaaattactgattttaagtcttctttactaatatatgcattcgatactacaagtttcccactaagcactgctttggctgcatcacacaaattttgacaagttgtctttttatttt

SEQ ID NO: 5101 - DNA, 1031 bp, Homo sapiens
aatactttttatatttgtaagtggttgaaaaaaatcaaaagaataatgatatgttgtgacttatggaaattatatcaagttcacagggcctccttaaggagtaaacatgctctaaataagttcataactgaaacagaccagcccctacaaaatataaaagcaagtgtgatgggatcgaaaagatctgccagtaattttttttgtctacaagaaaaaaattcaacaccctgtgtagcatacaataaaaaaattgctgtacttgtggggaaaaaaagactattccataagtcaataaaaaagccatcaatagagatagactctgagatgactcagatgttgggattagcagacagtgacttcaaaatagctatcataagacatgttcgtgaacttaaatgtaaatataaatataatgaacagagaaaatctgagtgaataaatggacattttttcagataaagaaaatgaatttagaactgaaaagtataatatttgaaaagaaaaacttctgaatgaacttaaaagcaaattggaaacactaaaagactgggtcggtgaacttgagaatgttatcagtagaaattatccaagtatgaaaacaggtaggaaaaaaatgaaaaaaaaaaatagaccctcagatccctctgagacaatattaagcaagataacatatgtgtaattgtagtccccgtaaaaacaggagagaggggacattattttatgtgccgatgcacataaaaaatattagatgaaacaaaagctgaaatttttccaaaaatatagatctaagatactctgaaccccaagcaggatacccacatatacacaaaacccatcattagacacaatacagaaaatcttcagagaaactcttaaaagcagtcacagaaaaacagcatattatgtaagaggagcactgatatggatggcagccaacttcatatcagaaaaaatgctagaagtaatgccaaaaaagttcttcagactgaaaggaacttttttacattacatgatatcttatgtaaactgga

SEQ ID NO: 5102 - DNA, 1045 bp, Homo sapiens
tttttttgtttgtttgtttgttttttggttttttttttttttttagtagagacggggtttcaccatgttagccaggatggtctggatttcctgacctcgatatctacccgcctcggcctcccaaagtgctgggattacaggcgtgagccaccgcgcccggcctttcttttttttttttgagacggagttttactctgtcacccaggctggagtgaagtggctcaatcttggcccactgcagcctctgccctctgggttcaagcgattcccctgcctcagcctcctgagtagctgggattataggcgcctgccaccacgcctgtctaatttttgcatttttagtacagacgggattttgccatgttggccaggttagtctcgaactcctgacctcaggtcatccacccgccgtggcctcccatactgctaggattacaggcatgagccaccacgcccggccagaaacaatctaagaacctatttttgaatacagtatacttaatgagaagaaaaaaaggagtggtgagatgaatagattttaaggtttttttgtttttgtttttgttttttttaagatggagtctcactcttgtcgcccaggctggagtgcagtggcgcaatctcagctcactgcaacctccgcctcccagattcaagcgattctcctgcctcagccccctgagtagctgggattacaggcgcctgccaccacgcctggctaatttttgtagttttagtagagacgtggtttggccatgttggccaggctggtctctaactcctgacctcaattgatctgtccgcctcagcctcccaaagtgctgggataacaggcgtgagccaccacgtccggctgattttaagtttttaatctcagcacttgagtccaggaggtggagcccagaatcgcttgagccggagatggaggttgcagtgagccaagattgtgccactgcactccagcctggatgacagagccagactctatctcaaaaaaagaaaaaaaaaagattttaagtttttatatggggtagttatcagtttg

SEQ ID NO: 5103 - DNA, 1053 bp, Homo sapiens
tcccatatatactgcttgaatcaatattcaacaagttcagaaatcatacaaaaaaatcattattatcagctaagctctttctgtgtatttccagtccttattcatcattgcttacaacaattcactttatacagtgctggtctttatatccttttttctcattgtttttatttagtttttgagacaaatgacaatagagctcataatgtacctttgaaagtgaaagccataacatggcatgaaagtgatgtttaaatactttgcttcatcctgggatttgaaaacggaaggaagataggctctagaaataagagggaattcagcatttatacttttaaggcaaaaattatgattaaaagtttacatagtaggaagtctcatctttaactgctatattggtgtgtttactgggtcacagagaaaatatcatgttcttttgggtagaatattgaaatggaacttggtccctatgagatctagattccaggcacaatttcatcaaaggatggtgaaaaaattattttgctttgtaggaaggaataacctgcaaaatctttgagtcttggaaggtcctgttttttaaaaaatgaaaggtaatttactgtgaaaagaaacagttcctttttctttccttccttttttttttttttttttcagactgggtcttgctctgttgcccaggctggagtggtgcaatctcggctcactacaacttctgtctcccaggctcaaacaatcctcccgcctcagcctcccgactagctgggactacaggctcattccgccacacccagcttttttttttttttttttttgtatttttggcagaaatgaggtttcaccatgttgcccaggctggtctcaaactcctgagctcaggcagtccatccgcctcagcctcccaaagtgctgagattacaagtatgagccactttgcccagctcttttttttgggtgggtggggaacagtctccctctgttgtgcaggctggagtgcagtggtacaatcacagcttagctcattgcagcctcaacttcctgggctcaaatgat

SEQ ID NO: 5104 - DNA, 1195 bp, Homo sapiens
ttaagagccataaaggtacctttatgcatggatgtgaccaacacagcgtacgtgtaccctgcctgacacccaccctagggcattgcctcccctaaccatgtttactcaccctgacatctaagacatgtatgctcacttgtgttgagtaagtaaaagcaccaattccatagtttaagggcaatggaacttaattttgtaatttacaatattgcataaattatatgaaaagacaaatatgttatttaattacaaaaaaaagtcctgaatccactttcactattcagtttatacatatttgtgaaaggctcaattactattgaatcttatctatgcacaaggcaaatggacttaaaaatgaggactcaacatactaccgattccattttctttgtgaggtcatgtgttcttagtaagttataaagttaaaaattcaagttgccaagctggtgaaaagtcgtattaaaagtgtttgtgttttaaatttgatagagagcagcactaagtccccaaggaactttgtccatgatagaactgttctcttttgtgatgtccagtagggcagccaagctactagccatatgtagccatggaacatttcaaatgtggctagagtgatggaggaactgaattttgaattttatttaattttaacttgcatagtcacatgtagctagtagtcactgtattgggtagggcacagctattgaccagtcatgagctgtactgtttatttgtagaatacaattgattgtgatttattttatttatttatttattttgagatggagtttcactcattgcccaggctggggtgcaatggtactatctcggctcattgcaacctctgcctcccaggttcaagcgattctcctacctcagcctcccgaatagctggggttacaggcatgtgccaccacgcctgcctaatttttttgtatttttagtagagatgggggtttctccatgttggtcaggctggtctcgaactcccgacctcaggtgatccacccgcctcggcctcccaaagtgctgggattacaggcgtgagccaccgcagctggtcttgattgtgacttagaatgctcccaaatgagtgtggacctactaagcacagtgtacttgtcatccgaaaatgtttttcatcatccttggtatctttatcataaacatgtcttatcacctcttggatgtcaca

SEQ ID NO: 5105 - DNA, 1038 bp, Homo sapiens
ccagccccggggagatgaggcaacccagccccatgaagaggccttagagtgactttcaggctggcactgagcgtcctgccagcctgggggagatgaggcacatgtacataccctctgttgtatggctgttggctccttaacaagcttcccctcaggtacattgtctatgatattgctcaggtaaatctgaagtatctgctgaaactgaaattcaattttaagacctccctgtggtaattgggagaggtagccgagtcacacccggtggctctggtatgaattcacccgaagcgcttctgcaccaactcacctggccgctaagttgctgatgggtagtacctgtactaaaccacctcagaaaggattttacagaaacgtgttaaaggttttctctaacttctcaagtcccttgttttgtgttgtgtctgtggggaggggttgttttggggttgtttttgttttttcttgccaggtagataaaactgacatagagaaaaggctggagagagattctgttgcatagactagtcctatggaaaaaaccaagcttcgttagaatgtctgccttactggtttccccagggaaggaaaaatacacttccacccttttttctaagtgttcgtctttagttttgattttggaaagatgttaagcatttatttttagttaaaaataaaaactaatttcatactatttagattttcttttttatcttgcacttattgtcccctttttagttttttttgtttgcctcttgtggtgaggggtgtgggaagaccaaaggaaggaacgctaacaatttctcatacttagaaacaaaaagagctttccttctccaggaatactgaacatgggagctcttgaaatatgtagtattaaaagttgcatttgaaattcttgactttcttatgggcacttttgtcttccaaattaaaactctaccacaaatatacttacccaagggctaatagtaatactcgattaaaaatgcagatgccttctctatttgtgtattgcgtgtctggtctcattctgac

SEQ ID NO: 5106 - DNA, 1774 bp, Homo sapiens
cagcaaggatcccatcgatgtcaactatgagaagctcaaaactgacattaaggtaacagggtcaggccttcctcaagcatcttaacctctcatcctgagagcagcggtcccaaacttccatgtgtgttaggatctcctggaaagcttgttaaaacacaggtggctggcgcccaataattcacttttctaacaagttcccggacattgctgctggtggtcctttgagaacctttgggcgtttcacgtgtagataatgcaccttgtttgcaaggcagccttccaagccagcacctcagcttggcgtacaaatttatttttgagggtcttaccaaaagttcttttttgtttgtttgtttgtttgtttcctctccttaatctagagaggagctctgtttttctaaacccttgtagcgtgaacttttagaagacttattaccggtgtccatttcagaagtggaaatgcttgatggcacctgtaataaaaacacaatgcttgcgttcatttttctctggtgctgaagtggactgtgttggcacacacagtctctgaacaccccgcttagaccaactagaggagggatttttgcctcagcttctagatggcccggtccttgagcctatctccacactcatgtgccccattgtcctcagcccattccctgcagtgttgcaggggtttgggtgggcgagagtatgttgagtctggtaccaggtgtttacatcgctaaagaaagagccttggcttctttcctaggacaaagtatagacctatgggtccaagcagggtaagacaccacatgtcatttgttttgcccctagagcaccttcctgatgggaaaactgtaggtgtggttcttcgtgaagggattcttattctctttttacaattctgaagccttttaattaaaagacagggaggtagaccagcattctaggttttctgaagtttgaatataaatatgaaaataaaacataactagtctcctccgtaatactcaggcttactgagcatagattacatcagctatttgacagatgcttgttaggcctgtgctctgagccagggataattttcattgcacatcatagctgtgacttcctctggcccattgtgttttaactcatgctgagctggactctcttccaggagccaattgcttgttctggagatgccctgttcactgacagtgaatcccacattctagcttccctgatatcccaaaacatagaattttaagacaaaaaggaaccctgagattctctagcagcccaagtagatgaagaggtggaggcttaggtaagtggagccactggcccaggatctgcccagcccacaggcctgggacacaggctctcggtcatgcccggcttcctttgaggagtgtggtgttgagctatgcattgactgagcctgagcattcctcctctgtagctctcctgggtctcttttgtgctaatcccaagattctgtttatccaggtggttgacagagattctgaagaagccgagatcatcaggaagtatgttaagaacactcatgcaaccacacacaatgcgtatgacttggaagtcatcgatgtaagaatcccttcttcccccacttccttctgtgtcctgccagctcttccctgcccactcctccaacctgggcctgggtagaaaagagcagtttatttactttaaataacccaaagaagtgactcatttgttcagcagaaaaattagtagttttttttttgtttgtttgttttttgtttttttttttgacatggag

SEQ ID NO: 5107 - DNA, 1034 bp, Homo sapiens
tattggcaaagccccagagacgatgtctcaggatacagagtgtggggcccattggtacacaggtgtctccacgcaggggctgagccaaataggcagggctgctcgcaaaagggagtgagtgccttttaaggaaggtggccccacttaacaaatggaaaatgaaggctgcagatctcatgcttcttccactgcagcttctcttgatggcaggcagttcccaagatatgagcagtagcaatatttgttggaggtgactgatctgaaagggacagcattgatttgaatgtaagtccataagttcaggagtgtgtcctttttaaaaatagtgttcaacacttgaaaactcttggttcttttccaggtgggaacccaggggtgcacttaactaactgccttggctctgggaccccagggaaggccgctgggtggggtggtcagcatgatttatgagccctcatctgcacatcagaattggatgggaattatgctatatcttcgtccagacgtgctggactgtttgaaactgggcataggggcagaggagacatggttggctaagcccagccgtaaaggaagtgagcaagaatcttcagacacactgccatccctcatggtggggtggggctacagactctggatttgggtcactggtgtcctcaggaaatcccagcaggctcctgactgctcctgttgggggcctgagggtgggctgcccggtccagctctcctgcgatcacactgcacagtgcccagctttcagagcgaaatcccctgtctcctcagatcgaccttcagaagatgcccttggggaagctgagcaaaaggcagatccaggccgcatactccatcctcagtgaggtccagcaggtaagcacagggctaccaggggcctcctggaaccctcctctggccgacttagggggtgagacctgggggtggcaggggtaacatttactcaaggttaagaaactggaagtactgaactgcacttcacgagggtttcgatttttttcagttcaataaatgacaagtgc

SEQ ID NO: 5108 - DNA, 1412 bp, Homo sapiens
agtaagtgaggaagagtcgaacacagcgctgaaaaactggatcttaacatcatcatcgctgtggttctttatgaagggaaaccagtatttgctctcagtgttgctgctttgtactgtagattcacatgcattgcgtgttctcaactaaagacggtaagctactataggttgagtctccctagtcccgaagcccaaacaaattgcctcaaaattcaacactttttgagtgacaacatgatgctcaaaggaaatgttcattggagcatttcagatttcagagttttggattagatgctcagtcagtaaatatgaagcaagtattttaaggtctgaaaggtttctggtctcaagcatctcggataagggaagctgctcaacctgtattctcatcacttcgcactgctctgtaagatgtgcatagatatctgccaaaacagaagttcaaggttcaagtatgtttggaaaaggtagggtaaaacaaagctaaacaggtttctgtgtgggtttattatgctgattaccactgtaggtcttcaggaaccagagaaatagaatacaggatttcccatacatatttgacatcagggtgttttttctttggagtgtttgttaacatcgtgctgtagaatggtttggagaaggctgccctggctcatcataccttagaaaagggggaatgttgctgataaaaacactcttgggagcattagacttggaagcaaaggagagctgtgaatgctgagggtttggaagtacacactaaatataactgtagtaatttgaagtttcagttttgttttaaacttgtattttggttttttttcctttcaatttgaacagaggaggtggaaaagatgaataagaagatggaggaagtaaaggaagccaacatccgagttgtgtctgaggacttcctccaggacgtctccgcctccaccaagagccttcaggagttgttcttagcgcacatcttgtccccttggggggcagaggtgaaggcagagcctgttgaagttgtggccccaagagggaagtcaggggctgcgctctccaaaaaaagcaagggccaggtcaaggaggaaggtgagggccccaagctgccccctccagggccaaaagccagggacattggtggccaggttgttgtccacggaacctctccctttgtgtccctgacatggcctgttgagtgctgcagagcaggacacagaatggcaggcgctttggggtggcgggagtagtgtgtatatagatgccgagttgacagatgatgggaatgagaacaactcatttgccttctaccttccccttactttttagttacatttaacttcatgtttacatttttctgttctcctccaaggtatcaacaaatctgaaaagagaatgaaattaactcttaaaggaggagc

SEQ ID NO: 5109 - DNA, 1059 bp, Homo sapiens
aagatagaaaaggtaagatcttgggggcccagatccctgaactttatggattgcttgcaatgatgttattggctatctcaagagaaaagaagaaatgggggctttagggtgctagctcaacgtaagtgattaaaaataaagtgaagacattagtattgaccagatacgtcagtgacttccagacaggtctggtcctccttatcacggtccagttctcatgtatgtatgcatctgctcttggaaaatgttaacaaaaggagtctcttttggacccagcagtggctggggagagactgtttgtctgtgttttatggtagaattaggtataaggagtgtgtttaccctgttatgagcctccagccttctgtttaatcaaaggaacttcattaaccaggctttcccaccagttctagcccttgaaggctgacagccagtcagagaaaatggatggacacacaggtagaagggaaggcttgtgccccgcagccttctcacccttctctaatgtgacatgcacatattaattgattcatttaaggcattaattgaaagtctctgcctcccggaggtattgtacagaaaactgaggtgagccaatgggtatttagaaaagaaaaacatggaattgctgtatcttctccagctaccttcaaccaccaaaaatttaaggcaaacattaagatcctctttacctcaaggggaatgccggatggtatgtgctgctgggttactggttttatgtaatgccaggaacccctcctgctgcattctctggattgagcctcccaggcctggaactctcctgggaatatcaggcctggggactggggacctgggcaggctggcaggactggattcttgcctgtgggtttattactccttagggggtgtcatctgtaaagagactaaggaggccataggagggtgggagtggacagaaagtccctgctagtacaaaagtgctgcattgggggctgggcacggtggggtggtaggctgaggcaggagtattgcttgagtccaggagttctggaccagcccgggcaacatagtgagacc

SEQ ID NO: 5110 - DNA, 1029 bp, Homo sapiens
gagatcatgccactgcactccagcctggcaacagagcgaaactccatctcaaaaaaaaaaaaaaaaaaagattcctccatgtcttgtcgtattgatagctcatttctttttattactgaataatattccattgtctggattaccacagtttgtttattcattgacctgctgaaggacatcttgattgcttccaagttttggtgattatgaacaaagctgctagaaacacccaccatgtgcaggtttttatggggacataagttttcaactcctttgggtaatcaaggagtacaattgctggatcatgtggtaagagtatatttagttttgtaagaaactgccaagctgtctttcaaaaagctgaatcattttccattcccaccagcaatagatgagagttcgtatcattatacatctttgccagcatttggtgttatcattgttttggattttggccattccaatagatatatagtattttattattgttttaatttgcatttccctaatactgtaattatcttgaacatcttctcatacgtttatttaccatctgtatatctttggtgaaatgtcttttgcctgcccctacccccactttttttttttttttttaagactgtcttgctccgtcgcccaggctagagtgcagtggtgtgatcacagttcgctgcagccttgacctctgtctcccacctcagcctcttgagtagctgggactacaggtgcgcaccaccatgcctggctaatttttttaaattttttgtagagacagggccccaccttgttgcccagactggtctcaaactcctggttttgctctttttaaaatcacattgtttgttttcttactgttgagtcctaagagttcttggtatattttggataacagccctttgtcatatgtcttttgaaaatattttttctcagtgtgtggctggtcttccgcagagcagaagttcttaattttgtgaagtctagttaatcagttacttctttagtggattgggcttttggtgtttgtaaaaa

SEQ ID NO: 5111 - DNA, 1028 bp, Homo sapiens
tgccaccatgcccagctaattttttgtactttgtttattggcttattcatctcccccattgagaggtgtcttgtatcatgcacaaaatctctgtattttggggtccttttaaaaatttctgttccattgtctgtttaacctttttttatatgtaaacttttttcgttgttgttggagacggattctcgctctgtcacccaagctggggtgcagtggtgtgatctcggctcaccgtaagctccgcctcccaggttcatgacattcttctgtatgtagactttttttcttatagcagttttaggttcacagcaaaattgagtaaagtacagagtttccatatacccgctagccctacccaccccacacatacacagacttttgtccacaatcaacatcgccaccagagtggtccatggttatagctgatgagctacattgacacatcgttatcggagtggtccatggttataactgatgagccacattgacacatcgttatccctcgaggtctgtagtttacatgagggctcactctttgcattgtacattctgtcagttttaacaaacatacattgacatgcatgtacctttatggtagcctccagagtcctttcactgcctgggaaatctctgtgctttgcctagtcattcctccctcccctctaacctccagtaaccactgatctttttgctttctccatagtttttccttttccagaatataatatagttggaatcatacagaaggtagccttttcagattggcttctctcactagcaatgtgctcttaagattcctccatgtcgagccgggcacggtggctcacatctgtaatcccagcactttgggaggccgagcccagcagattacgaggtcaggagttcgagaccagcctggccaatatggtgaaaccctgtctctattaaaaatacaaaaattagccggtgtggtggtgtgcacctgtagtcccagctactcgggaggccgagacaggagaattggttgtactgggaggcggaggttgcag

SEQ ID NO: 5112 - DNA, 1032 bp, Homo sapiens
tcacaggaggttagagaactaaggaggaaggggagaaggctttaacccacccctctgctgtctctctctggaggaaacctcaggcagctctgtgtacttccccctctgcacacacacctcttcctgccttctctaccctgacaccaaggtctctccccagccctggtggcatcgtgcctgggttgctaataatagagaagggtgaatctgccaggcagtgaatcagaaggctgtcccagctctgttcttctgccctgatcctggcaaattcttgtgggctgattcggtaaatatccttgtgagcagaataagtctttgtgtgttctggaaactcctgctgtccctgggggtaacaccctcttggaaggatgatggggatgcctttggcctcaagatcttaggacggcgtttcaaattgctccaggcttccaagctagcctgggctctgggaggagggtttgcaggtttggagaaggagctgcttcccaggtgctcaggggatggaagtgagaatagggagggtgtggagggtacaaagagactgtttagttcttgcgtaaaagacaacacaatatggtccttccagttctttttagagctcaaaaggtgaaataagaataaagaacagcgatctgcagttttcctattatccaaaagcctactacccaattcagtggattgttttggcaacttgcttggataaacttatttagaaattatttcagaattcctccaggcagttaccctacgtcctttttaagtcaaggtgtggtataagtccattaacgaattaaaatacttccagatttctgtgttattctcaaggcacttttgctagataacaatacctcacacttggacggtgttttgtggtttgcaaagcactttcacatctgttttctcacttggttgccataataaccctgggagccgggaagggcatgtcttgttattatccctattttgcagatgaggaagccaaggtttttagaaggttgggtggcctagtcaaggtcacaccggtaggggaat

SEQ ID NO: 5113 - DNA, 1021 bp, Homo sapiens
aagtgctgcagtttccctacgaccattggattttgtttgtagtttgatattgtcttactgtcccttgaagttgtaatttgtaattctttagttttcaagagggactctacatgtttccttgtgatgatggccttgagttactcatgtgtacactgcctatttatccccattgagcccccactgcccgaacatgttgatggcattttatatagtaagctgtcagttacttaatgtacaaatattcttccattccatgtttttctcttaaaattttactttattggccaggcgcagtggctcacatctgtaatcccagcactttaggaggccaaggcgggcggatcacctgaggtcaagagattgagaccagcctggccaacatggtgaaaccccgtctctactaaaaaatacaaaaattagccaggtgtagtggtgggcacctgtaatcccagctacttgggaggctgaggcaggagaattgcttgaacctgagaggcggaggttgcggtgagccgagatagcaccactgcactccagcctgggcgaaagagctaaactccatctcaaaaataaataaataaataaaaaataaaaaaagattgtactttatttggcaataatgtttttattctgaattattctactaggtccctttatttccttgtgaaattgttcttaattgcgctggcctggaaatagagcccatatggtactggagggtgatggtttttcataatttttcttatgcaaccacccttagtgatgagtccctagaggattgaactgtgcctcattctgtggactggactttttggaaacccctttttgagcccccaggaagaaatttggctgagagctgatgcctggatgctagccagctggctgctggccatatccagccaccccagtcccctggccatctgtgcacctcggcaacagagtggcgactgacacacccaggcccagaaagccagacagactggcggctggaaacttcatggaatccttgtaattagaaatg

SEQ ID NO: 5114 - DNA, 1024 bp, Homo sapiens
tagtggatctaaaacgggatgacaccggaaacctgtggggaggacgccgtccttgtcgccccttgacagagggggcacagaggccttagagaaacaaaaataaaaatagcaattgtttgccacttccctccctaataaagtgttctctccaaacctggtttccactctatttctgaactgtttcgccccatggtgtgtaggaagccagggtaaatgtgggagtgggaggaaggggacacaggcagcaactcaaaggaaggcagaattagtagccgtctgggaaccgggggcgggggcattctagaaatgcgaagaggtcgaatagccagctgggtccggagtctcctcacctctggtgtcttagcggagcatgagtgtgtatgtatgtgtgtgtatatgtgtgtatatttatttgcgcatatgcacgtgtgtatgtgtgtgtgcatgcatgtgtgtatatgggtaagtgtgcagtgtgtgtttacgtgcatgcatgcatgtatgggtgtagatatgtgggtgtgtagataagtgtgggtgggcacatgcgtacacccactggaggggtgcgatggaagttgtgtgcagctgcgtgagcgttactgaccatcctgtggtttgctgatagctgcttaatctgggttgtgtgtttcctccctccccaagcagacactcagggtgctccgtgatgcaccgggacgctaatattttcacacctgcaatctgtattgttcttttctccttcggagagcaatattgcccttctgggtgcttaagcaggaaacacaggaccagataatttaagaggagccttaatgctcagggccagaacagacagacgggcctgaacaaggtcacaggccgtccagggagtgcagggctagggcaatgccagcccacttccttccagccgagcgctcccttcacggtgaccaccttcccttcaacgtctttgtttcccggctgtaaaatgggcatgttgcatacagctatgtaggaagtgtttgcaagtgcccaggctctg

SEQ ID NO: 5115 - DNA, 1043 bp, Homo sapiens
gttctggatccagaggctcacggaggctggaatgaaagagggcacccctgccccagtacttgatttggagcgttggattctgcacaaattgatgctcagcagttgcacggtgcagagcccagtcagctgcactgttgctatgctctcgggaggaccccgattgaccagaaggacatggtcaggagagctcggcaggggtttttctgcttagtacacgttatagagtcttagctatggaagagctctagggggaggggaagaaccctgaggtgtagtcctgggttgagtctaaactctgttacttcctatctgtgtgaccctagagaaaactttctgctcctcagttgcatcatctgtgaaatgtgactgataatacccaccttaaggctgtgagccttaaacaaggtaatgtgggaaatgcctagcacagcgtctggacatactaaatgctcgatacaatagcatggacctcagaggcagctgtggtgtcatttgttagtattttatgccgaacctgcgacctccaccattctctttgattgggtgagagtgaataagggtgtctgaggcagtgttgctgacttcttcccttggaagaggagaagtcatggggtctgggagctctttgacattgaggtttgtaggaagtgtgtgctgggggaggcttgctctgctgagcacagaagcaagatggtctgctggggagtgtggagcccgagccagccagacctgaacccacaccctcactctgtcctagaccttggcgtgggctgaacatctctgagtctcagtgtcctcatctctaacatgaggataatgagcctctctcagggggtgctgtgaagatgaaaggagataatgcagctcaagtaccgggtgcagaacaggggtggaatagaggacacccctccaccagttgtgaagagcgtttttaagtggatgccctaatcgccttcaccaattggctcgagtcacgttgtcccaagtacagctaattgtcgaagatgatgacaaaacaggcagcaggatttatttttccaggg

SEQ ID NO: 5116 - DNA, 1034 bp, Homo sapiens
[399 bp omitted]aatctctcttggtatgctgctgagttggtgggacctgggcaattacaagggaggtcactgcacccccaggcagttcccagcaagtgttttttccaatttcactgacattctttccgggctcaactcaatttgttttcaacttctctatggcaattgatgactgactgtgtaattcagcaggatctcctgtgaagtgcttcttccccagttgaataggagctggtgtttgtctaagcctctgcttatgcatgaggtataatgctttttatatgttatataatgctcttacgcgttagctatctgaatgatagatttaataaaatatacctcataatattatggggaaaggatgacgactgttatagagaggaacttgggagtatcacttctgtaatccttatctaacctgaatctgctagcaggaaactgaaaaggcctgtgtatgacaatgagataaacaattttaatctcttagcaatgtcaagtggaaaatctaactacctgccagtagtttaagaaatggctaagagattttgttgggcacaaataatcctgagacccagattgctgagccaagggtaggaaaattggttttgctatgtgttacagctgggaagtgagaaggtcactgtttg

SEQ ID NO: 5117 - DNA, 1048 bp, Homo sapiens
ttacactgtaaatataggaataaatgtagtctttataaataaagcctaaaatcggcctccaggatttttttgggttttgttgttgttttgttttttgttttggttttgcgtttttgttttttgttttttgtttttgttttttttgagacagagtctcactctgttggccaagctcgagtgcagtggcacgatcttggctcactgaaacctctgcctcccaggttcaagcaattctcctgcctcagcctcccgagtagctgggactacaggtgggtgccatcacacccagccaatttctgtatttttagtagagacggggtttcaccatgttggccaggctgctcttgaactcccgacctcaggtaatctgcccgcctcagcctcccaaagtgctgggattacaggcgtgacccaccgcgcccagcccagttcacattaggttttgtcatcacatgaatttgcatcaagcttgtgaaaaaacttttggttttcagcacttttggatttgtggaattgcagataaagataggccctaaactgcaaagatttaaagagccaagacagcccatctccttagaagtgctgaagtgaggctcccatatcactgctgatggcatgcaaacgacagactggagctggcctggcgttcttgtcaaggcccttaacgcattcattgagtttggccttttttatgtccctggttaccagctgcttgtccagtaaagatataagaggaaagaccctctcgggaatgccaaggggcatctggtgtttagagtgcctcctgctggcttcaagactagcccagctcatataaaatgtttccagaaggacagccagccaagagaggaacaggccaactatgttcagtctctacagcaagaagcacaggatcttccacagccagactcaacgatttcatgatgcaaagtcagattgaaacagcggtgctcaccatgcttccttccctccttcctagttcacctgaggaatgagacccgctcctgtcagcagtaggggctcactgggagcctcccagaccctcctg

SEQ ID NO: 5118 - DNA, 1052 bp, Homo sapiens
ggatcatgttttctggaaacataactgttcttcaagaactgaatcttgaaaattcccattagagaaggtgactggctactgagtgatagttcctgcgtaatcggaagtagttcttttatctctaaaaatagtccttggattcaaaagcttttttctatatctttgatattacattatttcatttttaaaaaatatacctgaacattgaagggaagatttttaccttgttaagaaaacaaacatgttctttttgggtgtctaaatggagataagcttgggctgcttaaaggtaaaccaataattagtatattccatggttaactgttataaggaaataaaatcagtaaaaacaaacacattatcagggaatgcttttacatggttttagatttctaaagaaacagtttcataacacgtctatttagaagctgttgtaggttcacttgttcatgttcttgcttgtttcttgctttttctatccttaatgtttttgatagatttttgccatattttgattgtgttattacataagaaaatactgaactaaactctgaaagtcttgtatctctgaaagtccaatttctccttacttattttaattaaagaataattttataaaaaagaatgatcttttgcaaatcaactatttaagtaactggcaagagtattacaaaatttaactttctaagacctaaaagtatttcattaaggattcagctctgatatcagatactattccatttgttctgtgtgcatgttttgtgaaatgtgaatccattttcatcaccttattgccttttttcatctttcttttgtttttgatagccaggtttcccttatccatcccctcatcatcactccggtctgatctcctctccgatcaactttgaacacatctatcacatgactgttaattctgctgaaaaatttctctctcctgattccataaaccctgaatattccccgtctctgcgctctgtccctggtacaccaagctttatgactctgagggtatgaacagctgagtcaggtgttaactttcactaaccatg

SEQ ID NO: 5119 - DNA, 1061 bp, Homo sapiens
tcagcaatttatccagaagacatagccaagataattgatgaaggtggctacactgaacaatacgaaattcagtttagctaaaacagacttctgtaggaagaagatgtcatctaggactttcatagctagagagaagtcaatgtctggcttcaaaggacaggctgactcttgttaggaattaatgcagcttgtggctttacgttgaagccagtactcatttaccatttgaaaaaatcctaggcccttaagagttacagtaactcggttgggcatggtggctcacacctgtaatcccagcactttgggaggctgaggcaggcagatcacctgaggtcaggagttcgagaccagcctggccaacatggagaaactctgtctctattaaaaatacaaaattagccagctgtggtggcacatgcctgtaatcccagctacttgggaggctgaggcaggagaatcgcttgaacctgggaggtggaggttgcggtgagctgagattgtgcagttgcactccagcctgggcaacaagggcgaaactccatctcaaaaaaaaaaaagaattatggtaactctactctgcctgtattttataagcagaacaacaaagtctggatggcaacacatctgtttacaggatgtcactgaaaattttaagcccactgttgagatctactgctcagaaaagtaatacttctttcaaaatattactgctcattgacaatgcacctaagtcacccaaaatctctgatggagatgtacaaggagattgatgatattttcacgtctgctaacacagcatccattctgtagcccatggataaaggagtaattttgactttcaagtctgatcatttaagaaacacatttcataaggccatagctgccacagatagttattcctctgatgaatctgggcaaaatagattgaaaaccttctgaaaaggattcaccattctagatgccattaagaacgtatgtgattcatgggaggaggtcaaaataccatcattcacaggagtttggaagaagcagattccagccctcatagatgacttttagag

SEQ ID NO: 5120 - DNA, 1007 bp, Homo sapiens
gcgagaacctgtctctataaaaaattttctttaattagccaggtgtagtggttgcatgcctgttgtcccaactacccaagaggctgaggtaggaggatcacttgagctatgatcatgccattgcactccagcctaggcaatacagtgagaccttatctctaaaaacacaaacccacacacactctcatactcatcagtggaataaatgctgtcttgtaactgaatcagataataattatgattattctaatgtagagtcagagttggaatgtctgacttttttgtgtagctctttcaataattccctttgtaaccttagtttaagtaaaccattgaatctttctttgcttgtgtcaccatttgttgatattcattctttcaacaagtgtatattgagcatctaccctattcatgtaactgtgctacagtgctttattatacattcttaacagggactagaacacttacctgaagatttctctgctttctaagtttgattcactgtcaataacttaactacttttaggaatcaaatagttcaaatataatgaaattcctttatagaactcatgttgggcaaagaaatagtatacccctggtgtttacagaatccgtctatattataacggctatataatctgaatcatggtataccagttcctcatttacgatatatgttctgtttgcttcaaaaatgttttgatttggctactatatgatagccccataggatttgggtgggattccactctacagttatttagtgtagacctttcaaaatatttggggtttaatagttaaaagtaatccgcaagctgcccccccttcccttctcccaggttacaatgcaccatatctctcggtgtacagtgaaaatgcagttgatatctttgatgtgaactccatggaatggattcagactcttcctctcaaaaaggtaatttaacattaaaatgtgggctaagccaactgagtataagtgaaaacactaaattactacatagtaa

SEQ ID NO: 5121 - DNA, 1035 bp, Homo sapiens
gcctgtgttcacagctactctagaggctgaggtaggaggatcagttcggctcaagaattcaaggctgtagtgacccgtgattgtgccactgccctacatcccagggcaagagagaaagaccttgtctcaaaaaaaaaaaagaaaagaaaagaaaagaaactgggactttttaacttacagtttatgtttaccaataacaaacaacttgttagatgcaagctagtttttagtaggttgaccatatataatccatatcacatcttggtgttttttactttgaagcaaggtttcttatgagaggggttgttacttgtgcaaatctgtaattatttaggcagtagaaaaggcctgttgatacatattcaagatgagtggttttagttatttttattatttataggaaaaccatgctgtccataatttgaggaattcttgataagtgggtcatctaaaaaccagttctgtgatcctgggcggcggggggacctttttaaatgtactactgtaaaaatacatttgaggatcttttagtagaaaaatcctaacagcttcagggaccattatgaacattttgcattaaaatgttttgcagtatggacagtaccactaatattcagcttttcctctttttttttttaacagagcattaagtaaaatgatactgaaatatagtagatgtttctaatgactgttcgtcagagtaacaccttaaagtatgtttacttaggaaaagaaaattagctaacaaaaaaaaattgcatttacttaaagatatttcttatattgaatttataatatctctgctacttatgtatgtttattagcttttgctgcattattatacttaatgctatagtattttagcacataaaaaatgacaaaaagaatattttaacttccatggctaaaatattaataatgattatgtttgtttttaaggttttaaaatactttgtaataaaataactaatggtattaatcagttgctttgctgctatactatatcagagtcattgccaattcataattaaactg

SEQ ID NO: 5122 - DNA, 1034 bp, Homo sapiens
attattaaaagatttaacagaagagaaaggtgacagcttcattttggacaagttaagtttgagattcctaagggacatccagttggagatgtccagcagacagtcagatatttaatatatgcgtcaggagtttaaggaagaggagtggactggcaacagagatttggaaataatcagagttgaaagtggatgagattccccaaggggcagattgtagcagtgagccaaggacagaaacctggaatctccattgaagaaagggtgaaggaataggactccacaaaagctaagaaagcaatcgttgagaagtatgtggttacttaggaaagtacctgtcagaaaaactagaagagcagataattttaaggaggggaatggtcagtgtgatggtatggcagaggtggttggtcagataggacaaaccagaaatactgacctgagtatcagatcaaagcagaatctgaattgcactgtattagaagttaattgggagtttagaaaatacagacggcatttgtataccatttttcagaaatctggctgaggaagttttgaatcctggctctaccacttaatagttttataaccttaggcaagttgatccatcttctacatctttaaaatgaggatcataattcctaccttatagggtttctgtgagaattaaaataattcatatatgtaaagcactttggaaaacgatctgcatatactctgcacataataaatgttattatgattattaaggaagaagggagatagatgatagctagaggaagagttggagttgatttgtttattgtttggttgtttggttttgggggcaagaaggaatgagagaggttcttcccattaataactgaggaaaagtaactaggtttgaacctgagactttagcctccataatggaaaaacttctttagaactctccgggccttctaatcctggtttactattaactctgcaggacacagtgttcaagttatcttccattccatttcctatggaaagaaagaatatttctggccaggcgc

SEQ ID NO: 5123 - DNA, 1077 bp, Homo sapiens
gttgaagacctaaagtttgaattgcagctggaacttgtacgtatagaagggaataagactagtattgactagaattgcaggaatcaagtcctttggtatcaacatattatcattcttctccctctgtctctgggaacccagtgttctcatgctgccctctgatttgttggagctttaccaccagtgcctctcctcctccaaagttaccttctttactcctacttttacccttccacacaggcctctaagtgtagttactttatttaaaacagtacggttttaagttaaaatgttcccatccctattttttcctccacatgttttgcctgttaactcaaaattcaaatgaatgctggaatttttggcacaatgggaagatgttcggagcaacatgctttcctttttaagtcacattgtttggccaatacttgtatgtgtaagagtagctttgaagagaagaaatatatgtaataccagtcattcccttccctctgggaaaatgaaaggaggcaaccaggcagagcagagcatattctcaacactctctgcttctctaacttgggggaatgtaggcatttgggcttttctacatgtagaatcatagagttttgaaggagaaaaccttagaaagtatttaatccagttgttttaaccattacagcactcttctgttattaagagtggataggttactctcccatttttaagagtgacttttttaaagttctcaatctttggggattaggacagtgtggtgatacattgttatgtaaaatattctttaggacagataaagaagggtttgagttaatttatttatttatttatttatttattttgagatggagtctcgctctctcacacaggctggagtgcagtggcgcgatctcagctcactgcaagctccgcctcccgggttcacgccattctcctgcctcagcctcccgagtagctgggaccacaggtgcccaccaccacgcccggctaattttttgtatttttagtagagatggggtttcaccgtgttagccaggatggtcttgatctcctgacttcgtgatctgcccacctcggcct

SEQ ID NO: 5124 - DNA, 2055 bp, Homo sapiens
gaaagcttagtcagagtgcttcatagctgtattacatgaacttcttaaactttccttaatgtggatgttaagaaagtgaagatttaataaaaagaaattcagatatttttaaaataaagggatatcttatatacatttatttgaaattgattttcctgacaaaggccatcactgaatactgaactcgttaatgggctttttattaggtctaagtgctttcctatcatttctcagccatgcaacacagtgagataaaactggtggagtctctgcatctgcatgtaaaatgatagagaacagagagtaatcacataaagaagctaacaagaaaaagcctttacaaatagtcgatgctcaataaattcttgtggattgaatttcttaattaacaacaaaaggaaggagcccagaaaaagtgaatagtaattcagattaggagcacaagccatcatgccaaaatgaaaatcaagctaggttttaattaatggaaatttgaaagaagatacattatttagtgaggaaaagaaaaagaattcgtaagacatggacaactcgtggccctaatggcaaataggagagagactagtgcagaatatgacttgcacgccagatgacattgattgcatcatttttagaatagacctaaacttgaaagagacttaagtttatcactgaaggcatgtttaccacagctttttaatttggattttgaatattgcagaacaaaattttattgtataacataatgtatactactacttcagtaatataatgtgatatttacagtatgagggcaaggatgtttttaatgcttcatttactattatttccccaagtctctaggacagtgtctggcacactctcaatatttgaatgaatttctgaacatactgccttacctgataactgtgttatattattagatagtaatatgaaaaacacaaatcagctgatgtcaattcctaaggatatggaagtgaaaaatgtgggattggctgttttctggtttttttctacctagtatttttatttgtatgttgtaagaattacttgggaaattgtgcatttaaagttaatgccatagtcaagagatatgtatgaatttttaaaaattcatctgagaaaaactggggtttggagtcttcatcctgtcaataaaaaaatacctgaaatcagattggcagtttttttgtaattaagtgtatttgtttcatcactgcattaatttcttataaaggattattcttattagtgcatactctgtgctttgataagagtatttcaaaacataagcctgtttggtgttgaattagcttagaaaaatcagatataaacagactcctatttttaaattctctcaagcctaccaaaagatttaatgtggttttttattatttactatacacaaaaagaaagaaactcagtaacataaataagcatttcatggaaactgatgtaattgaactattaagtgatattctaggaaacactagtgtattttagttttgtttaaatgtagagttaattatagtgatcaactttgaaatacagtagtttgtgaactgcttttagtagattcagacagggaaggttatccattaaaatcaattttaattgttgtagccttaaaaaaagttgctgctgtcttctaggtatagagcaccaagactcacagcattctttcttggcatttttgaatacgcctaccgatgctctggatcaatttgaagtaagtattaaacatgtcacatatcctctggggtcaatttaaaattcactttgtaatttaaagttcacttataataaaaccattttattgcttcccacatcagaggacctagaatcttaaataaacaaaaacatattagcagaggaatatgttctgcattcttatggagactataatcccacctctgtttaacaaaacatctaagaaagatttaatcatgagagtcattataagatttaaaagcaatttcatctcccttaagaaacattaagagcagaacaaatcccaacttttgaaataatttgacaatttttttattctccaaa

SEQ ID NO: 5125 - DNA, 1050 bp, Homo sapiens
tactaaatataatttgaaaactttctgtctaaaattataattgtatcgttagctagatagccttaagacagtaagtagaaattaggttttggtagactttaatcttccctctttgttattttattgatcatttcagaaaacagaagagcttaattacaatataaccctgatttttgcagaatatcctacattaaactttctaaatttaatatacacttcagttttaagaatggtatgttgtttttatgatataaaatggcagaatccaattgagaaatcttattatttagaaaacctcacacatttgtgcatctgtgttaattgttagatttaaagagtgttaattctgtgtttcaagggtgaagttttaataatgtatcagctatgagtaacttggacttttgtaaacatcacctgctctaccatgtacataaaagaacagttccataaacctcttcccagttgttgacaggtagtatactatggtagaccttttcaaagaaattatttaagactatctttgaatttcctaccacttatttctttaggaagctttaaaataacatatattgcactgaagcttttttgttttacttttgtactttgtctttatatattctagggtcagcgatgaaaaggatgcacgagggtatcttcaggccttagcttctaaaatgactgaagaattggaggcattaagaaattccagcttgggtacacgagcaacagtaagcttctatgattttgcatggaggcttatcatattagaaaaaagagatttaaaaaacactataataaatccaattacttatatcagtttgtttagactttgagcctactaaagagttttttatgagaaaactattagtttgggtcttttccagtttagaaaaacataacacacagctggttaactataataatttaaatgttaaaaataggatggaactaaaaacacagtcattatttcataggatatgccctggaaaatgcgtcgttttgcgaaactggatatgtcagctagactggagttgcagtcggctctggatg

SEQ ID NO: 5126 - DNA, 1087 bp, Homo sapiens
tatcatctgacagacataccaggcatttcatttatcacacggtgatgttccctgctaggacaaaaaggagctaagtagattcattggcagagtacaccaagaattccatcttcatatctgcacatatccagagacccagaaagtggaaagattcatttagtttcatacatctttcatttaatgggagattaaaacctctccctgaagccccctagtggacttcttctcaaggtaccatttaagttctaactaggtcacatacctaattcttgaccaacacttgcaatgtagaatggaattattatgattaacttaaaccagccagttttgactgggcccaccttacatgtgcacactgtagcctgataattgaatttggttcacaagacagaagagatgaatagatgtcgggtaaaaacaagcagtatctgccgtaggggatttatgtgcctcagaagtcagtgttagatggattatctattttgatgttaaagttactaagaataataagaagagtagtaatggaaagaacagcagagaacaacatgtaaaatccttatttaaaaaagagtaagatagggaagacaagtggataaccacataagcaggaaatggtcatttcagtagacctaggaattttgaggaaagaggtggcaataatgagcgaggatgcctgccccaccttcatacctgtggtaggtggggtacaggaggaaaagtagctcctattaatgtccatttggtattctttggtcttttgtttgtttgtttttttttgagacagagtctcgatctatcacccaggctgggtgtagtggcatgatctcagctcactgcaacctctgcctcccaggttcaagcgtttctcctgcctcagcctcccgagtagctggtattacaggcatgcaccaccatgcgtggctaatttttgtatttttagtagagacggggtttcaccatgttggccaggctgatctcaaactcccaacctcaggtgattcatctgccttggcctcccaaagcgctgggattacaggcatgagccaccgcacctacacctcccctgcattgggtatttttatgtctc

SEQ ID NO: 5127 - DNA, 1058 bp, Homo sapiens
tgaagcagtaattagaagagtttcacgctgttgaatattctctagatgtcaagcaggagaactttcaacccattaattctaccatcctttcactgaccctcacttcacttatattccctatttcccccttaccctgtttaaattccattgagaatgattataatcactccttgtatgccatttcagttcctttgactgtctctcattctgttatatttgttttgctaagtgaacattaactattacaattttattctctacctgtacagttccaaatgactagaaaaaatagctgactattcttactggtctactttaaattcatgattaccaacctcaagtcccccttgtctgacaaatgtactgtattaccctagtatattcactcttccactcacctagtaactattttttactttctttttttttaagagatggggtcttgttctgggcagcagaagggctggaatgcagtggtgcagtcctagctcactatagcctcagactcctgggcacaaatgatccccctgcctcagcctcctgagtagctgggacaataggcacaagccaccatgcccagctaatttttaaaacgatttagaaatggagtcttgctgtgctgtctaggctggagtgcagtggcacagtcatagataactacagcctcctactcctcaagccgtcctctggccttaacctcccctgttgctgggattacagatgtgagccactgcatctggcctatttctttctacttgagtttgaaacctctgtcatcctcactttcagcttgcatctcctttcactgaaaggattgaggcaaaccgcagacaacttccacaagctccagttaccatatttaccgcctacttactgttagacccaaattctctgttcttttcatggatgaactgtgcaagcctctagtaaggccagtatcttccatcccttcctggctagtctagtgcatgttttgctttcatgtcatgaatttttttcttcttgtgtcatctgcatcatcagatcatttctatcagcttacaaatgtcagttctcca

SEQ ID NO: 5128 - DNA, 1039 bp, Homo sapiens
cacacatttatgtttggaaacatacacatatgtttggaaacacatatgtttggaaacatacacgtttggaaacatacacatgtttggaaacatgtttggaaacatacacacgtttggaaacatatatgtttggaaacacacacatatgtttggaaacacacacatatacacacacatatatgtttggaaacacacacacacacacacatatatatttattttattttatttttttcttttggagacagtttctcattccatcacccaggctggagtgtagtgacacagtcacggctcactgcagccttgacctcccaggctcaggtgatcttctcacttcagcctcccaaatagctgggatcgcaagcatgtgccatcctgcccagctaatttttcatttttattttttgtagagaaggggtctcactgtgttgcacaggctgttcttaaactcctgggctcaagtaatcctccctcctcggcctcctttggcctcccaaagtgctgggattataggcatgaactatcacacccagctgatgaagcataatatttgaataaaccaagttgcaaaaggcaatgcacagtttggtgtcatttataaagacattttaaaaagtacatagttttatgatgttgtatataggcataatagtgtaaaatatgcatggatacagtaaacaccaaatttaggatagtagctatgtctgggtagtggagggagaggatgagatcaggaatggtaatagaatacttatgtttttcagtactatctgtaatgtcttgttaatttttagtattttctattttatttatatagtattatgaataaaatatattcacataatatgctttatgtatatgtatatagtttataattactatctataaaataagcaaagatattattgatgcatataaatcctgtctttgcagttcctttaatctcctttacaatctaagaagtactataccagtagaagtaattcgtagtgactgtatagcttaatttttaagataaagaataaaatattttttc

SEQ ID NO: 5129 - DNA, 1030 bp, Homo sapiens
gtgttcacaatatatgaaaaaataggaaatctcagcacagaactagaaacaaatcaaatggaaattctagaaatgaaaaatacaaaatctgaaatgaaaattttcactgcaaaaaattaacagcctagtggagatgacaaagtaaagacttgaagttaaataagccagaagttattgaaggtaacagagaggaaaagattaaaataatagtagtccaaggacctgttagaaaatatcacaaggttttatgtacatgtactttgagatcaagaaggagaggaaagagaatgggccagaaaaaatacctgaagaaataatggcctcaaatttgatgaaagatataattttatgtatttgagatgctcaagaaacaccagggggccgagtgcagtggctcacgcctgtaatcctagcactttgggaggccgaggcggatggatcacgaggtcaggagatcgagaccatcctggctaacacggtgaaaccccttctctactaaaaatacaaaaaaaattagccggacgtggtggcaggcgcctgtagtcccagctactcgggaggctgaggcaggagaatggcgtgaacccaggaggcggagcttgcagcgagcggagatcgcaccattgcactccagcctgggtgacagagcgagactctgcctcaaaaaaaaaaaaaaaacaccagggaagataaatatgaaaaaggccatgtcaaggttcattatagtgaaactattgaaatccaaagacagagagcaaattttggaagcagcaaggaaaaaatgacaagttacatttgggggaactacaattccattaagagatgaattctcattagaaaataaagaagctaaaagagagacttaagaattctatatatccagtgaaaatatccttcaaaaataaatgtgatatgatatttttaagtaaaagaagaacaaaaagaacaagaagccaggggtgatggctcatgcctataatccctgcactttgggacactgaggcaggcggatcacttgaggttaggagtt

SEQ ID NO: 5130 - DNA, 1027 bp, Homo sapiens
actttatatttaaaaattttaaaaataccagcatgaatttggaaggacacacaaaaaataagaaataaattaaggatatattggatgatttaaaaggtaccctcacattttaagaggaaagtaggaaacagcagaacgttgttggtgaattaatcattcaaatgagagtatctttggatggtgcaaaatgtgagaaagagaaagatgctgaggagaagtacgtaaagggatactgccaagttagaaataaactaaaccattttctaagagtgattttcaaactttggcatgcatctgaatcctatggaggaagggtggttgaaacccagattgttgagtcagctgcagaagtgctgattcagtgggttgggtcgggctggggaattgccatctctaacaagttgccaggtggtgatgctgctgctggtgtagtgaccacactcagaactatgctctaagacagcagtgactgtttcttttaagttttgggtggtgagagtgatctctgagaagaacatgaatgtggcaaggagtagaatgtttctgtttcagtgtttgctttttaagatgtgggtgtcttaattgctgtttcatttaattagtattgaagttctaagacattattaaaggaagactactttaattaaacaatttgtattttatcagatctctgtttggcttttgcctattcgtgtgcttttctctgtgggtatctgattgtcacagtttttattgaaaataaagatatggaaatgctttgaaaattgtacaatgcagttttttttttttaatttaaatttttgtagagatgggggtctcactgtgttgctcaggctggtcttgaactcctggactcaagtgatcctgccacctcagcctcccaaagtgttgggattacaggcatagctaccacttcttgccacagtgcagccttaaagatggtattgtggtctcaagagtcagttatagaatgagaaacgaaagtgctattttgtggcttaaacagtaatccaaaatcctagctgag

SEQ ID NO: 5131 - DNA, 1672 bp, Homo sapiens
ttgaacccaggaggcaggggttgcagtgaaccaagattgcgccactgcactccagcctggcgacagagcaagactctgtctcaaaacaaacaaacaaacaaaaacgttgggcctagtaaatacagcaagtaggccaaagacacaggattttaaatatattctgcttccctaattttcaaggctttaaatatgcgaaattagtttctttggtttaacacacatttcctatgtttgtaattttaacatatagtaataaaaggaatttgaattttttcaagactctttaaatcttaatgtcaactcagtaatatccctgaaacaatatcttcattctgtaataaaaccttaatttcaaggcattcatgtgtcttgtactcactagccttcatgctaagtgctacattatcattattgtagttaggtagatgagaaaatgaaatgtcacagagattaatttttcaacatccacttacaacatggagtcagtatttgaatacaggtttctctgactacaaaacccatttttccactatgtctagttttctccctcacttaaaaataatatataatgtacacacaaatacacatgtatatgtaatacatgcttataaagcaatgtagaacataaagttataacatcagctgtaatctaacaacctacagaatctcagtgaacagtttgatgtactcttctcatcgtttctttacaccacatacatacccataaggatccatatctaaaattagttggcttctgtttattatatacacctgagaaaagcccattctgatatttttacagtattagaaatgggaagagacacatatggtgataattactatattctacgtagtagtggtttctaaatgctgatctataggctgatgctggttctaataaagttcttactgatccaaggtgaaataaggaaaacataatgataatatgaatttctttcaatgtagggactatcctgtattccaagttttttctttcattgtttttttgggggagggggtggattcaaatgttcattcttctaaaatcttggaaagctgtgttccattgttgtaggtgaagatgataataatgatgatattagctctttgcaaaatacaacaatggtaaccctgtgttgttctctgccccagtctttaaaaattttgttttactgctgtatgaaatttagaagttttgtaatgactgctgatcatcatcttacacagtttcttgttaattagcagcatatgtaattaactgcataaatatttgacccagtcctgttgaccttgggatacagtatattgatttttcacccttattagtttactgagtacattttatttttttcattcacagtacctggttatggattattatgttggtggggatttgcttactctactcagcaaatttgaagatagattgcctgaagatatggctagattttacttggctgagatggtgatagcaattgactcagttcatcagctacattatgtacacaggtaaaacagtccttcattgtacctggctgtgagttaccatgtaatatctagcaacagaggcctatttcttgccagatttattaattatggtcttggatacatttatcgtcaaccaaaaaaaattattttgagatgattttggttgttttgctttgttgttgtt

SEQ ID NO: 5132 - DNA, 1042 bp, Homo sapiens
aactagaatgtttataaaatttcggattgctattatagtgagatgaagccaggagaaagtagtcttctaggctctgacagtctttacaaactctctaaaatgttagcagtaaaccataacctcaggttggttaaatcataaaacaggacttggtagtaagtatgtaaagtgctttctgttttccccttaaaaagaaccagagcggccgggtgtggtggctcacgcctgtaatcccagctctttgggaggccaaggtgggcggatcacgaggtcaggagatcgagaccatcctggctaacgcagtgaaaccccatctctactaaaaatacaaaaaattagctgggcctggtggcactcacctgtagtcccagctactcaggaggctaaggcaggagaattgctcacacccggaggcagaggttgcagtgagctgagatcacgccactgcactccagcctgggcgacagagcgagaaaaaagaaccaaagcatagtgttgtatagattttagtaatttaattgttttgtggatcatggctgttgaattttccttgtgggaaataataatcacttattatatatagcatactgtgtgataatgtttttagtgtatctggaatatggtgtagccattaagaaaaaattaggtagatttctgtgtactgatacggaaggatgttcaaattcattgttacttgaaaaaaaaaaaaaacttacagagcactataatctcatttgtataaagaccaaaaaatataggggaggtgggataccatgtgaatatataatctgtgtgtgtgtgtgtatgtgtgtgcacgtgcacatgcatgcttatatagacacagattttctgagaggattttgaccaaagagttaataatggtaacctctgcacacaacaattgggcaatgaaactatgggaacatgactcagggagacttttactttcttagagttatctttgaagtttctgtcatagtgttatttttgtttctttttagttaatgtattacaaaattatgatacataaaattgattttta

SEQ ID NO: 5133 - DNA, 1031 bp, Homo sapiens
ttagatatcaaatattctgtttttaaaggggggagatattgtttagttttttttaaaaaaggtaatgaagtagatgttactaaagcctttaagcatgttgaatccacagagcacctttatgaatatatatatacccagggtatatgtgcatcatgatttggttaatattgatctagaacagggcttctcaacagggacttcattgacaactggggccagataatgctttgttggaggggttgtcgtgtgcattgtagaatatttagcagtatccctggcctctacccactaaatgccggtagaacccatcctttcccaattgtgacaagcaactgagagcagtgtgatatgttgaagcaaaaacgtagcctgtgctttatatctagactcaggattcaaggcattgataggaatcatttaatagctagatatttatggataaaatcatatgctgtctggggtttgcttaaaaatatgtatatgctcctgtgtgtgtggtgctaggggatggtagtaagtaggtgagggtctaaatgaaataagattgaccaagaaaataattgttgaagttgagttcattagtaggagggggtttttatactagtttctctacccttgtatacgtttgaaattttgtatcataaagagtttatattgtttattttcttattttaattaatgtttttgaagagacagtcttgctctgtggcccaggttagagtgcgatggtgtgatcatagctcacttcagcctcaaactcctaggctcatgtgatctttctgcctcagccttccaagtagctaggactacagaggtgcatgccaccagcctggctgatttttttttttttttttttgcctgtagagacagggtcttgctatgtcaggcaggctggtttcaaacttcaggcctcaagcgatcctctcacctcacttcccaaagcgtgggactgcagatatgagccactactcctggcctattatttttatttttaaaaaataatttttttagttaaacagattagcatagat

SEQ ID NO: 5134 - DNA, 1030 bp, Homo sapiens
tataaaattccatagagctcattaaatattacttggtaacattttgtctgtggtgacattttttaaggcataaaagacaaattcaacacaattgtgatataattatgataaaggttacaatccataatgctaatttaatattagtggaatactaaatggaaacccttgtaatggggggcttatgcagctatatttaaaggatgtctgcaaactactttcttctatagaaagacattttgtaatggttgatttctaacgtgacgtaacttgtttatattattctgtatttatctgtattctgctacaagcaaaagtcagcaggagttttgaacatgccctctagaaattctgtttaatgctgattatgcagtcactttgtattttgttttatattacaggagttgtagtaaaatctagtaatggaagaactgcctgcatttttatgtagatttgagggaaggattgactggagtgatgttaaaaatatccagcagctggtatggcctggtcagaactgctgtcacacatagatttggagtggacttctggggggtccgctgctgtgctgtatcatggtgaagggttgaatgggataggcattctggggcttcagggaagcagaacttaactggtgtagaattctgtcagtattttaactggtaaaaggtgatactgacgagcaggctgagtaatagccctggaagttagtaagattagtaagaaaataatgacaaattcgcctttagaaatctttatctgtcagtacttgtagcaacccaaagatgaacaaacatacagggaaaagcaaaaagtgtttccatgatgacagatatggtggcagtgaaagtaaatacttcattatttatttatttggagaaatttgaaaacacaaagaagaaactaataatcacttttgttctgttacccagaactaataacattttggccaagtttttgcttttagtttttttttttaaactaaaaaaaacaaacaaacaaaaaccctcagaagtgaagcacaaatatattc

SEQ ID NO: 5135 - DNA, 1027 bp, Homo sapiens
gggccacatgcggcctgtgggccacgggttgggcaagcctgctgtgataaccattgctgtagtgcttgtcatctttgtaggaaggcgtgtagtgaggcttacaaattttgaacttgggaatgtctgtctgcctccgtcacatgggagctgagagccatattgaaatggtgctcacgtggtggatagaatagggtcttcaggctacgtgggagtcatagaggctacctgagagagaacaggcttttcttggttcagaaattctaggtttgagaaggaaagcctacatacagccatctccacactgcacaatagatgagcagttttcagcagacatctccacattggtgttcttattggtctaaatgtacacctggtcagaaatggttttcatggccccagatgttcaggaagagctacatgaactctgttgatgatgtctttttaattgttagacattttggccactgttcctggatcagcattttttgggcagacccattttcttaacaaactgtactctctgaggcagcttggatctatccaggaaagtttccactagttaatttgcatagctcatgttggcattatggagactcaacagtttatctgcagggtgtgaaattggggtattagtcagcaccgtaaggcagaaaaggtggccagacccactctttgggctctggatcctggatttactgaaaccgcagataccctgagcctgaagatgccatgtccagtcctaatacctggttcctggaacccacctccaccactgttgccacttgaacaacataaaaaaatattttaaggacatgttatcttgctgaacctaaaagataaatagagaattctacatgctgcagagactacacattcttttctagcttatttatgtatttatttatttaaaattgagacagagtctcgtcctgtcacccaggcaggagtgcagcagtgtgatctcggctaactgcaacttccacctcctaggttcaagtgattctcctgcctcagcctcctgagtagc

SEQ ID NO: 5136 - DNA, 1030 bp, Homo sapiens
ttgatataaattaactttctctggagttacacacaaataacgaagatttaagagaaccttggctgaaataaatttccagttgtttggaggctaataaataccatgcaggtgtaaccattaaaaaaattattatataaactactatattatgtaaactacaatattttagcttttctgtgtgagaaagtgatttttgtttgtttgtttgtttgagacagagtcttgctctgtcacccaggctggagtgcagtggcacgatcttggctttctgcagcctcagctcccgggttccagtgattctcttgcctcagcctcccaagtagctgggattacaggcgtgtgccaccatgcctggctaatttttgtatttttagtagagacgagatttcaccatgttagccaggctggtcttgaactactgacctcaagtgatctgcccacctctacctcacagggtgctaggattacaggcatgagccactgcacccagccaaaaatgatttcataaaaattgttaaaaatctgtagctgctttgttaccttcattaactctttgtgattaaagttgcaagtttattgcagtaatgggaatgtgttagattaatgtttaggtgagttatattttaaaatctgtgtagtatatttatagttcacccagtaattagaacaccgtatcttaattccttattgttcctctagtgtgtcacaggaggtagagtttattgatgctgggattgcggatgtgaaaataacattctcagggtatcttatgacttaaaaggccgattttttaaccagtgatattttctgtgattgtctataatttggtttaaatttatacttaataagggccagaatacatggctatattcttagtatcctttagaacattatttcttagtcaaagtttatgaggcatctagcaacattttacatgatatataaaattggaggtaaatgtgctttttcttgggaggaattcatagccttaaactattcttggaggagtgtatgattctctctctgtact

SEQ ID NO: 5137 - DNA, 1030 bp, Homo sapiens
tttcatttaacagtatgcattagagatgtttctattaattcatgtgggtctacttcattttatttgctgcatatgtttcattgtatggatatatgtgggtatagtgttttgtggcatggatatcccgtaatttatataccatttcggtatttcctaggtagtttccagtttttcattctaacatacagtatttcagggcttatacatatactcagaagtggagtttttgggcaaaaggaatgtacatttaaaatatttagttactgcaatataatatttcttccacttcaaaggataccagtttaaacttctaacattgggatatgagagtccttgtttcctaggaacagagtattatcagtcttttttgcctatcccatggtcagtaattgatacttgttacattagtataaaaatctctgatttacttccagatgttagacattttccatatggttttcttttgttttgaattgccagtgcctatttttctaatattaatatttctcttagtgatttgtaaaatctgtatgttctatgtgttaattttttgttacgtaaatatttgttacaaatatatttttccaatgttgttttatttttcttaaactttgttcgtgttatcttttaccttacaggagacttaagttttcatatagataaatcttctttttattattaatacttctggctataaggctctgtgttgctaaaacagctttttccatttcaatgttatgtgaatatgctccattatattttcctagtattactgtagattttaaaaaattgtttctctaattatggcattattttttgagtcgtgtgagctatggattaaagtttttttccaaatagttcatctttctcccactcatttaaaatacctatatctgagcccatttctgcttcattgttctattggttcaggggtcagcagactgacacacaagacaaatctggcctactgccttgtttttgtaaatacagatttattggaacatagccccacctatttgtttacatactg

SEQ ID NO: 5138 - DNA, 1046 bp, Homo sapiens
tccagtaagctttatgaagaaatgccaagaaaatgtttagttcaaatttactcttctttcatagaatgactttcactttaactgtttcacttgatttctatttatgctactctacagctgtccatttgtgaaagttaccagcctctagaatgtaaagagctatatatgattctattctagcatattgaggtgaagttatagatgagcagtgtgttttgttcagcttagttttgattaattttccttttttatggatattgaattatctttataattcagtgaaaaggcagtgtttgagatatttcatgtgctttcttctctgtaaagttctcagtttttgtcactgaaacctataagccactgagcggctgctgtctgtatctgcttatgccagatagtccttggctttcatttgccagaatgcagcaagctttttgttatatagcttcaaatggcttttttccttaaaagaagcatgtttttgctggagaagtatgaatctatattaacagttgattataaaggacaaaactctgggacagccaaatggaagtgatgcgtagggcaaggtttagggtaagggagtagagggggaggatttccatgccctccttaattttcttctgagtttttaggttatagcaccaacatactaatgacactagcttgtttatatacatgtttagccaaattatgaaaagtaaaagaaactatttacctgaggatattattacaaaaaaaatgcctcaagttgagtaagggcaattataatagtggttgaatttctggtactattttgtcataatttcacttgttattttttatgtgtttgtgtatatttcttggatgtgctttaactgttgcttgtcttcagtaccttggcaatatatatgaatttggaattgtggcacgactctggggagggaggtattctggaaaatgccatatgtgtgaaatttttacctactacactgagaaagagagattttttttgagacagataaaaaaaaacattgtatatagtcacactgctttttctcagtctg

SEQ ID NO: 5139 - DNA, 2458 bp, Homo sapiens
caggttcatcttgaactcctgaactcaggcaatccaccgggctaggtctcccaaagtgctgggattttaggcatgagccaccatgcccgtcctcccattttgctttttaaaattttgataaaggaataattaaaatgccatttattggtaaataataactgaaatgcatagctatactaatataaggatgtaaataactattttactattaacatacatttgtatcttactgatagtattttattatattgggattgaagatgccaatatttctgtgtgactatgcaaaaaaatcttacaggataagctttttgcattggaacattttgttgttatataattattcttcagtaagtatcaagttaatgctcattcatccaccaacaacaacaaatatgagatgactaattacattttatttttatatttatatatctccaatctgcacatcagtggtagagttctggacctcaacgcagagggttaaaatcatcatgaaaaattattgatgtgttgttcatttaggactttttatgtattgaagattatgcagcacccgtaaatgtatttgtgacctgacagtacgacacaaacgtgtggtgtggtatgtagaaacttaatgtacactagtgtttcctaaattatatttctagagatataaatgaatattctgaaaattaagagttcagtggctgtgtaagattggaaaatagtgctttttgtatgcctctttggatattacaaagcacattatcatagaaaaagtttcaaaaagtttgctgtagaaaccatttaaactttgttttacctagaatttgcctgagtaatttaacattggaactccttatgaagaacagctgacagagtttgggaaatgctggtatatacttaaccgtaggtagtgtgagagcctttaaactggttgtgtgacagaaagtggttaataaagtcttctaacacataaattgtcacaatttatatcaatttccaaacaaaggcaaaggtttgaaggtttgcctttatcctttccatattttttagcgtatctgtttatgtcatctaagcaatattaagttggtgtggagttttgcatggggtgtatatatctttacaaagaaaggacagtgagacttgatacatgacttcgaggagtttatatgtgcacttcttggtttgcaaagatgcacctgctaagctagtgattttgtttttttccagtaaagctttattatgttctaatccagttacctctctaaccattggtacagaatttgggatcgatattgtcatggctgtgaaatagaacaatgctaattagattttatgaaagttttgtaaaagcagtatagttatcttgctacagcaagaatcccatccttaagtatcatcgtttacttagagtggctaatgcaatgccccaagttgactcagatactattaaaagcactcaagcatctacttagaagtggtatgccctgagatttaaaaaatacttgtttgaaaagattaggaaaagcccccgcaatgaaacagtgactaaagcccctttttgagattgtattgctagctacctgtgatctggccctgagctaaaagcataactaacaaacatttaacaacagactaagttcgggtatgtagtgaagctgacatatgatatcataaagcttttccatactctctacttatagagattctcctagagtttatggttaaaactacaataatattttcaggtctactgtagtatctgtttctgcctttttgttgcatgcgttcgtaatgtgttacccatttctgactaatacatgctaagttgacagtttcttctaagagtcctttgctgtgttatgttgcttgaggctgtgattaagtgtgatcatcatatttgtctcttttgcctatgtacctctggtaatcccagttaagtgtagtagctcatgagttctggttttattcaacctctgtgtgcatctggctcagttgacttctctgtattaaacatgtacaaatgggttacgttcctggatcttactgatcttattaatcatgtttgtttttccattaaatactaagcaataacaacttccttattacatgtacctctaacttgaaaatactgtgaattctacacatccaagacctttgtagaaggaagcaaaaaaaaaaaaaaaaaaccacttagaacatgatcctttgatcatgtcaacatcctgcttaatatacttcagtgactactgaaagctttcagaatgacatttgaactcctctttagcatgccatacagaatttttaatatgatcctgtttacttctctttttcttcactttatttatttatttagttttttgagatggagtctcgctctgtcacccaggctggagtgcaatggcacgatcttggctcactgcagcctccgccttctgggttcaagtgattctcccgcctcagcctcccg

SEQ ID NO: 5140 - DNA, 1048 bp, Homo sapiens
gaaaacgaggaggtctgagaagttcccaggtatgtgcagttatctcttcacgtcacctcatgggtcccatgtgcaaactgagggggagttagtatgaaacatgcatcgaaattcaggccatgaagtcaacaagctcattctgtggaaattccggctggccatattggttccaattggtttcaggcagttttttcttttttaagagacagcctccctccatgttgcccaggctggggcacagtggcctggaactcctgggctcaagcgacccacccacctcagcctccctaacagctgggaccacagcatgcccgaccacgctagacttatttttactttttgtagggacagtgtctccctgtttttttctccctcaattttttttcttgatatcataacatgggggagtttcagggtttcagcaagttgtttattttcttatgtgccatcctgcaagctcaagaatttctgctagtcattggtctttggtgtgaggttttgagactatgttttctgaagaggccatatatgcaaagtgactcccaaacacagaaggaactgagaaaccaaagaatgaggcagacaaatccagtttgtcacttggaggtgattttttggggaactcacagaagcatggtcttgggcagccacaagacgggtagatctctgcactgttaccccctagactcagggcttatatatttttggggaaaaagtatatgtgtcctggaaggaatgtgcaggcaactgaaatagtgctatgggcatcacagtttatgatgtatgctgtagcatcgagggttgttttggaggaatggcgagacttacggtagataggtgtttctacatagagtacgacttcaactagacatcttggaggcactcccagactcatgcttagttaggcatcagtgtggcagattagaatctaagaggagtgactcttgtccccatactaaagatggaacatttttcaaaaaagtacaagaagacagaatccagcaacatatagaaataattatcttccatgccaaagttggattcctcc

SEQ ID NO: 5141 - DNA, 1075 bp, Homo sapiens
aggcttttaggctgcatggctcagactcccttggtcaccgcgcagcttctcagtgcctctgtcttaatggtcccttcttcgtccttggggactgggcgcatgtcgggtcctttgcagcttggactgtgtccatggtgttagctcactggcctcttccctctgcccaggtcatcatgaggtcctgctcgggcatcaactttgaagagttttaccacttcctcaaggtcatcgctgagaagaggctcctggtcctgagggaggcagccgctgaggacggtgctgggttgggtttcgaacaggcagcctttgatgttgggcgcatcacagaggtgctggcctccttggttgcgcaccccgacttccagagagtggacaccagcgcgttctcaccacagcccaaagagctgctgcagcagctgagagaggctgttgatgctgctgcggccccatagcacctgtcgtgaggatagaaggacgggtggaagagaggcagcctcctgctccggggcccttccagaaataaagaccgccctccctgtgacctggggcccacccctgtcgaggcttgtggcctggctgttcatggccactgcctgggtgcctgttttcaggtgaggcccaatgaggtcagggacccaagatgggatgtggcccttctgacctgcagcaggcctgctgggagctcggagatggtgccaggacctggctcttttgggggccctgcctccttaggccaggacgcctgagctgacaggagtctgtgtctggtgtgccttctctggtggctcctcttaataggccagccctgtcccctcgtctcaggccattggaccacccctggctctgccctgtgggttcagggaggggttggagcagtgctgggcaagctcaccagggcctccaggcagggctggggttggcctccatcacctccaggtgatgggctgtggaaccagcggcctgcgccttcctctgggtacccagagtggagggctgggttgggctggcctttgccacctccctgcctttgcagggcctgtggacagctggagaggccacagatggggtggaatcc

SEQ ID NO: 5142 - DNA, 1638 bp, Homo sapiens
gtgctgagctggatggaccgcgagacgcgcgccctcgccgacagccacttccgaggcctgggggtcgatgtccccggcgtcggccaggctccgggccgggtagccttcgtctcggagccgggcgccttctcctacgccgactttgtgcggggcttcttgctgcccaacctgccctgcgtgttttccagcgccttcacgcagggctggggcagccggcggcgctgggtgacgcccgcggggaggcccgacttcgaccacctgctacggacctacggtggggcggcggccgcagaccccgggcggggaggaaaggccggcgggacccaggcccgggaggcccccgcctagagaggggcaccagggagggtgagggaggccaggcgcgtggcccctggagagttcctctgcagacggtttggagtgaggacggggcccagggagatggcatggaccgtgcctttcatttcaggagacgtggttgtaccagttgcaaactgtggggtccaggaatacaactcgaaccccaaagagcacatgactctcagagactacatcacctactggaaagagtacatacaggcgggctactcctctcccaggggctgtctctacctcaaagactggcacttgtgcaggtaatggggcttgggacgcaccgaggcgctgccttccctagcgctgcgtgaacccagaggcctttctgatgaaggtggcccctgggtgcacaacggagctatttttccccgtgaggcactttaatcagtttaaaagaaactggattgtcttccgcatggctgcaagtgttgttctttgggaggtcaatatggttttttttcctttttttttgagagagatctcctcagcctccctagtacctgggattacaggaaggcgtctccactcccggctttttttttttttttttttttttttaaagagactaggtttcaccatgttgcccaggctggtcttgaactcctgagctcaggtgatgcatccacctcagcatctcaaagcactgggattataggcatgatcagtactttctaataagcagaaccattgtagtcagactgccccgccccctcccccgccagcagcgtctggctcagaggagggtctggggctctttgggggctgcagccatctggaagctccactggagccgattggtctcagttgccccactcgtgctgccctagtctcctcgtgcctcacgtgctgtcggtggtgcccttgcgccctcctcacagggactttccggtggaggacgttttcaccctgcctgtgtacttctcgtccgactggctgaatgagttctgggatgcactggatgtggatgactaccgctttgtctacgcggggcctgcgggcagctggtgaggccacggatgtgggagtggaacccgaaggggcctggtgacagaacggactgggaggcccagggtggcaggaggggggctgcttggcacaggcctcacagtgggtgccatcccttgagaccaaggggccacccctccttcagttggaccaggcctctggggtgccaagcaaagcccataccagcccctacaggcatgaaccaggcgctcttgctgccgcaggtccccgttccatgctgacatcttccgctccttc

SEQ ID NO: 5143 - DNA, 1035 bp, Homo sapiens
gatgacagcacatttgttcccagcctggtttactaaatattttatgcccactgtggagacccactgctcagaaaaaaagattcctgcaaagtattattgctcattggcagtgtcccgttcacccaagagctctggtggagatgtgccaggagatgtatgttgtttccatgcctgctaacacaatgtgcattaattctccagctcatagatcaaggagtcatttcaactttcaagtcttactatttaagacatttcataaggctacagctgccatagacagtgattcctctgatggatctaggaaaagtctattgaaaacctgctggaaaggattcaccattctagatgccttaaaaacattcatgattcgtgggaggaggtcaaaacagcaacatgaacaggagtttggaaaatgttgattccagccctcagggatgactctgagggatcccagacttcaggggaggaagtcactgcagatgtggtggaagcagcaagagaatgagaattggaagtagagcctggaaatgggaccgaattgctgcagtctcatgataaaatgtgaatggatgacaagttgcttcttatggataaacaaagaaagtggtttcttgagatggaatctacttctggtgaagatgctgtgcacattgttgaaatgacaacaaaggatttagaattgatatcaatttagttgataaagcagtggcagggtttgagaagagtgactctaattgtgaaagcagttccactgtgggtaaaatgctagcaagcagcatcacctgctatagagaagtctttcatgaaagggagagtccattgatgtggcaaacttcatagttgtcttgctttaagaaatttccggctgggcgtgatggctcacgcctgtaatcccagcactttgggagtccaaggcaggcggatcaagaggtcaggagttccagaccagcctggccaacatggtgaaaccctgtctctactaaagatacaaaaaaaaaaaaaagacatttccacagccaccccaaacttcagcag

SEQ ID NO: 5144 - DNA, 1064 bp, Homo sapiens
ggcttgtgggaaagtgtccctgcagcacagtgccctgggtattgtggaggtcgggaatcaacctgatttgtgcaggccgaggcccgggggcagggcctgaggggtgggatcactgggcctggcccaggcctcctgcgcccctttgctgcccccatcacctacgttgcttgccccttgggcagggcgtcctcactgcctctggaggctgcgatgggcagatctctcccccagggctgcacctgcgggggctacgaaggtccccaaaagcggtgaccctcctgcccccaaatttagtccctttttctgcctggggctcccttccgaaatctcacctctgtgaagctgtggcagggttgtctgtttaggggaaggacgtctcccaccctacaggcatctcagatactcttggaaagccccagggagggttgtggatgcctgtggaaccttctggttgtgctgcctctccctgctcagccagagcggggccatgtgcggacatttcacgggggttacatgtggttatggcctctttagggctgaagggacctggctttggttctctgctggcagagcgtggccaggggtggctccagggtcactgagcggggattgtgtgggaaccagagcctgcctccccttcctttaaaatactttttatttatttatttatttttgagatggagtcttgctctgtcgcccatactggagtgcagtgacacaatcttggctcactgcaatctccgcctcccgggttcaagcaattctcctgcctcagcctcccaagtagctgggattacaggcgcctgcccctatgcccagctaatttttgtatttttagtggagacagggtttcaccatgttggccatggctggtctcgaactcctgacctcaggtgatccacccgcctcggcctcccaaggtgctgggattacaagtgtgagccaccgtgcctggcccctttaaaatatatattttttaatgtgaaaaaatgcagacaggaaagagtgtatgtcagatacatgcacagtttaaaaagtaataaaatggattcctgtatagccag

SEQ ID NO: 5145 - DNA, 1102 bp, Homo sapiens
ggcgtgctgtggagatggggatattgcatctgtttctaacccacgtagccactggccacgtgactacgtaactgaggagtggaatttgtagtttgatttaactgatttaaagacgcacttgtgggtggtggcttcatctggatggggcctgcttgtgttcactctcttggcttgcaagactagggtctgaggcacaccttgtatcctccttgtagttgtgagagccacaggaaaagcaagaaggagaagaagaaaaagaaaaagaggaaacacaagaaagagaagaagaagaaagacaaagagcacaggcggccagctgaggccacctcctctcccacatctcctgagaggtatgccctggtccatatctgcctcttgggggtgggggcctggttgactccttccgagtgactgactgccattggtctccccaggcccaggcaccaccaccatgactccgactccaactccccctgctgtaagaggaggaagcggggacacagtggggacaggaggagcccgtctcgcaggtggcatgacagaggctctgaggcctgatggctggaccctgctcactgctgttgtgggaccctgaaccctcccttcaccttgcttgcctcctgcctcggaagctccttgggtgtgggtgaagcccgaggctgctcctgtggaagtggctctgggcaccagcctgtggggctaaagacttgacagctagctctggagcagccggcttcctggaaaacctccaggtttcgcataccagggatggcccctggcttggcctgcgaaggtgaacctgcccagatttatcagtagaggctggactccctctgtgtcctgcccatggttgcagcagccatgggcctatgagcggtctaactgtggccaagtatggtgacctctatttttctttatattgactctttgtatttcaataaatatattttaaaaggaaggtatatcaaattggaaggtcagtatcaggggttaatgagatcccactggaacgtcggagctggggtctgtctcccaggagtctgagacctggtgattttttttttttttgagtttcacttttgttgcccaggccggagtgcaa

SEQ ID NO: 5146 - DNA, 1024 bp, Homo sapiens
aggggacagggggctgcacctgtgataagcccttgtccccatgcagtctagcaggaaaggagagggagctttccccgaagaccctcctggaccagccccaggctcctgtgctggtgaggccgagggagagggatgtgggcataggacacgtagcaggatttccattttagaggcagccggacctgtcttcaggtcccttccttggtgagagacaggggtacgccagaggaagctgggcgctcggcctctgtgcagcctcatctcctggaatctgagtattgaaaactgggcttttacttcgcacacctcagcacagactcccatgggaatccaggtcacagcaaagcagccctgggcctccattctcctttaagcaagcatgacaatcctcacttcactgagtttttattaaaactagcaatgaccttagaaagcaaggcatgacctcagctccacttttgaggctgcagtccattcagagaggtttcgcagactcggtaacggccagaacagacagcctgggccctgccgcaggctgactcagaatctttgggagtagtgaccaacttctgcttttggaaaaacctctacaggcggttctgagaagtccaagggttgctgggagaggttggtgagtggcgtggtgattacatgtgtcttggaagcatcctgggctgggatttgataagaaaccattaggtggaagaaccttccttttaaaaaagatctcttcattctctgcctagcaggttgcacgccagggcctgtactgaccacctccacgtgccactggggctgtaaggaggaatggcggccgtgggcagcctgcttgggtaagcatggacttttaggtccctggggattactgtcaggggccaccccagggaacccctctcttcagcaggaaaccgccattctaatcctccctagtccttgctattgtccactgtcccctgtgctggaagctttgtgcccttgctcagcctggcagcctcttcctggctagggggccagaacgcctctg

SEQ ID NO: 5147 - DNA, 1033 bp, Homo sapiens
tgcaggggccctgaggtcaccctcgggtggaggggggagactgccccgcccacctagcaacccccagacaggttggaggactcacatgatgaaggctgtcacaccgatggcccagatgtctgtctgtggaacagccccctggccctccaggagctctggagctgggaggggcacatgtggttgggctcaggtggagggacacaggtggtgggcatgagtgagtggtcccaggtgggataggtggggcacaggtgtgtgggccaggtgtgtggctgagtgggtggcagtggagctgggagagaggacagcactggaggagagggggcttcttcctgccccccgccccaggtgaggtccccccaactgtccacacacgcacccatggtctctaggtagtccttgaacttgtctgagggcagcaccttctcctggctgaggctctgtgcattgcccaggtccacgaccttgagcaggttgtattcggtgatgatcatgttctcggacctcaggtccaggtgcaggatgtgctggttgtgcaggtactgggtggcactcaacatctgccacaggtagtccttcacctcggattctgagtaggaggccctggggggcagaagctgctcagcccaggctccggggtgggggccaccagggccagggctgagactactccccgtggactgggaggggcactggctgtgcagaggggcctggtcctccagccccaccccagaggcctgggtccatcagtccatcagtccgtccatcagctcaaccacaccaccccaggccaccctcacctctcggccaggcaggggagcagctcgggcccagagcacagctccaagatgagcaccaggtgccgggggctgaggtaggctgcgtgcagctgggccaggtgcgggtggcgcaggcccttgagggcctcgtattcgcgcagcactgctgtcttgtccttggggtggtaggggatgatcttggcggccagcgcccgcccgctggccttctcccagcattgccgcaccacgctgaa

SEQ ID NO: 5148 - DNA, 1603 bp, Homo sapiens
gaaggtggaaggtggtggagtgggggcaaggaaaatgtggccataccctggccagcaaggagctggaatcagaggaaagtgggagaacctcagaggtggccgatcctagatggactccctgcagggactgtgttagcaggtcagtacttaagtcctgggaaagccccagactgggcaggatgagggggacacagtcgtttcctctctaacctcccctccagggctgccctgcatttctgggtggggtactgggagccatctctgccatctgagatgccagggctcagcctgccttttctccccttgtcttgctgcttaaaacccaaataaaacccgagctgaagggcctggggcacacgttccctggcctgcgctccctcccgctgtcctctttcctcgctgacctgctgcaggtgtgctcctgggagcctacgtgtggggcagatggcagcatctttggagctttcttgattgcactttgtgtgttgcatcatggtcacttgtgtgtgccagatgagcagttaaggcagtgttagaatcagtactgagcttgatctgtccctatcacagagcaaacttctgggatactagaataaatctgaatctgtccccttctgctttggattttagcagaaaggtggtttagagccatatccgtgggcttgttcagacacagattcatttgggttttcttttctttgcccatgcaggaatgtctacacctgaaacatgttagcccagcagaattacccttgtgacaccaattaccccaatgggtgcagagagtgcccaatagctctatagagttgactcgatatagtttcatgggatagcacttaaccctttcttttgcaggtgaagaaaaaaatttccctctaccctgttaggttcagtggctcagggctgcaaattaaactggcacaagacaaattaacaggaaaaaaaatcatacaatttgattaatattttaagtttcacatgcacaagaacttcatagaaaagcgtatttcagcaaaggtttgtgaattgtggagaagtgactggacacagaaatgggattgggcgtctaggactgataaattgtgggaaagtgactaggaaatagatgggaagaattaacacaagataatggtcattgtagtaaggtctgtttaggcagaatcatctcccaggattagagtgccctcctcttcctggtagagagagggtgcctttctcatggggaatgaataccctacttttaggcagataggagtacagagagctcttcctgcatctgcttttactcagaataattcttgtaccacagcggtatatttggggatgacatcctgttcttcactgccttagagcctaggttatgttaaccacagcaaactgcttttacctgcccccatgggcctagaaagctcagtcccacctatggggctgtgtgtccacttgccagagctggggcccattagctccatgacaggttcactccttgcctggccctgacctggggtcatgacagctgaacaagccccaggctgggttgccccgaggtggtaaacagggaagtcccagtaagctccagttccaggaagcagcaccatgggagaga

SEQ ID NO: 5149 - DNA, 1050 bp, Homo sapiens
cgggtgtgtctgtgtgtgggggagtggatttgctcctggtggcggtggggtgtgtctgggtttctctcaggccctctcacccgagatcaggccgccgcctctagtgccagcccggggcaaaacagggccaccccccgacccgctacaccccacgccctcttgcccccccggccgggtcttggtcgggacaagcgaccgtggtgggggcgttgtgagagaaaggccccgcgcggctgggccggctgttcgccttcggccagccctgacggctctgggtgggtggggcaagagggggcctcgcaggagcccctgtgcggcgagggatccaaaacgctgcctccgcgacagggcggaggaccggagggcgtcccaggatcgtgggccctgggccctgacacctctgaactcctgagtagctgggaccccaagtaggatgtccccggctgccgctggggtataggtgtgctataaagggagagcagagtcagagaaggttcggaagcatggcgactgcagggggaagggaggcagcgggaaacccaaaaaagcctacagcaggccgggcgggcgcggtggctcccgcctgtaatcccagcactctgggaggccgaggcgggtggatcacgaggtcaggagatcgagaccatcccggctaacagggtgaaaccccgtctctaggaaaaatagaacaaattagccgggcgtggtggcgggcgcctgtaggcccagcttctcgggagcctgaggccggagtatggcgtgaacccgggaggcggaacttgcagtgagccgagatggcgcgtctgcactccagcctgggtcacagagcgagactctgtctggaagaaaagtaaagaaaaagccattaaaaaaaaaaaaaaaaaaaagcctccagcacctggtattctcaggcggtctcccatccaagtactaaccaggctcgtccctgcttagcttccgagatcagtcgcgttcagggtggtatggtcgtaggcgccagaagaggagcctggctcccccaagtgcccggccagccttgccggccggatt

SEQ ID NO: 5150 - DNA, 1030 bp, Homo sapiens
gggcaaaacagggccaccccccgacccgctacaccccacgccctcttgcccccccggccgggtcttggtcgggacaagcgaccgtggtgggggcgttgtgagagaaaggccccgcgcggctgggccggctgttcgccttcggccagccctgacggctctgggtgggtggggcaagagggggcctcgcaggagcccctgtgcggcgagggatccaaaacgctgcctccgcgacagggcggaggaccggagggcgtcccaggatcgtgggccctgggccctgacgcctcggagcactccctgctccgagcgggcccgatgtggtggaagctcgggagcgcgggagccgggggaaggccgcgggccagcggctcgggggtccccgatccgagccccgcggccccgggctggcggtgtcggctgcaatccggcgggcacggccgggccgggctgggctcttggggcagccaggcgcctccttcagcgtctacggccataccaccctgaacgcgcccgatctcgtctgatctcggaagctaagcagggtcgggcctggttagtacttggacgggagaccgcctgggaataccgggtgctgtaggctttttctttggctttttgctgtttctttccttttcttccagacggagtctcgccctgtcgcccaggctggagtgcagtggcgccatctcggctcactgcaagctccgcctcccgggttcacgccattccccggcctcagcctcccgagtagctgggcctacaggcgcccgccaccacgcccggctactttgttctatttttcctagagacgggctttcaccctgttagccgggatggtctggagctcctgacctcgtgatccacccgcctcggcctcccagagtgctgggattacaggcgcgagccaccgcgcccgcccggcctgctgtaggcttttgtggcttcccggctgcctcccttccccccacagtcgccatgctacccaacctcccctgactctgctccccctttaccgcccacctacaccccc

SEQ ID NO: 5151 - DNA, 1261 bp, Homo sapiens
gcaattcaattcactcatccggcgcagtcgcaaccttataaaccgggggaaggggcgggcaggggcagcgggtaccacagacgccagccaagatctccgctccagaacgcatggactgctttacccgggaggaaggacattgcttcgccaaccaccaggaaaacagtccctgtgcacccggattcctattgccccgcacttcgtgtcaactccagtaccgaggacacgccagagacccaggcctccggacgcgcccggtaccacggctcccgccaaaagggcgggcgcactctgcaaatctcggggcccactgcaccgcaccaagagcacagtgaggtaccaagagcacagtgaggtgccaagaaagaatggagcctacgaaacccacctccaaagcaagcaattcatccaagaaaaaacccgtctcagcgctccgttggtcctctcgcacgggccgcctggccgccctgctcaggcacagctcaaacccctccaccctattccggactgctcaaaagggggctgcctaccgaagtagggtgcttcctctctaaggctcaaacgttctcgctctctagctccctcctcctcactcttctgggtttccccctggacctcgcgttatttctctagccttccctctgtacctctgtacttctccctttctctgtccctcttagcctctctctctttacctctccacctctccggtctctctcgatcgctgtctctctccctccctcggtttctatctctccatccatcttctccttgctctccttcaagccgtgtgtgtctgtgtttcaccgtgtgtgtgtgtgcgtgcgtctgcgcacccgtgctcgcgtgcgggttccggaacgagaacgaacgggtgtgtctgtgtgtgggggagtggatttgctcctggtggcggtggggtgtgtctgggtttctctcaggccctctcacccgagatcaggccgccgcctctagtgccagcccggggcaaaacagggccaccccccgacccgctacaccccacgccctcttgcccccccggccgggtcttggtcgggacaagcgaccgtggtgggggcgttgtgagagaaaggccccgcgcggctgggccggctgttcgccttcggccagccctgacggctctgggtgggtggggcaagagggggcctcgcaggagcccctgtgcggcgagggatccaaaacgctgcctccgcgacagggcggaggaccggagggcgtcccaggatcgtgggccctgggc

SEQ ID NO: 5152 - DNA, 1032 bp, Homo sapiens
tattaccttagtatttttctctgggtctttggaaaaccatagtcaatttttagaacatattgctttcattccccataaactcttcacacatgataactgtttaagctttgaaaacacatactgaagtattgtgagcttaaaaaaactttttaaatatttgcatagttttgaggtgaatttgtttccttacagatctctcctaatcattgagatgtatatttcaaaagaggaaattttacatgttgtccaaaacagccttgctagtaactggtgaattttggtattaactattattaaagtctttaaacgacacaggtacctaaagatcaccttaatgtggcaatttgtgatggtgtagctagctgattgtgaaaactgttcctttaaagtcgcttcttgcatgttcggtgttagtcatccagctcaggcttgtgttgcagctgacaatctaggaaagacggccttagagagtggtgcaggccccacactgacggactgccttagaaacccgacttcctctagactttgaaccgccagacttttctcttgtttagaaaacaaacttatatttaatgtacttactacttaaaactccagacagagatataatgtagaaggcaaatattggccaattttttcctctttttaagtggaagacaaatgaacgggatttttaaagtgcttttaaagtgcatgaatggttaataaatcagtatgaattgtaagccttcatcttacatccaagtccttagttggttagggtttcttttctttcttttttaaagagtgtcaattaccttttgaacctgtgaaaatttgatagttgttaacagtctgatggtcctaattctttcttttcattctagaaatgaatgtggttgtaatcatgttcctaattcttgggacaacctgcaagacagtgagacagtttaaaaattacctttcatgttgaaaaagtctgaaacagagaacccaatgatatttaaaataaatgctacataaaactctttttaaaattttgattttaactta

SEQ ID NO: 5153 - DNA, 1063 bp, Homo sapiens
acctggctatttttttatttttaatttttattagagatgaggtcttgctatgttgcctagctggtcttaaactcctgagctcaagcaatcctcccgccttgtcctcccaaagtgctgggatgatagacgtgagccaccacatctggctcatgtgattctttctagggctcagcttctgtcctggaggcctttcccctctggcagttaggattcatcctactcagttctgtgaggccatttttacctcttcagttgcttttcttttcctccaaattttattgatgccttttgcctgatgtcatcacctcccttgctctctgtccttgtggctttatacctttttttccttcctttagtaggatttggagaggaagagactataagctttaaggaactataaggcacaggtttttagtgcatatttaacctgaaccctccaatttgctatatttttttaactgatttttatttttactttcttctctgtttcttgatcagacttgccagaggtttgtgaatttgtttagtttttccccacattaaagatttgtggtttctctttattgtatattttcattaatttattattttttccttactttaattttctttgggtttattttgcttttttctaactttttgagatggatgcttatcattgatttttttgccccctgcctttcttttttgatatgttcatttcaggctataaatttccctctgataactgctttagctgcatcacgcatgttttgccatgtaacatttttattcaaactcattttcaaattttcattatgattttttaaaatagtcacaaaaatcataaaatttaacatttatgtatagtatccacgtaaggaaatatttattttttaaagaaaacatatattccagcctggtcaacatggcaaaaccccatctctactaaaaatacaaaaattaggtgggtgtggtggcgtgcgcctgtaatcccagctatttgggtggctgaggcacaagaaccacctgaacccaggaggtggaggtcacagtgagctgagatcgtgccattgcactccag

SEQ ID NO: 5154 - DNA, 1032 bp, Homo sapiens
aaaagcacatcagccctatgccatacataacaccctggtttttcctttggtatttatttctgtatctccaagtaacatggcttttattgacatgtgattgttttttttcagtttttaacattatctattgactttaattcttttttactgctctcctcacccacacacacacggcccatctccacacctgcacaatacagtcctcatagagtttgttggattcataattagtatgtaccgtattgtgcccatggaaaaagttactcaaagctgacccatactatttcccatgattcccttttttctttcacaatacaaccaacacatcaggttcactatcactcttgtcatcttaagatgcctctcccagggcccctgacctacttctgtctgggctggctgctgctcctgtgggctgctgcctggctggcatcttgggagggcccttggccatcctcctaggacctttcttggcttctctcttgggtttgagtctctgtcgtgtgcctttcatgtcattttctttcttggtttaccccttcttggtggagcacatcttctagtagattcccaagaaaggatggttcagaggttagctttctttgaatgccaagagatagctttattctacccttacaatttggtgagtgtggctgggcatggaattctaggttggaacagttgtccgtagaaactctgggggcattcctccttatgtgttatgactgctgatgttacagcctgcctcgttatgattcttgatcttgatcttttgtaggtaatgtgttgccctcaggaagctttcacggtcttctctttggcctttatgttctgacatttttccttgatctagatctgttttcctttgctttgctgggcacttggcaggtctttatagacaaactcatgtttttaattcccggaagttttctggaattattttcttatttctgttttttttttttttcccatttcttttttttctgaagtccttagttggatattagactttatcattttatcctctaattt

SEQ ID NO: 5155 - DNA, 1029 bp, Homo sapiens
gagctgggattatagacatgagccactgtgccgtgcctaaaatatgcattttttaaaaagacagtttattttaaggtggatgcaatacagtttccaaatatgagactgtttttactataaaaatacaactggccaggtgcagtggctcacgcctaaaatcccagctctttggatggccaaggcaggcggatcacttgaagtcaggagtttgagaccagcctggccaacagggtgaaatcttctctactaaaaatacaaaaattagccaggtgtggtgatggattcctgtaatcccagctactcaggaggctgaggcaggagaatcacttgaacctgggaggcagaagtttcagtgagctgagatcgtgccactgcaatccagcctgggtgacagagcaagactttgtctcaaaaaaaacaaacaaacaaacaaacaaaaaacaaactacaacttccttacaagacataatgacttcttttctccataaatgtctctagtattagttacatgattgtataatcttctaccttattttaacttgtcatagctatatatctgtgaagaaaatagaagagctaatgaatatgatttcaagaaagctttggacttgttggaatatattgatgaggtaagtaaaattgcttgagatgatctcaggcaactgaatacatatataaaaagagggagatccctcttttagtcaatcatgaaaatgaattaagcaaaaaagactgtatctgtggttcaactacctttaatccttagaatgtaaacaactcttcagaaaagctgtcaaggtcaagagactcccttttgtgataattctcacacattcctgggtatctttttttgtgcacagataaatactgcttttcaaagtcctgaaatatttttttgtctttcatttattaagtcattagtttctgaaggtaatatacgactttatcagtttattctggctgggtgcagtggctcacgcctgtaatcccagcactttgggaggccgaggcagacagatcacctgaggt

SEQ ID NO: 5156 - DNA, 1028 bp, Homo sapiens
cctcggcctccaaagtgctgggattatagacatgagccaccacacccagcctggaatttttcaaaataaaaattggagcggggaatctcagctatgtggtttggatcaagtatatgcagatatggatatctggttatgtggcttatccacagagtccagcctaagatctgggtttaaattatactgctgtcatttttttccttttgagggagtggatatagtagaaagaattgggatttcaatattttctccagaacttactagctttgtgaccttggatagttaatttatgctccttcgcctcagtttgttcatctataacaagggtagttgtaaggattgaggacactgtcttgggaaaaatggcttgcatatattaagtactcaataaattataggtattagccccttttattaaaattattttttactgtttgggataatcttccttcaatctttttattttttgcactagtagcgcctgttctaaaaaaagtgtgtttatattctataggactggctgatagtctaagaggggaagccatattttagcctggccaccagaggtagatcatgttaatcaaagcattttaaccaaggctttcctgtttcttctttctccctgctttgcatttgatcacttcttagcttttatttcttaacgcgatgggaacatttgcaggtctcagtgattctacagactgttagcacaatgtgtctaatcggaggggatagactttttaaaaataactcttctggtagttaaataattcctcatggaaaatgtgtaaattatagaaaaaattcaataggaaaaataagttgtctgtagtcctacctccccggagatagccactggtactgttttgtgggtttcctcccagtctgattttctaggtacagaaatggacaaaagtgttccatttaatttttccaaaaccaggatcacggggaatgctgccagtatttgagcgaaagtatctgtgttttggtcactgttttgctgtgaatgctgtgtttatgaggct

SEQ ID NO: 5157 - DNA, 1015 bp, Homo sapiens
ggtttgcatattttattgtaggctcatgcaacacttctgggtttggcaaatatggaaactcgttactttgcaaagaagaaaacccttcttggcttgagtaaattggctgcattagcttcagacttttcagaggatatgctacaagaaaaaattgaaggtgaaagaatttgagcaaaaggatttacaaattggtcatgccatcaattaactcatgatgtgttcctgtcatcagttagcaggatctatctcttagaaacaggacctgtctctaagaggaatgcatttagttaatgtccatgtgtagttactcaattatatacttggaatttttttagagaaaagtagtttgtattttaaataagaattcctaaagaatagactcaaatgattttgattggagaggtctgattatgtacctttagtgataaatattccaagggcaaaaagaactacaaagcaatcttgacctttacacagtgggtttgttgtaggtagtgtggtataggtgcaataattctgaactattttgtgtatattgtagatgaaaacgattacatatagtacagttggcccttcatattcttggattccacatctgcagattcgaccaaacatcaaaaatatttggggaaaaaagaattaaaaatattcaacaacaattaaaattacaacaagagaattaacaaaaaaattaaaacaacaaaaataatgcaaaattaaaacaaaataatgcaaattttaaaaaaccaatacagtataacagctatttacttagcatttacgttgtatgaggtattataatctagaggtgatttaaggtatatgggaggatgtatgtgggttatgtgcaagtaactaccgtttttatataagggagttgagctttttggtattcctatgggtcctagaaccagttgtcagcagatactgaggcatgatgctattattttttagaaccaaggagagaggagtacaaatatagaaagacagtgaagaaaaactctgtattattgaa

SEQ ID NO: 5158 - DNA, 1033 bp, Homo sapiens
gaagaagaaccaagcagatacttagctgaaggggttgggcagaggacagagtgcaggtaggcaacagcatggaacccaggttttctagtcccagcacaagaaccttgacagagggtgggtaggatgttactaaggtgccaggtaggcttagaccttttttttttttttttttttccagtccccattgactgatgtggtaagttaaagtcagaattaagagaactccacaggattgaaaaagctcttcttctgagttttgcagaaggaataattttcttttttggcttactagactgactgctgtctggcaaggctagtttttattgtccttaaagctgaaagacacagagcctgcttcttcagatagcaaccggttcttagcatttgattctgggatgtaaaggatgagttcgaagtaggactaatgttgtaaaggaaaaaatgtgcttaatatatcatcaagatgattttctgcttagggtggtagcttttacatagcattttgttgttattgttagatgtatttgactctgttttcctttcttttaggagatagtgttttaggtgctggtgcctgtggtggtgttcctatcattttttctagaaacagtggactggtgtctattacttcaagggaaaatgtgtctatattggcagaagacttggaagggtctttagcatcttcagttgctggaccaaacagtgaggtaatgtgattcgataagaatttgaagtttttatgttatttattttttagagatagtgtctcacgctgtcacccaggctagagtgcagtggcacagtcgtagttcattgcagccccaaactcctggcctcaagcaatcctcctgcctcagacttcccagtaggtgcctggctaattttttgttttttggtttggtttggtttttgagacagagtctcactctgttgcccaggctagagtgcagtggcataatcatagctcactgcagcctcacctcaacctcccgggatcaagcagtcctcccctcttaacttcctaaatagctgg

SEQ ID NO: 5159 - DNA, 1007 bp, Homo sapiens
gtaagttctttagtggtgatttctgaaattttagtgcacctgtcacctgagcagtgtacactgtatccaatatgtagtcttttataccttaccctcctcccacccttccccttcaggtccccaaaatccattatcattcttatgtctttgtgtcctcatagcttagctcccacttataggtgagaacatatgatatttggttttccattcctgagttacttcacttagaataacgtggaccaatattcttgaattcctttcaagagtccaagcagaagtgataaagtttggggagctgggggaagagaaccgtgaagaaggaaaatgagccgtgctaggattccttgctttgaagtgtcatgtcatttagttacatgcttggtttcttatttttagttgtcagtagagggtgctttgccacccttttaatctttttgagacttgaatgaaagttgctagtaataggaccgggcgcagtggctcgtgcctgtaatcccagcactttgggaggctgaggtgggcggatcacctgaggtcaggactttgagaccagcctgaccaacatggaaaaaccccatctctactaaaaatacaaaaattagccaggtgtggtggcgcatgcctgtaatcccagccactcgggaggctgaggcaggagaattgcttgaacccaggaggcggaggttgcagtgagccgagatcacgccccggcactgcagcctgggcaacaagagtgaaactccgcctcaaaaaaaaaaaaaaaatgttgctagtagtagtattagatgttttagaagagctaaaataggaaccatttaatttattgggagcaacaagtttgctagacttaaggaacaaataagctttaagatgcaaaatggtttgtttttacatatatagcagtttgaaatttctataaccaatggctaaaaagcattttaaatatatatgtttgtttttaaacattagagacagggttgccctgtttggtcttgaactactgggct

SEQ ID NO: 5160 - DNA, 2121 bp, Homo sapiens
tcttttttttttttttttttttttgagatggagtctggctctgttgcccatgctggagtgcagtggcacgatctcggctcactggaacctccacctcccaggttcaagcgattctcttgcctcagcctcccaagtagctgggactacaggcacgtgccaccacactcagctaattttttgtagttttagtagagttggagtttcaccatgttagccaggatggtctcgatctcctgacctcgtgatcctcccacctcggcctcccaaagtgctgggattacaggcgttagatatatttctaaagttggttatcagagttaatagatctattgtttttggtgttgataattttggaatattcaaaagtatttgttgtgaggtagtcgtttctgagtgtgccaattacttttttttgataaagcgtgtggtaataaagatttatactataagattaatcacccacctcattttttcctttagtcgatgaccagctgaccattaacatagatgaaggtggatgggcttgtctggtgtgcaaagagaagctcattatttggaagattgctctgtcacctattactaaggtaatggctctttagagagctggaacaagatagaggagaggaatgccaattgacttttcatttttaccctaatttttttacagttggaggatagtcaataggaaactacttaggcattaagagtttgcattttcatagtgatgtgaaataatgagcatgcatacacatttgtgtattgggaaaaaagtttcccccttttgaagatctgtgttgtttacatttaataaaattagagtcattgatatttccaatgaatataatgctaatccgtctgcctaatgaagtatcagactaaatgctatccacataagcaaatgaactttgagtttgcgtatttctgagaagacagaactatgttttgttgaacctactgaatgatgcttaataaaataagaaaatatgataccagttgctagttaaacttttcacttgtccacttccaacagtgggttatcatttgcatgtctagtaacgtatcctcagcaacctttttctgtttgttacagcttagatacactactctcttctaccagtcattacttccttggccatgttccgttggaactcagggctcctgcttacctcaattcttcacttctgctgaactctgtgttactgctgcctagaaaagggtgtatgtggttaggagtaataggtgagggtgaattcctgggggacatactgagttagctgcgggatcctgatatttggctgagagtctaagaaattgtttcctaggtaacttggtataattactctttggtcatgctaattttaaatgtcagatgaacaaatcaagagtaaattgggaaagttccataggaagcctaagcactcatcttaaccttacttagtcttctcttaactggacttttctagcccaggaagaggttaggatagttgttcttcagagtttggtctacctttaagttttcatgattcaatactcttaagatactttgttttaaaattactgaaagcctgattaaaaggagatgtgagaagaaagaatatttgtagaatggtgtttccagcagtgagtcagaatctaaaatatgcagagaagggaaatcagatgcatcttcaaaatactggatttgatgtgaaagattttctgtttgggtttgttctacagttatccgtttgcaaagaacttcagctgccacctagtgatttccactggagtgccgacttagtggctctttcttactcttctccctcaggtgaagcacattctactcaggtaggtgacttaaaagcttatttaaataaactttttacaacaaggacatcctaaagttagaggaatcatcctctttgattttgagatataactataaacctatagaaatcaagatattgtggtattggcaaagagagctacacacataggtcagtgtaacagaatagagaatacagttatagatccacataaaggcacccatttggtctttgatgaaggtgcaaaagcaattcagaaaggatggtttttgacgatgatttttctctgtatcaatgcatagtgtaggaacatttg

SEQ ID NO: 5161 - DNA, 1055 bp, Homo sapiens
aaggtctgtgtataaatcttatcatgttttaagaaagtttacaaacttgtgttggaccgcattcaaagctgtcctgggccacacgtgtccctgggccatgggttggacaagcttggggtatacagtatggatatgctgcacaaagggttgattcacaacctttaggcaggacagtatgagattttatcactttacccagaacagcatgcaatttacaacttaggaattgttcatttgaattttccatttaatattttcagactacgattgaccacaggtatttgaaactgcagataaaagggggaaatactgtatatgcaaaattcagtcctgtttacagagttgatcaggtttatgaagtttcccgtgaaaccccaaaactggcacctcatgttattgggtttaataatacagtaaaatcaagtcctacctccatttctggatcctatgtagcatcccagaggctgtgtgcacaaatttatgacgttaccattgtcgtggtgtacctttagaagcgtctgttggtggagaattagtgtggaattttgacagatacaatcaacacaagcttagaaaggcaactttaaagatgagcagttggatgacactggaagagcaaagttcagagcagccttaatatctgctgaagtcatttttattaaggcttgaattctagatctttgtgatttttctggaacagtatttttcaaattgtaggggtgaccaaaatttagcggttcttgaccagcatttaaaaaaagaagaaatagaatgcatctcatatgtttagtaaattttgttcgttttacttaaattgtatatgggtgtatcgtgatgtaaaatgtattatactgtgaataactctatttactgtataacttaataacagtaaaaaaaaaatgctgaaattactctgttttagaagaaggaatatatctcatcaactggaacttggcacatcttgcctgtaggtccttgggagctttagggatagttgttttcagacaactactaacctttctatacattgttctgttttaaataaataaatgtat

SEQ ID NO: 5162 - DNA, 1052 bp, Homo sapiens
gtgcagttttcaacattttggcacatgaaagcctgacaagtttttaaaagggcagaagctttattttttgaacaggaaaacatgttttttaaattcacatgtttgtatgagtacttttgcgaagcaaggcatgaactgctaggtattattaagaatgaatgatttttgcatttaagttgtttgaaggcatgtattttgaaaaatatctgttacaaatttataatttcaagacaaattgaatcttattttataatacttttggaatttcattaataaggctaaaatttgaggaatataactaattttcagccttaagacatttaagtttggaagtccttgctattcaacagaataacaagaaaacttcagaatgtatcactctcctgaaaagaagatattaataagcccttttatttatggttatagttttatttatagtctcaaaattcctaaagcaatgctacaaccattgaatttgccatattttgtatcagtgctgttaatttgctgttgcctcaagaaaaagtgctttttctccatggatgaggctagaccctaagaagtaattaagtcaatgtaaatcaaatggaagttttcccatgaactaagcatttattagttccctgattagactggaagaagaaaccactatttcatgaaaagcatggaatattatattttattgttcataattaatgaataaaattgatatgaatgaatatagtgttctttgaattagtaaacagtacatctgtgacaatcatttttaacaagctctacttgtgttctttataaagtgtgattttcagaaagcaaacaacacaattacaaggttgaatctgaggaaaataatccttgtgccatagaagtatttacgaaattgcatttcattgttatgttttattttctgatacatgatgttcaattttatctttaggtaatattttatatcatagattaaaatttatagtgaactttatctgtgtctgtcactttttttttttttatgacccaggaaccaaagatgcagtctgtcatttcttataaaactt

SEQ ID NO: 5163 - DNA, 1035 bp, Homo sapiens
ccaggtgtgttggtgcacacctgtagtctcagctacttgggaggctgaggtgggaggatcacttgagcccaggagattgaggctgcaatgagccgtgatcatgccactgcactccagcatgggtgacagagtgaggccctgtctcaaaaacagaaagaaaagaaaatacttggtatataggaagtcatcaatacattttggctatgataataattattaattttgggattgatatattttaaacctatattttaaaataggtttctggtctatctgtgtcagctatgactaactagaagaagcttgccttcaaattgctatatggtttatcataaaagcctattactaagattttttgttgaggccttctttttttaaatgttgtctttgtcaggtgggcagaaacagcggattgcgattgcccgtgctctgctaaaggtaagcctgaagcgacttggatgttttttaaattagggattatttttattagggaccttgtaatttgtaatttactatttgtcttcttccttttcctgttttttgtttttttttttttcttggagtgggagggtgacagttctggtgaaaggtaagttagtgtagtatattgtccaaatttaacaagtatttcttaggtatcatgagctcagtactgtgctaaggttgttggaggtagaagaatttaacacatggaccctccatcaagaagcatacagtctagccagtgaaacagtgattattaatgcaaaatataaaacagcgtaagtatgcatatttgtacaatctgtaatcagctgctaaagtgaatagtacagacttgaagtacttagacaagattcctagaaggaaagggaagagccattttagctgaaaggcgggcattctctttttaaggaagcaatagccttccctttgttatacaactgttcttctcaggcttataggtgattaaaaaaaaaaagcagctttactgaagcagaatttacatatataaaattcatttattttaaatgtactttccagtgacttttagta

SEQ ID NO: 5164 - DNA, 1130 bp, Homo sapiens
tccgggtaggtaagataaactctggagctacacagaggcagtggcatagagagaaggccatcggatttgaaaccagactaacaagggtggatcttaactccactacttgttagcttaagcaggttgttgtctgtggtcttcaatgtcctcatcagcaaaattggaattataatttctacctctcagggttgtaaggatcaagtaagaccgtctacgtatatagtaccttggacatagtaggtgcagagttggcacgtggtaagcatttagcctaggtttgcttctgacttgccctttaagagctcatataccaggattagctgtggtggagtcacccatccatagccagatgagtaggagaaccgagttcagcttttgagtttaattttttgctgtaagtaattaatattccattttatgtttcagagggggtcatcttaaatgagaaaagcttccagggtgctttggagtttaagaacgtgcattttgcctatccagctcgcccagaggtgcccatatttcaggatttcagcctttccattccgtcaggatctgtcacggcactggttggcccaagtggttctggcaaatcaacagtgctttcactcctgctgaggttgtacgaccctgcttctggtaagcagttcaccacactgtagcaccgagggactctcccgagctctgctcccacttttgcgccctaggagatgctcaaaccatgcaaataccttattttgtagagtaccttcttttctaagtgccagtggaaagaaatccctcaaacagaaggtgtcatttgcaggggcatgacagctcatacagaggcctttagagctttttgtgtgtaatgtgtcctacctcttcaagcccagagtgacttccccagatctacctcctcatctcccatgcgggtatctcctctggacatgccctctactgggagcaggtggacgaggctgtgctcagcagccaggacagagtgcctggggtgctccagcagcaccctggagaaccaccgtgtgccagtgcgcgtgctgggcgcaggagtgatagggagctcctggagaacctctgcctctgcctgtgagccattgaatgcttattgtgcacacagttaacttggccatcag

SEQ ID NO: 5165 - DNA, 1846 bp, Homo sapiens
tatcataggcagtgaggtttatccgaggcgtgattattgccaattgaaaacttttctcgatacccttctgtgatgacttgcaatgtagtcagcattggcaaggttttttttttttttttttttttttttttttaaagggagtctcattctgttgcccaggctggagtgcagtggcatcatctcagctcactgcaacctccacctcccgggctcaagcaattcttgtgcctcagcctcccaaagagctgggattacaggcatccgccaccatgcttggcctttttttttttttttttttttgagatggagtcttgctctgtcacccaggctggagtgcagtggcgcggtcttggctcactgcaacctccacccccccaggttcaagcgattctccagcctcagcctcccgagtagctgggactacgggtgcgtgccactgcgtccagctattttttttgtatttttagtagagacggggtttcaccatgttggccaggctgatcttgaactcctgacctcaggtgatccacctgcctcggcctcccaaagtcctgggattacaggcatgagccatccacgcctggcctaatttttgtatttttttttttagtagagacagggtttcaccctgttggccaggctggtcttgaactcctggcctcaagtgatctgcccaccttggcctcccaaagtgctgggattacaggtgtgagccaccgcacccggccagcattggcaatttttgacatctctatggtgaccgaatgaatttttttcttacaaaaaaaattttagttttgtaagaaactcccaaactgccttccaaaatgtgtgtcccatttgcatccccactagcaaggaatgagagttcttgttgctccacatccaccccagcatttagtggcgtcagtgttctagcttttagccattctgatagatgcatggtatttcattgttgttttagttggcatttccctgatgacatatgatgttgagcgtctgttcatatgcttatttgctctctgtatattttctctggtgagttgtctgttcaggacttttgaccatttttaagtaagtcttcatgtttccgtattgttgagttttaagagttcttcgtatattttgggtagcaatcctttattggataggtcttttacagatattttcttccagtttgtggctggtcctcttcttttcacattgtcttttgcaaagcatacatttttaattttaatgaagtccagcttctttctttcatggattgtacctttggtattgtatctaaaaagtcatcaccaaattcaaggtcatctacacttgctcctaggttgccttctaggagtttattgttttgtgttttacattaggtctgtaattcactctacattagtttttgggaaaggtgtaaggtctgtgtctagattccttctttgcatgtggatattcagttgttctagaaccatttgttaaaaagataatatgtatattgccgttgcatctccattgtattgcgtttgcttctgtgtcaaaaatcagttgactgtttatgggggtctatttttgccaaatgcatttttaattcagcctaaaaattttagtccattgtatcttgcataaatattcatactgtagaatatttgaattgtattttttcagcatcctcactgagggaaaatgttacaaatgtatgtcctcacatttgatgtagaccattgcatttggggtttaagttgttaaatggttcaggctaggcatggtggcttacacctataatcccagcactttgggaggctgaggtgggtacatcacttgaggttgggagttggagaccagcctggccaac

SEQ ID NO: 5166 - DNA, 1097 bp, Homo sapiens
caaaatagcttcattctgaggccttttctcttggctggtaggcagctgccatcttgccatgtgctcacatagtggagagagagtgtgctctagtgtctcttataaggacactaatcctattggatcatggccccacacttaacgacctcatttaaccttagttactttcttagaggccccatctccaaatacagccatggtggggattaaggcttcaacatgtgaatttcagggggaatttccattcagtctgtaaaagggcctcaggaagtggcttcacctaggatctgatctttggctctaggggatcagaaatgtgactttgtttctcctgcacaaactcatggacctgacataggggaagtccagttatgagaacctgatattgtgtatggcatactgccaatttattaatttacatagtgggcctacccaccattaagttgtgtttctgctattcctttttttttttttttttttttttttgagagaaggtctcaccctgttgcctaggctgtagtgcagtggtgtcatcttggctcactgcaacctctgcctcccgagctcgagtgatcctcccacgtcagcctcctgagtagctggaaccacaggcgtgcgccaccatgcccggctaatttttgtattttttatagagacagtgtctcaccatgttgcccagcccactggttttgaactcctgggctcaagcgatccgcctgcctcagcctcccgaaatgctaggattacagacgtgagccactatgcctagcccatttctgctattcaaaacacttcattatggtgccagcaccctgtattagtcatcagaaggtttttcattaagtgtggaaccagagtgaagggaggggggtggttctggacagttctaggagaatcttgatggactgtgcctgccctacacagaggacacctgtccagttggttcattttgacatcagttgtgttcaggccccagaagtgttagacctgccctgttggtctcatgtcctgatggtgaccatcagagatatgattatgttccccaagactcaccccaggtgtcctgatggacttgtcttctcagggtgggacattcc

SEQ ID NO: 5167 - DNA, 1758 bp, Homo sapiens
atcacacccacctgcatccgtggaaatgtgtcccagactccagcaaaccaaacatgtctaaaaaccaaagttacctttctccgcaaagcatctttcctcttctgtctcttggttcagtgagagagactgcagtgcgaacctcttggccttggccagagacatgggttgttcttataatggtagtaataaagataatagttaatatttcttgtgtactcagccctgggcattgtaccagatgctttgaatatgtgtgtagtttactcataattctgtgagggagggattgtttctattgccattttacaaatgaggaaactgggcacagagagatggagtgacttatgcaaggtcaaacagctagatggcagagcttaaaaggagaacttaagataacgaatgcctaacctaggagggccggttctgaggttgagttcgtcagggttccgacccaatgctgaccaactcaacctcaaaacggccctcctaggttaggcattcctcatcctaaatcctccctttaaccctcatcttatcctcatttttcagagaggaaaaatgctcacatccaaccagtcatcacgtcctagttcttaaaaatatctgtagtcctatactctgccctttatccctctgtccccagcctacttcgccctaagtttgcttctcacctagggcactagaacagtgctctgtccgctgctcctttcgctctgtagccagagtggatcatttaaaaatgcaaatctggctgggtgcggtggctcacgcctgtaatcccagtactttgggaggctgaggcgggcggatcacctgaggtcggcagttcaagaccagcctgaccaacatggagaaacctcatctctactaaaaatacaaaattagccaggcatagtggcgcatgcctgtaatcccagccactcgggaggctgaggcgggagaatcgcttgaacctgggaggtggaggttgcagtgagctgagattgcgccattgcactgggcaacaagagggaaactctatctcaaaaaaaaaaagcaaatctggctggatcattccccagtgtaaagcccttttaggccgaccttgccacaaaatccttctgttctataatctagaggcttcatttcatttctcagttctccttcctgtgcacccatgaggtctctgcccctgctccatcctgccaggctttctgctcccttccctgattccaaggtgaggcctgtgcttcctcttcctctgcttgggatgtgggaagatgccaaagacaggctttgtcgcagaatgtggttctgtgatgtgtaaattgggagaccttgcgtaggctccctctctctgtgttcgagattcctctctgaaaaacgaggataagatgagggtgaaagggaggatttaagatgatggatgccagatccttcagataatggtgaggactctgaagtgctgcctttgagtccttgaatgacagtggggattgctgtacctgcctgatataaccagatgggtgccctgttcagcagtgggcaggtggtaggcacagtgtacagcttcctccaaccacccccaacctcttctatccagcgctgttgtccagcaatctgcaattcagattttccttcccctttcttttgaaggatatttgtttccatctttgctgcaattcagtagaatgaggtaacaaagatacttgaaggtatctgtcaagaaatagataatgggagaagttgctggggccgcatcaggcaagggtgggggca

SEQ ID NO: 5168 - DNA, 1088 bp, Homo sapiens
tgtgcctggcagatagatgaggctctgacctgagtgagttaggggcagggttttaggagcaaatgtgggcccctacagtactgtgagattagggcaaagctgcctcctggaggttttttgtgtggggggcttcggcggggtgggcagcatgccttcattaaactgtggactgcacacatgtatcccctccgctggggcatgttcagttggtgcctgtgtggaggactcaggagggctcctctcactgcagttactgataaggggctggtgtgtggtttgagggcaggactgctctgagaacctgaagcctgctggcagcttttgctgagtttgtagttgcattttatgaagatgggccgtgagtgaccacagtgaatatagtgacaaaagcagtgggtatggtgggcaaggaggccagagtagctacttcctgaagcccagtgaggatggagatcccgcagggacagtgccctgtgggggctgggatggatgaacctttgaaatcggaactgcccccgaaagccagggatgtgcgtgtgctacagaaatacattgtttcagcgaaactgagcattctgtagctgtgctgtcacatcagattccagaaggacagtagagaaaaaatgtaaaatatcttactaattttttatgttgatcatgtgtggataatattttggatatattgggtcaagtaaaatgttattaaaattaattttacgtattcctttttataatgtggcaactagagaagtttaaattacctaggtggctcccatcgtatgtctgttagagtccatggcgaaccctcctgtggttcatgggacaggtacccctaactgttttattttaattttgtctttgggatactcctaactctagagcatgctaatagcatggacagagacagtctgatcttgcaccagacacatgggggctcagatctttcttctccagatttccagaacctggagtccctggcttcttcctctactcccttctcatctgtcagccgctcatgtcctcactcattctctacccagcgcagatgccgagtctcttcactcagcctccatctcccccacaccctc

SEQ ID NO: 5169 - DNA, 1030 bp, Homo sapiens
gatgcaagggccttgtaagatctaaaattttttcgatttctctaaatcttcactccttctataaacatctgttgagccctcattctggactgggccctgggtttacagtggcatgcacaaggaaacatggtcctcacttctgctggggcttctaggttagtggggagaagcatctatgaaatattcgtatgtatagaggtaaacctgcacctgtgggctgtggaagggggcctgtggggcctgtgaggttgtcaggtgcaacaccagaaaagcattctttgctgcaaatccattgctttagaaaggaccctcctgggtagtgatttgggatttagagtaggtttgcacagtggaggagagcagttagggtggcgacttttcatctaccagttgctatgaaagcttagggggctgttgatatcactcgggtgtaaagagaattatttcattgttcagttggttgagtgtagattttgttgtaaaatatctttttctctttcctctttttaaaaacattggagactaggagctctcactggactttgagctgcttgagacggggactgtgcgattcatctttctgtctctagttcttagcatgtgcacggcacagagcaggcgctcagagtgccttcagtgaaggaataaatgaccataccaccaggcacagagtgaggcctttagaaaccctgagcatcatcgggtgcgcccaccacttctgtatgtgactcaaagtaagtgtaaggaaatccagttctgttttgtttctgaaatactagatgtcaggaagggtgtttaggtgtcaggctttggtggcctacacgtgcccagtcctcttatgccatgaccattgttcctgtgacccctcactctgtccccagatatcctgccatgctagtatgttttggtgacagccttaaacaagacgagactgcctccttttttctttcttcttttgtttttctgggataggggtctcactgtgttgctgagacttgtgttgaactcctcagctcaagcagctctgcct

SEQ ID NO: 5170 - DNA, 1046 bp, Homo sapiens
gcacagtgtattgggagaaagggaaatttcgggtgacagattgatcaccctggctgacatgtttctggaagtgggtgggtgggtttgattgagaacactttgggctcctgcagtgatggtgggaaagaaaaattctttccaaagctgcacttctcttaataattctctcccctcaaaagaaagattatgataaagaataatttggagtaataagtaacaagatagaattagaaaaatgttgaatttctgaatgaccattcagaggtgtggctttttccacgtctttttctcctgcaatgaactgctcccacgtcctgcactgcaataccagtctaatgaacactttgtgaaacaaatcgtaagtatgtacgcacgcatatcaaactatgctctgaggataaagcaagttctaatttgtggaaaaaggattaaatatttctgttttctgaaaagagttattttgtattttgttttctattaaaatgtatttagtttcaaaaaaaaaagtgttggcatctcatttcatctctgaggacaggcgggtgagtgttctgtcctgggatggtgtgtctctctcacctctcatcagggcaataacccgtcggttacctaggccacactgtccccaacgaaggtgcatttttatctgttcttgggttctgtttagcttactttgaatcatgattcccttagtattcacttggattattgatggcatttaatgctgtttgtacatccaagattgatagttgctgactggagaccacatatatttcaccatctagagtcatttgatgagatcctactttgcacttccttcaaagaccccactataaaatctccaaggggcataagaactggactgttcaataaactcaaactatgtattgaacaattccagataaaggactcgttcaaagtaaagtgaacttcaaaacataattttctcagccgggtgtagtggctcactcttgtaatcccagcactttgggaggccaaggcaggcagattacccaaggtcaggagtttaagaccagcctggccaa

SEQ ID NO: 5171 - DNA, 1048 bp, Homo sapiens
catccctgcaccctcaccacactggatggatggtattggctttctgaggccagtgcatatcctgtggctccatgtaccccggggtgttcccagaccccacttggagaagtaacacaggaagtagagttgccagctcccctccccccgtcagtcagtgttcaatcttgtttggcttgtaaccgtttaggacagtcattgaaaagggcaggcgcagcttgggtttcaggtcaccaaaaatcactaccttagaaaaaatgtgggccaaggaagatagaaattaaacttcacagcattaacttttctttagagtggtcctgaaaaagctgtgggccaaagtatttttgtcttatcaccactgaaattcaggtagctctgcctcacattactttggatggaaaattctttacacaatgttgaataattaaggagcaaaaaaatcactctaattaaattacagttaatgataaggatgtcaagaatattgggtgccctaaattaaaccattgttttcctgttcctgttttctgagtccacttccagttaggatggcctttgaatttttgattcttgcaaccgagacagtataattgaaggatttccttgtgatgagtgaagagtctagattcccatgtagaagctttaatttctagaattttatagtactctccaaaatattttttattacatttgtatttgaattttcaaacatctcttttccttggagacagttccctttttgggagttcttctgataaaactgaggaatactgcctgcatttgctttcgattttctgtaaatacaaaaaaaaattacactgaccttattagctttgatgatacagagtttggagattattctgtgcattaaaaattaatattaaagaagatagcattatgacatctgataacagtagaccaaaataaaacattttaagactctggccactactggtaactagctctgtggcttgtcctatgtttatttccgggtatcagaagtgtatctgaagactcagaagtgaggaaccgcatgcggaattccaggaac

SEQ ID NO: 5172 - DNA, 1048 bp, Homo sapiens
gttaaatttttctgcaagttgcttaaagcctcagaaaccaatgccaatgataaaaaatatctctaagttcttacctctcaatgaaagaaacccttattataaattcggtttttctttttttatccttagtggaaattgatcactgcactgaaatatttaagatttatatgatatgcagaattaatggaacttcctttttttcaaacataatagagtcattttactaaagccttaattttcatgatttttcgtttttgtaactattaaacagactattctctacttatgaattctgtcacccaacaaccatgaaactgataagataaccccactagagggttttattttgtaacccttatttcctgtaatattttgaccattttctccaactgtagactatagtaaatatagattctttgctttaaaataccattatgggggccaggtaaaactaggataattctatgcgtgtgtaaggccaggtgtattattttggtttatatattgattactgtatactcgtcgtttaccattaaaaattattaccacaaggattgtttggccagaactttacatttcaaaagattatagtctatcaaccatttcctttaagttcttactttatttctgaactgagaaagttgtctgttattttgtctgtaatttgattctttaatcctttggtttaaaggatcattattttaaaggggttaatatatattgatcactttggactgctgctcctggaatatttttctctaccctcaggtctctgaagagcagttaaccaaatcaaatgaatagttatttcctgatcaccaagataaagtgtaagatatactcattaatctattttagaagcagtcctagcataaaaacactataggtaaaagtttttacataaaatttgaatatcacagaagcactttcacagaccagcatgagatcaattgctgaatcatataggaattgcattcagaatgaaaggagaaagtgatttggttggcggtagtcagagaaggctttactgagcaggaggtaggcttta

SEQ ID NO: 5173 - DNA, 1050 bp, Homo sapiens
cgtcttatcccttattttgagaacaggacatcctatttctgtctgcagtggtgtttgcaaatagagcatttgtgaaagttttctttatgtagtcaagcatagtaagtaatgtaaagagccattctgtagattgtgccacactcttccatgttaataagattttgtatagaaaagcagtttttctgtgctgtaaaacagtattaaagtagaaattcaaaaagatcacgagcttaaaataaactctcaagaattccaagaagctagatagcactcacgttatttttatgatgagtttcaaagataaggcctgtcctcagggaactctccatctgtttaggggaactgaggaagagtgatggcaagaggggacaacctgcatgagggttggggtgatttaggcttggttgtaacatcattagatttgtcatgtactttggctgcttttcaaagggccatatgaggagggcctaaaggtggaagaatattggaatagtccagttgagaagtgatttgtagagtcgggcatagtggcatacacctgtaatcctagctacctgggaggctgagctgggaggatcatgagcccagaggatggagaccagcctgggcaatatagccagaccacttctctaaagagagcgagaagcaatttgtgctgtcaaatagcaaacagtcaagatggggtagcagaaatggttgagttgcactagccgcaattttttttttttaagttgagagagaattcccatttagaataggagttggtggcctctttgaagtaagggagagagagaacagaattttatcatgactggctttttggttgttttgttttcttttgttttgtttttgctttaatggtggatagtggcaccattaagccggctaagaaaaccgggagaaggaagaggtattgcaggtggaaatgtctgttaattgactgagttgaggaaggtggtctgactgtaagtcttgcatggtggtgtggtgaagccgggaatgtgaagaagcagtggcagacagtaatgggagggcagagccacaagagag

SEQ ID NO: 5174 - DNA, 1035 bp, Homo sapiens
ctatcccgggccatcgatatggttcccaaagagctgagtgtgctgctcctgtggttctgaggaggggatgcctcttggctcagagaattaggaggatgggaaaagaatcttctagctggaagaaaatatttagatatggaatttggatttttttcaagagaaggttaggtaagagataaaaaagatctccttgcctatttttagaagcatctaaactgagctcttcacccagggcgtcatcatgtacctcctctgccgtgactgagggtagtgtcctccagcatgtccacagggagggtcactggtggctgcaccgtgcctcctcaggacacagattgcattggtctgggccactgtccccccaccctgggggattctcaggcagccaaggttgaggagaagaatcagagctgagagtctggttgtccctcctagggccacacagaccattgtcaaaagccagaaaggacattcctagaataatttctgtgtttataaagggatagattcatggaaacttgagtgctgctggaatgttctttccctcttacgaacatgcagcttctctttggctggtggtgtagattgagccccagatgggtgattttggacatccttaccctggttcatgtcatcctcctccctgtttctaagaacagattctcctttttacatctctagatgagagtagcttgagtggtcacgtgcggttgctaggaatggagctgcgagcagcagctccctcctcttttcagcagcgagactcaaaagcacctccgggtgcatcttccttcccacctgccacaaggaaaggaattcggaagaggaaaagattcattcaactgtccttcttccagtgcagggtgggatgcggggatgaggaaagcagatgcatgggatatgggatgtgttcaggtgaccgatggcactgtcggtcctccgggagctgagcagagagtaaaggctgagactgctcccagggtctctgcgtcccctccaggctgctggggagcagctgagtgcttgtggcccctg

SEQ ID NO: 5175 - DNA, 1050 bp, Homo sapiens
tcattctgataaatactttttatacagaaatagccgcttgagtgtatagtcaacatatatttataaacacacacatatacacacacttgcactgttttataatctggctacttacaaggatattgtgaacattttctatgttattaaacactttttctacatgatgattttttaaagtatatcacattccattatacctacatatataattttaaccagtctgctcttcatgtaaggtagttaggtcattgttaatttttttaccattataaaaaaccctgaaatggacatggtattttatatataaatccttttaacacatttctgattgttaccttggattgaattcctaaaagtgaaactcatgagtaaaatagcatgaatatttttaaggtttttacaaaatttattttttaattgacaaataaaaatagtatatttttattgtgtacaacatattttgaaatatgtagacactgaaatggccaaatcgagccaactgacatatgcattacatcacatagttatcattttttgtggtgagaacacttaaaatcgaccgtcttggcaatttccaagaatatattgttattaactttagtcaccatgtggtaccatagatctcttgaacttattcctcctatctaacagattttgaattctttgaccaatacctccccactcccacttccatcccccagccccgtaaccaccattccactctctcctattagttcaacttgaagttcacatgcaagtgggatcatacagtgtttctcttcctgtgctcggcttatttcacttcgcttaatgtcctccaggtccatgttgttgcagatggcaagacttcctcctttttaaaggctgaatagtatttcatcttgtgtatatgccacatttcctttatccacttatccactgatggacacttgtgtttccatatcttggcgattgtgaataatgcagcagtgaacgtgggagtgcaggtatctcttagagatcctgatttcagttcctttgggtgtgtactcagaagtaagattactggat

SEQ ID NO: 5176 - DNA, 1021 bp, Homo sapiens
aggaaaagtgaaaagcttggcaaccaccaaatggtacattttcctgctctagagatacttgtcaagcagtcttgtagctcagaagtgtctataactggctgcattttgcccagtgataggaagtcacctatgtctacacacgttggtggaaccatattagtatgatagtgctttctctagatatgtctagggagatatctgactttttgaaaagcagaccaggaagtagtcacacatctaagtgaatggtatttccttccgtgtcgtgtctggggagctcttgtagaaagtacccaacccagtgtctgaatacatgtgtgggttcccagtgattctgctgtttctcagattactggcaggattccttaggattgtcttttaaacctggacgagatcattagcatagcttgtatagcttaagcatttgtagcaacagagcatggataggataagacttcactggaggttgctcatccagctaagggaaacaagttactacctttgaccactgacgttattctgtcaaagcaaaccaggaccagtcaggtaccggacctgcctggccatcagaccaagcagtacctcttagactgggccttttcctggccagattttgactgccttgccaacagtttttcctaaatcatgccctcaactgagactttcaaggttacctcttttttgtatttatttaaatgaaggtcctattttatattcacttttagaaactcattattttatagcaatgagtgccacacatttgggactctctttggactctcattggtgccacttcttggctgcatccttcttccagatttcctaataagaaatctttgaccttcggctcagtgcctgtctcctctggctcagtgcctttagctcagtgcctgtccccttctcctgtgacatcccagttgagcgtccacttcttcagaagaggctggctggagtctggaaaaatggcagttttcagaggtgcatgtgtggacacgaggctgagtaatttcaaggcagtcct

SEQ ID NO: 5177 - DNA, 1056 bp, Homo sapiens
cactatccttgaataattgacggctgcacccaccggaggctgcaaggctgtgctgaaataaaatgattttcattaggagtaggtgtggagcttcaggctacacctgcggaatcggccctcattcatcctggcctcatcgtcatgccagccagggcctcttcctccaagacctgtttggtgcccaaaaaatggttggtgaaagtgatgtatgtggtgccactttaccctccaggctactgttgcttctgtaaaatgcagatagttagagtcttccttggaaagccctcggcctggctgtcaatgaatttctgttgatgatatcttggtaaaagttaccaagcctcaggaacctcccttagggccaggcaccaggtgaggtgcattattcacatgatctcatttatttcacgctgcatgacaacctttcaaagtaggtattcctgtgtccatttttacaagaaaactagagctaggagggattaagaaattcctctaagactgtgcagttagctagaagtaaatttggggtgtcagagccccatccatcactctgattctaaaacttgggctgtctcatacacattatctctcttaatttttctgcagaaacttgtttttcagaaactgtctaaatcagtaataaaggaaggttggagagagtgatgattaaaatctgaagaatgagaacaacttttgttagcaatcgatacacaggccgggcgcggtggctcacacctgtaatcccagcactttgggaggccaaggcgggccaatctcttgaggtcagaagttggagaccagcctgggcagagataggcaaaaccccgtctctactaaaaatacaaaaattagccaggcgtggtggcgggcatctgtaatgccagctactcaggaggctgaggcaggagaattgcttgaacctgggaggtggaggtttcagtgagctgagattgcaccagtgcactctagcctgggtgacagagactccatctcaaaaaaaaaaagaaaagaaaaatcaatatacagatgcaatagaagcaaattttgtctcttaca

SEQ ID NO: 5178 - DNA, 1050 bp, Homo sapiens
gataggaatatttttgtggtgttgcagcacattctggttatatttttgtacctgtttgatttagcctggagataaatgattccatcctcttaagcccttcatttaaaatattaattgattctatctatatcacaaaacggctgacagtttgcaccaaaaaatatcagcatatgcaaaattcccttttcactgacccctgcaaaaccagtgcttgaggctctaaaaggctgcagtttagaaggcacataaagccactttttttttttttgagatggagtctcgctctgtcacccaggctggagtgcagtggtgcaatcttggctcactgcagcctccgcctcccaggttcaagcacctctcctcccttggccttccgagtagctgggactacaggcgcccgccaccacacccagctaatttttgtatttttagtagagacgggatttcaccatattggccaggctggtctcgaactcctgacctcaggtgatctgcctgcctcggcctcctaaagtactgggattacaggcatgagccaccatgcctggccaaagccatccttttcttcctgatggggcaagggtggggattagtcccacctgtggggcgcttagctggcctccagatctgaatgaaggcagagagcaggagcggcccccaggacctgcatcgctaaggcccagagctgccttcttgcctgtgtgtgcgaggtcatgtgatcttcttacccgctgtggggtggtggttcccacttgatcaataaagaaactgagatgcagagaggttgtgtgtcctgaattctcaggccatctctcacctgggactcagtaggcccacccccacttgatttcctagatggcgtgggcatcctcagggatgtgaccgagaggtgtgcccactgtactttcaccactcgtcccacccacccactcaggcctccccatatgcacaggtgtccctggctgacctaaccttgtcaccaggcattagcacagggactgttgccatagagacccaatgcttcccactgaacacagaaaagatgctcct

SEQ ID NO: 5179 - DNA, 1041 bp, Homo sapiens
gcagcttcgagaggtgaacaccaaaggggctcttggctttccgtgccatttccatagagttctctttcagctcttagccatgtgcgttgaggctgtgagggcattggaacagcacagtctcccagtaagaccacagtgtggtggtcaagggcagagactccagagctggaccatctgggctatttctagttctaccacttactagttctgtgacctcattagaggctaagagttaaggcacatcccttaacctctctgactcagtttcctctttggataaatgggtgttaagaatagtgcagatctcatagatttgtcatcaaagaataagtgaatcaagtgatgtgcaaagcagacagaacacaagcctgcacataaacacgtacagccatatgcatgttggttctacaaaataaatacacatgatttgcttctatttattgataaataggatgtttcccttggcaacacttctggagctgggctctggaagcgtgaccttgagaaaggggaggggacagtgggacctgaagggcagagtccccacggctcacgaaccgcagcgctgacctttcccttgtttccatggggaatgtgaagaggatggtgccaacagcctggaggccacgatgggaccagcagtgtcagggcaaggcaggtagcgccctgccctgtcttgactgcagtggctggaggggaacgcagagcatctttcctgctcccctgcagctccatccccgtcctttccctctggtctccttttccgtgttacgttctgcatctgcagaggctcccgtctctgtcatcaacgtaactctccttgtgagatgaggaagctgagccctgtgcccttgtcacttatttgcccctgggcggacagtggctggggtgcattatttctctcctttccatcatcgtgatatctgtgtctccatcctagctacccttttccttatctcttccttttctctcattctttctctctctcatcctggcgtgggtgggtatgcagggaattctagggatataattagtagccag

SEQ ID NO: 5180 - DNA, 1025 bp, Homo sapiens
tcactgcttagaggtattctttgaatatttttaggagtaaatttcagatgttgccccgattataatttttacttgtgatatttctgcatgcagttgtttcctctcataatcgcttgaggaaaaactaggagtgtgtcaatggagcaatatgtctatctttcaagataaaatcatttttgaacttctgtctgcatctcagatttttttttctatgaacattagttttgatgtcttccctgaggagacaatagatatcatgtaaggaacacttacgctctcatgacacatcagtttgattacccagaattccctgggacagccagccagaaagggagggagaaacatggctgatttcctcattaatccagcaagcaggctgtcagactcaaaggcctggatgtgtttgcacagccaaatgtctgctgtacaagatacagaaggagcacattaattcagggaacagtttttttttccgtaatatggtttccaggaggaacttaataatcaggattcatagcttgggcaaatctcagcaattcttcatcttctaactactgaaaatgataatttgttcatgataatcattttaacagccattttgagtgtcgctttagtcttcatagacttaaaactacaaggagttgtctgaagacattcttaagaggtctattattgaaaacagacatttttctgtaactcttttcttcaagctctgaatattcttttttagtcctagattgaaagtgacgtattctggactggacatggtggttcacgcctgtaatcccagcattttgggaggccaaggcaggcggatcacctgaggtcaggggttcaagaccagcctggccaacgtggcgaaaccccgtctctactaaaaatacaaaaattatctgggtgtggtggtgcacgcctgtaattccagctactaaggaggctgaggcagaattgcatttgaacgtgggcggtggaggttgcagtgagcgaagattgcgccattgcactccagcctgggcaacaagagt

SEQ ID NO: 5181 - DNA, 1071 bp, Homo sapiens
tgtcacctaatgaaaaattagtttgtaatctttatagtatttatgagtctgtatcttttttttctaggaggctgatgctgtctgcaacttaatcttatccttagtttattacttttataatttaatgccactctctcgaggatccaggtaagtaatatcctgtcattaaaattattttaaattgagaaatgtgttcttttttgcttatccttcctgttatggatataggtacagagtacacaaagaaatggtaaggagctccctatttttttccaaaatctgcacaaaaaaatatttccttagtctatcacatcagcaaaagaattatagaagacagttctaatatagtgtgcttacgtttaataggatagggattcatccattcaacacaagttcatggaaagtttactgtgtatcatgtgccgtgctcagtgtgttttaattttttgtatctgccagcctcttactgaacctcttcctcctcctcttccttttccattttgggctgtcaggtgacccataatcctcatgttttatacttttgggccaacagtcactctgtactatttttattattttggataaattcttgctacttgtatatcaggagttttttaggtatcattaaaacaagagctatgactgtagagttttcatttcattctccttttcccagcactgtgtgcagtaaattatgtaaatggccttttgccattactggcacatagttgaacttaagatgttttggctaaaaataatacacttgaatgtctttatctttgattaatggcttagaaagtaaaactcccctaagtgtggtagtaaatttggttatagaatttaagactcattgaaacaaaatagaaacataaatgttgtcttatcagcataatattgctagttgtgtccactgaataagggatgtgaggcctgtgcacatcaccgcttgtgggccccactgtactcaacagccagcatccgtcctttgtcctcacagcagctctgctggctcacgtgtgacattgaaggacgtgcagctctgattgtcctcaactctgcctcatccctaca

SEQ ID NO: 5182 - DNA, 1296 bp, Homo sapiens
ttcaaggttgctgcctactaagatggacatgagaaaacattcaaagggagctcttagaagtgagcagtgccccttgttgacgaagagaacctgtgagcttttggtgctgaggttctctgctggcctctggtaggagctgtggggagcgtaacctgggctctgttggggcctgaagacaggcagagatgtccttggccaccaggccaccatctcttgtatcagatgacctccttggccctttttaaaaacatgtaaggtagagccagcactacagagttgcagttggggtttacagtgaatgaaacactagtaacgtgaattttctttttccctgaaagcagtttaatactaaaacgaaggatgggttcaccgtgaacacaaaagttcccagccttaaagaccaagggaaggaatatgatggattcacaatcacgattacaggagacaagtatgtgcgcttcttaatgtgggtgtaaactagagacgaggcaggaagggtgcctgtgcttattgtcactatagagttttgtggtgttgaacttttgctccatcctgaaatgaaaagtatcaaggtccagtgagcagttataaccagttatttaaaaaaatgtgacatctaaagtattacaccagcagatacattttctgactgtctaaatctaaggactttctagatactatgtatgatgtagtttgtgggagacattcttctgggttcttgaagttccttgggggggcgagggaggcttttactaataaaatgaaaaaagatgagcagttggcggattgaagtccattgtagatttaaatatatatgtataaaagccaatctatatatatatagagagagagagagagagagaaaacagctttaataattaatgagtagtataatcttattgtagaaaatttagaatatacagataagcaaaattaacaaaataaaaatcaagttattttctttaaaaactgaggttagactgttctactatttacccttaccattacattatcacaatcatttccccagtcatattcttaaaagtatttttagtaactgcataatattccattgtatagatgtagaatttctctgactgatctttttgttattgaccacttagggtatttctcattgttttgctttataaatagcactgcagtaaacatttttattaactctagttttatttacatctgaaatccaagctttgtctgtcagcctccatattccttgaattgtgggtggaattgccttgagctgtgcacacacacacacacacatacacacacacc
